United States Patent Application Publication US 2007/0061916 A1 - sequence listing, part 3

SEQ ID NO: 8030 - DNA, 812 bp, Gossypium hirsutum
  Clone ID: GOSHI-09MAY01-C16580_2
gcgttctgtctttgtttcgtatagtaaagcttttaatgcaaaattcagtctcccaaattgaagttagttaaatctaggaaccaatgctcgttcttaaaattctttgattttccaccgctcaattcacgcctcctaacagtcgcttgttcccattctcttttttctttcttcattttactctctcttaaaggaacttcccgaagtatatgatttgccccttccccgcctccgaagaaacgttcttttttagcacccaagaaaaaaaaagtctcttctttcattgatcaacttgtttctcttacagttccttgttttatgcttcatactgttgtttctcttcatctttcgatcagtcctacttctgggtatttctcgttttgaggttttaattggtagccatgaatgctcttgctggaactagccgcaatttccgcctggcctctcgcctacttggcttggattctaagcttgaaaagtctcttctgatcccatttagagagatcaaggtggagtgcacaattcccaaggacgatggaaccttggtgtcctacgttggattcagaatacagcatgataatgctcgtggtcccatgaaaggaggaatcagatatcatcctgaggttgaccctgatgaagtaaatgcacttgctcaactaatgacctggaagactgctgtagcagacattccatatggtggtgcaaaaggtggcataggatgctctcctagggacttaagtaagagtgaattggaacgtctaactcgcgtcttcactcaaaagatccatgatctcattggtatacatacagatgtt

SEQ ID NO: 8031 - DNA, 635 bp, Gossypium hirsutum
  Clone ID: GOSHI-09MAY01-C16580_1
cccacgcgtccgtatttttccttctctttctcattctttcttcaattaataaccaatcaaagtgctctctttgcttttccctgttttataagtcatcgaactgttgtttttcttgatctctccttcattcccgtttctggtttttttgttttttttttttttgagtttttagtaggtagccatgaatgctcttgctgcaaccaaccgcaatttccgactagcgtctcgtttacttgggttagactctaagcttgaaaagagtcttctgatcccttttagagaaatcaaggtggagtgcacgattcccaaggacgatggaaccttggcgacttacgttggatttaggatccaacatgataatgctcgtggcccgatgaaaggtggaatcagatatcatcctgaggtcgagcccgatgaagtaaatgctctggctcaactaatgacatggaagacggctgtagcagccattccttacggcggtgcaaaaggtggcattggatgcaatcctagggatttaagtaagagtgaattggaacgtctaactcgcgtcttcactcagaagatccatgatcttatcggtatacatacagatgttcctgcaccagatgtggcgactaatgccccgcatgatttgg

SEQ ID NO: 8032 - DNA, 610 bp, Gossypium hirsutum
  Clone ID: GOSHI-09MAY01-C16570_1
ttctacgcgtccgattctacacctcaaacatgcctatcatcctgcagtctgcacttgtttcaaatctttatttcatctcccagttgctgtacaggaagtacagtggtaacttctttgtgaatctgttgggtaaatggaaggaatctgaatattcaggtggtcaattcattcctgtgggaggtttagcatactatgttactgcacctgcaggcttagcggacatggcagcaaatcccttccatgctctattttatcttgtgttcatgctttcagcatgtgccttgttttcgaaaacttggattgaagtttctggttcttctgccaaagatgtggctaagcagctcaaggaacaacaaatggtgatgcctggacatagagattcaaatctacagaaggaactgaatcgctacattccaactgcagctgcgtttggaggaatgtgcattggtgcattaactgtcctagccgacttcatgggagcaattggttcgggtactggaatattgcttgccgtaacaatcatatatcaatactttgaaacttttgagaaagagaaagccagtgaactgggtttctttggactctgaagcttctagtcatgaaatttttg

SEQ ID NO: 8033 - DNA, 633 bp, Gossypium hirsutum
  Clone ID: GOSHI-09MAY01-C16480_1
ctacggattcttcttggttagcatatgtctcaaaggcctaacgttccccactcttcttcaatagcttttggtctccattctcatctcctggtttccaagaaaaatacccctaatatgcaacaggacctaatagagacaaatatcccttaggagaaactgtttcagtaaagaagaaagtagattcagcgaccgagaaagttgagaagacgactgatttaaaagaacccaaagttcaaaacgataaacaaagtgtttctgaggtaatgaaagaattgcaggttctgtttgagaaagcttctgagtccggaaaccaacttttgaaaatgctcgacactcaaaaatttcgttaccatcacaaaaaatctgtttatcaaggttctacccagatacttcatatcattacttcaaattcatcggaaacagagaccttactgtcgaaagacaaggttagttcaacagagaacgatgagattgataatgcacagaatctatcttccattctcaggaaattgtgcatgtgggagaccaaactctatgacgaagtcaaggctgaggaaaagctgcgtataattcatgcaaagacgtgtaggcagatgaaaagcttgaatcagaagggtggtaatgctcgcagag

SEQ ID NO: 8034 - DNA, 394 bp, Gossypium hirsutum
  Clone ID: GOSHI-09MAY01-C16450_1
gttgggggaggaatatatacgaaagcagccgatgttggtgctgatcttgtcggtaaagtcgagcggaatatccccgaagatgatccacgaaatccagctgttattgccgataatgtgggtgataatgtaggagacattgctggaatgggatctgatctatttggatcttatgctgaatcatcatgtgctgctctttttgtggcgtccatatcatcctttggtatcagccatgagtttacagcaatgtcttatcccttgctcattagctcaatgggaattgtggtatgtttgataactacactttttgcaactgatctgtttctgatcaagaaaagtacgtgtcatcctaccgtcattcaaaccacaactgcttatcttcacacaacttatgaat

SEQ ID NO: 8035 - DNA, 718 bp, Gossypium hirsutum
  Clone ID: GOSHI-09MAY01-C16470_1
aattaacaacgcaaacaaatatttaaaaaaaatggggtttcgataaaaatatgaatatttttagttcattatatgaaaccaatgcaattgcaggcaatcatgattttgatagtgaaatagaaagctagcctttccctttgccattgcgtttgtctctcttgtgttcactgtttcagggataattaaaccctttcaaccacctctcttgtctccgccattaaagcttctgaaagaaaaaagtggggtcaattttcattcatttaattccttcgtttctctggtacaaaagatccaaggggagataaagtgttgtttgtttttagctattgttttatttttatagtaatgcattgctagcttctccaatttcatcactttcctttggcactgaatgagataataatggcttctaacgcttacattattgctaataagagagccgtttcgtctcatcctcatcctcatcgtcaaccccgtcttcctcttcttcttcttcttctgttctctctccttttcatcgggaaattcgatcttgtttcggctctaaattacaccaagtatactaggaaagtgagtaacttgaggcttcaaagaattcaaaaacacttggaaaagatcaacaaacctgctgtcatcaccattgagagcccagatggagatatcatagattgtgttcataaaagaaaacagccagctttggatcatccttttctgaaaa

SEQ ID NO: 8036 - DNA, 938 bp, Gossypium hirsutum
  Clone ID: GOSHI-09MAY01-C16460_1
gaaaaggtgaaattcggaacattcgatattatatcagtccatgaagttcgggaaggtttaaagaagttctcaaagtggccaacttttcctcaactctattgcaaaggtgaacttcttggtggatgtgatatagcaattgccatgcatgaaagtggtgaacttaaagaagttttcagagatcacggagttgatattattgggactgaacaaggaaccggtggcatcttggaaccgaccggattgactgcaaacctaaattctcggcttcaaagcttgattaattcaagcccggttatgctgtttatgaaggggaagcctggtgaacccaagtgtggttttagccacaaggtagttgaaatccttaaacaagagaaagttgattttgagagtttcgacattctctcagatgatgaagttcgtcaaggactgaaagtttattcaaattggtcaagttaccctcaattgtatattaaaggtgaacttatcggtggatcagacattgcgttagagatgcagaaaagtggtgaactcaaaaggattttaaccgagagaggcatcgtgaaggaagagacactagaagaccatctaaaaagtttgatttcatcttcaccggtgatgctcttcatgaagggtacccccgataatccaagatgtggcttcagctctaaagttgtcaacgccctaaaagaggaaggcattgattttgggtcattcgatattttaccctatgatgaggttcgacagggattgaaagtcttttcatactggccgacctttcctcagcttttttacaatggtgaccttatcggaggttgtgaaaattcatgaactgttaaacttggttactttaaccatacttgtcgatttagatggttaatttgtttataatatttgattttgaggtcaacttttatttttccaatatatttatattgggt

SEQ ID NO: 8037 - DNA, 555 bp, Gossypium hirsutum
  unsure (1)..(555): unsure at all n locations
  Clone ID: LIB3543-020-Q1-K1-H10
ccgcgtccgcgagagaggtatcatgaaggaagagacactagaagaccatctaaaaagtttgatttcatcttcaccggtgatgctctcatgaagggtacccccgataatccaagatgtggcttcagctctaaagttgtcaacgccctaaaagaggaaggcattgattttgggtcattcgatattttaaccaatgatgaggttcgacagggattgaaagtcttctcaaactggccgacctttcctcagctttattacaaaggtgagcttatcggaggttgtgatatcatactggaactgcgaaacaatggtgaactgaaagcgacactgtccgagtaaaggtggcttcagtttgtttaaaataaatgacttttggggcaaaaccttgatttcatttccagatttctcagtcattgaggttgaatgtatgccaattaacagtaattaaaaactagttngntttttttcttttcttttctggtttttatttgctttaaagctctttatctacttgtgtttttcaagttgattaaagttagtatttactgtatctatatg

SEQ ID NO: 8038 - DNA, 863 bp, Gossypium hirsutum
  Clone ID: GOSHI-09MAY01-C16410_1
ctaaaacctttagagttaagcaaacgtgagagtattatattcaattgcaaaaagttttagaactatgaagcaaatgaagttggaacctgacattgtagttgataaacctaaacaagcaaccctgccgcctccgccgccacttccacgattctgggcgaggaagactagtgcagacagtgtaacaaaccgagagattgctaagttctggaggcagaagcatgccgaggaagaggatcacctcctagctgccatcaaagctgcagcacgcaaaagggcctgcaatctttcggaggaagactacaaatgtttcatggagtcactaagtgatgaagattatgaaactaagcagaatatcacagccccaacaaatcatagcaatggcaatgaaattcgtgtgggtataaaggactggtggacaaagagcaagtatgcatacctaaaccaaccagccattgagtctacagacaaaccaaggcgacgagcatccacttatataccaaactttctcaattataaacctgctcctttatatcctacatcacttggtgtcttttagaccactgagatcgaggagctttttcaacttccaattgattgcattacctccatatcagggcaatatattgatacgcatttactttaaagtgtcattgaaacctctgttcattcatttcagtttggttgcaaataagtgtggttagtatcactctaatctgtcatgaaaaagtttcattgtagatctaacagtttggctatccatatcatattatgaatttgatcatgtttatgttaatttatttatatgtagaatatgatttgctaataaggcatatttgtgtatattattatcagatctaaatgtc

SEQ ID NO: 8039 - DNA, 1166 bp, Gossypium hirsutum
  Clone ID: GOSHI-09MAY01-C16430_1
gcacaagattcagctttctgatccattcttgtcaaccgtgaatgtgattcatccaaaaaaaggaggagagggttttcatgcaaaaggaaagttacccatttgttgttttgtttgtttagatgccatggcttatccacattatcgatcaccttttggtgacacaacgtttaccaaagtgtttgttgggggactacttgggagacccccactgaggaaatgcgtaggtattttcagcagtttggagagattcttgaagctgttatcatcactgataaaaacactggcaaatctaaaggatatggctttgttactttccgtgatcctgaatcactcggagggcttgtgttgatccaaatcctgtgattggtggaagaagagcaaattgtaacattgcttcactcggaaggcctaaaccttcaccgccacgaggaagaaatcaaggtacatccttttcagggagttgcacagcaaggtacaccgtcgtatagtggagttgcacagcagtgcctccaccaccaccgccgccccgacccccgggcatttatccaccatatgggttcccaacttacagtcctgaatacgggtatcaccaagctctctataatccacaaatccagcaggcacaatactatcatcaactgtatggttcatcatcaacctcaatggggtctccatattattttggctactctttgcaagctcccaggggaacattttctgcaccccaggctcaacgtatccccggaccgtcctatctttactatcctgcacaaatggaggggtccttctccacctatcctcccccaccttttcatcccactaggcatccaattccatctcctgcagattcacagactcctcaacctacctccacagaatcagaatctggggccatcacttctgaaagtccaaaaacctaaagggaagaactcatccctgatgccaaaatgttcaaattgtacaatcttgataagttttttatgcccttcttatcacctcatttcactcttatattctcaacattttagccatagctgactactgcatcaagttactgctatggcctaaggtaagaaaaggaggactaatcaaccacccttatgctgatttttttcccccttattctatttttttccccaaaagtttttatcttaagttattcattc

SEQ ID NO: 8040 - DNA, 634 bp, Gossypium hirsutum
  unsure (1)..(634): unsure at all n locations
  Clone ID: LIB3543-027-Q6-K6-D1
cggacgcgtgggcgcggngctgtcattcgatattacaaaaacccaactccctctctttgctatttggccctttctctctctctctctcaatagacagcaaattagagtttgcagctgtcgggtctttttttttttgttgcttttttttttctggcttttcttttattaaccaaccgatcaaataattaacaacagccaacaagcaacaacttctatgacatcataaacaagtctgcatctcactctctgtcactctttcaatgattcctttgtggtaatgtgtgaagggtgccttgggaacgtatattagacacaatcatatatggtagagcaatgaaagcaatggccaaaagggttgtggatgttatacaagtttcaagtttcatgcaaaaggatagataaaccccggttttttcttcttctttttgtttgtttagatgccatggcttatccacattatcgatcaccattcggtgacacaacgtttacaaaagtgttcgttgggggattaccttgggagacaccaacagaggaaatgcgtcgatattttgagcaatttggagagattcttgaagctgttatcatcactgataaagtcacaggcaaatctaaaggatatggctttgttactttc

SEQ ID NO: 8041 - DNA, 660 bp, Gossypium hirsutum
  unsure (1)..(660): unsure at all n locations
  Clone ID: AI054528.1
gtaattcactgattaatgagttatcagtgaagccgccactttacatgatcttatatgttatcttttttatttttgtcttcttgtttgttgttggaatatccaaagcttgggggaacaagtatttcttgcctattcctctgttatctgagcgggtttatgccctttataaacagttcagaagcttgcgttttgcaataagaaaaccttgttttcctttgttaaattgcggaaattttgagaatcctccatggaagacaaatatgcaatcaagaaagatgttactgaattaataggtaacacgcctatggtatatctgaacaatatcgtcgatggttgcggagctcgaattgctgccaagcttgagctgatggaaccttgctccagtgttaaagacaggattgcatacagtatgattaaagatgccgnagatanggncttgattacatncnnggaagagtgtctcatcgacactaccagtggtaataccggcattgcattggctttcatggngcagccngggttattaaggtattgcaccntggcagcttatttgagcatcanagggagatccgtcttcagcttttgagctgaggtccattacagacaanccaaggcttaaaggncatttanaaggctttggatacttaaaacaccctatgn

SEQ ID NO: 8042 - DNA, 514 bp, Gossypium hirsutum
  Clone ID: uC-gsflmaxxa076c11b1
tgtcacgcgtccgatttgattgaagaactttggaaacaaagtctttttgattaaattgaggaaattcagggggaatcggtcatggagggcaaatgtgcaatcaagaaagatgttactgaattaataggtaatacccctatggtatatctgaaccatatcgtcgatggctgcggtgctcgaattgctgccaagctcgagctgatggaaccttgctccagtgttaaagacaggattgcatacagtatgattaaagatgcagaagataagggcttgattacaccagggaagagtgtccttatcgagcctaccagtggtaataccggcattggattggctttcattggagcagctaggggttataaagttattgtcacaatgccagcttctgtgagcatcgagaggagaatagttcttcgagcttttggagctgaagtatgcctcaaaacccagccagggctttagggggtattagacaaggctgacgagaactgagaacacaccaacggttcatgct

SEQ ID NO: 8043 - DNA, 744 bp, Gossypium hirsutum
  Clone ID: GOSHI-09MAY01-C16710_1
gaaaaattagttctatatgttcttttgggtacccttttccatttcttgtgcttctactttagatttatttttgtttcacataaaagcaatttgggtatgaaaaaaagctaaagattttgtttagaagtgatgtagtgaatggtttaataagtatagcagagcctaacagattttgatcctgattttactgattttaattacattgtcatgcaggtctagactctacttcaacagatagtgagttcttattttgaactgttttggtattctataaggaatttaagaacaataaattttaaacagatttagctaataccacccttccattacatattacagccccacgcgtcccaaacaatgtctgactccatcattacgaagaatatccttttcatcttatctagttgtttctatgcgaggggatgagttgcatgattagtttctataaagcatcagggaagttctgttttgttgatcttgtggttgtttggtggaggtttttaagaatttcacttttgcaataagcaaaatattatttgatggtactttaatattttaatatatgcatataacactgcagtataagctagatggatctccctctttaaaaagaccatagaaatcttggttgtttttgcacatttcattatatgccaacaagattggaaaaggtgatcaaattgtgatacactcacttttccttgtaggtttgatggttagaggatgcttatggtgattgggact

SEQ ID NO: 8044 - DNA, 412 bp, Gossypium hirsutum
  unsure (1)..(412): unsure at all n locations
  Clone ID: LIB3146-039-Q1-K1-A4
ttccgcggccccgtggggccaggttcctccaactcccttggaatcaaagaatattagggtttctaaaatttcacaatcttttttctttttccctctgcgagccaagntacaatatataatctagattttaatgatattggcaaattgcttaccggagggatatggaattaggttggggaaatttaggagacccataaactccttggttccaagggaggcggtggaacccgcgccttcgccacggcggacgcgtggttccgcttgggccttttggcccggtacatggaggcgttgttggcttaaccatattatggtgtatgccaacatgattgagatgggggatcaaattgtgatacactcactgacccttgtaggtttgatggttagaggatgctaatggtgattgggactg

SEQ ID NO: 8045 - DNA, 451 bp, Gossypium hirsutum
  Clone ID: GOSHI-09MAY01-C16720_1
gatatccataaaaagcatgtcttgggcttgtttatttgttataaataatctgtgaaaattagggccttgtgttcattgatcttctgcaattgtttgtggagtaaagcagctagttgtctacatgttttaagtcgaagattgaagcttgagtctgtttacatttgaaatcataagagaaaaactttaagctcaaatgatcttgtaggcttttagtatcttattgaacttgatacagggtccatttgttttgcaaaaattgactttcaggaaataaattttgcaaaatagatttattttcactgacgctcagatttttttatcctaccaaattaaatcatgaaattttacttatgatttgataagaacaatgttacactgctgatcttttgcaaacactcattaaaaagggtaattcttagaattgatagagttttacaggtggagttgattt

SEQ ID NO: 8046 - DNA, 1486 bp, Gossypium hirsutum
  Clone ID: GOSHI-09MAY01-C16690_1
ctgaaaaatttccagctgagcaacaaaattcagaggacagtggcagacttaaggaatattttgggatgaactctccaacaaaagaccaattctttattgaaagaaccgcccgtccggccacgcgtccggcaaaaggagaaaagacaagcaagctaaagggatctgaactatgcatggaatatgagactattgatttttccatgaaaagggtctcgaacatctatatagaggcaaagaaacatctctctgatctgctaacaaacgaggatcaaaatgaggatcttttgagtacacaggttccaaaaaccttaggtaggattctttctcttcctgagtataatacatcccctgtcagcagccctggtcagaacttggagcatagttttacaactgcgcatatgagatttgcaggctcggacaaattgcaaatggtgagtgaaaatgatcggtttgtcagccttctaagtatgagggcagagaagaccgatggccagctttgcatttctgaaaacaaaagcgataatgaagttgaaagtgataatgcaatttcaaacaaccttgacactagtgtgaataatgacaaagaggatccaattttttgttctataaaagatgaattgagttccaaagagtctgtgagtattgttaaagctactgaaatgatggttcatgaagaaagcaagtccctggatatttcttcagagacgagcggctcttcaattatcacagatgataaaaatgttgacatatatgaagtttgtgatgaaaaacaaaatccttggtacttgaaacaggattcatcggaagtggaccaacagcctttttctccattatcatctccatcagactcatcagtcatgaaaaaggttgaatgtttggagagtgttactgatataccagagcgatcaagccccgtatctgttcttgagccaatatttgcagatgatcttatcagccctgcaagcatcagatcttattccggtgaaacatccattcaaccgctaagaattcgattcgaagaacatgactctttggccacaaatcagagcaatcgaattaaaacttgtatgaatgataaggaatcaatatttgagcacataaaggcagtgctgcaagcctcgagtttcagctgggacgaagtctacatccggtcactttcttcagacctgcttatcgacccattgttggttgacgaagtcgaatacttgcccaaccagctttgtcaagaccaaaaactgctctttgattgcattaatgaagtagtcagagaggtttgtgagtactattttggttcccctagtgtttcatttgttaaacccaatatccgtcctatcccaaacatgcaaaatacaattcaagaagtctgggagggagttttttggcatttgctcccgactccattgccttgtactctggacctggtagtccgaaaagaccgggctaagactggaacatggatggaccttcaacttgacacttgttatat

SEQ ID NO: 8047 - DNA, 349 bp, Gossypium hirsutum
  Clone ID: LIB3083-005-Q1-L1-G10
gtttttcatcacaaaatccttggtactggaaacaggattcatcggaagtggaccaacagcctttttctccattatcatctccatcagactcatcagtcatgaaaaaggttgaatgtttggagagtgttactgatataccagagcgatcaagccccgtatctgttcttgagccaatatttgcagatgatcttatcagccctgcaagcatcagatcttattccggtaggaatatgagagaagtcttttgtttatttcacatttggcttttgcttttaagtttgttgagccacagtgattcttcctaatgccaagttgctcaccaatcttcaggtgaaacatccattcaacc

SEQ ID NO: 8048 - DNA, 445 bp, Gossypium hirsutum
  Clone ID: GOSHI-09MAY01-C16640_1
ggaagacgaggcggacgaagtatcttttactctctacctaagcttatttgtgtgcctatgcaatggcacttgatcctcaaaacgcccccatggaagggttcccggccacacctaacatccgggaagtgaggcctgagtccggttttgagaatttcgggttttgcactgacccctgtcgtgtcccgggcggtgaacccaactcgggaataagaagagtgagtttgagggctgagattgacacttcacctcctttcggatcggttaaggaggctgtgacccggtttggtggcaacggacattgcgtgccattgaacaagtttggagaatatcatggaattgaagagtttgatttaaagaaagtggaggaacaagcagcggaattggagaaagatctgattgtgaaagaattagagacccttgatgtgcttgaagaactggggactac

SEQ ID NO: 8049 - DNA, 799 bp, Gossypium hirsutum
  Clone ID: GOSHI-09MAY01-C16100_1
gcgttgggtcatgtatattattatatcctccaccatttgtaaggaggaaaacagtagacaattctttctgagttccttccctatctcacctttcttctgagatagcgactggaactcggtgtttgtcttcccttgaatcttctcatcctttcttttctaaaaggaagatggcatttagtgggacgacagataaatgcacgatttgtgataagactgttcatttcattgatttattaactgctgatgggattccttatcataagacctgcttcaaatgcacccattgcaatggcttactcgtgatgagcaactattgttcaatggaaggagtgctctattgcaagcctcactttgaacagctcttcaaagaaactggcacttataccaagaatttccaatccaaaaaatccgacaggccaaatgggcagacaaagactccgaacagacttgcagccttcttctcaggcacacaagataaatgcggagtctgtaacaaaaccgcgtaccccttagagaaggtgacagttggagggagaaaactaccacaaatcctgcctcccgtttttcccacaggggtggcttgcttacaccatcaacatatgctgccatggatggtatcctttactggcaacatcactttggctcactgttcatggaaaatggaatgctcagtcccctttgccagccagcctgcattaagaaaaacttggcaagattctcctctgtatcccaaccccaagaatcacttgaattcggaaaagaagcgaatcccgaagcgctaatcccaaacccaatcccc

SEQ ID NO: 8050 - DNA, 979 bp, Gossypium hirsutum
  Clone ID: GOSHI-09MAY01-C16080_3
ctcccttgtctctgcaaatcagtttttttttcttctcatctcagttctcgcccaccgccgtctccgctgattttttctggatctgacccgtattccgtgtcggatcgttttgacacaggtactgcaccccaaattgccgagtcagggtaacgaagcttaccatcgcccctcttctctctctcgtatctacaaatcaggtttcttcattctcttctcatctcagttctagcccaccgcctccgctggtttttgccggaatctgacccgtatcgcgtgtcggatcgtgtcgacacaagtactgcatcccaaattgctccgagcccggagatggctcaaatggctcaaatggtttgtggctcttgtcgtcaattgctttcatatcctgaaggaactcggcaagctaaatgttcatgttgtgaaacagccaactttgcacttggaagctcatcgggttggactcgttaggtgtgacactggtgcattgttgctgatgtacccctatgggtctccgtcagtcaaatgttcatcttgcctttctgtgacagaaattggggaacacaataggcgccctccatggtctgttcaacaggggcaaccaacccctcccaactctgtgcattaaactgctccaatgactttctaatccattgatccttgactatcttcggcatcttgatgtttagatgcattaacgatgtacaggaattagttccggtagtgcccaaatggaacttgtaatcttttgttattcataaatggaagttggagttcttgccatgaaggttgaacttgaatctctttgtgtgtagttttaccaatgcaattcatcaccttatcatattattagattggtaatatttttttgtaattttttatgtatgcattgaaactcataataattagaggaatcatttttgacgaaaaaaaaagaaataaaaaaaaaaaaaaagtttgaatgactaaagaaatctaacttagt

SEQ ID NO: 8051 - DNA, 505 bp, Gossypium hirsutum
  Clone ID: uC-gsronu33B124g08b1
tgctaatcattttttttcttctcatctcagttctcgcccaccgccgtctccgctgatttttttcggatctgacctgtattccgtgtcggatcgtgttgacataggtattgcaccccaaattgccgagtcaaggtaacgaagcttaccatcccctcttctctctctcgtatttacaaatcaggtttcttcattctcttctcatctcagttctcgcccaccgcctctgctagtttttgtcggatctgacccgtataccgtgtcagtgatcactgttccaccgtttggtcgcttgcttattactaatagtggaatttaaccaatctgatatttgtttgcgaaagagattaattatgaattttcttccatttttgttactttgaatttggtatgagctttttcttttttctttcttaatcagttttctttaaaagggtctgctcgaacgagttagtgttttatctaaaattagaagacattttcttttttgtattaaatgtttctttta

SEQ ID NO: 8052 - DNA, 541 bp, Gossypium hirsutum
  Clone ID: LIB3584-042-P1-K1-F3
atcatcttccccctaccatctcccctcttctctccctcgtctctgcaaatcaattttttttttcttctcatctcagttctcgcccaccgccgtgtccgctgatttttttcctgatctgacccgtattccgtgtcggatcgtgttgacacaggtactgcaccccaaattgccgagtcagggtaacgaagcttaccatcgcccctcttctctttctcgtatctacaaatcaggtttcttcattctcttctcatctcagttctcgcccaccgcctccgctggttttttccggatctgacccgtatcccgtgtcggatcgtgtcgacacaagtactgcatcccaaattgctccgagcccgggtaacgaagcctataattatgcctataattatgtttctcatagtgttgtcttaattcattggctttcttactttgtttgctttttgatattttggatgcagagatggctcaaatggctcaaatggtttgtggctcttgtcgtcaattgctttcatatcctgaaggaactcggcaagctaaatgt

SEQ ID NO: 8053 - DNA, 375 bp, Gossypium hirsutum
  Clone ID: LIB3493-054-P1-M1-C2
ctcttcttttgatctctggcgggggggggatccccaagtaaaagtgcccttttcccttttactcagaaaattcgcccccaaattcacccctcttctctgcctcgtcttagtaaatcagtttttttcttctcatctcagttctcgcccaccgccgtctctgctgatttttttcggatctgacctgtattccgtgtcggatcgtgttggcataggtactgcaccccaaattgccgagtcaagttctcgcccaccggctccgctggtttttgccagatctgacccggataccgtgtcggatcgtgtcgacacaagtactgcattccaaattgctcccagcccagtttggatgcaaagatggttcaaatggctcaaatg

SEQ ID NO: 8054 - DNA, 592 bp, Gossypium hirsutum
  Clone ID: GOSHI-09MAY01-C16000_1
aaagtaccagtttatataatggaaatagattaacaatggttcaaaacctctaatcaataatataatcagttcaatatttcctggtaaacaggaaggcattgcagtaggaaggacttttgctgctcttaagaattataaagtggatggtaacaaggaaatgatggctattgggctgatgaacatggttggctcctccacttcttgctacattacaactggcgccttctctcgatcagcggttaatcacaatgcaggagcgaaaagtgcagtgtctaacatagtaatgtcgattacggttatggtgacccttctctttctcatgcctttattccagtacaccccaaacgtggtgttgggagctatcattgtgtcagctgtagttggccttatagacattccagcagcctgtcaaatttggaagatcgacaaattcgatttcattgtgatgttgtgtgctttcttcggggttattttcatctcggtccaagatggtcttgccatggcagttgggatgtctattttcaagatccttctgcaaattactaggccaaagacagtgatgttggggaacattcccgggacagattttttc

SEQ ID NO: 8055 - DNA, 821 bp, Gossypium hirsutum
  Clone ID: GOSHI-09MAY01-C16390_3
cggccgcgtgggcggccgcgtgggttcgaatttcagttttgattctaaattcctgtggaagaatttttcctcttttgggagaaattttgatgccgcaaaaatttttaattaggtttattgggtttaatttgctgcggtttgtacttaaattgaaagcaccttttgggaattaaagctagatctcacaagttctacttaatggcataacctagttttttttcttttggaagatgatcctttcatctttgtgcttagatcatagtatttatctatttttccctaaaaaggctgatattttgccttatgttgtaatttgatcatggcattgttgttgaggaatcataggcatcataggggttcaaaaagggttgctcattgtcttttagcatggagggagaggccatggatttggcatattaaatagttggttcttcatattaagaagttagagaggtgggagatggttaaagtggtaaaggcaaggagaaattttgtgcttgtaaggaagaattcgaaacaagcacattatgattgatcttggcatcgataataacaagattaactgggctctcaaggacaaacaggagttcagagacatcattgggactgtataccgtgaggcatggaaaggccgtggtttgaaagattactcgaaaaagtactgctattgagtattcttccaacatgtagttgatcagaatgtaaattgtatgtagatatgtgtgtcatttgcaatgtttggttgcatgaatgtggaggataatccaatttgagatggaactttgaaatatatattttatgtgctcttttgatgcttgttt

SEQ ID NO: 8056 - DNA, 678 bp, Gossypium hirsutum
  Clone ID: GOSHI-09MAY01-C16390_2
caaacatctaggccttgtttgggtcacatgaatggcttagccattcctcccttattcaacacaacgttcttattcatgggttcggttggctgtaaagcctattcaatggaatagctattacagccttattcctcaaaatcactgggtggcaattcaacgccatcactaatgaatggctattcaacgcttccagtaatacaaaaaattatttttctttccttttctacccatctcacatctcttcaaattccctactcctatctgagagtttttcaacaaatctatcgtgcgaacgtttggagtgagcaagaagaggggtttgaaagaccagcagcagcagccatggtgaagaagattagcgtcacaaataaagccttgattccaggtttaatcaaaccctcaagaatgtccaaggaaacaagcacattatgattgatcttggcatcgataataacaagattaactgggctctcaaggacaaacaggagttcagagacatcattgggactgtatatcgtgaggcatggaaaggccgtggtttgaaagattactcgaaaaagtgctgctattgagtattcttccaacatgtagttgatcagaatgtaaattgtatgtagatatgtgtgtcatttgcaatgtttggttgcatgaatgtggaggataatccaatttgagatg

SEQ ID NO: 8057 - DNA, 752 bp, Gossypium hirsutum
  Clone ID: GOSHI-09MAY01-C16390_1
tctacgcatcgtctataaattataaaccactaacatttcagaccgttcccgcccccgcgttagggtttggtatcacaaattttgcgagaggaaaagcatttcatcatcagcgaaaaaaagggaattttagtcttcaggggaacgatcgaacgatgtcgtacctactaccgcacctgcactcaggatgggccgtagatcaggccatcttggcagaggaagagcgtctcgtcgtcatccgattcggccacgactgggacgaaacttgcatgcagatggatgaggtgcttgcttctgtcgctgaaacaataaagaactttgctgtgatttatcttgtagacataacagaagtacctgattttaacacgatgtatgagctttacgatccatcgacagtgatgttctttttcagaaacaagcacattatgattgatcttggcactggcaataacaacaagattaactgggcactcaaggacaaacaggagttcatagacatcattgagactgtataccgtggggcaaggaaaggtcgtggtctggtaattgctccgaaagattactcgacaaaataccgctactgagtattcttgcaacctgttgttgatcagaaagatttaatggtcatatttcgcgaattcaatacagactattttccttatgaactgtgtatgtcgttcgcaatgcttgcgtgtacgtggaggataatccaatttgagatgaaactttgaaatatatattttatgggttttctt

SEQ ID NO: 8058 - DNA, 417 bp, Gossypium hirsutum
  unsure (1)..(417): unsure at all n locations
  Clone ID: LIB3148-016-Q1-K1-D9
ggtgttaattaagctgtcggatagggctaataaaacagtttgaatgtgatgctattaagcggatttaatgtaaggtgaactttttttttcagaaacaagcacattatgattgatcttggcatcgataataacaagattaactgggctctcaaggacaaacaggagttcagagacatcattgggactgtatatcgtgaggcatggaaaggccgtggtttgaaagattactcgaaaaagtgctgctattgagtattcttccaacatgtagttgatcagaatgtaaattgtatgtagatatgtgtgtcatttgcaatgttgggtgcatgaatgtggaggataatcaaattgagaatgaacctttganttnnanaaaaaaaaaaaaaataaataaaatanaataaaaggttttttttattt

SEQ ID NO: 8059 - DNA, 404 bp, Gossypium hirsutum
  Clone ID: LIB3120-009-Q1-K1-H12
tcgcctgcggtacgcggttcgcaattcgacctacgcgtacgcattcgcgcgagcggaaaagcatttcatcgtgaggcaaaaacagggaattatagtcttcaggggaacgatcgaacgatgtcctacctactaccacacctgcactcaagatggaccgcatatcaggccatcttgtcagaggaagagcgtctcgtcgtcatccgattctgccactactgggacgaaacatgcatgcatatggatgacatgcttgcttctgtcgctgtatcaataacgaactttgctgcgatttatcttgtatacataacggatgtacctgcttttaacacgatgtatgagcgttacgatctatcaacagcgacgtacttcttcagaaacacgcacattctgattgatcttggcac

SEQ ID NO: 8060 - DNA, 1691 bp, Gossypium hirsutum
  Clone ID: GOSHI-09MAY01-C16340_1
attccaccgaagcaggagaaaaaggaagaaaaacactctaagaaacctctttaacatttcccctccggtcattttatcgccgccgccgctgctgtcgctgctgccaccacaatcaccgtcacctctatttttataaggaaatagccttaacctcttattttccacattttaccctcacttatttctccaaatttacccaataaatgcaatttctagggttagggttttggggaactcgatgaaaaaaagaaagaaaagcaacatggaagatttcaaggattcggaatcgaaatcggtgagtgagacggtgaacgggtcacaccaattcacgatcaagggttactcgttggcgaaagggatgggtgccgggaaatgtatacaaagcgatatttttacggttggaggctacgattgggcgatttacttctaccccgacggtaaaaatccggaggatagtgcgatgtatgtttcggttttcattgccttggctagcgaaggtacggatgttcgagcgcttttcgagctcacccttgttgaccagagcgggaaagggaagcataaggttcatagtcactttgacagagcgttggagagtgggccttatacgttgaagtacagaggaagcatgtggggctacaaacgattctttagaagaacaactttagaaagttctgactacattaaggatgattgcctaatcatgaactgcactgttggagtagtcagaactcgccttgagggaccaaaactgtcttctattcctgtaccgccatcagacatgggtcagaatcttagagctttgttagaatccgaagttgggtgtgatataatgtttcaagttggtgatgagacatttaaagcacataagttgatccttgctgcacgttcacctgtttttaaagcacagtttttcgggctcgttggagaccctaacttggataaaatagtagtaaaagattttgagccttctatcttcaaggcaatgctcttgtttatttataccgacaagcttcctgatgtacaagaaattgtagactccacatctatgtgtacatctgccaacatggttcagcatcttttggctgctgctgatctgtacaatttagatagactcaaagtgttgtgtgaggcaaaattgtgtgaagaacttaatgctgatacggtggcaacaacccttgcacttgctgagcagcaccattgtgcacagcttaaggccatatgtttaaaatttgctgcaactccgtcaaacttgggagcggtgatgcaatcagaagggttcaagcacttggaggaatgttgtccatctttgttatcggagatgttgaaggcctttgcatccagcgaggaaagctcgagtctgctttcaagtcggaagaggagtgtcagcagtgtatacgggatggatcttgcagcagaaggtccagcagcagaaccgatgaatccaaatggcaggcgagttcggagacgttgattggcaatcaacgggtaagtgtgtttgggggtgtttctgggggcataccatccataccatccaaatatttggagtggattgttatgtatttacatgtgggtaatatattagttagaactggaaatgccttttttggttctgtgtataaaggaaccatgctttcttgatgctgaaatgtatggttttctggggcaattaaataagctatttattagtttcc

SEQ ID NO: 8061 - DNA, 275 bp, Gossypium hirsutum
  Clone ID: LIB3048-045-Q1-L1-B5
ctaatcatgaactgcactgttggagtagtcagagcgggcgttgatgtaccaaaactgtcttctattcctgtaccgacattagacatgggtcagaatcttagagctttgttagaatcccaaactaggtgtgatataatgcatcaagttggtgatgagacattttaagcacattatgtgatcccttcttaaacctaacctggtttttaagtacaatttcttgggctctgtagaaacccacacttggattaaataatctttatacaattttagccctt

SEQ ID NO: 8062 - DNA, 1007 bp, Gossypium hirsutum
  Clone ID: GOSHI-09MAY01-C16360_1
caaaattttccggaaccagatcggaaattccctttcgttttcccccaaaaggtttccaatttcccctccttcaggatcgacgctagactatccatcgccaccgttcatcatcgtctcagccgcctctcttaaaaccagggatacgaaaagatgggagctttcatatcgaagttctggttcatgttatttcccgcaaaggaatataagattgtggtggttgggttagataatgctggcaaaacgacgacgctttacaagcttcaccttggtgaggttgttactacccatcctactgttggcagcaacgttgaagagcttgtttataaaaacatccgtttcgaggtatgggaccttggtgggcaagaccgactacggacatcgtgggcaacatactatcgtggaactcatgctgttatcgtggtgatagacagtgtggatagggccagaatcaccattatgaaagaggagctcttcaggttgctcgcacacgaggacctacaacattctgttattctcgtctttgcaaataaacaagacctaaaggatgcaatgaccccagctgagatcaccgatgccctttcgcttcacagcataaaaaatcacgattggcacatccaagcctgctccgcacttaccggagatggactgtacgatggtcttgggtggatcgcccagcacgttaccggaaaagcaccaagctgaaaaggatctgttcaatgagagaacgacccattcattctccatatatatactatggattctgctgattgatcaccgaaaaaaacagagtgaacttttgtgtaccatcttctgtatgaactttttctatattgtttttaaacatttcaatttgcctctcaagaaattgactttttatgcacaatgacatctttttcatttaaaaatatgagaatgatgaaaacgttgctataaaaaaaaaaaaaaaaaaaaaaaaaaaaaaaaaaaaaaaaaaaaaaaaaaaaaattctgcggcgtcgacgcgaccg

SEQ ID NO: 8063 - DNA, 841 bp, Gossypium hirsutum
  Clone ID: GOSHI-09MAY01-C16280_1
gcgcccacgcgtcctaaaagagatgcctatttattgatgcacatgagaaggcatgggggtgagggcaaaacaccagcagcgctagctaaacccaataaagaatccacttctgaaccagctcttattaagagatattcatgcccttttgctggttgcaagaggaacaaggatcacaaaaagttccagcctctgaaaaccatcttatgtgtcaaaaaccattacaagacatcccactgtgacaagagctacatctgcagcaggtgccacaccaagaaattctcagtgattgctgatctcaaaactcatgagaagcattgtggtaaagataaatggctatgttcgtgcggcaccacgttttcgaggaaagataagctgtttggtcacatagctcttttccagggtcacactccagcaattcccttggatgaaactaaaggacccactgccccatctgaccctggagatggcagtgaagcaacaaatgtggtcggaagcatgaatttcttcaactttggtagtgaaaatggggtggatgtcaaaggcagccttgatgatcctgctgcttatttctcaccattgaactttgagacatgtaactttggtgggtttcatgagttccctcgaccggcatccgatgattcggagacttcattggcatttctcctttcaggagcgtgtggttacaataataataataatgatgttgagaggtcttgaatattgatggtagactagactagattgtattcttccttgaattagggagctattagtttgtgttagatttgtatggtcaggcaaacccctgtgtacttatttaaataaaatgatatttttattg

SEQ ID NO: 8064 - DNA, 543 bp, Gossypium hirsutum
  Clone ID: LIB3829-024-Q6-N6-A2
caataaaaatatcattttattttaaacaactaagtacacagtggttgccttaccatacaaatctaacaccaaggaagaatacaatctagtctagtctaccatcaatattcaagacctctcaacatcattattattattgtaactacacgttcctgaaaggagaaatgccaatgaagtctccgaatcatcggatgccggtcgagggaactcatgaaacccaccaaagttacatgtctcaaagttcaatggtgagaaataagcagcaggatcatcaaggctgcatttgacatccaccccattttcactaccaaagttgaagaaattcatgcttccgaccacatttgttgcttcactgccatctccagggtcagatggggcaatgggtcctttagtttcatccaggggaattgctggagtgtgaccctggaaaagagctatgtgaccaaacagcttatctttcctcgaaaacgtggtgccgcacgaacatagccatttatctttaccacaatgcttctcatgagttttgagatcagcaatcactga

SEQ ID NO: 8065 - DNA, 957 bp, Gossypium hirsutum
  Clone ID: GOSHI-09MAY01-C16250_1
attggatttggcattgcatagtaaatttgagttgtcccatacctggaagaatggcagtgtttatttcactgggtattatgttgatacgcctcaaggtagtggttctgagtctgaagaggagcttcttgcccacgcgtccgatcccgtaaagcctcatgctacagcatctgatcctaccacgtcaaaacaggttaagattgtggaaccaaaaaaagcagaggatagtagtgatgacgaggatgaagatgatacttctaccgaggatgaaatgtccagtgaggatcaggaacctggcatgttagtaaatggtgagaatgaaagtaacaatgacactgacagtgatgaggatgatagtgaagaagaaagttcagatgaggatcctgagacacctgagacggaaaaggctggaccgagcaagaagagatctgcagagtcagctacaaagacccctgcaccagaaaagaaggcaaagctagtcactccccaaaagacagatggcaagaaagtgggtggacatacagcaacacctcatccttcaaagcaagccagaaaggcatcggctaccacccggtcaagtgaatcagagcgcaaagccaggcggttcatcattcccttgcaagtcttgcggcaggtcatttggctctgaaatggccttgcaatctcattccaaggcaaaacatggaactgcagtgtaaaaatcaatcagtctaacaagtaatatctttgcttaactattaccattcctggaatgggcaaattgaacataattagttaaatgttttaggtgactataattgatgatttatgtgtttaatgagtagtatttgcaaattattaggttatcttaaatgaaattgtgttctgcctatagcaaaaaattatgtcatattggtatcattttctcatgttatgattgtgtttaaagtattatatatattttttaacttttaacgtgtt

SEQ ID NO: 8066 - DNA, 452 bp, Gossypium hirsutum
  Clone ID: GOSHI-09MAY01-C17870_1
ggtttcaaaacttctcgtggggggtatgcggggagctagataagtggaacaggtcagagtaggtcaggctctttacaaagcagccagtttgttcaaccattcctgcctgccaaacattcatgcatattttatttcacgtactctcttactacaacaacaagatttgtgtgggggggggggggccctggttctgtcttatggtcctccggttggccaatgggactgtaaagaccgccttagatttcttgaagaagagtacttttttcgatgttggtgccgtggttgttcagaagtgaatgaatctgatcttgtaattagtggattttgttgtgttaatccaaattgcgctggggtggttttagacaatcttgtggctaactgtgaaaagcagaagcctaatgttcctgaaacaatttgcaacgagtctcatttgcagggtctcgagctcaagg

SEQ ID NO: 8067 - DNA, 866 bp, Gossypium hirsutum
  Clone ID: GOSHI-09MAY01-C17810_1
ggaggggttaattcctcattggatcaggcctcttccacctaggttccctgtggatgaggagctagtgtggctcaaccctgataacaatcatgagcttcaatgggacccagcgtccggtgctgatactaggagaggagcagcagtgagagatttaattgcaaaagctttgaggggaccacttgctcctaaccaacaagagcaagtcctcgtggagctggctaatgaccctaaacttgtctatcactgtggattgactccaagaaagctacctgaattggtggaaagtaatccgcttattgctgttgatgttcttatcaagttgataaattctccagaaattgctgagtatttttcagttcttgttaacatggacatgagtctgcactcaatggaagttgtgaaccggcttacaactgctgttgaacttccgaaggaatttgttcgtacatacataactaattgtatatcatcctgtgaaaacatcaaggataagtacatgcagaataggcttgtgcgactcgtatgtgttttcttgcagagtttaatccgaaacagaattattgatgttaaggatctgtttatcgaagttcaagccttctgcatcgagttttcaaggattagagaggcagcgggtttatttaggctgttgaaaaccttggaataaagggtgcctgtgttctatcccttacctgcatttaaacaaagttctacctcgtaagaaagtgtagataatatgattgtagtttgggacccgataactgctggctttagatattccgaaactgaaaaattagtccgcaatgcgtttgcaggaataatattagcagaaagaacgtaggcaggcaggcatcatgtaattaagcgta

SEQ ID NO: 8068 - DNA, 545 bp, Gossypium hirsutum
  unsure (1)..(545): unsure at all n locations
  Clone ID: LIB3825-025-Q6-N6-B12
atcccagacgaaaccaagcacttaaacatagaaaaccaaacgttcatacgcttaattacatgatgcctgcctgcctacgttctttctgctaatattattcctgctaacgcattgcggactaatttttcagtttcggaataactaaagccagcagttatcggatcccaaactacaatcatattatctacactttcttacgaggtagaaccttgtttaaatgcaggtaagggatagaacacaggcaccctttattccaaggttttcaacagcctaaataaacccgctgcctctctaatccttgaaaactcgatgcagaaggcttgaacttcgataaacagatccctaacatcaataattctgtttcggattaaactctgcaagaaaacacatacgagtcgcacaagcctattctgcatgtacttatcctgaattttacaatgattgtaatatgtgaggcacaaaactttgttttaaagaagagggaactaatatgaaacanaaaattgaacattttaactttgtataaattctcaacagttattcta

SEQ ID NO: 8069 - DNA, 657 bp, Gossypium hirsutum
  Clone ID: GOSHI-09MAY01-C17820_1
aaattcatctgatctactttctattcagtagtatatacaaactaaattagcttggcttctctccaacagaaatggctcccgcttccttccatcacgagaaagtttgcgtgatggacgcctccggtcgcctgggctctaccctggttgaacgcttgctggaaagaggctacactgtccatgctgctgttcaaggccatgttgatgatttgaaactgaatggggtagctactgaaagggaaaagaagctcaagattttccgggcagaccctttcgattatcagagcattaccgacgccctgaaaggctgctctggtttgttttacgcctttgagcccccacaagaccaccctgcctatgatgaatatatggtagaagtggaggtacgagcagcacataatatggtagaggcatgcgctcggacggagacaatagacaaggtggtcttcacatcctccgccactgctgttctttggagagacaacaattcccaatcgcttgcttccgatttggatgaacgccattggagcgacgtcaatttctgccgcaaattcaagttatggcacgcgctgtcaaagacggtggcagagaagacagcatgggcgttagcaatggatagggacattaacatggtttcaatcaacggggggttgttgatgg

SEQ ID NO: 8070 - DNA, 947 bp, Gossypium hirsutum
  Clone ID: GOSHI-09MAY01-C17590_1
gtgaatcatctgaaggttaaaagaaagacaaaatttccttataaaattcagataagaactctgggtttgttcgtgccttgaaagaaagcaagaattttctttttctttttgtttgagaaaaatcttggaagagaaacgaacaatcatggaggaggctgtcaaagaacaacaatctgctgctcaaatttctgggagtgcagggaagtcgaagctacgttatccacttcgatcctcaatgaaaccaaaggagcagaagcctcccgcgcctgatttatccaattcttcttcatccagaagggggagggcaacacccagtgtaagcaagagtgtgggtgttctagatctttcaaaggagaaatctgggtcaggaaagccgcccaggaggctttccatcccaaccaaatcaacagtgactgcatccccaaaatttgttgggacaaccactcctatattcgagggtagagcagccaagaaaccaagcaatggtcaaggcaaaagtgacacacccctttctgattcttctagatcatcaactcgaaggaggttcaatgtattgtcatcagcttcctactggctgtcgcagattaagctctctgaatcagcttctaagcactctgtctcacttggatttttcaaacttgccttagaagctggatgtgagccccttcagaaaatgagtgatgagcttaaatcctatattcgtcgccataatcttggtgaaaatggggaagctataaatgagctactcgaaagctacaatgttccagacaatcccgagcaaccacaggtgcctgaaacctgttctcaggtgcctgacgagggaacccggtcatcggatgacgaggttcacagggtttctcctgtagcagcagcagctcggagattgaaacccaagtccttgaatactgatgctgctcgggtatcatcagtggccaaatcagcaaaag

SEQ ID NO: 8071 - DNA, 378 bp, Gossypium hirsutum
  Clone ID: GOSHI-09MAY01-C17560_1
ggccgacccacgcgtgcggcccgcctcacattgcaaaatactatattttgcagcggcagaaggagctctctctctttctgtcgtgagacatccttttagcttttgattttagtttataacaatcttaatccaaatgcctcctttggctttatctgacctcaaagagaagaaagaagagaaaatgatgaagaagaagatcgctctcgaaacacctgaatccgagaaaaaaacgaagaagatcaaggaacctaaggttagagaagaggaagatgattcggctgtgaagaagagtaaaaagaagcgtaaggcctcggagctccaaatggaagaggaggagaggagcgagacgagctcggagcttgttgagccggtggatcc

SEQ ID NO: 8072 - DNA, 1368 bp, Gossypium hirsutum
  Clone ID: GOSHI-09MAY01-C17420_1
cttttcaaatcctgggtggctgttgacaactcattgttgctaaaattttagtagttatttttaatttctttgctactggcaggcccacactgttctggagatgaactatactgagcagcaacttatttcagctgtgagctctggtggactgcgtccagttcttgctggtattgagtctggagtaccagaaagtatgctgtcactaattcaaaagtgttgggatgcaaatcctcaaaacaggccatcattcaatgatatcgtgttagaactagatgatatgttgcaacaaagaaagaaaatggagaaagaagatttatctcttcaccagcctcccatttctcacttccatcaagtcatggatgatgttaataaacttcatacctatcaggaagagaataactgggtgctctcagggagaatgtgtctccaaaagagcttcatttggagaatattctggtttcacaatgtggcttgatggttttgatgatccttttgcatatcatctattgcttccgtcgcgtgcctttgctacatgtggaagacgggagagtatggaggacatgcactttcttatgcctttcctatgcaatgagaaggatgttcatgcttttggtatcttcgatgggcatagaggtacacaaaaccatgatacagaacgctgaagatgcagtagagatcatatatgaggacaaattcttgtaaatcttatctgagaaattaattcaaatacttctctgcccccctctccttgtttgaagctactaaatttgtctgcgttgaggttgaatctagttttcttggtcctatatattatataatgtatataaatttctgttctctggaaaacttgcaggtgcagcagcagctgtgttttcagttcaagcattgccagagtttctgggggcctttggttctatgtgcagtcctgctgatgcactggtggaagcatttgttaggacagatgttgcatttagagatgaacttgattctcatcgaaaatcaaggagggttattcagaaagactggcatcctggctgcactgcagctgttgctctaattgttaagaacaagctttttgttgctaatgcaggtgactgcaggacaattttatgtcgaagagggtgccctgtagctctaagtagggatcatgttgcaagctgtcctgaggagagaaaccgtgttgttagtgcagggggggaggtaaaatggcaagttgatacttggaggggtggtcgggctggacttcaagtaactcgctccttggtgatgatgatttaagcctgctgtaactgcagaacctgagataacagaaactgtactttcagttgaggtgagttctgggaatggctagtgatggactttgggatg

SEQ ID NO: 8073 - DNA, 702 bp, Gossypium hirsutum
  Clone ID: GOSHI-09MAY01-C17640_1
ggaaaaggccaaaacaagcccccgaattcactcttttcctcctattaaacaaaagccaatggcctccttatccttcctccacctctcctccgccacccgttttaccccacgcgccactcctcttaaccaccgggctcgaacccagaaatcattctccatcaggtcccaatctgccccagtcctttcccaagatgagctcaaaaagcttgcagctgacaaagcggttgagtctgtcaagtcaggtatggtcctaggcctaggaacaggctcaacagctgcctttgtggttgacaaactgggtcaactcctttccaccggtcaactttctaacatcgtcggaatcccaacctcaaaaagaacccaagagcaagctgcatcacttaatatccctttatccacccttgacttgcatccccatattgatctcgccattgatggtgctgatgaagttgaccctaacctcgacttagttaaaggccgtgggggtgcacttttgcgagagaaaatggttgaagcagcttcatcttctttcattgtagtggctgatgatagcaagcttgtttcagggctgggagggagtggtttagccatgcctgttgaagttgtgcagttttgttggaaatataacttggttagactgaaggattgtcaaaagagtgggttgtgaagcaaaagtgagattagcaggggatggtagtgaaa

SEQ ID NO: 8074 - DNA, 420 bp, Gossypium hirsutum
  Clone ID: GOSHI-09MAY01-C17660_1
agcaattgaaaatgtttgatgatttagctaagaacttcgcagatcttacgtcaaaaccgagtttgtttgaaacagatgggaatttagatgaggatgttttaaggcagtttgagaaagaagtgaaagatagagtgaaatttgctaggttgatggtagctgaatctaaagagaattatgataatcagttgaaaattcagaagttgaaagataccattttctctgttagtgaatcattaggtaaggcaaaaaagaatggagctttagcgagctctattgctgctaaatctattcctaagagtttgcattgcttggcaatgaggcttgtggaggagagaatttcacacccggagaagtataaggaagagtcgcctacggctgagtttgaggatcctagtttgtatcattatgctgtattttcag

SEQ ID NO: 8075 - DNA, 526 bp, Gossypium hirsutum
  Clone ID: GOSHI-09MAY01-C17600_2
ttttcagccaactcaacagtttcatattccacaaatgcatgcaacttgttactaaatgcatgccatcactctttgctgacctagatgctgaagacatcccaccaccagagggttgaggctgacaggtacggattgttttcacactcccaaccgcagagaaaatcttcatgaggttctgatggcagtgatcctcagccaaattttcagcaacaattatacgagattgcaactcttccatatccgattcagtaaggggatgctggcgtcttactttttttccatcttcactaactacaagctttgctgagttccgcaaaacagtagctagctgggaatgagtagttacaagggctttaatcttcttaaaagatgcaacagcagatattggcacatatccatcaggatccttgttgatgaacctcataagatgatccgtggtggccaagttcacatcgccaaaatagtactcaacctgattcaaaatcttcagtgtagcttccgcacgcgggccgtttttggaggaaat

SEQ ID NO: 8076 - DNA, 1137 bp, Gossypium hirsutum
  Clone ID: GOSHI-09MAY01-C17600_1
aatcaaaccaactcaacctgatctgttaatttgattttaacccaaacatgtacacttcataaaatacatgcatggtacatactggaaggaaaagcaaaacaaattattctaacgacaaatattattccttattcactcattaaatatagggcattggtcatctacttactacatcaatcaaagctaaaaaaaacataagacatgcatatgtttttgcatcttccatacccacatacaaaatcataggaaaatgggtcactcgacccactcaccaatcatataatttttttccaactacgactaatggctaatagccacagaaggaaaacctgtcggccatccaacaccacttataacacacatctccctaccctcctataacattgcacaaagtcgcacgattatgtagcataaatttcattcatgcagtattaacagcaactggcttccctcgacccatagcaaatcctcttgtgccatctggcatacgaggaccagggggctgctttgctccagtagcttgctcattgctgacccaattacttgaagctgaagggggagtgcctacatgatttccgtgactactatgatggttattatggtattgagtccgcccacgtcctttaccccggcccctgtttctcccttttttctgcccacactctttctcattagaatgctcttctcctataagaattggattggaacttgcaggattccccatgtgaatgaatatcagacaactgagaaggatcttcttgttgtttctcatttgaaggcagttcagaaatacaaacatcatcttcctcacattgaccttctccatcatgcccctttttcactcttgcatgagcacgttttgacacatgtctaagcattagacggaccctaaggccactcctccggacgcgtgggaatttccctcttcgttaagctccgcaacagctttttcagccaactcaacagtttcatattccacaaatgcatgcaattgcaactcttccatatccgattcagtaaggggatgctggcgtcttactttttttccatcttcactaactacaagctttgctgagttccgcaaaacagtagctagctgggaatgagtagttacaagggctttaatcttcttaaaag

SEQ ID NO: 8077 - DNA, 573 bp, Gossypium hirsutum
  Clone ID: GOSHI-09MAY01-C17630_1
tgaaataaacatacaaacaagcagtctcaatttttgttgaagtcctgataaaatttattattaatttatagtttaatctctcctcgtccagaaaagaagacccacaaggtttctcttcttttctcattgtcggttccttcgaaatccctggcgaagtttatctcaactcggtagagcaaaatgatgaggctgcgaacatatgctggtctcagtttagtcacgacactagcagttatatatcatgcattcaacagcagaggccagttttatcctgctatggtttatttatcaacctctaagatcagcttagtgttgcttctcaacatgggccttgtagttatgtgtatcttatggcaattaaccaaacggctattccttgggtctcttcgagaagctgaggttgagcggttgaatgagcaatcatggagagaggtcatggagatcctctttgcaatcactatctttcggcaggaattctctgttccatttcttgcaatggttactgctctattgttaatcaaggctttgcattggttggcgcagaagagggttgagtacattgaaacaacccct

SEQ ID NO: 8078 - DNA, 1372 bp, Gossypium hirsutum
  Clone ID: GOSHI-09MAY01-C17140_2
cacctacaacatcctcatctcagccaatgcttctttaaagcaagagcttcctgggccttcaacctcatccatcatcgaccccataatccggatgccggtagaaagatccagaaagtatgggtcaaatgcacagaaaaggttgttccacacggctgtgacagcttctgactcggtttacaacacttggcagtgtcgagttatgtattactggttcaagaagcataagaatggacccaattcggatatgggcgggtttactaggatcttgcactctggtaaacctgacaactacatgaatgaaattcccactttcattgctcagcctttaccagctggaatggatcagggttatatagtcctgaacagaccctgggcatttgtgcaatggcttcaaaaagcagacatcaaagaagattacatactgatggcagagccagaccatattattgtgaagcctataccaaacttatcaaaagatggcttgggtgctgcatttcctttcttttatatagaacctaaaaagtatgagtcagttctgagaaagtacttccctgaggaaaagggtccaataaccaacattgaccccataggaaattctcctgttattgttgggaaagattctctcaaaaaaattgctccgacttggatgaatgtgtcattggcaatgaagaaagatcctgagagagataaagcttttggttgggtgcttgaaatgtatgcgtatgctgtttcgtctgccttgcatggtgtgggtaacatcctgtacaaagatttcatgatccagcctccttgggatacagaaataggtaacaagttcatcattcattacacatatggatgcgactatgatttgaagggtaggttaacctatggaaagattggagaatggaggttcgattaaagatcatttgatactgaagcaccaccaagaaaccttcccctgcctccttctggtgttccggaaagtgtggtgacactggtgaaaatggtaaatgaagccacctcaaacattccaaattggggttcatagaaaagggaaaaaggaaggttaggggtgcaattgcaagatataggcaaggagggctcccttcatttcagttgtcagctgcagatattgggttggtcatgggtggggaagaaagaaagggagtgtttgggtatatgttgctgtttattctaaagtaatcttgcttggaatttccttccttgagtgtgagcgtaggtacaaggatgcgatacatttactaaggcgattgcttgattgcttcacctgtgatgcaagaaggggatattggaccgtaagattatctgttgatttggagcatattggctgccccaatgagagtctttcaatcgctgaggctggattatt

SEQ ID NO: 8079 - DNA, 735 bp, Gossypium hirsutum
  Clone ID: GOSHI-09MAY01-C17140_1
aaaaaaggctgaacatttcttcaacaactctactctggctggcggctttcagcagtcgacacggtgactttcttcaccaactctctcccgtgacagtctgtcaccttcccaaataccgccaccgctttaggcggcttccgccgctccatcacttgccgaagccgcccttcaccaagtgccataaacaaaagagagaggtcattaagcaaatagagtgagaaatggggtgtgggaatgtgttcttcacgttgatcataacattatcagtagctctaatcacctacaacatcctcatctcagccaatgcttctttaaagcaagagcttcctgggccttcaacctcatccatcatcgaccccataatccagatgccggtagaaaaatccagaaagtatgggtcaaatgcagagaaaaggttgttccacacggctgtgacagcttctgactcggtttacaacacttggcagtgtcgagttatgtattactggttcaagaagcataagaatggacccaatttggatatgggcgggtttactaggatcttgcactctggtaaacctgacaactacatgaatgagattcccactttcattgctcagcctttaccacctggaatggatcagggttatataatcccgaacagaccctgggcatttgttcatgggttccaaaaaccgatttcaaaaaaaataactcctaattggcaaaccgaaacatttaatgttgaacctaacc

SEQ ID NO: 8080 - DNA, 355 bp, Gossypium hirsutum
  Clone ID: LIB3083-027-Q1-L1-F8
cacttaaaattaaagtaattctttccgaaggtgagatggcaaataaggccagttgtttgcaaagacaaaaagttaaaaaacgtagttaaagagtaacaagtttatatatcttaattaaaacaagcatatgggctcacaaggaccacctgtatatataactttgttttttttatctctattctcctcaggctcagggtgtatcttattcccaatcttaactaccagcatagaataaacaccaacatataaccaaacacgccctttctttcttccccactatgaccaacccaatatctgcagctgacaactgaaatgaagggagccctttttgcctatatcttgcaattgcacccct

SEQ ID NO: 8081 - DNA, 943 bp, Gossypium hirsutum
  Clone ID: GOSHI-09MAY01-C17130_3
aaacccggggggacggaggcgggcggttgtttacatcatccctttctctttctctttctctatctctctctttctactcggggagttcttattcacctaggagggtcattactttcataaatacgtatacagcttgctttagagagagagagagagagagagagagggatttctgctaaagcaaaagcaaataaaaaaaatgaaaaaaccttgtgttgggtgattgttaaagggtcaattttgtgtctataaatgtctatctggtaaagcagaaaactgcctttttttgcaacacaaaactgtagctctacttaacctatattcatcaaaagaaggggaagagttggaattcaagagcttagcctttctcatagttcaattccttgccagctttgaaccatggagttccctaatctagacccagaaagctcttcccagaaaaaaatgggaagaggcaaaatcgagattaagcggatcgagaacaccactaatcgacaagttaccttctgcaagcgccgcaatggactgctcaaaaaggcctatgaattatctgttctttgtgatgctgaggtggctctcatagtcttctccagccgtggccgtctctatgaatatgctaacaacagtgtgagagcaacaattgagagatacaagaaagcatgctcagatgcaacaactccagggtctgtggctgaagccaacattcagttctaccagcaagaagcaaccaaactccgacgacaaattcgtgatgttcagaacatgaacaggcatatccttggagaggctctgagctcattgacctttaaggaactcaagaaccttgaaggcaggctggagaaaggcatttgtagaatcagatcaaaaagtttttgtttggtgtatattaaaatctttcattctttccttccatcttaatctctttggtggtttattatatgga

SEQ ID NO: 8082 - DNA, 1416 bp, Gossypium hirsutum
  Clone ID: GOSHI-09MAY01-C17130_2
ctccgccaccccttccggccaagtccatattacctgatttactaaatcattggctatcacttggtggggcatgagaggatcctattccacttggtttttgtgtcgttttctcattctcttaactcactcttctttctctttatattatatgatactaatgttataaaaattacctcagttctaccagcaagaggcaaccaaactccgacgacaaattcgtgatgttcagaacatgaacaggtctcctatcaatttctcttcttcttcctacactctatatctatatctatatacgaatgatgtttgttgcaggcatatccttggagaggctctgagctcattgacctttaaggaactcaagaaccttgaaggcaggctggagaaaggcatttgtagaatcagatccaaaaggtttttgttttggtgtatattaaaatctttcattctttccttccatcttaatctctttgtttgtttattatatggaataaaatatcgttattcactcaccacattctccaactctaccagaacgaattactgtttgcagaaattggattcatgcaaaagagggtaaactttcatccctacttggtctatttatttataggctagttaactcaaaacccggtgtatagctggtttagaagcaatcttgagtatgttgattcatccatcattagcttgaaaaagaaaaaagaggattgtataaattgatatcctcaaaccccattggagtttcatcttcagaatctttagtttgttagacactatacaagatatgagtgatagcataaaggtcgtcgtcttaattattaacagctgtaaaatgggtatataatttctaggaagttgaactgcagaacgataacatgtacctgcgagcaaaagtaagcctctctgcctaatgaataagcctctctgcctaatgaatttcaactatagatggagatgttgggtgttgatcatgattaaaatagatgcatggatatatggatgcagatagctgaaaatgaaagagcgcaacaacaatcaaaccagctgatacaagcagcctcctcctacaatcgcaactttctgccagtaaacctgctggaacccagtaataatgattactccaaccaagaccaaactcctcttcaacttgtataagcttctctcttccacctccatctattcaagctgacatgcaagcagcagcctctaatgttctaccaactttatctctggttaagcatatatatatatcttataagccatgcaagtatatatatatatatttatatatggtttataaacagttgaaagcctagttgttgattgtgatgaatgtaaggaacttaggtttcagcactggactcctttttaactgttttattgcaggaaaggtttatttttgtattatatatgtttctt

SEQ ID NO: 8083 - DNA, 1280 bp, Gossypium hirsutum
  Clone ID: GOSHI-09MAY01-C17130_1
gttgggtgattgttaaagggtcaattttgtgtctataaatgtctatctggtacagcgtaaacggatttttttttgcgggtgggggctgtagctctacttaacctatattcatcaaaagaaggggaagagttggaattcaagagcttagcctttctcatagttcaattccttgccagctttgaaccatggagttccctaatctagacccagaaagctcttcccagaaaaaaatgggaagaggcaaaatcgagattaagcggatcgagaacaccactaatcgacaagttaccttctgcaagcgccgcaatggactgctcaaaaaggcctatgaattatctgttctttgtgatgctgaggtggctctcatagtcttctccagccgtggccgtctctatgaatatgctaacaacagtgtgagagcaacaattgagagatacaagaaagcatgctcagatgcaacaactccagggtctgtggctgaagccaacattcagttctaccagcaagaagcaaccaaactccgacgacaaattcgtgatgttcagaacatgaacaggcatatccttggagaggctctgagctcattgacctttaaggaactcaagaaccttgaaggcaggctggagaaaggcatttgtagaatcagatccaaaaagaacgaattactgtttgcagaaattggattcatgcaaaagagggaagttgaactgcagaacgataacatgtacctgcgagcaaaaatagctgaaaatgaaagagcgcaacaacaatcaaaccagctgatgcaagcagcctcctcctacaatcgcaactttctgccagtaaacctgctggaacccagtaataatgattactccaaccaagaccaaactcctcttcaacttgtataagcttctctcttccacctccatctattcaagctgacatgcaagcagcagcctctaatgttctaccaactttatctctggttaagcatatatatatatcttataagccatgcaagtatatatatatatatttatatatggtttataaacagttgaaagcctagttgttgattatgatgaatgtaaggaacttaggtttcagcactggactcctttttaactgttttattgcaggaaaggtttatttttgtattatatatgtttcttaaaactctacatatagttttcatccaaaaaaaaaaaaaaaaaaaaaaaaaaaaaaaaaaaaaaaaaaaaaaaaaaaagggaaaaaaaaaaaaaaaaaaaaaaaaaaaaaaaaaaaaaagagaaaag

SEQ ID NO: 8084 - DNA, 1831 bp, Gossypium hirsutum
  Clone ID: GOSHI-09MAY01-C17050_1
attgcatgtaatattttcctcttttcttccatctcttctcttttctttttagggttttggtgttaggaggcaatgcagaataattcatcaaagaacaaatgttcatctgcatctcaccagcagatggtggacaatgccaagaaccggctggattttctccaagaacagttcactgatcttcaagcagctaggaaggaaggtcgagccggtgatgttgcagtgttagaggagcaagtttatcagaatcttcgtgagtggaaagctgagctctgcacaccatccccggcctcttctttattgggtagtcttggatcattctctgatgatataaaccgattgttgcaactgtacgaggaggaagatgatgccactagtccattaaaggagccagctgtgctgaagcctgagattgatgatcaaagcctaaatcccagtactttacctgtaattcccgaggactattttgtgactcatgagccacaagaacaatcatttcaagggtttgatttatgcaaagtttctacctcggctaatgctgacataaattatcaattggattatcatccatttgatttacaacaagattttgaccatgagcatctcctcgatgccaatggcactgaagattatgtgaaggatgctaactccaacatgctgccaaatatctctcctccaccatctgctttcatgggtccgaagtgtgcactgtgggattgtacaaggcctgctcaaggatctgactggtttcaggactactgtagcagttttcatgctaccctagctctgaatgaagacccccctggcacaactcctattctacgccctggtggaattagtttaaaggataatttactacttgatgcagttcgagcaaaggcacagggtaagaatgttggcatccctcaatgtgaaggtgccgctaccatgaaatctccttgggacgctactgagctatttgatctttctttactcgagggtgaaataatcagggagtggctcttctttgataagcctaggagggcatttgagagtggaaacagaaagcaaaggtcattaccagattactctggacgtggttggcatgaatcgaggaagcaggtgatgaaggaatttgcgggccaaaagaggtcatactacatggacccgcaaccttctggcaaatatgaatggcacttgttcgaatatgaagatatatggttgtgatgcttttgctttatatagactggagctgaagcttgcgaatcaaaagaagagtcccaaagcaaaagttccaaaggattcgcttgctgatctacagaagaaaatgggaaggctcactgctgaagtccctggagatgacaaacctcctggtaagggcaagacaaaggcaaacaagaaagcggccacggctgctgctgcagcggcaaatgttaattctgctcaagattagatgagcggtaagactgacgaggtgaattatggttataatgtttctgaaagaagaaaattgactagttgtgcatttggcatccagtgttattctgcatcaagctttgctgtagttggtctatagatagagaccaaagattgcagtgtcattttcttaaaagaactttttttcctttattccttcagttgctgcttggtggcttttttactgcttatatggtgtttatgtacagttagagtaagcggaaacctttattatattaaactggggagggaggtaaatggtaaattgtagatgaagaaaattttatgtagggaaacatgttaatttctccctaatatttgatgcagtttattattaatccaaagcagtggattgttttctctcacaaaaaaaaaaaaa

SEQ ID NO: 8085 - DNA, 552 bp, Gossypium hirsutum
  Clone ID: LIB3584-056-P1-K2-F2
cggacgcgtgggcggacgcgtgggcggacgcgtgggcggacgcgtgggcggacgcgtgggctttgataagcctaggagggcatttgagagtggaaacagaaagcaaaggtcattaccagattactctggacgtggttggcatgaatcgaggaagcaggtgatgaaggaatttgcgggccaaaagaggtcatactacatggacccgcaaccttctggcaaatatgaatggcacttgttcgaatatgagatatatggttgtgatgcttttgctttatatagactggagctgaagcttgcgaatcaaaagaagagtcccaaagcaaaagttccaaaggattcgcttgctgatctacagaagaaaatgggaaggctcactgctgaagtccctggagatgacaaacctcctggtaagggcaagacaaaggcaaacaagaaagcggccacggctgctgctgcagcggcaaatgttaattctgctcaagattagatgagcggtaagactgacgaggtgaattatggttataatgtttctgaaagaagaaaattgactag

SEQ ID NO: 8086 - DNA, 919 bp, Gossypium hirsutum
  Clone ID: GOSHI-09MAY01-C17030_1
ctcaaaaagcatggagccgctcactaccagcctaacccattccatttccactcttccacccatccgcttcttcgcctcagctcaccgtctcccccctccgcagctttctgtctccaccgtccgccacctccgttcccgggttttgcgttttagtaatctgttgcctaaagcgacaacttcggaagaagcctcctccaccgggccaaaccgatatttcggtgaagatcgtgaccgcgtggtgacagtggaagaagttccggcggttgggaataataatgtcttcaatgaaaagctgccacttggagaacctaaagtagagtcagctgccgatgaggactcgcagatgttcgagtttttggagaaacttaatatcaagcttgactctggagatggatattcagtcatattatatggaactggtgccttgtttgcattgtggctagcctcatctcttgttggtgctattgattcaattccattgttccctaaattgatggaagttgtgggtcttggctacacagtctggtttagttctcgatatctgttattcaagaaaagcaaggaggagttgggtgctaaaatcaaaaaacttaaccaccaggtccttggctcaaaggacggttaattatgggaggatttaatcccactgagtcttgcttgaacccttgataatggaagatatgccgagttggatattttctctccttcatatttaggagcttagagagtacagagatatgtctgtatcgaaactagttggtagcatcaagataaaacattttgttggtttgttcctcccccccaaaaaaaaaaaattctgccggccgccccgcgggtggagcctccattcgccccctggttgatccttttacgcgccctccctggccggtctttttctagcgtttttactggggaaggc

SEQ ID NO: 8087 - DNA, 693 bp, Gossypium hirsutum
  Clone ID: GOSHI-09MAY01-C17350_1
tcagtttcaaacaagggcttgattgcaattgcagagaactgccctaatttgacctctttgagcatcgagtcttgccccaagattggtaacgaaggccttcaagctatcggaaagctttgccctaagttgcaggctgtctgcgtcaaggactgccttcttgttggggatcatggagtttcaagcctgttgtcgtcaacatcttctctcctttcaaaggttaaatttcagggtttgaatatcacagacttttctcttgctgagattggtcactatggcaagtcggtgacaaatctaatgcttagcggcctagaaaacgtgagcgagaagggattttgggtcatggggaatgctcaaggcttacaaaagttggtctctttgacgatcacatcctgccggggggtaacagatgtgagtcttgaagccatgggaaagggatgtgcaaacctgaggcagatgtgccttcgctggtgttgctttatttcggatgacggattggtggcttttgccaaatctgcaggttctcttgagtccttacagttagaggagtgcaacagaatcacccaatccgggactattggtgtcctctcaaactgttcgttaaaatcccttaccgtagtaaagtgcatgggaattaaggatatatcctcggaagttcctttgtcgtgctgcaattcccttaaatcattgtcagta

SEQ ID NO: 8088 - DNA, 469 bp, Gossypium hirsutum
  Clone ID: GOSHI-09MAY01-C17370_1
cgtaaaacgctttggctggatcttctcgtcgcggtgcccatacgaagggatcaacaactccagacaccagaaaaaagtaacaaatactctcacttttttcccttttcatttcgacgggactaactctaaattacaggattttattgttggaactgaagttttaaggtgatggcgaggatcaaaccacaagctttgctacaacagagcaaaaggaagaaaggcccagctcgaataagtcttacaacaattataatgttgactttgattgtcgttttgattctgttttttgtgtatgccacctacagacactggactcaaaggtcaagaattcatattgaaaacagggaatcagttattgagggtgacaactctttcatggattcaaagaaatctgatcttccaggatatgcttttttagattactgcgaaatggctttttttcagtggagctttttaaggacattttttc

SEQ ID NO: 8089 - DNA, 528 bp, Gossypium hirsutum
  Clone ID: LIB3583-023-P1-K1-D5
ggattttattgttggaactgaagttttaaggtgatggcgagaatcaaaccacaagctctgctacaacagagcaaaaggaagaaagggccagcttgaataagtcttacaacaattatagtgttggctttgattgtcgttttgattctgttttttgtgtatgccaccctacagtcactggactcaaagggtgacaactctttcatggattcaaagaaatctgatcttccaggatatgctgtaggttccttacttgctaagctgtttcctaattaatatttggtgcctgtgtgaataatgtctactttcttgtaatactggcctgcaacgtgctgtgcttggttctgagaaacaatattgacctaggtgattaacttacaatgtgtttttttatccaatgcatatatatatttttatctatttaaccagctttctgcgattaaaatttttttttcagcttgcacatgtgtcttatgagcacttgaattcatcaaaagacattacagaagaaattcttttatcatgttcttg

SEQ ID NO: 8090 - DNA, 891 bp, Gossypium hirsutum
  Clone ID: GOSHI-09MAY01-C17280_1
gttggttaggtgggtgtgggtccaaaaggcattctaggctttaataagaatcatggagaagaaatatctctccgtcttcgaaccgatgacctcaaaggattcaggaaatatgagagcataaaaaaaactcttctacatgaacttgctcatatggtattttctgaacatgattcaaattttcatgcccttgataaacagttgaatgaagaagctgctagcctagactggaccaaatctaggggccacgctttaagtggaatcggacactcggagaaccatgaagaatattatgttgaagatggcagaaattctcagaaggttggtggaaatatgtcaactttgctggaaaatgcccgtgcctcttccgtagctgctgcttttcgtcgtctgataaacactcctgccaatgtggacgcatctgaaacacatgatgagccagaacctgatgattctgagttggttatgcatgatggagatgaaaatctagatattcaatgtcaaattagggctcaggggaaacatgcttatgaatcagattctgatggccttgctgacaatcaaaacaagtgtgagcctgatccggatgatttgcttcatgctgaaactctgcaactgaaacatcattctgtatccactgaaaacagttctcaatctcagatgactcttgggaaatcaacagccatgagttcaaatgaagagcctgatcctgatgattcgggtgcttcttcaagttctggaaatgtggttgaacctgtggtgatgccagctctggacaccaagattcagacaagtgagaccatagatgagccagatcctaatgatgtagaagcacaatctagcatttcgggatgtgtgaacagagcaattatgatcctcgtcatcacataacaa

SEQ ID NO: 8091 - DNA, 344 bp, Gossypium hirsutum
  Clone ID: uC-gsflmaxxa026c08b1
tctggtcgtgtaggaataatgactgagatggctccagtgtggttatgttggtgtgagtcccaaatgcattctaggctttaatatgaatcatggagaagaaatatctctccgtctacgaaccgatgacctcaaaggattcaggaaatatgagagcataaaaaaaactcttctacatgaacttgctcatatggtattttctgaacatgattcaaatttttatgcccttgccaccacagactgtactagacaatgagcttcaaaaattttttcaaatgggatttgactcgagtttcagctatggacagttttgggacccaatttggtcggttataaacctgtgcttt

SEQ ID NO: 8092 - DNA, 690 bp, Gossypium hirsutum
  Clone ID: GOSHI-09MAY01-C17260_1
gatgatgatagcatcactagttcccaacttcatgatgggagtcataattggagctggttatataggtttgctaatgatgacagctgggtatttcagattgctgccagatctccctaagatattctggcgttaccctctttcttgtatcgactctggtgcatgggcattgcagggagcatacaagaatgatatggttgggcttgagtttgatggcttcatacctggtggtccaaaactgaaaggtgatgtcgtcctcacatccatgctaggcatccatctggatcattcaaagtggtgggacttaccacctgttataatgattttgatagcttatagattacttttcttcatcattctcaagttcaaggagagagtgtcaccattgtttcgaactctctatacatggcgaacattgcaccacatgaaaaaaccaccttcttttaggataacatcagccttcccatccaagaggcaccctgttctactttcactgtcttctcaagagggtctaaactctccttttcacttgaagcaccccatcatgagtaccattgtactgctcttactggaatttgattaccgaaactattggaaagagattatattataatttcatttggaatttcctgtttccccttttatttttccattgcttctaatatctgccgacttttctggcatttatggccc

SEQ ID NO: 8093 - DNA, 992 bp, Gossypium hirsutum
  Clone ID: GOSHI-09MAY01-C17210_2
ctagtttatggcaattttgatgaactttatttttccggttattctttggcaataacaattactattcttcttcttcatcatctcaacataaaagagctgcatgtcatagatggggttccacagcttatttttgtccgttcaagctacacaattgagacagttgaagcagaaaggatctctgtggatcatgttgcccatctaaagccatctggaggttcagcagcaactcaatgtaagcttgcttgcttgtagcattttctgtcaaaactgatattcgtatttgatcgaagcccccttttttttttgtattttatgattatcagggaattgtttatgtttgtatgtttttcctgcatccagtggctgctcagcttaccggtatacatagcgccatcaagatgttgaatagcagaatcagggtgcttcatcaatatcttgttggaatgcaaaaaggtgatattccttgcgaaagttcactgttaaggcaagtatcaagcctcctccgaaggttacctgcaattgaatcagaaaaatttcaagatgactttctaatggaatataacgacacattattgattacttatcttgctatgttcactaactgttcaagcacaatgaatgagctggtcgacaaattcaacaccacatacgatagacacagtcgaaggggtggccggactgctttcatctgagttttgtgtttttaaactcaatttgataacggaagaaagtgatatgatttaaccggtcaattggatagctcgtgttggttggaatttagttaatttggattttaaaattttcgaatcatggaaccaatgtatcttctgttagttttactcaatgatgtttaagtcaggctggattgttaggttggactggaaattagttgagctacgagtctggagaaagtcattagatcggttggcttgagaagtacggatcggttgaaatgtgtaaaaaattgattgaatcagatttttatttttctt

SEQ ID NO: 8094 - DNA, 1185 bp, Gossypium hirsutum
  Clone ID: GOSHI-09MAY01-C17210_1
gacaagcagctagcaaagggggggggggggaggaaagcatcaatttgagcggtaaacaaaaaaaaaaaaaaattggcaaatcaaaagaatggcgtcatcttctagcagcggtctaaccttcaagcttcatcctctggtaatcctggacatatcggatcactacactcgtgtcagggcccagtggaaccctccttctctcaccttcacctccgccaccgtcaatggcgtccaaaaccagcagcaagctcctcgagtctatggatgtgtcataggcgtccagaggggccgcaccgtcgagatcttcaacagcttcgagcttctctacgatccctccacccactccctcgaccgccccttcctcaagaagaaacaggagctttataagaaggttttcccccatttttatatacttggatggtactccactgggagcgatgcccaggaatccgatatgcacattcatagagccttgatggatattaatgaaagtcctctctatgtgcttctcaatcctgcaatcaatcccacgcaaaaagatcttccagtcaccatttatgaaagtgagctgcacgttatagatgggattccgcagcttatttttgtccgttcgagctacacaattgagactgttgaagctgagaggatctctgtggatcatgttgcccatctaaagccatctgatggaggttcagcagcaactcaattggctgctcatcttactggtatacatagtgccatcaagatgttgaatagcagaattagggtacttcatcactatcttgttgggatgcaaaaaggtgatattccttgcgaaaattcactattaaggcaagtatcaagtctcctcagaaggttacctgccattgaatcagaaaaatttcaggatgactttctgatggaatacaacgacacattattgattacttatcttgcaatgttcactaactgctcaagcacaatgaatgagctagtcgacaaattcaacactgcttatgataggcatagtcgaagaggtggacggactgctttcatttgaatgtgggtattgtttattagtaagttggatttttgttggggagaatggtgatgctgtttgtgtttgcagtgttttaaagcttcttaaataaggtaatatgatttgaagtactagtatggtattaatagggatatttaaacttcctagag

SEQ ID NO: 8095 - DNA, 459 bp, Gossypium hirsutum
  Clone ID: LIB3197-039-Q1-M1-E6
cccacgcgtccgagccctctctatgtgcttctaaatcctgcaatcaatcctgcccaaaaggatcttcccgtcacaatttatgaaagtgagctgcatgtcatagatggggttccacagcttatttttgtccgttcaagctacacaattgagacagttgaagcagaaaggatctctgtggatcatgttgcccatctaaagccatctggaggttcagcagcaactcaatggaattgtttatgtttgtatgtttttcctgcatccagtggctgctcagcttaccggtatacatagcgccatcaagatgttgaatagcagaatcagggtgcttcatcaatatcttgttggaatgcaaaaaggtgatattccttgcgaaagttcactgttaaggcaagtatcaagccttctccgaaggttacctgcaattgaatcagaaaaatttcaagatgactttctaatgga

SEQ ID NO: 8096 - DNA, 1076 bp, Gossypium hirsutum
  Clone ID: GOSHI-09MAY01-C17230_1
atcaaatccgacctgcgtttaaattcgccgagaatgtagccattttgcatgcctaaaatccacagacaagaagaagaaaaaaaaagaggaggaaatttaaaaattaaaatactttttaaaatataaatattcaatccctcgagtattttttttaatttcttttttctgcgacgataaaagagccacggttactttacatccacagtcgacgggctgactttgcggcggcccatggcgatcgtcgaccggcatcagcggagctccgaaaggaagatgtttagtctttgtcccttttggcacacttcgaccacgatgaacaactcttcctcttctttttccactaaaaatctcaaccacaatggcagccgacactcggagacggttgccgccaagcgctctaaatccgtctcatccattgctagatcgcttctccctccacggcgccggctgcgcctcgatccttctaataaactctatttcccttatgagcctggaactcaggcgagaagtgcgatcaggttgaagaacactagtaaatctcacgtagctttcaagtttcaaactactgcgccgaagagttgttttatgcgtccacctggtggtattttggcgccaggggaaagcattatcgcaaccgtgtttaaatttgtagagcgtccggagaataatgaggtgcaggtggatttaaagagtaaagttaaatttaagataatgagtttgaaggtaacagctggagtggattacttgcctgagctttttgatgaacaaagggatcaagtgactgtagaaagaattttgcgggttgtatttctagatatagggcggcctatccctgcattggacaaacttaagcgtcagttagctgaggccgatgctgcttttgaagcatgcaagaaacctgcccctgatacaggtccccgtgttgttggcgaaggtcttgttatcgatgaatggaaagagcgaagggaaaaatacctggcacgtcagcaagttgaagcggttgattcaacatgaagcggtgtttgatctgctgagagagctttctttttttttggttgaatcgtcaattatgactt

SEQ ID NO: 8097 - DNA, 573 bp, Gossypium hirsutum
  unsure (1)..(573): unsure at all n locations
  Clone ID: LIB3583-011-P1-K1-B6
ctggttttgtctgaaataaaaattagataatcattagtagaatgccatgtgagctggtgtaggcatgtgcaattgatcctttaaaatataagatattccttagactatttaaagtttcctaatattacgttttatttaatgcttacttgcttgttggttatatgttatttttattataattagattgtgtaccattattggatgtaaatccctgctaaacttgagatgctgatgccaacacagaacttttgattatgccttctcttttacagtttgatgaacaaagggatcaagtgactatagaaagaattctgcgggttgtatatctagatatggggcggcctagccctgcattggacaaacttaagcgtcagttagctgaggccgaggctgctctcgaagcacgcaagatacctgcccctgatacaggtccccgtgttgttggcgaaggtcttgtaatcgatgaatgggtaattgactgtctntatgtcttaaaccatgctaatttatccttntcttacttcttatgttactcgnattaaatgaattcagaaagagcgaggggaaaaatcc

SEQ ID NO: 8098 - DNA, 383 bp, Gossypium hirsutum
  unsure (1)..(383): unsure at all n locations
  Clone ID: LIB3148-017-Q1-K1-A8
gccgaccgcgtacaatccctgctaaacttgagaatgctgatgccatactacagaacttttgattatgnccttctcttttacnagtttgatgaacaagagggatcanagtgactattagaaagaattttgcgggttgtatttctagatatggggcggcctagccctgcattggacaaacttaagcgtcagttagctgaggccgaggctgctttcgaagcacgcaagaaacctgcccctgatacaggtccccgtgttgttggcgaaggtcttgtaatcgatgaatggaaagagcgaagggaaaaatacctggcacgtcagcaagttgaagcggtagattcaacatgaagcgatgtttgatcttgctgtgaatgctttctttcttc

SEQ ID NO: 8099 - DNA, 326 bp, Gossypium hirsutum
  Clone ID: LIB3148-017-Q1-K1-A3
gggtgacttagggtttgtcttggtttaatattctgggcctatcgggccttgtaaatttgggtttaagttaaaattgggttttgggtcatggtttagttattggttttgggctgatggggttatgtagctgggcttgttgtttgggttttgggtcaaagcctgtaaatggactgtggttattttactatttatttatttattttatatttatatataggtttggggtttttaaaaaaaaaaagacttgtaatcaatgaatggaaagagcgaagggaaaaatacctggcacgtcagcaagttgaagcggtagattcaacatgaagcga

SEQ ID NO: 8100 - DNA, 729 bp, Gossypium hirsutum
  Clone ID: GOSHI-09MAY01-C10990_1
gccttgtttttcctacaaaaacgtaggagttgagggatggttttgttaaaattaaagttcctattggcgatctcctttggtcgacaatcgacaatccccacccagcagctaacttcttgtttttatttttgttcttcagtctgaaaatcagtgagagatcgaagagatggcctttttccttggacaaagtagccttgcgaaccacttccgatcttatcagaaggcagaggcttccatggctgtgccaacacgagcatttcatgttgaacttggggatcgtgagaaagctctcttggcaaaggacccttcgttaagtcgttttaaatcttataagaagagtgtgtcgacactgaagagaattggggatgttcttacagttgttgttgtagcaggttgttgctatgaaatttatgtcaaggcagtaatgcgagaagaagctaggaacaaggcaaaggctggtggtggaagtaaatgaggctgtgcaagctttggcctgtgtgtggaaacgaaaaagtggatgtcagcatttcatcttgtttttggcaatgctgttttagattttaaagattttgcctagtgataaataagcaaaactgacatatgttatgacattgttgaagaccctagtctgcaaatttccatcatgttctcatcatatgaattctgtcataaaaaaaaatgatgattccaataattatagaaactagcccggtaatagggtttgggagt

SEQ ID NO: 8101 - DNA, 502 bp, Gossypium hirsutum
  Clone ID: GOSHI-09MAY01-C10880_1
tcgtttacgcgtccggttataatacacttccatcttccaaccaaattaatctttcttaacatatacattcatgcggatgagttgcaacggttgtcgagtccttcgcaaacgctgtactgatagctgcactataagaccttgtctccaatggaggcctagcgctcaatcccaagccaacgccacccttttccttgctaaattctacggccgtgctggtcttattaatcttatttgtgctggccctcagaatctccgtcctggagtttttaaatcattgctatacgaagcatgcggtcggatagtggacccagttcatggttcggtcgggttgatgtgctccgggaactggcatctgtgtgaagcagccgtcgacgcggttttaaacggtgcgccgattaacaagttccttctgaattgtcggctaccaagtgcccgccgcttaaatcctcctttgacattcgacacgtttcaaaagacagaaatccaatgatgggcttcgcaa

SEQ ID NO: 8102 - DNA, 599 bp, Gossypium hirsutum
  Clone ID: GOSHI-09MAY01-C10840_1
tcgcaagcagtgggcgccagttttcagtgaacttcctcttggcccacaacgaaagcaacaaagcacttcatctttgcaattcagtttcatggggcccaagctttttgtgaacactactccggttgatgtgggtaagaggccagtgactggcctccgactatatctagaaggtaaaaggagtaatcgcttggccatccacttgcagcatctttcctctcttccaaaaatcttccaacttgtagatgatccaaatgagaacttcagccaaatgtctcgtgatcgtaaatactatgagaaagtttattggaagaactactctcatgtatgcactgctcctgtcgaggctgaagaggatctttccatagtaactggagcacaactgcaggttgagaatcatggttttaaaaatattctctttttacggctacgcttttcaactgtcttgggagctatgtctcttaagcagccagaatgggatggatcacctgggttggcacctatttcaggactcatatcggcactaatcagtcatctcttcccacccgttcaggggccatctcccaggtccagtgatgtgactttaatctttgttttttttc

SEQ ID NO: 8103 - DNA, 891 bp, Gossypium hirsutum
  Clone ID: GOSHI-09MAY01-C110598_1
tatgttgtggctaggtcatcggagtatcctgaggggcagttgattacagataagttgttggagacattggaggaatttgtgagggatagagctaaaaagccaacgagtccagagagaaaggagcttcctcctccacctaaagaggaagagcttgaaccaaatatgaatgaaataaaggcgctacctgcacctgagaattatgctccaccaccgccaccatcagagccggagcctgttaaacctgcagaaccccaggaggatttagtgaatttgagggatgatgttgtcacagccgatgatcagggaaacaaatttgctttggctttgtttagtggtcctgcagcaaataatggtaatggatcatgggaagcattcccatcaaatgggcagcctgaagtgacatctgcttggcaaaccccagctgctgaaccagggaaggcagattgggaattggctttggttgagtcagctagtaacttgtcgaggcaaaaagcagctttgggtggtgggcttgatccattattgttgaatggcatgtatgatcagggaatggtaaggcagcatgttagctctggtcagttaagtggggggagtgccagtagtgtggcattgccagggccggggaagacaccggttttagctcttcctgcaccagatggaacagttcagaatgtcaatcaagacccatttgctgcgtcattgagcattccacctcctttatatgtgcaaatggctgacatggaaaagaagcaacatttacttgtccaggaacagcaggtatggcagcaatattaaaggatggatcaaggtcattctagtttggcaagattacaccctggatatatggacctgaccgatgccgtgacccttatggatgcccctgttatggat

SEQ ID NO: 8104 - DNA, 647 bp, Gossypium hirsutum
  Clone ID: GOSHI-09MAY01-C10490_1
cccacgcgtccgctcgttcaagatctactcggaagacagcaacatcgtcgtcgactctttccaccgatacagtcgggattcgactgggcaccaggggccaggcgccagttgcgccagtgagggcatcgtcgtcgaccagaacttccactcctatgccgcctccgcccctggcggctccggatacttcaacatctacttccgtggaggcaacaatcccaatctccgtttctcttcatttggggatgactccggcgggcgtgggcagacattcacgctgttcacagagaatgccaacgccgggaacgggcagtcattctcgagttctggagtaaacggtagcggcgttcctaacgaagtctgtagttgcgggaaaggagccattgtgattgggtcaggtttttccggttctggagaagcagcctatggggcgattgacagtttctcttcgttcggattcgtctcttctgcttcccgtaatacgttcaagagttactgagacgggggatatgcgtttggttctcgcttttctcaagcttttcgcgatctatccctttggggggtggacgattgctttcccgtgcttgcgcccgattttccccttgggtatagtaaagtttgttttttttctaatcttttggccccttcct

SEQ ID NO: 8105 - DNA, 1150 bp, Gossypium hirsutum
  Clone ID: GOSHI-09MAY01-C10480_1
gggctgtcaaggctgaagacatgttggaaacagtcctgccagtctcgaatcctttgattgctccaacccccacaggggacagaacctgttctggcaagctgtccatcaatgcaagcatcccagcaacacagaagctcagtcatggctagcagattgtaccgtcaaataaagcaagaagtcgagcctgagccctactggttccctcaactcccacctattgacccctctctcccctctcgcggctgtagccacggattccacttctctgttgagagttccaaggaaagatttttgctctttggagtcatcctctgcaaatggcagttataatgcctacaactctacatcacttgtcggtttctcaccaaatggaagcccaacgtcacagcaagattctcagtcgtatccatccgacttgcatcactctcctgacaataatggtggctctcctattagtggttcctgcgtaaccgatgatgtaagtgatttgagggataagctgaaagagctggaaactgtgatgttgggccctgattctgatgttattgacagtaagacctcaccagagatgggcacctggagacttgtaacagatgcaatctccagaggggacttaaaacaggtccttgtcttttgtgcaaaagccatgtcagataatgatctcttgatggcacagtggttaatggatgaattacgccgaatggtgtcggtttctggggagccaatccagaggttgggagcctacatgttggaagggctagtggcacgactagcctcatcagggagctcaatctatgaggctttgcgaggcaaagaaccaaacagtgctgacctattatcttacatgcacattctttatgaggtttgcccctacttaaagttaggctacctgtctgcgaatggagccattgcaaaggccatgaaagatgaagatagagttcatattatcgattaccaaatagctcaggggagtcagtggatcactctcatccaagcatttgcagctaggcctggtggaccaccccatatccaaataactggtattgatgattccacatctgcatatgcccgtggaggaagcctaaacattgtgggaaagaggctgtctaagcttgcaaggtattttaaagtgccatttgaattccatgct

SEQ ID NO: 8106 - DNA, 402 bp, Gossypium hirsutum
  unsure (1)..(402): unsure at all n locations
  Clone ID: LIB3166-026-P1-K1-E10
gaaagggcggggggacccacgcggccgcccacacgtacggttgggatccttcnttttggaagggctagaggcacggggcggctccttagggagctcaatctataaagctttgcgatgcaaagaaccaaagagtgctgatctattatcttacatgcacattctttatgaggtttgcccctacttaaagtttggctacatgtctgcaaatggagccattgcagaggccatgaaagatgaagatagagctcatattatcgatttccaaatagctcaggggagtcagtggatcactctcatccaagcatttgcagctaggcctggtggaccaccccatatccgaataacttggattgatgattccacatctgcatatgcccttggaggaggcctaaacattgtggg

SEQ ID NO: 8107 - DNA, 1084 bp, Gossypium hirsutum
  Clone ID: GOSHI-09MAY01-C10460_1
cccacgcgtccgcccacgcgtccttaaatatcagccaaacagttccctcaccttcagataaatcaaaataagtaaaagaagaaggaacaagtgctttgaaatccaaacttgagattcagcgaaccttctccacattcaaagcaaatcaaagggcacattgatgactttagttccaggccaatcgacccttcatcgccatcgtctgcatagaatctggcactccatcatcccagcccccaaaagcctgtcttctcagaccttccaagctaacgtgtgcgccgctccattcaccattcgaggcccaaagagtgaatcaccttccacgatcagtcgtcggaagcccatagcacccgctaaaagtagagccctttcgcatgcccgtgcctccgccacaaaagcatcaaccacatccttaaaaagataagtccccgcccccacaatttctccttccgaatttctagctaaaactgatgttatagcgattctatcaacactttgaaaagtcgcatcaaattttaacttaataactccagtgtctgggggtttccaaatttcatttgctatagatctaaaggatggacagaagttctattgattaagaataagttcttgattataccctctaataaaccccaatagctcctgcaaagaaaactttacacttcatgtatcaatttattccttcgatgccataaaccttattagggaagaacccttaattggccttgggtttcctccggctccaccaagcgtcctagcaaaacgaatcttacaacttatcaaagcttaacgatgcccatacacactgtaagaaatcacaggaccacatcaggtgatcagcatcctctggatctttcttgcacaaagggctgacagtttcaacactcaaagttctacgcgctaggttgcagaaatggggcaaaaaattattaaacatcctccatatgtgtatttttacttttgcaggaatgtgtaaagcccataatgatttgtaaaattcattgtattcctcaccgttaggggaagtgtctaaagtattctgtatgtgttctgaagataagacccgatacccacttttaattgt

SEQ ID NO: 8108 - DNA, 759 bp, Gossypium hirsutum
  Clone ID: GOSHI-09MAY01-C10410_1
gtgatagagcaaaacaaccttggtttttttctgtcttcattcaggcatgcaagtttaagatggttctagcatatattgaagttgttttatgtattctataatagatgttctgtagggaggatcggtagaggttatacctggaacttcgtgaatatactgtgaattgatatagaatggaggatgaaaatgggctggagcttagcttgggtctatcttacagtacgttgtctgccaaatctaaaggcaaaattagtagttcttcagatactaggacagaagaaggctataaaggcgtcgaaattgtggatgactttaaaaactttcttcaaaccagaacccagaaacaggaccctggtgtcagttctcacagaagtgatccagtgaaacctttggaaaacttctttatatgtatctttccaaggctgctggtgatgcgagaagcctctgtgaacttgaatggtaagcgtaagattttgtttgatgagataaacaatccaaagaagcttgagagagaagctcatcatgttgatttatctgaaaaacccaaaacatcacatatctccatgacaacagaagatggctctactgcggagaatgaagatgtagctgaatctgaagttgagggttcacccttgaggctagtttcacgtcatgatgatggttccaagcggtttattggagttagtgattcttctgaggtgccgaaggaggttaagcttggaaacttgaattacggcaatccatgcccggttcaatctg

SEQ ID NO: 8109 - DNA, 448 bp, Gossypium hirsutum
  Clone ID: GOSHI-09MAY01-C10400_2
ttctcggtggttatgatagagatggtcctcaattatacatggttgaaccatctggcatctcttatagatactttggtgctgcaattgggaagggaaaacaagctgccaaaacagaaattgaaaagttgaatctgtccgaaatgacatgcagagaaggggttattgaagtagccaaaatcatctacaaggtacatgatgaagcaaaggataaggcctttgaacttgagatgagttgggtctgcgatgaatcaaagcaacaacatcaaaaggttcctgatgacctgttagaggaagccaaggttgctgctaggactgcactagaagagatggatgctgattaaattgtcagtgaagccagaatagtctttgctattgatattctcatcttcatgaatccccattgttatggtttaaactttcctcgtatcattttcatataagatccctg

SEQ ID NO: 8110 - DNA, 1117 bp, Gossypium hirsutum
  Clone ID: GOSHI-09MAY01-C10400_1
gcccgcgcgaactagtgggggaaaaaagcagagaagaagaaacaaagatgagcagcatcggaactggttacgatctctctgtcaccactttctctcccgacggacgcgttttccagatcgagtacgccgccaaagccgtcgataacagcggaactgtgattggaattaaatgcaaagatgggatcgttatgggagtggagaagctgatagcatcaaagatgatgttacctggttctaatcgtagaatccactcggttcatcgtcattccggcatggcagtggctggattagcagctgacgggagacaaattgtggcccgtgctaaatctgaagctactaattaccaaagtgtgtatggtgaacccattcctgtcaaagaacttgctgaacgtgttgcaagttatgtgcatttatgcaccctttactggtggctcaggccctttggctgtgggataattctcggaggttatgacagagatggtccccaattatatatggttgaaccatctggcatctcctatagatattttggtgctgcaattgggaagggaaagcaagctgccaaaacggaaattgaaaagttgaagctgtcagaaatgacctgcagggaaggggttattgaagtagccaaaatcatctacaaagtacatgatgaagcgaaggacaaggcctttgaactggaaatgagttgggtctgtgatgagtcaaagcaacaacatcaaaaggttcctgatgaccttttagaggaagccaaggttgcagctaggactgcattggaagaaatggatgctgactaatgattttaccggagacagaatcatcttgttgtcttatgtatttcgatcttcaccaagttcccaatgttatggaccgtcaaaattaaaaaaggagtgagtgcctgattaaacagggtctttctaagatcatatgagcagcaggcatttggatgagatcatggattcaaaaaaccttggaactgtactgtagattttttaggcatcacgtagactttgccagtggcaactactgtgaaggttgttgagaaacatctttctaggtttggtgtgtataccgctaaacaatatattgcttttacaggggctatattttcgaagtc

SEQ ID NO: 8111 - DNA, 666 bp, Gossypium hirsutum
  Clone ID: GOSHI-09MAY01-C10420_1
attgagttcagtagttcctcatataaaattattgcctctagagatatagtaatatggagaagacaaaattgtttcaagccccgacagccccagaagcgccccttgtttcaaagagaggaggacgggttattcacatttcatttgatggtcagaggcgaattgaaagctaagcagtggtaattctaaagattccccgggggaaaaatagagatgtctcctacgttacccataatatgtggaagtatcgacgtaatttcatagagtcattcggtctgaatgctacatgaagaacataagccagatgacggaacgggaagacctaggatgtagaagatcataacatgagtggttcgacagatttggattcctatatatccactcatgtggtacttcattgtacaatatatataagaattatacgataagaattatacgaatccatctgtatagatatcatcatctacatccagaaagccgtatgctttggaagaagcttgtacagtttgggaaggggttttgattgatcgatcaaaaagaagaatctacttcaaccgatatgcccttaggcacggccatacataacatagaaatcacacttggaaggggtggacaattagctagagcagcgggtgctgttgcgaaactgattgcaaaggaggggaaatc

SEQ ID NO: 8112 - DNA, 589 bp, Gossypium hirsutum
  Clone ID: GOSHI-09MAY01-C10750_1
cttaaattcaaaaccatatttctttaaatttataggttcctgaatccggttttgcttacgggattttcaacccttcgtcgcttaaatttgatattttgcttctgggtggtgagaaattgcttgtacaagcttcaccattctctttgattgattaggcatggatgagcaattcattcttagagttccaccttctgtcgctgaacgcataaatcgtcttttaagtgaaaacgcttcatcttccgaggacaaatcactggatttggaattttctgaggatggacggaccggcacatttgtcattggcaatgatcgtttccctgcatctgtccttgatctaccttgtgttgttgagtcatacaaaacttacgacgatagtgcattggttaaaacagctgatgtcggtcaaatgattttggtcagagagtctggagaagcttctccagatgtggtggaatacagacacggtctaactcctccattgagggatgctcggaagcgaagatttcgaagggagccagatctaaatccagagcttgtacaacgtgtagaaaaagatttggtgaacatcatgtctggaggaacagttgaa

SEQ ID NO: 8113 - DNA, 591 bp, Gossypium hirsutum
  Clone ID: GOSHI-09MAY01-C110728_1
ttcacgcgtccgcccacgcgtccgcccacgcgtccgcccacgcgtccggtacaatctaagtctccctgtgagaaaatggcatcctaccaaatcttagctttcgcagctttgttcttgatcttgttacccgtagccgtcaatggagatttaggtgacttatctcctgctctatctcctttctatgataggttgtgtgatgatgttgattgtggaaagggaacatgcaaagcggacataagctaccctttgaactacatctgtgagtgtgatgctggttggaaaagaactcaagacgacagtgatgatgatgatgatcataagtttctgccatgcgttattcccaactgcactcttgactactcttgtcaaccagctcctcctccagtacctcagcgagaagttcctcgcaattcatctttatttgatccttgctattgggcatactgtggagaaggaacctgcaacaaaactgcaacatacaagtacgtatgcgaatgcagatctgggttttccaatcttctcaataggacatacttcccttgctacagtcaatgtaccctcggatccgattgctcccgccttgggattacg

SEQ ID NO: 8114 - DNA, 941 bp, Gossypium hirsutum
  Clone ID: GOSHI-09MAY01-C10730_1
cccacgcgtccgataaaataaacatataaacaagtaccaccaaacctcctttttggcgccaagttcatgaacttaaatcctttgtttctcctatataaatccctctttccctcaaccagtcttcctcagctactattgatcccctcgcgcccgggaaaacaaaaacactactatatatcaccatgccttcttcgccttcttttactcttgtgtctagatgcacggtttccccagaccaaatatctgacatcaaaaccttaaagctttcggtttctgacatccctatgctttcatgtcagtacattcaaaaaggggttttgctcacttctcctccttattcgttcgacgacctcgtgtgcttccttaaacaatccctgtccactactctctcctacttccctcctttggctggtcgtctcaccactgaccccgacggtcacgtccacatcaactgcaacgatgccggcattgacttcctcgttgtgaaatcccccaatatttccattcacaacgttttggtccccggcgatgtccccgattgtgtcaaacagtttttcactttcgacaagacacttagttactcaggccacttcaagcccttagctgcagttcaagttaccgagttggccgacggggtctttattgggtgtatagtgaatcacgctgtgaccgatgggacttcattctggcactttttcaacactttcgctgagatcaccaaaggggctttaaaaatatcgaaatctcccgattttggtcggaacaccgtgtttaattcccaagccgtgcttaaattccctcccggaggacccaccgttactttcgccggcgacgagccgttgagggaaaggattcttcatttcagcagagaagcgattttaaaacttaaatacagagctaattacggttgtttattaactaaacaaacgaattctcgagtc

SEQ ID NO: 8115 - DNA, 584 bp, Gossypium hirsutum
  Clone ID: GOSHI-09MAY01-C10600_2
aatatataatttaaaagaaaaaagaaaagaaattgtttcttcttttctgggtttcaattcgcccattttcttccggttcttcttgttttgaatttttcctttgttttataaatcgaattcgaagatgggttcttgttcctttcttcttttgttgttctatataactgctggctgttcaatacgctgcgttttgggttctccgatttgctcccatgaagctgatgtgttcattgaaaaccttcgatttcaatgctctccttcgttatctccaatcccccctctcgaggtggatggaaacttcctggacagagcattgacttccaaacagagaaatggtcacgtttccgtgctcctttatgcttcttggtgcccattttcacgaagattgcgtccgaattttgacattatcggtcccatgtttcctcagttggagcatctggcagttgaggagtcttcaccttccccaaggtgtgttgctactttcttgcttccgaatgttttacaaaccctgtgaagtaatttcaattcaattatatattttggctgttggtttgatccaattggtttggggatattatcctcct

SEQ ID NO: 8116 - DNA, 793 bp, Gossypium hirsutum
  Clone ID: GOSHI-09MAY01-C10600_1
ccaaattcataatccccaaagtccaaattttaaaccttgggttttttctttttcttttaataaaattaacagccaaccaagcttggccaaagattagattttttttctttttacccactacgaaaaaaatagcacacagctaccaccttccctgcctttctcccaaaatttatattaattttcttttaatttttactttttttctggatatcaattttcccattttctcctgcttcatcttcttgttattgtgaattttctgttcttttttttctctcttttttaattttataaatgaaattcaaaatgggtttttcttcatcatcatcatcatcatcttcctctcttcttctgttcttctgtataacagtcttttgttcaatacgctgtgttttgggttcttctatttgctcccatgaagctgatgtgttcattaaaaatattcactttcaatgctctccttcgatctctccaattccccctctcaaggttaatggagacttccttgacagacaattgacctccaaacagcaaaatggttatacttctgtgctcttttacgcttcgtggtgccccgttttcacatgggtttgcgtccgaaatttgacattctcagttccatgtttcctcagttggagcatctggcagttgagcagtcttcagcttcaccaagtatattttcgaggttcggaattcatagtttgccatcaattctaattgtcaaccagacatcaagggtacaatatcgtggtccaaaagatctcccttcaatagaacaattttatgagaaaat

SEQ ID NO: 8117 - DNA, 564 bp, Gossypium hirsutum
  Clone ID: GOSHI-09MAY01-C10620_1
ccttctcgtccggtgatcccattgtgcaaagctgtgttagaagcctatagggatcttggataccggggcaataggcaaaagactagaatgatgtggctgattgatgaactggggattgaagtgttcagatcagaggtagccaaaagaatgcctcagaaagagttggagagagcatctgatgaaggtttggttcaaaagcaatgggaaaggagagactacctcggtgtccatccgcaaaagcaagaaggtttcagctacattggcattcacatcccagtcggtcgcgtccaagctgacgacatggacgaactagcccggttagccgacatgtatggctcgggcgaactcagactcactgtggagcaaaacatcataatccccaacgttgagaactcgaaactagaagcattacccaacgagcctctattgaaagatcggttttcaccccaaccaagtattctcatgaaagggctagtagcttgtactggtaaccagttttgcggacaagccattattgaaacaaaagctagagccttgaaggtgacggaagaggctgaaaggcta

SEQ ID NO: 8118 - DNA, 1367 bp, Gossypium hirsutum
  Clone ID: GOSHI-09MAY01-C10180_1
atttgtagctatggtgcttcatttccctctcctttgcctctcaaccttttatggagagagggacatccttatttcgttgctaagattaaagtttatgttctccaatatagtatctttttattccccttttcttgcattatttatctaggctgggaaaagttgatatgtctaagcactgcatgttcattgcacaacattatgtgccttgctttttagttttcctgtaactatttcttcaaaaataaaaaaatcctgttattaaatttctgtcttgtatgtgctataaggtccgcaaaagaccattaaacaagaaggagatttctcggaaggaggatgatatagtaactgtccgtgagaatgctttaactgtccatgaaccgaagctaaaggtggacttgacagcgtatgtagaaaaacatgagttctgttttgatgctgttctggatgagcatgttacaaatgacgaggtttatcgggaaactgttgagccgattattcccataatctttcagcgaacaaaagccacttgttttgcatatgggcaaacaggtagtggtaagacgttcacaatgcaaccattacctctcagagctgcacaagacctcattagattcttgcatcagccagtttatcacagtcagagatttaaattgtggcttagctattttgagatatatggtggaaaactcttcgaccttctgagtgatagaaagaaactttgtatgagagaagatgggagacaacaagtctgcattgttggattgcaagaatttgaggtgtcagacgtgcaaattgtgaaggaatacattgagagaggaaatgccgctagaagcacaggatctactggtgcaaatgaggaatcttcaaggtcacatgcaattttacaacttgtcatcaagaagcacccagagataaaggagtccaagtggaaaaatgatggggatgagtcaaaacctgggaaggttgtaggaaagatttcttttattgatcttgctggcagcgaaagaggtgctgataccactgacaatgaccggcaaactaggattgaaggtgctgaaataaataaaagccttttggctcttaaggagtgcattcgtgcgctagacaatgaccagatccatatacctttccgtgggagcaaactcactgaagtacttcgtgactcctttgttggcaattcaaggacagttatgatctcctgtatttctccaaatgcaggatcatgtgaacatactctcaatactctgagatatgctgatagggttaagagtctttccaaaagtggtaatccaaaaaaagagcaggcggtaaattcttttcaaccaagtaataaggatgcttcttcagcatcgtctctgttacctact

SEQ ID NO: 8119 - DNA, 551 bp, Gossypium hirsutum
  Clone ID: GOSHI-09MAY01-C10170_1
gttctattcgtgaggaagccgggaaggttttgactgctaacttgaaaggaaggccggcgtttgaagccgatgaccagtcagctttgatttacttgttgctttctcaaaaggaaatgtggatggataaagtgtttctcgagaatcagtattatttgcatggttattgggcaggtttggttgataggtacgaggagatgatggagaaatatcatccaggtttgggagatgagaggtggccgtttgtgactcatttcgttggttgcaaaccctgtgggagttacggagattaccctgtcgagaggtgtttgcgcagtatgcaaagggcattcaactttgccgataaccaggtgcttaagctgtacgggtttagacatagaggattgttaggccccaatattaagaggatcaggaacgagacggtgactcctttggaaatcgttgatgagcttgatattcgacgatcaacgcacgagaaagccgaaacacggagctagtgatggaaaagatatataatgtgccataatgtgtaggtaatggtcattccttttgat

SEQ ID NO: 8120 - DNA, 1075 bp, Gossypium hirsutum
  Clone ID: GOSHI-09MAY01-C10160_1
ttccggtacttaccgggtcggagccgacgcgtccgaaacatcctttcttcatgagagaaagatgttatgagccaagtgtagctcaattggccggagggcgatgaggatactttacaaggtgaccgtagggtgatgacaagtatcttattgcaacagccgaacagcccctctgtgcttaccacgtggatgattggatccagccctcggagctacctataaggtatgctggattttcgtcttgctttcgtaaagaagccggttcacatggccgtgatactttggggattttccgggttcatcaatttgagaaagtggagcaattctgcattaccagcccaaatggcaatgattcgtgggacatgcacgaggaaatgttgaagaactctgaggaattttatcaggagataaagctaccttatcaaatcgtcgccattgtttctggcgctcttaatgatgccgctgccaagaaatatgatttggaagcatggtttcctgcatctcaaacttacagagagctggtgtcttgctcggattgggcagagtatcaatcaaggcgactgggaaatcagatacgggcagaaaaagaacaatgaacaggcaaaaaacccaatatgttcatctgttgaactcgactctcaccgcaacagaaaggaccatgtgctgcatacttgagacttaccagaaagaagatggtgtcgaaatacccgaaggtttacaaccgtacatgggcgggaagtctttcctgcctttcaagaccaagccggcacctgaagctaaagggaagaaatcaaaggcctagtaaggctcaaattggctaaaactatttttgttgctctgaaattgtttgtctttaaccttttctttatgatgaaacttgagtataccattgaattatttgtggtacattgcaaaagataagccgaatccccgccttgataccacgtttcgaggtgttgttggaacaaggagaaggtgacatttaaggatttgtataaccgttgtagttttaagttttaagttttaattgaatgttttctcattgatgtacaatagaatggatttttgttcttttttg

SEQ ID NO: 8121 - DNA, 474 bp, Gossypium hirsutum
  Clone ID: GOSHI-09MAY01-C10110_1
cccacgcgtccggagaattcagcgggcttttgcgtcagagagataaagaagctccaagatgaactgagagtggtttccaattcttggtgtgcatcatgaaactcatggcccctttgcctcttttctgtgtaatttacagttgatggatacaaatgcttagctttggtatattatcagagagtatatctccaattcagaggtatatttgatgagataattattgtgttctgcttggaacttgtttgttagagctattgtgttttgctgttgttaagttcttgaaggggaaattggcatgaatttattgtaaatttttatttggtattggtttattagtatatattatcctcttaagtgtgaacgtccccagggcggcgtgactgtgcgcaggcactaaagtaatagcttgtgtattcttgtgtggctgagcattagcaactacttttagttcaagggaaaaaggtgccatttcct

SEQ ID NO: 8122 - DNA, 383 bp, Gossypium hirsutum
  Clone ID: LIB3166-022-P1-K1-B7
gcaaggcttccaacctcagaggagctcgatgcctatgcacatgagcaatgggagtgtttcttgctgcaacttataagttcaagacaagcccaaaaatcaacgagcttcagctcttccatgatgagaatttttcagcgaggtcttttgcgtcagagagataaagaagctccaagattaaccgagagtggtttccaattcttgttgatggatacaaatgctcagctttggtatattatcagagagtatatctccaattcagaggagcaaggtgtcgatcaagcacacttaatcagcttttttgctagaacttaattttcatacccctggagaggcatatagtttagatacactgactgatgaccagacaactatgatcaaggacc

SEQ ID NO: 8123 - DNA, 374 bp, Gossypium hirsutum
  Clone ID: LIB3147-022-Q1-K1-F5
atcaaactctatatgatctacaatgtgttggagtgtttcttgctgcaacttataagttcaggacaaactgaaaaatcaacgagcttcagctcttccatgatgagaatttttcagcgtggtcttttgcgtcagagagattaactgagagtggtttccaattcttggtgtgcatcatgaaactcatggcccttttgcctcttttctggttgtctatcacctaaaattacttctcatctgtgtaatttacagttgatggatacaaatgctcagctttggtatattatcagagagtatatctccaattcagaagtatatttgatgagataattattgtgttctgcttggaacttgtttgttagagctattgtgtttac

SEQ ID NO: 8124 - DNA, 522 bp, Gossypium hirsutum
  Clone ID: GOSHI-09MAY01-C10080_2
cccggtccggtattccgggcgggccgaccctcgcgtccaactggattggctcctttcatgggattccttcaggaaaggcttgcactgaaagaagctggtgctgagttgggtccatctgtattgttctttggctgcagaaaccggaaaatggatttcatttacgaagatgagctcaacaactttgtcaacagtggtgcactttctgagcttgtggttgccttttcacgcgagggacctaccaaggaatatgtgcaacataaaatgatggagaaggccttggacatctgggacatgatttctcagggaggttacctgtatgtgtgtggtgatgccaagggcatggctagagacgtgcatcgagcccttctcactattttccaagagcagggatctctagacagctcaaaggctgagagcatggtgaaaaatctgcatacgaccggcaggtatctgcgtgatgtatggtaactgactacaccatgaaaatgcagaaagaaaagaaatggctttatatattatata

SEQ ID NO: 8125 - DNA, 1183 bp, Gossypium hirsutum
  Clone ID: GOSHI-09MAY01-C10080_1
agccgatcgactaaaaaccttgcatcacctgctggaaggatgagtatgcacaatggattgttgcaaaccagtgttgtctccttgaggtcatggcggaatttccttcagccaagcctccgcttggtgttttctttgcagctgttgctccaaggttgcagcctagatattattcgatatcatcctcaccaaggttggcaccatcaaggattcatgtaacttgtgcattggtttatgagaaaacgccaacaggtcgtattcacaaaggtgtttgttcaacttggatgaagaatgctgtgtcctcggggaaaagcgatgactgcagctgggcacccatttttgtcaggcaatcaaactttaaacttccttcagatactaaagtgcccatcataatgattggccctggtactggattggctcctttcaggggattccttcaggaaaggcttgcactgaaagaagctggtgctgagttgggtccatctgtattgttctttggctgcagaaaccggaaaatggatttcatatatgaagatgagctcaacaactttgtcaacagtggtgcactatctgagcttgtggttgccttttcacgtgagggacctaccaaggaatatgtgcaacataaaatgatggagaaggccaaggacatatgggacatgatttctcagggaggttacctgtatgtgtgtggtgatgccaagggcatggctagagatgttcatcgagctcttcacactattttccaagagcagggatcactagacagctcaaaggctgagagcatggtgaaaaatctgcaaatgagcggcaggtacctacgcgatgtatggtgatgattacgatgaaagaaactttataaaaatatacggcggtcaaaaagaaacttgcgagaagggttaaatgggtggaattgaatttattttgtatcaaagttaagaagtgttgcgattcttttatatatatattagtgtcgggataattttggatgatatgatgtaatattttaatatagaagacaatgtaatataatggagaaggtagagtaatggtattggaatttgtcttttataagaaagaaccggcaaatcggttcaaatgacaagcagcaagtgttgcttgctactccgaaatgttactcaactcttcctatctactggtaatatatgtttaagtttggaatctc

SEQ ID NO: 8126 - DNA, 410 bp, Gossypium hirsutum
  Clone ID: uC-gsronu33B077d05b1
cttattcgcccaccataatgattggccctggcactgggttggctttttacaggggtttccgtcaggaacggctcgcactgaaagaagctggtgctgagtcgcgtccacctgtattgctctttggctgcagaaaccggaaaatggacttcatatatgaagatgagctcaacaactttgtcaacagtggtgcactatctgagcttgtggcagccttttcacgtgagggacccaccaaggaatatgtgcaacataaaatgatggagaaggccaaggacatatgggacatgctttcccagggaggttacctgtatgtgcgtggcgatgccaagggcatggccagagatgcccagcgagctcttgacactatggaggatgctcagaaagcccgaatcagctcaaaggctatgagc

SEQ ID NO: 8127 - DNA, 453 bp, Gossypium hirsutum
  Clone ID: GOSHI-09MAY01-C110078_1
ttaactttatggccagatgcattttgtccaatcctaaagctcaggctttgacaccagaagaactgcagaaaactctgcttaaatcattgggaggcgtcacccacgcgcgcattgctttgggcatttggcatgctggaaagttggtctatgcgttgtcaacctggggacttgcactggttgggttatatagagcccgtagtgtggtaaaagttgctgcaatgggcatccacacgaccagcaaagttgtaatgagggctctatgaatttattgctccaatatcagataaaaagataaggtctgtttgaactgtattattctttcaattctcggttggtttgtttaaaatccttcttgttgctgtaaaatgtacatgttgtaaatatatttgaaatactcttttaatgaatcaattgtattgcttcagaatgaaaaaaaacagaaaaaaaattgaa

SEQ ID NO: 8128 - DNA, 561 bp, Gossypium hirsutum
  Clone ID: GOSHI-09MAY01-C10010_1
aggggctgtattttccagctctacaggaatcagctgatccgccataaagatttcttgttcctttgctgtcatacatagggaaaacatgaccccctccttctttccaagaaaaaacctccttacctcatccatcttctccctcctatttataaattccccagcgcatctcaacattcatacaaacttttaaattcccttgaaaaacatagtatattgtcattaggagtcaatggcagggattggtaaaacggctccagatttcgaggacttattgccggcgatggcggagaagctggggggagacgggctgatgagggagttgtgtaatgggttcaagctgttgatggacgaggagaaaggggtgatcactgcggcgagcttgaagaggaacgctgctgtgctggggttgcaagatttgagagacgatgagctggcgagcatggtaagggaaggtgatctcgacggcgatggggctctcagtgaaatggaattttgtgtgttgatgttcagattaagccctggcttgatggaagagtcccgattattgctggaagagatgct

SEQ ID NO: 8129 - DNA, 945 bp, Gossypium hirsutum
  Clone ID: GOSHI-09MAY01-C10340_1
cataaatacccttttaccaaaggagtatacattaaaacatagcccaactcttcgttttcttcaagcggaaaacagaaaactgaggctttcccttctcaaatggcaccgagggagaaaacggcggccgtcaagggtactgggaataataacgaggttcatttcagaggagtaaggaagcgtccatgggggcgttacgctgctgagatcagagatccagggaagaagagccgtgtttggctaggaacctttgatacggccgaggaagcagccagagcctacgacgccgccgctagggaatttcgcggcgccaaggccaagactaattttccggtcccttgtgagaatctcagcaaaggtaataactgtaaaagtaatggtaacaacaaccaccatagccctagccagagtagcaccgtggaatcctcgagccgtgagccggcgctcatggttgactcttcgcctttagatctcaacctcgtacaaggtgaggcggttaccggttacgtgcctacggctgttagatttcctttccagcaagcttcaccggtgccatatattgcgggccgcaaagttttctactttgaaccattcgttcggcctggtgcagtgaaaggacacccatttgaacggtttggattcgatcatcatgatcttcatgcgacgtttaatggtgtacaaagcgactctgactcatcatccgtcgttgatttgaaccaccatgaggtcaagtcgcgcccgcttctcaatatcgatctcaaccaacctgccgttccggaaattgcctgatttttttttaatattcgcagatcgtcaaagaggaaaggtcaaaaaaacgagttttttaaattttcgttgtttaaacacatttttcttagcagtcccaaggaaatatcgaaggtagattttacagcgaaatcagtccaaacagaaaaaaaaaggccggcc

SEQ ID NO: 8130 - DNA, 623 bp, Gossypium hirsutum
  Clone ID: GOSHI-09MAY01-C10360_1
gattgctttactttttgagctctcatagtcatggccgacgatctctgtttcttcaccaaggattctttcatcctaaagtcgcccaagaagtctccattggtgttgaggacggttgtattgttgtttgtaatggtttgtggagtgtatatctgcacgatttgtttgaagcaaataagcactggcagcaccactgaatttttgaattttagagtggtccaaaagccctgtccagaacctaatattgagccatgggaaattccttacgtacactatccgaaccccaaaacttatagcagggctgaatgtgcgtgcaacccagtccggtattttgccattatgtcaatgcagagatccgggagtggatggttcgagacattattgaacaatcatactaacataagctcaaacggggagatattttctgtcaaagttaggaggagtaatgtgtcaacaatttttgagactttggacaaaatttataacctagactggatgagtagtgcctcaaaaaatgagtgcacagctgcagttggcttgaagtggatgcttaatcagggactgatgcaacatcataaagaaatagtagaatacttaatactcggagtgtttcaactattttcctc

SEQ ID NO: 8131 - DNA, 587 bp, Gossypium hirsutum
  Clone ID: GOSHI-09MAY01-C10330_1
cttatcttttcatatcttctatggagactcctctttctaggtgtctcgtccatctctcctccggttcgcgttgaaggtggacgatatctgctccctccagaatggaggactgttttcgaggctaaaaactcacccatctccccccaaaccaccagacccgaggtcgatctatcaaaagctgcgtcaaaataaatagctactcttgcgttcctttattcccgtcttttttctacaaccatatgaaattgtccaaacaccacaacaaaatagccgacattgtttgctgttacccatggtgaaaacccagggaattgtcgaaaaatgtggttgctatcttctttcgcatttcgacaccgaggacaggaaatatttgcagccactcttcttaatctgagatttgttagagtaggaataaagttccaggaaatacgccatatagcgatagcaatttttgaagggagatttaaatttcatagctttttgtagaaattttttgtttctgcctatattaaaataagcattaggatccatattagcctatgtaatagcttgtaggcacttttgactgaaaattcgctaaaatgttc

SEQ ID NO: 8132 - DNA, 844 bp, Gossypium hirsutum
  Clone ID: GOSHI-09MAY01-C10280_2
accacgcgtccggacgatttcatttttcaaaactttccttctgaaacatttcattttctttttggggtgggaaactttctctcttccattcttcatctcctaaagctttcctaatctggttcacatacccaatcgtaccttttttgctcttcggcatagtcagggacctccatttccaggaatctccttcaaagatgattgactgccatccattttcgactcctatttgaactgctttccaacacgctattgcttcaccagcaaatgcagaggtaatgtcattgtggatctctgaacaggataaaagaacttttccttccgcatctctggccataatacctgaagctgaacggttttgactctcattgtatgcactgtcgaagttaatcttgatgaactcacaatggcggtgccgaaaaggcgaccttgacaaggggtgagctgttcaaacacccaggtaagccactgtacgaagtccatgctctggttcattataatattctgaagtgatagttgtaataggcccatttgcccggcccgtaaaccaaatcaaaatataaacaaaataaaaattaataacagtccagaaatagtccatatacctaggcccaaattgtttttaacccactagcctatcccaatttcctcaatccagttagcctaacacttaacccggacccaaggcataacgcagcccaaaacaaaaatcagaagcaggaaacactagaaaaccctggcgctgcatgactgcacagccagcacactctcctctcgtgcgtgtgcgaccacaccttcgagccgctcctcacacgtgcctctgtacgatcatgtacctacaaatgac

SEQ ID NO: 8133 - DNA, 867 bp, Gossypium hirsutum
  Clone ID: GOSHI-09MAY01-C10280_1
tccttactaaaaacgtttcacttttcccctttttatttgaagccctttctctcttcccctttcttcactcttcgggaaaccctttcctaatctgggatcacacccacccaatcgaacctttttttgtgcttcgaccgtacctcaagggaccctgccagtgggtcaggagcctatttgttttagtcagcaaatggctgcaggggttatacccaattatggaagtctctgagcagcagggataaaagaaacccttttccttccgcacatctctaaagccacaatacctgagagcccgaacgattttgacctcccgtgtgtatgccaccccgtcgaagttaatcttgatgagactcacaagtgccccaccagaaaaggcgacattgacaaggggtgaactactcaaacacccaagtaagccactgtacgaagtctatgttttgaatcattataatattctgaagtgatagtgttgtccatgcttccactataacaggacattctcggaataaatggtccattgtttcagctctttctctacgttgggggcagcttttgttggttgctaacttcctatactgcatatttacttttgtaggcaaataattccatgagagtctccagattgtaatctttatttttgttggtagatttaggctccaaagtttttttgttaaatttcctgtagatggtttgtaaagcgtaagctctaggatttgcatcagaactctgtaatagtttataggcacttcggaccgagaattcacccgacgattctccccccagatgaagaagtcctcgtgacgtgttcgtgccaaggggatccgaaggattcttccagcgtcttcttctgtgaaagtattatttaac

SEQ ID NO: 8134 - DNA, 389 bp, Gossypium hirsutum
  Clone ID: LIB3166-024-P1-K1-B6
ctcatattgcccaaaatgccccacttttaaaggcaacattaacaaggggtgacctgttcaaacacccaggcaagccactgtacaaagtctatgttttgaatcattaaaatattctgaagtgataatgctgtccatgcttctactataacaggacattctcggaataaatggtccattgtttcagctctttctctacgttgggggcagcttttgttggttgctaacttcctatactgcatatttacttttgtaggcaaataattccatgagagtcttcagattgtaatctttatttttgttggtagatttaggctccaaatttttttgtaaaatttcctgtagatggtttgtaaagcataaactctaggatttgcatcagaactctgtaa

SEQ ID NO: 8135 - DNA, 602 bp, Gossypium hirsutum
  unsure (1)..(602): unsure at all n locations
  Clone ID: uC-gsronu33B012c05b1
ctcttcttctccactaatccaccttcaatcccaataaacagtacagcatgcgccataatacaccagccctgaggctttgacaaatccagatcaaccagacttcctcacactcagagatccatacttttattgaaggcaagtaaaagaaggatatgaacgaggtgatgatggcagcggatgcaagctcgatgagaggaggtggagcgacgtcatttgcgtggtctgcgtcgtcgaatctgcttgctaataaccttcctctgctcacggccttgctcgctttcgctctcgcccagtttctcaaactctttaccaattggtttaaagaaaggagatgggattctaagaggatgattgattcaggtgggatgccatcatcacactctgcaactgtgacagctttcgcggttgctataggtttgcaggatggaatgggaggaccggcttttgctttgcagttgttcgncatgtgttgtgatgtatgatgcatctgtgtccgacttcacgctggcgtcagctgaatgctgaataaatnggtgtgaagtcctcctgacaccattgctagcggaggccctgcggaatacttgacatactcactcagtgtg

SEQ ID NO: 8136 - DNA, 611 bp, Gossypium hirsutum
  unsure (1)..(611): unsure at all n locations
  Clone ID: AI731243.1
caatacagtaagcgccaaaatacaccagccctgaagtgggcctattcttgttgaggaacaatcgttgcaccttctcctccttctcatttcgctgctaattcgctgaatcgttgttgcctttggttgccaggctttgacaaatccagatcaaccagacttcctcacactcagagatccaaagcttttattgaaggcaagttaaaaaaggatatgaacgaggtgatgatggcagcggattcgagctcgctgagaggagatggagcgacatcatttgcgtcgtctccgtcgtcgaatctgcttcctaataacctccctctcctcacggccttcctcgctttcgctctcgcccagtttctcaaactctttaccaattggtttaaagaaaggagatgggattctaagaagatgattgattcaggtgggatgccatcatcacactctgcaactgtgacagctcttgcagttgctataagtttgcangatggaatgggaagaacggcttttggtattgcanttgttctggcatgttttgtgaattttgatgcatccggtgttccaattcattgctgggcgtcagcttaattgctgaatcaaatgttttgtgattccct

SEQ ID NO: 8137 - DNA, 1159 bp, Gossypium hirsutum
  Clone ID: GOSHI-09MAY01-C10250_1
tggacgcgtgggtttttatggtttaatggagatgtggacaatccaaagaagaaaccaggttcttgataccatacttttgcttggaatagttctggttttgattcccacgcgtccggttgaaagcagaaagtacagtgcttcattgacagactttggaggggttggtgatggagtaacatcaaatacgaaggcttttcaagctgccatttttaacctcagccaatatgcatcagatggtgggtctttactctttgttccaccaggaaaatggctaactggtagttttaaccttactagccatttcactttgcatatccacaagaatgctactcttcttgcttcgcaggatgagagtgaatgggctgtcattgatcctttaccatcctacggtcgaggaagggatgccgatggtggacgatatatcagtcttattttcggaaccaacctcactgatgtcgtgataacaggtgataatggcactattgatggtcagggtgttacctggtggaacaaattccataagggagagttgaaatacaccaggccttaccttattgagatcatgtattcgagtgaagtccaaatctctaatctcacattgatgaattctccttcctggaatgtccatcctgtttatagcagcaatgttgtcgttcaaggattaacgatcctcgcaccagtaacttctccaaacaccgatgggatcaacccagattcttgcacgaatacccggatcgaggactgctacattgtttctggagacgattgtgtagctgttaagagtggctgggatgagtacggtatcaagtttggtatgccaacgaagcagctagtgatcagacggctcacatgcatttctccattcagtgcagtgattgcactaggcagtgagatgtctggcggaattgaggatgttagggccgaagacataacaggcattaattccgagtcggctgttaggatcaaaaccgctgtaggaagaggaaactatgtcaaggacatatatgtaagaaggatgactatgaaaaccatgaaaatggtgttttggatggcagggaactacggttcgcaccctgacaacgattatgatcctaatgcaatccctgttatacaaaatatcaattttcgtgacgtcgttgccgagaatgtaaccatggca

SEQ ID NO: 8138 - DNA, 355 bp, Gossypium hirsutum
  Clone ID: LIB3145-024-Q1-K1-D10
caaatctctaatctcacattgatgaattcttcttcctggaatgttcatcctgtttataggggcaatgttgtcgttcaaggatgaacgatcctcgcaccagtaacttctccgaacaccgatgggatcaacccaggtgagaaaccggacattgaatcgggctatacgcatttgaagcttcttcattggtgttaaaagggttcttgtttttcttcagattcttgcacgaatacccggatcgaggactgctacattgtttctggagacgattgtgtagctgttaagagtggctgggatgagtacggtatcaagtttggtatgccaacgaagcagctagtgatcagacggcttacgtgca

SEQ ID NO: 8139 - DNA, 473 bp, Gossypium hirsutum
  Clone ID: GOSHI-09MAY01-C11900_1
gttaaatctgaagagaaaccaatgtatagttctcaatcagcaatgccaatcacaaacgggcagtcgtctttctttcatatgcatgacagtgggaagcaacatctttctggaacattatcatcagcaactgaagccttcgatgctcctagtgcagcaccaacagttaaagagttatctggggtttcacgctcagactgtgctctctctcttctgtcagctcaatccttggatttgtcaagccatgtgacaggtattcaaatgactaggcccttgatcaatcaagctggccttgcccatcgtagcactgagaaatctgcagtgatgagttactcggaaaaaggtagcagtttctattcatgtgggatgaaccctaccggagtaagccaagaagggtcagtcgtggtccctgatgctggtcatactgctaattttgaaggtaaagtccaagacttggatctcttgagtgcaaggta

SEQ ID NO: 8140 - DNA, 458 bp, Gossypium hirsutum
  Clone ID: GOSHI-09MAY01-C11930_2
cggacgcgtgggttcagattactggcccgttctttatcccgtttgaaaagcactttttcacccaaaagtgctggtctcttaaaagcagctaagaacagcctcctttttctcttaaaatttctccatcaaaaaagtgcttctctctagacggagaagctaaaaaattctccttttcttctgctgtaactgcttttggatgaaaattgaccaaatacccccgtcttctcccccaaacggctttcccctctgctggttccctaaatgttctttcccctctgctggtgaaattggagctttatacccgatttcttttccccattttcggctttcaaagctctactttctgttctttgttcctcttccgcagcagagaatgagaacaactcgacttttagttgaatatctttattaaaaatttgtctcatctggtggtttctgagaggaaaaaaatgggatcc

SEQ ID NO: 8141 - DNA, 417 bp, Gossypium hirsutum
  Clone ID: LIB3135-026-Q1-K1-E7
cccacgcgtccgctaaaaattctccttttcttctactagaactgcttttggatgaaaggggggcaaattaacctgtcttctcccccaaacgtttttcccctctgttggttccctaaatgttctttcccctctgctggtgaaattggagctttatacccgatttcttttccccattttcggctttcaaagctctattttctgttctttgttcctcttccgcagcagattttatggaatacgaagatattaactgggcatatgagaatattattgattcagaaaatgtgcattgtccagaaagtgatgatgatgacgaccaccacgatggtgattattacgattaatcaaacaatttcagtggttttaaaatggaattaacaagagatgttatagcttctactttaatgaattcacttt

SEQ ID NO: 8142 - DNA, 370 bp, Gossypium hirsutum
  Clone ID: LIB3166-045-P1-K1-G9
agaagctaaaaatttctccttttctttagcttgaactgcttttggatgataatggaccaaattaacctgtcttctcccccaaacgttttttcccctctgctggttccccaaacgttcttttccctctgctggtgaaattggagctttatacccaaattttttccccattttcggctttcaaagctatttcctattctttgttcctcttccgcaggtgcgagtttcttttcttcttcttctgtttaattagttcctcttctgtttaatctctgtctgagaacctatgggggttttcgaccttaacattccatacacggattccaagccgcccagcaaggcgaattccaccgttgccaaattcacccgcatt

SEQ ID NO: 8143 - DNA, 608 bp, Gossypium hirsutum
  Clone ID: GOSHI-09MAY01-C11850_1
cttccgggaccatcttcgagggccatgggaaccttggctttggtacctaacttggtccttgagggaatcaatttaatggtccaattcccttggctattggggaggtatcggctttggaggtggttggtggttccaaaaatccatttaaccggccaatttccctggcctttagggcagtggccttctttggggaagttggttgtttcacaaattcaattaaagggccaaattccatggcctttaggggagtcttcacctttgaagtggttggatgtttcaaaaaatcagttaaacggccaaattccctggtctatagggcagttatcatctttgaagctggttgatgtttcagaaaatcaattaaatggtacttttcctctatctttgggacgactagaaagtttggaaactctggattgcgggtataatctattagaaggagttgtatcagaaacccatttttctaatctcacgagattgacaactctagcagcatcacacaatcggcttagatttgaaccaaactcaagctggattcccccatttcaatgtgaacggatcgaattgggtaactggcatcttggcccacagtttccccagtggctaaa

SEQ ID NO: 8144 - DNA, 489 bp, Gossypium hirsutum
  Clone ID: GOSHI-09MAY01-C11870_1
atctcttaaaagatgtttctaccactctggccagtatgattccgaggaaaattgtgctcagctagacaagaagcttaagaagcatgagggtgggagggtttctaatcgcctcttttatctgtctatccctccaaatatttttatcgaggctgtcaaatgtgccagctcatcagcttcatctggtaatggctggaccagggtcattgttgagaaaccttttggtcgagattcagaatcttcggctgtgctgacaaaatctccgaagcagtacctaactgaggatcaaatattcaggatagatcactattctaggaaaggaacttgtggaaaatctttctgttcttcggtttgccaatcttatttttgaacccttgtggtcaagacggtatattagaaatgtacagataatattctctgaagattttggaactgaaggacgtggagggtattttgacaattatggaataattagagatataatgcagaatc

SEQ ID NO: 8145 - DNA, 756 bp, Gossypium hirsutum
  Clone ID: GOSHI-09MAY01-C11810_2
ctttgttgaatgtgacaccataaacaaagcatccgaatttaggattagattattgacaagttatagtctattgttcttgatgcgtaaagatgaaatgactaatgattgattaagttttgacggtggttaactcttgaaacttccttctgttctattaaccacccaaggcacccaaacatcagcagccaaagtggggcgatatgcctggatatattgaaggaccagtggagtcctgcactcactcttaagacagctcttctttctgttcaagctttgctttcagctcctgaacctgatgatcctcaagatgctgtagtagcacaacagtatcttagagagtatcagacatttgttggtacagctcgttactggacagaaagttttgccaaggcctcttctttaggggttgaggaaaaggtacaacgactcgtggaaatgggttttcctgatggtttggtgagaagtactctagaagcagttgggggtgatgaaaacctggcccttgaaaagcttttatccagctgatctgtgctggagctgccaattgttctacatcttttagtaattcttcacctacctggtgaatttgaacgccatacaatgacacattatatctgaatataagctgtttctaattactgagttctgattccataaatttccatttttcgttgaccatgcttaaaaaaaaaaaaaaaaaaaaaaaaaaaaaaaaaaaaaaaaaaaaaaaaaaaatattaaaaataaaaaataaaa

SEQ ID NO: 8146 - DNA, 911 bp, Gossypium hirsutum
  Clone ID: GOSHI-09MAY01-C11810_1
aaaaagactaatagcgtaaaaagagtcggccgcgtcgctttacttattggggcggggggggttgatccaacaaggagaattgagagaagatgatagactttgctcgtgttcaaaaggagctacaagaatgtagcagagaaaaagactcttcgggcattagcgtctctccaaaatcagacaatcttgctcgcttgactggcatcatccctggtccccttggcactccctatgaagggggctcctttgaaatcgatatcacattgcctgatgggtatccatttgagcctcccaaaatgaagtttgtgacgaaagtttggcacccaaacatcagcagccaaagtggggcgatatgcctggatatattgaaggaccagtggagtcctgcactcactcttaagacagctcttctttctgttcaagctttgctttcagctcctgaacctgatgatcctcaagatgctgtagtagcacaacagtatcttagagagtatcagacatttgttggtacagctcgttactggacagaaagttttgccaaggcctcttctttaggggttgaggaaaaggtacaacgactcgtggaaatgggttttcctgatggtttggtgagaagtactctagaagcagttgggggtgatgaaaacctggcccttgaaaagcttttatccagctgatctgtgctggagctgccaattgttctacatcttttagtaattcttcacctacctggtgaatttgaacgccatacaatgacacaattatatctgaatataagctgtttctaattactgagttctgattccataaatttccatttttcgttgaccatgcttataacttttgttcgatgaaatgttgttacttgcattttgtttaacggcagcttcgagttgccattgctggttttcttg

SEQ ID NO: 8147 - DNA, 366 bp, Gossypium hirsutum
  Clone ID: LIB3493-025-P1-M1-C1
atcgactctgtttgtgttcaaaccgagctacacgagtgttgctcagagaatggcgcttcttgcattatggactgttccaaatcatactatcttgcttgatcgactgacattatccctggtccccttggcacttcttatgatagtggctactttgaaatccatatcacatagcctgatgggtatccatctcagcctcccaaaatgaaatttgtgacgagaggttggcaccctaacattagcagccaaagtgggtcgatatgcctggatatattgaaggaccatttgagtcctgcactcactcttaagacagcttttctttctgttcaagctttgctttctactttctgaaccttatgatccttaaga

SEQ ID NO: 8148 - DNA, 646 bp, Gossypium hirsutum
  Clone ID: GOSHI-09MAY01-C11580_1
cttagaatcaaaagcattcaacagtttctctgaaatcaccactatctattttctggtggtgactcttattttccttcactattgttttccctgatcggtgagcagcccaacagtaccttgaacctgattttcattttacagtactagagatgctcccccaaccgttcctcgtagatctttctccactgcctcttctgtaaaattcgggaccccgtcaagaagataagtattcatttccccccttaatccttcaacggccaaaagatgagccacttggttcccctacctcggaatatacgagaatccacagtttttaaatctctttctcaaagagtatgtaagcactgatgtatgaatcatcgttcttgtttgcttgttgtttctttatcaccataagtgaatcgccttcgatcaccacatcttgaaaccccaaatcaatgcccaattggattacttggagacatgcaatagcttccgcagcaaaccttgtttgaatgtgattattaataattgttgttgaccccagaacaaccccttttgatttcaaggaatgagcttgaaaagccccatcaaaacttacctttatgaaagcgttctctgaaggcctcatcttacaatctcaactctcgtaacatgtaacagtttg

SEQ ID NO: 8149 - DNA, 871 bp, Gossypium hirsutum
  Clone ID: GOSHI-09MAY01-C11550_1
ggctcttgcttatagaacatagccgaaagcaaaacccaagcctactcaaagcaaagaaaaacacagcaatggagagaagcaaggcgatgatgatggcagtggcagctgtcggattggctttagtgctaatggtgcctcaggccgatgctacaaggtacattgttggagggggaggcatcggttggactactaatgtcaattacactgtctgggctcgaggaaagcacttctacaatggcgactggctttattttgtatatgatcggaaccagatgaatgtgctagaggtgaacaagactgactacgagtcatgcaatgctgatcatcctcttcacaactggacaaccggagctggaagggatgtggttccgcttaatgtgactcgccactactatttcattagtggcaaaggattctgctacggcggcatgaagctagcagtgcgtgttgagaaccctcctccgcctccaaaagctgctccattgaacgaaaagagtggctcctcaccaagttccattgtctacagaggccagcttgttttaccagctgctttcgccattgccgcactgtgggatgcattcgttcgaatctggtagtttcggtatcgagattgaacctggacaattccttcatcaattgtgaaacgaatcaaatcaaattccatttcttcttaaattactggtgtgatttttcatttcatttttcatctgttttcatgataggtgacatgaatgaaactagctttaggggaggttttgaactttgaaatgtaattaaggtttgctgatagggaggcatttgaaaaatgctttctttgctggggaaattattgcttgaatttgtggcaaaatgcaatgttattgaattctag

SEQ ID NO: 8150 - DNA, 1610 bp, Gossypium hirsutum
  Clone ID: GOSHI-09MAY01-C11540_1
gaaacaaagccttaaagatacgaagctgcagtgcataaaaacaaagcaaaatcaaaatcgcaggcaaattcatagagggaaggaaatcggaggacacgatttgaacggcgaaaatcatgatctctcagtttttcgtgctctctcagcgaggcgataacatagtttttcgcgattatcggggtgaagtagcgaaaggagagtgcagagattttcttccggaaagttaagttctggaaagaggatggacaagaggaggcaccccctgtctttaatgtggatggtgtgaactacttccatgtgaaggttgttgggctgttgtttgttgcaaccacaagggttaatgtatcgccatctcttgtcctggaacttctgcaaaggattgctcgtgtcattaaagattatttaggggttctaagtgaagattcattgcggaaaaactttgttcttgtatatgaactgcttgatgaagtcattgactttggttatgtgcaaacaacatctactgaagttttgaagtcctacgtttttaatgagccaattgtggttgatgctgcacgtttgcaacctcttggccctgctgccatctttatgcaaggaaccaaaagaatgcctggcacagcagttacgaagtctgttgtagcaaatgagcctggaggccggaagagagaggaagtttttgtggatataattgagaaaatcagtgtcacatttagctctagtgggtatatactgacttcccgcgtgggtggcactattcaaatgaaaagttatttgtcaggaaatccagaaattcgactagctcttaatgaagatctgagcataggaagagggggaacagtctatgactataggagttcatctggttcaggcgctgtgatactcgatgacttgtaattttcatgaatcagcgcgtcttgatagttttgacatggacaggactctatctctggtaccaccagatggtgaatttcctgtcatgaactaccgaatgacgcaggaatttaagcctcctttccgtattaattgtttaattgaagaagctggacagcttaaagctgaagtgattattaaagtacgcgcggagttcccttcaaacattactgccaacacaattgctgtacaaatgccacttcctaaatatactactagagctagttttgagttggaacctggagctgttggacaaagaactgatttcaaagaagctaacaagaaacttgaatggggattgaagaagatcgtgggtggatctgaacatacacttcgtgcaaagctgacattttctcaggaatcacatgcaaacctcacaaaggaagctggtccagttagcatgactttcacaataccaatgtataatgtttcaaggcttcaggtgaaatacttgcagatagcaaagaaatccagctcctataatccatatcgatgggtgagatatgtcactcaggccaattcgtttggtgctcgaatatgatactgtcaaacctctctttttctttaatatgttctgtatttgttgactcccatatgacacttttttccttttttttttcccttttcactaactgctttaaacatctttatcatgtagccattacctgatttctatgtta

SEQ ID NO: 8151 - DNA, 647 bp, Gossypium hirsutum
  Clone ID: LIB3543-027-Q6-K6-D4
cccacgcgtccgcggccgcgtgggcgggcgcgtggggtaagtaccaaagggtacgtgcacggtatattgctgtcgtaaaggtaagttttggaaagagatggtcaagaggaggcgccccctgtctttaacgtggatggtgtgagctacttccatgtgaaggttgttgggctgctgtttgttgcaaccacaagagttaatgtgtccccgtctcttgtcctggaacttctgcaaaggattgctcgtgttattaaggattatttaggggttttaagtgaagattcacttcggaaaaactttgtacttgtatatgagttgcttgatgaagtcattgacttcggttatatgcaaacaacctctactgaagttttgaagtcctacatatttaatgagccaattgtggttgatgctgcgcgtttgcaacctcttggccctgctgccatctttatgcaaggaactaaaaggatgcctggcacagcaattacaaaatctgttgtagctaatgagcctggaggtcggaagagagaggaaatttttgtggatataattgagaaaatcagtgttacatttagctctagtggatatatactgacttctgagattgatggcactattcaaatgaaaagttatctgacaggaaatccagaaat

SEQ ID NO: 8152 - DNA, 321 bp, Gossypium hirsutum
  Clone ID: LIB3189-004-P1-K1-G9
cccacgcgtccgcggacgcgtgggtgaatcagtgcgtcttgatagttttgacatggacaggagggtatctctggtaccaccagatggtgaatttcctgtcatgaactaccgaatgacgcaagaattttagcctcctttccgtattaatagattaattgaagaagctggacagcttaaagctgtattgattattaaagttctctgcggagttccctttaaacattactgtcaacacaattgctgtacaaattccacttgctaaattttctacttatacttgtttttaattgtaatcccatgctttttttcaaagatctgttt

SEQ ID NO: 8153 - DNA, 557 bp, Gossypium hirsutum
  Clone ID: GOSHI-09MAY01-C11570_3
atatcctcctcttctccatcaccaagtttggcaggtggcttgcagagacggaccctttgctaccctaatttcaaccccatctgtcttttatccatcctcacttctctaatataaaccacgttcccccttgtgttctgaacgtaacaaagttcctggaagaacatccaggaggagaagaggtgttgttggaatcagcagggaaggatgcgacgaaagaattcaacgatatcggacatagcaaggcggctcagaatttgctcctcaagtatcagattggtgttctccagggtcacacttcaaagaataatgaacaggttggttcaaccgaggagccccaaaagaaagagatgagtgcattcccgatcaaggatgacctgacgccttaatatgcggcaatcgttgagttccacttgcccccactccctggttgctgggttcctatttttttggtacaataataccctcacaacttaatccttatataattgctggtaaaataagtttggggttttccaaggttttaaaccctcaaacattgccccctttttttccccttt

SEQ ID NO: 8154 - DNA, 656 bp, Gossypium hirsutum
  Clone ID: GOSHI-09MAY01-C11570_2
ctttccccttcgtgtaagcacaagccattccattttcagtctttttttttttttttttgtttacaacaacaatggctggacacacagtttacaccctctcagaagtgtctcgacacaaatccaagaacgactgttggcttgtcatcgatggccgagtaacccggctctctttactcacccaattatctttacttatttatgttgacaaataatcagagacttgactgattctttcaggttctgaacgtgacaaagttcatggaagaacatccaggaggagaagaggtgttgttggaatcagcagggaaggatgcgacgaaagaattcaacgatatcggacatagcaagtcagctcagaatttgctcctcaagtatcagattggtgttctccagggtcacacttcaaagaataatgaacaggttggttcaaccgaggagcccaaaaagaaagagatgagtgcattcgtgatcaaggatgacctgacgcctaaatatgcggcagtcgtcgagttcgctgccccactcctggttgctggttcctatttctgttacagatacctcacactaagctcataagtgctgtaatcagtttggttttcaagttcaacctcaacatgccccttcttcccttaaaataattgttggcataaaatgtc

SEQ ID NO: 8155 - DNA, 705 bp, Gossypium hirsutum
  Clone ID: GOSHI-09MAY01-C11570_1
cccacgcgtccgcccacgcgtccgcccacgcgtccgcttttttttgttttttgtttacaacaacaatggctggacacacagtttacaccctctcagaagtgtctcgacacaaatccaagaacgactgttggcttgtcatcgatggccgagttctgaacgtaacaaagttcctggaagaacatccaggaggagaagaggtgttgttggaatcagcagggaaggatgcgacgaaagaattcaacgatatcggacatagcaagtcggctcagaatttgctcctcaagtatcagattggtgttctccagggtcacactttaaagaataatgaacaggttggttcaaccgaggagcccaaaaagaaagagatgagtgcattcgttatcaaggatgacctgacgcctaaatatgctgcagtcgtcgagttcgccgccccactcctggttgctggttcctatttctgttacagatacctcacaccaagctcataagtgctgtaatcaatttggttttcaagttcaacctcaacatgccccttcttccctttaaataattgttggcatagaatgtttacaatgatggtgtgttgttcctttctttttatcttcacttgtccttttggttattgctgttgatgattatataagaatgagagttatcatattcaattatcattagaaaagaatacatatgaaaacagaactgaag

SEQ ID NO: 8156 - DNA, 421 bp, Gossypium hirsutum
  Clone ID: LIB3146-003-P1-K1-A4
acgacatacgaccacgcatacgtacacacgtacgtttacgcttacggactaattttttgaataatggtacggcaacaatggctggacacacagtttacaccctctcagaagtgtctcgatacaaatccaagaacgactgttggcttgtcatcgatggccgagttctgaacgtaacaaagttcctggaagaacatccaggaggagaagaggtgttgttggaatcagcagggaaggatgcgacgaatgaattcaacgatatctgacatagcaagtcggctcagaatttgctcctcaagtatcagattggtgttctccagggtcacactttatagaataatgaacaggttggttcaacctatgagtccaataagaaagagatgagtgcattcgttattaaggatgacctgacgcctaaatatgc

SEQ ID NO: 8157 - DNA, 380 bp, Gossypium hirsutum
  unsure (1)..(380): unsure at all n locations
  Clone ID: LIB3166-040-P1-K1-E5
gtaagcacaagccattccattttctttcttttttttntttttttagtttacaacgagcggtggctggacacacagtttacaccctctcagaagtgtctcgacacaaatccaagaacgactgttggcttgtcatcgatggccgagttctgaacgtgacaaagttcatggaagaacatccaggaggagaagaggtgttgttggaatcagcagggaaggatgcgacgaaagaattcaacgatatcggacatagcaatgtagctcagaatttgctcctcaagtatcagattggtgttctccagggtcacacttcaaagaataatgaacaggttggttcaaccgaggtgcccaaaaagaaagagatgagtgcattcttgatcaat

SEQ ID NO: 8158 - DNA, 586 bp, Gossypium hirsutum
  Clone ID: GOSHI-09MAY01-C11560_1
atctcttcaacaatccaagatgttgtttcctcccctacttgtgtttgcttccatattcagtgcttgctgtcttgcaacttcaactttaggagctacacttgcaaaagacgaagtggaagctttggaaagcataggtgaaacattggggaagacaaactggaaatttagcgtggatccgtgcagcagcggagacgagagttgggcaaaatttgcagaaaaaggtgcatactatgttaataatgtcacttgtgattgcagttccagcccctgtcatattgtccgcatagtgctgaagggacaaaatctatcaggcactctcccaccacaggtgaccagacttccttacctgcaagaaattgatctcagtcgtaactatcttagtggctccattcctcgtcaatggggttctatgcagcaacttgtccaaatttcccttcttggaaatcgtttaacaggttcaatcccagaggagctggcaaacatcagcaatcttaccagcttgtgagatgctttagtccttgagcacaataactttcaggaaactgcctggtgcattggggaatctacccaaaatcgaaagattttt

SEQ ID NO: 8159 - DNA, 503 bp, Gossypium hirsutum
  Clone ID: LIB3583-020-P1-K1-G10
ctccctccacacaagatctcgaaaactcatttcttccccaaaaatgatggcttgaaggcaagctttcgcttccgcagttgtcagatctccagtgcttcctagtgggtaagcacaatagcccataacaagcccctcatgattccttataataatccctgcaattgctcttttttcctattgatagaatgctgcatcgaaattgattttaacttgttttaccttgggggtctctagcaatcctcctttgattttatgttagactcagttatggattttagttgatcaacctccaaaacataagctttaatgaaatccacaacctcttgtaccctttccttttttccctcgtgatagtatttgtttctattgtaccatattgcccaaagtgtgactgtcatgactgaacacatgactacccaaaatgaaaattattgttattaaaaaataagactaaccattgtttccaatcttgctctgtgtttatttgcgaggtgtccaccctg

SEQ ID NO: 8160 - DNA, 376 bp, Gossypium hirsutum
  Clone ID: LIB3166-039-P1-K1-G9
ctccaccacaagatctcgaaaactcatttcttccccaaaaatgatggcttgaaggcaagctttcgcttccgcagttgtcagatctccagtgcttcctagtgggggtacgcagcaaagcatcattccagatatttgttgattcaccatttcctatcctccaacccatgcttttttttagtaaacaacaggaaccccaaatgctgcgccaagtaaaagagggttaagctcctaaacctacattcaaaaattacctcgaggataatattttaatctcataacacacacaaacaaactactagggttggtgattagcctccatcccctgttagccaacaaggctaatagggggtttcgcgcggaccaagatcgagttgtc

SEQ ID NO: 8161 - DNA, 680 bp, Gossypium hirsutum
  Clone ID: GOSHI-09MAY01-C11520_1
atggatttcagtgttctcaatgaagccttgggcctctaaatccttcaataagatcgctgatatatgcgataatctcatgcttcaggtagcagccgagggcgttccttttcgagacgaatggcctttcgcaattcatcttctgggtcacatctacatcgatgatattaatagtgcaaggtttctttggaaatcaatacctcctgcaatcaaagagagccaaccggaggtggttgcggcctggaaaataggtcaaaagctgtggacaagggactatgccggtgtctacgaggctattcgtggttttgattggactcaacaaacacaagttcttgttgccgctttctcagagctttacactaagaggatgtttgaactgctgcaatctgcttattcgacaataagcatccaagatgcagctcaatttcttggaatgagtgaggaagatgcctcgaattatgtactcggacaaggttggacggtcgatcctacttctcgaatgataaccgtgacgaagcaggctatcgtgaaggagcagaagttagacccgggcaaattgcagcgactaactgaatacgtcttccacctcgaacattaaatcatgtctgtaatttctgtgattttttgactgtcttgttgaaaatttcttttaagcaaagttaatggttctaatcattatgagt

SEQ ID NO: 8162 - DNA, 1044 bp, Gossypium hirsutum
  Clone ID: GOSHI-09MAY01-C11460_1
cggacgcgtggggttcatctaagtccaaggagcggtagctgcaaggttatggggaagaagctagacgcgttgcttggaagagggttcaagccctacaagttgaaatcacttattagtgttgccctttctcgtctttccgttttcaagaatcggcgtcagattcgcagcaaccaagctcgctctgatgttgtggagctccttcagctcggccaccatgatcgtgctcttcttagagcggagcaggtggtgaaggagcaaaacatgttggacgtgtttgttatcctggaagggtattgtaatctcctcattgaaagactccatctcattgaggaagacagagaatgccctgatgagctgaaggaggcaatatgtggcttgctctttgcatcttcaaggtgtggagattttcccgagcttcaagagattcgtgcaatcttcacgtctcgctatggcaaagaattcgttgctcgtgccattgagttgcgcaacaattgtggagtcaacactaagattatacagaaactctcaaccaaacaaccagacttgcagagcagatggaatgtgctcaatgagattgctgctgagcatagcattgcccgacggctccgtgaaacctctgtttccgctaccctgtacgcaatttatgacagaaacatacagagagattaactcataaattgctagtaatgttatcaatgcaggaaaatttggacggaagcaagaatcatagccagcccaagttaggcacaataggtaaggcaagtaaccatgcagtcctaggagatgacaacgagttctctgattcaacaaaagcaaggaaaaaatataaggatgtagctgatgccgctcaagcagcctttgagtctgctgcaaatgcggccacagcagcaagagcagccgtggaactctctcgttctgatttccatgatcctgatgatgatgatcatgatgatgatcaaaacagtcccaatagtcaaagaaaaagagtgcttgagagagaggaaccaaattctgaagataaagaaactcaacaaggcaatcaag

SEQ ID NO: 8163 - DNA, 708 bp, Gossypium hirsutum
  Clone ID: GOSHI-09MAY01-C11400_1
cctcgtgccgaatcggcacgaggcggcacgaggattgtctagaaaactcctacattttcatctctttcactcacaaacaagcacctccaaatccaatggccgctgcagctccacccccaccaccatccgccgcccctgaaccttccatggcaccacctgaaacaaccccgataggccaccccgtcttcaccaggatccgcctagccaccccttcagacgtccctttcatccacaaactaatccaccaaatggccgtctttgagcggctgacccacctcttctccgccaccgaatcttccctatcttccaaccttttcctctcccctcctttccattcattcacaatttttctactcgaactttcctcttcccccattcctcctctcctttccccttcaccatctttcactcccatagaaaagacattcaacttcgacatccccttaaacgaccccgaaagtgatgccttctcgatctattacgggaatcagcaagttataatcggtgggttcgtgttgttcttcccaaactactcgacatttttagggaaaccagggttttacgttgaggatttgttcgtcagggaatgctaccggaagaaaaggtttgggaaaatgttgctgtcgcggtggcgaaacaggcggtgaaatggggtacgggagagttgaatgggtggttttggattggaacgtaatgccattacgtctt

SEQ ID NO: 8164 - DNA, 539 bp, Gossypium hirsutum
  Clone ID: GOSHI-09MAY01-C11790_1
attcgattcaagccgtgatagagggactcctttcaagtttgctctcggtcaaggacgagggattaaaggatgggatgaaggtattaagacaatgaagaaaggtgagaatgctatttttaccattcctcctgagctggcatatggtgaatctggctcaccgccaaccattcctcctaatgcgaccctccaattcgatgttgaattgctctcttggacaagtgtcaaggacatttgcaaagacggtgggctatttaagaagatactgactggaggagagaagtgggagaatcccaaggaccctgatgaagtgttagttaactatgaagctaagcttgaggatggaacagtggttgcaaaagctgatggcaaggagttcactgttatggagggtcatttctgtcctgctttggctaaggctgttaagacaatgaagaaaggggagaaagtacttcttacagtgaagccgcaatatggctttggtgagaaggggaagccagcagctggtgctggaggtgcagtgcctccaaatgccacactcc

SEQ ID NO: 8165 - DNA, 1803 bp, Gossypium hirsutum
  Clone ID: GOSHI-09MAY01-C11750_1
ggacagtcgatgtcgccaaatatggctgcatgcattgccgtggaggcaatatcaattcttggaaaagcttcatttaaaggggtttgtccatggagatgtgaagcccgagaattttttactaggtctacctggatcagctgatgagaagaagctatatcttattgatcttggtttagcttcaagatggaaagatgcacagtctggtcaacatgttgattatgatcagaggccggatgttttcaggggaacaatcaggtatgctagtgtgcatgcgcatttgggtcggactggaagtcgtagagatgaccttgagtcattggcatacacattgatatttctcccacgcggccggttaccatggcagggttatcagggtgataacaagagttttctggtttgcaagaaaaagatggccacttctccagagttgatgtgttgcttttgtcctgccccgtttaagcagttccttgaggctgttacaaatatgaaatttgatgaggagcccaattatgcgaagcttatatccttctttgagagcctaattgaaccatgcactccattgagaccgataagaatcgatggagctcttaaggttgggcaaaagcgaggaagactggtcattaatttagaagaagatgagcaacctaagaaaaaaatacgactaggtagtcctgctactcagtggatttcggtttacaatgcacgttgtcctatgaagcagagatatcactacaatgtagcagattcaaggttgcgccagcatgtagagaagggtaatgaagatggattatttattagttgtgtggcatcggctgctaacctctgggccctgatcatggatgcgggaactggtttctcgtcccaggtttatgaattgtcaaccgtctttctgcacaaggattggattatggagcagtgggaaaagaactactatattagttcaatagctggagcaactaatggaagttccttgggtgttatgtcaaaagggactccttacactcaacagtcatacaagttgagcgaatcttttcccttcaaatggataaataagaagtggaaagaaggctttcatgtaacctcaatgacaactgccgggagttgctggggtgtggtaatgtcaaggaactctgggttctccgatcaggttgtggagcttgactttttgtatccaagtgaaggaatacatcggcgatgggagagtggttacagaataacatctatggctgcaaccgcagaccaagctgccttcatactaagcattccgaaacgaaaaatgatggatgaaactcaggaaactctgcgcacatccgccttcccgagcacccatgtaaaggaaaaatgggcaaaaaatctgtacctagcatcaatttgctatgggcgaactgtgtgctagttctgtgtgttgtggagtggggtgtgtcggatacaaatatgtatccagacatgagtatgttttacttttgatgtaattggagggtcatatttatatttctgtattcatatccgagatgtgtcggatacgggtttcagatacaattattttaagaaaaacaaagagtcatatagtaacatagctagtttaacttgcttcataaagaagaaataatgattcaaagatcaaattttggaagctgtttcttgactttatatacatgggtggggttggtgggaattgggaaaccggttctgaaattttgaagaaccattcaaatgttgttgctcggggtagtatggagaaatcaggttaaactggtgtttattattattattattattattttatttatgaatttctaattg

SEQ ID NO: 8166 - DNA, 379 bp, Gossypium hirsutum
  Clone ID: LIB3166-043-P1-K1-F10
cccacgcgtccgcccacgcgttcgttcacgcgtccgagaaaaaagtacgtcggggtagtcctgctactcagtggatttctgcttacaatgcacgtcgtcctatgaagcagagatatcactataatgtagcggattcgaggttgcggcagcatgtggataagggcaatgaagatggattgtttattagttgtgtggcttcatcagctaatctctgggccctgatcatggatgctggaaccagtttctcttcccaggtttatgaattgtcgaccatctttctacacaaggattggattatggagcagtgggaaaagaactactatattagttcgatagctggagcaaataacggaagttccttggttgttatgtcaaaagg

SEQ ID NO: 8167 - DNA, 1049 bp, Gossypium hirsutum
  Clone ID: GOSHI-09MAY01-C11730_1
attatctaattcctaacagctcaatcattatcaaaatcaatcaattaaaaataaaaaaaataagaataagaataacaaggaaggaaggaagttcattcttaggtaggaggagaagagcagctagcttgaaaagagccgctgtctttttgatatatcagccgaggttttggcagagtttcgactttagatggcgatattgtacgcgctggtcgcgcgtggatcggtgatgctggcggagttcacggcggcgtcgactaacgccagcgcgatcgccaggcaaattctagacaagattccgggtgacaacgacattaacgtttcgtattcacaagatcgatacatcttccacgttaaacgcaccgatggactcaccgttctttgtatggctgatgaaagtgccggaaggcgaattccttttgcgtttcttgaagacattcatcagagattcgttaggacttatggccgagcaatattttcagcccttccttatggcatgaatgatgaattttcgagggttttgagccagcaaatggaatactactcgagtgaccctaatgctgataggataaatcgactaaaaggtgaaatgagtcaggtgagaaacgtaatgatagagaatattgataaagttttggagaggggtgatcggttagaattgctggttgacaaaactgccaacatgcaaggaaatacctttcgcttccgaaagcaaactcgccgttttagaaacacagtatggtggagaaacgtcaaacttacggttgctctaataatcctcctcctaataattatttatgttgtgctggctttcgtttgccgtgggatcacactaccttcatgcctaaaatgaggtcaagagcttgagattcaaactccttcggtacttgccccctttcctcttgcttatagttttatttgtttgtttttagttatatataatgtttatgtttatgttgagttgagttgagttgattttattgcttatttattcaatgtgaagagctagaaatgctatgcttggtcctgtgttaccatgtttctttaggaat

SEQ ID NO: 8168 - DNA, 585 bp, Gossypium hirsutum
  unsure (1)..(585): unsure at all n locations
  Clone ID: LIB3584-011-P1-K1-A8
gcgnctgncccgcgtccgcccagcgtccggggggcgtgcgggagagcttctgtcttttagatacatctgtcaaagtgatatagggagagtttcgactttagatggcgatattgtacgcgctggtcgcgcgtggatcggtgatgctggcggagttcacggcggcgtcgactaacgccagcgcgaggggggggggagttctagacaagattccgggtgacaacgacattaacgtttcgtattcacaagatcgatacatcttccacgttaaacgcaccgatggactcaccgttctttgtatggctgatgaaagtgccggaaggcgaattccttttgcgtttcttgaagacattcatcagagattcgttaggacttatggccgagcaatattttcagcccttccttatggcatgaatgatgaattttcgagggttttgaaccagcaaatggaatattactcgagcgatcctaatgctgataggataaatcgactaaaaggtgaaatgggtcaggtgcgaaacgttatgattgagaacatcgacaaagtcttagagagaggtgatcgcttgtgaattgcttggtgataaa

SEQ ID NO: 8169 - DNA, 521 bp, Gossypium hirsutum
  Clone ID: LIB3585-040-P1-K1-A1
gcgaccacgcgtccgcccacgcgtgcgcccacgcgtccgtagataggaagcgaaaagcttctgtcttttggatacatgtgtcaaagcgatggagggagagtttcgactttagatggcgatattgtacgcgctggtcgcgcgtggatcggtgatgctggcggagttcacggcggcgtcgactaacgccagcgcgatcgccaggcaaattctagacaagataccgggtgacaacgacattaacgtttcgtattcacaagatcgatacatcttccacgttaaacgcaccgatggactcaccgttctttgtatggctgatgaaagtgccggaaggcgaattccttttgcgtttcttgaagacattcatcagagattcgttaggacttatggccgagcaatattttcagcccttccttatggcatgaatgatgaattttcgagggttttgagccagcaaatggaatattactcgagcgatcctaatgctgataggataaatcgactaaaagtgaaatgggtcaggt

SEQ ID NO: 8170 - DNA, 761 bp, Gossypium hirsutum
  Clone ID: GOSHI-09MAY01-C11680_3
aaaaagtggagcaaagaatccttacatcaaacagatggcaaccatggagaaggggttagagtttgagaacaagaatttaggcctgaagcacctaaacttcgtcagggtggctacgatccacgccttggtttgcatctcgaacctttacaattactctaaacagaactcggggccgttgagatccaccgtcgacgccgtcgagcgtgccgttaccaccgccgtcggccccgtctacgggaaatttaaggatgttcctgatcattttccccgcgcccccgataacaaggtattcgcccattaagaaaaaatcaccgtttgcaacttttgagcagaagtttctgttgatgagttctttctcgtctttaggtttagcaattaattttagtattttgaaatgcatcggaagagtaaggattaaatctaatattttaaaaatggggaaagttcagtttagtgtgaaccaatttattccgaactttattattgtatttgattaaaataaccgtaggtagatgaggtttcacacaaatttgatgagcatgctccagcaccagccaagcaagtggttaaccaagcccacgatttggtccaaaaggctcagaaactactcgaggaggctcgaaccaatggagcacgaggggctttgcactacgctgcagctgagtacaagaacttggtgctggtaagctcgaccaagttgtgggttaaactgaaccgcaactcgactttcaactcagtgacagaaaaggttgttcccaaag

SEQ ID NO: 8171 - DNA, 594 bp, Gossypium hirsutum
  Clone ID: GOSHI-09MAY01-C11680_2
cgatcgtttattttctctcttttaagtggagcaaagaatccttacatcaaacagatggcaaccatggagaaggggttagagtttgagaacaagaatttaggcctgaagcacctaaacttcgtcagggtggctacgatccacgccttggtttgcatctcgaacctttacaattactctaaacagaactcggggccgttgagatccaccgtcgacgccgtcgagcgtgccgttaccaccgccgtcggtcccgtctacgggaaatttaaggatgttcctgatcattttcttggattccttgataacaaggtagctgtggtctcacacttatttgatgagcatgctccagcacctgccaagcatgtggttaaccaagcccacgatttggtccaaatggctcagaaactagtagaggaggctcgcaccaatggagcacgtggggctttgcactacgctgcagctgagtacaagatcttggtgctggtaagctcgaccaagttgtgggttatactggaccgcaactcgactttcaactcagtgacagaaaaggttgttcccaaagcagctaatttgtgtgagaaatacaacagttggttg

SEQ ID NO: 8172 - DNA, 935 bp, Gossypium hirsutum
  Clone ID: GOSHI-09MAY01-C11680_1
cccacgcggacggtttattttctctcaaaaaagtgaagcaaagaatacttgcatcaaacagatggcaaccatggagaaggggttagagtttgagaacaagaatttaggcctcaagcacctaaacttcgtcagggtggctacaatccacgccttggtttgcgtctcgaacctttacgattactctaaacagaactcggggccgttgagatccaccgttgacgccgtcgagcatgccgttaccactgccgtcggtcccgcctacgggaaatttaaggatgttcctgatcattttcttggatttcttgataacaaggtagatgaggtttcacacaaatttgacgagcatgctccagcaccagccaagcaagtggttaacctggcccacgatttggtccaaaaggcaacccaaaaggctcagaaactagtagaggaggctcgaaccaatggagcacgaggggctttgcactacgctgcagctgagtacaagaacttggtgttggtaagctcgaccaagttgtgggttaaactgaacagcaacttgactttcaactcagtgacagaaaaggttgttcccaaagcagctaatttgtgtgagaaatacaacagttggttaaaggagaagagtggaaaaggttatcctgtggttgggtatctaccatcgattcccgttgatgcctttgggaaggctgttaaggaagctgaaggaaaagagaaagcaaatgcggatgatcataaatctgaatcagattcagattaggtgtttggtttctgagtgtgttagcagagaggcaatgtgatgctttgccattgtaaattggctacatgttgaatctagtatgacttgattcgtttagatggctgatatggttgctctctgagtttgtggctgattttaccatatgcccttttcaactttccaaaaaaaaaaccaaaac

SEQ ID NO: 8173 - DNA, 336 bp, Gossypium hirsutum
  Clone ID: LIB3272-044-P1-K1-E11
caaaatttaagcttagagcttttttgtttgtgatttgatttaaaatgggggggttagagtttgagaacaagaatttaggcctcaagcacctaaacttcgtcagggtggctacaatccacgccttggtttgcgtctcgaacctttacgattactctaaacagatctcggggccgttgagatccaccgttgacaccgtcgagcatgccgttaccactgccgtcggtcccgcctacgggaaatttaaggatgttcctgatcattttcttggattgcttgataacaaggtagatgaggtttcacacaaatttgacgagcatgctccagcaccagccaagc

SEQ ID NO: 8174 - DNA, 769 bp, Gossypium hirsutum
  Clone ID: GOSHI-09MAY01-C111648_1
gcaattagaaaaaatcactgcgcagctagggaaatacggcaagatcgaaggcaaattcgttttctactggttccaaaaccacaaagcacgcgagagacagaagatgaagcgcatcagccttggccttaccaattgtcccagaaactcacctcccattactaccataactttggagactaggatggaaataatggaaagatcagatgaggatagtccatataagaggaagtgcaagagctggtcatttgagtacttggatgaacaaagcatatccccatgtaaagagcaggaaaacagaactctggagctattcccattgcacccggaaggcagatgaagggtttgaaaataaaacaaatagacccaaaccaaaaagaagaaaaaaaagaaagctgttagaaaaccaaaactctgttcccattatgatctgctttgaagcagatgatgatgatgatatgtgctagatttttttctttctttttttttcttcttttggttcgggaaagaagaaagacaaaggttgtctttccttaactctactgcttattaattcctgacttgaaaccaaagcagatttatgtcaaaaaaaaatataattatattatatttttatatatttttttttattttattttttattattttttttatattattttaatttttattatttaatatatttatattaatatttttttttttttttatattttttgaggggggtgtttataaaaaaaattcttcggggggggatttatttttttttatg

SEQ ID NO: 8175 - DNA, 448 bp, Gossypium hirsutum
  Clone ID: GOSHI-09MAY01-C11670_1
gcccctgccatcgcttatcacttaattggaccagttcattgcttacaacagatgcgagacttaatgaatgaacaggttcaagatctactagggcaaagccacttcattggacatcatgtttaaagatagcagaagatgttgcagagggccttgcctacatccaccaagcatcaaggcttttccatggcaacttgaaatcgtccaacgtcctccttggttctgatttcgaagcttgcctcgccgactacagccttgtgctccttgcagactcttcttgttttactgaagatcctgattctttagcctataaagcgcctgagattcgaaaatccagccgccgactaactcccaagtcggatgtttatgccttcggtgtgtttctattggagcttttgacaggcaaacttccatcacgacatccggtgcttgtgcctcgggacatgctgga

SEQ ID NO: 8176 - DNA, 371 bp, Gossypium hirsutum
  Clone ID: LIB3166-040-P1-K1-H8
cccacgcgtccggctcaagctccctctacgtggctcgaagcaattgctacgataggcggagactctccgattcacatactcggagactcttggaaaatggccgatcggagatttggcttttgacattaattatctcatgcggagacagggaaatttcgaagtggcaagtgtatatgcaggtgataattgtgtggaacttaagggtgaagagattaaaaaggagttgaataatctgctaaggctgttaactctttgtaggcttttctcgaagaagccatttccggtgtttttagactctgcaggttattcagaggaagatgctcttcttcataagcctaaaagcaggcttatgaaaccagcattcaccatca

SEQ ID NO: 8177 - DNA, 330 bp, Gossypium hirsutum
  Clone ID: LIB3166-040-P1-K1-H2
accaacgcgtccggcaagttttcaactccagcaggatttttttttgctaagaggtagcattcccttcgaggtgggagactctccgattcacatactcggagactcttggaaaatggccgatcggagatttggcttttgacattaattatctcatgcggagacagggaaatttcgaagtggcaagtgtatatgcaggtgataattgtgtggaacttaagggtgaagagattaaaaaggagttgcataatctggctaggctgtttactctttgtaggcttttcttgaataagccattttcggcggttttagactctgcaggtttttcagagg

SEQ ID NO: 8178 - DNA, 495 bp, Gossypium hirsutum
  Clone ID: GOSHI-09MAY01-C11630_1
caatatacttaatgggaactcaggaactgctccgtgggatgctttgccaggatttaaggatgttcctagctctgagaagcaaaacttgtttcttagaaagctgagcttgtgttgcgttgtatttgatttctctgacccaatgaagaacttgaaagagaaggacatcaagcgacagacgttacttgagcttgtggattatgttagttctgcgaatggaaagttttctgaatccgttatgcaagaagctgtgaagatggtgtctgccaacctgtttcgacctcttactccacagcctcgtgaaaacaaggtgctagaagccttcgatttggaagaggaagagccattggtggaccatgcatggcctcacttgcaaattgtatatgaattctttctgagatttgtggcatctcccgaaactgatgctgaagttggccaagagatatattgaccattcttttgttcttaaattattggatctctttgattctgaagatc

SEQ ID NO: 8179 - DNA, 422 bp, Gossypium hirsutum
  Clone ID: GOSHI-09MAY01-C11180_2
gtgcatctttcattttccatgttctttccagggttttgaagtgtttcccctttctggctcatttcaattctaattcaagttccagttttcatcatctgggtagtctgggatctcccttccaaatttgggttccttttattttttcatcaaagattcgatgtcacaaggcttttcaattgagctttactttgatccagcactcgaaaaccaagtcttgaaagcttggaatgtattggctcgtcgccaaatcagcactcagttaattgaaattgagtcaaggcctcacattactctcttctccagcccttttctagaccctgccaagcttgaatctgttgtcaagtcttttgcttcaaaacaaggacctttacctctatcttttacttcaattgggagtttcccaaatgacaaaaatgttcttt

SEQ ID NO: 8180 - DNA, 716 bp, Gossypium hirsutum
  Clone ID: GOSHI-09MAY01-C11180_1
ggttgtttgagaaaccataaatccccttttttatcctcctcctttggcctttagaacaccaaatctaacctgggtattttggtttaccatgttctttgtaaggttttgaatcaatttccccttctgggtcaccttcaattcttgtcaaagttccaattttcatcaactgggtactcttagatctccctttaaaaatttgggttcctttctttttttagtttttattaccctcaaattttcaatgtcacaaggcttttcaattgagctttactttgacccagctcttgaaaaccaagtcttgaaagcatggaatgttttggctcgtcggcaaatcagcactcagttaattgaaattgagtcgaggcctcacattacacttttctcaagccctttccttgaccctgccaggcttgaatctgttgtaaagtcctttgtttccaagcaggagcctttacctctatctttttcttcatttgggactttcccaaatgaaaagaatcatcttttccttgcaccagctccaacaatggccctcctacagttccaggctcagttatgtgaggcaattaaaaaggaagggattgatattggggaagagttcaaacccgacgcttggattccctattgtgctgtagctcaacaagttccaaaaacaaaaatggctgacgcattttgtgtggtaagacagttgaattgcctgtttctgggtatgcaat

SEQ ID NO: 8181 - DNA, 543 bp, Gossypium hirsutum
  Clone ID: GOSHI-09MAY01-C111158_1
ttttggtgacacccaaaaaccttagctatctaaatccttttcttgctttacactctcccaacgttaaacccctcgtcttccctttcccttctcacccttccctccctcatggagtcgaacaaatgcaagatctccccatttcctttcttccccacattgttaacgccttgggaaaactctaccaccctttggttcaatggtttcgagccccaacaatcaccatccgtcgcgattctatctgatatagtgctcagttcttggactgttaacctcgcctcgcatctcaatatcccaaatatctgcttcgttcctttcaatgttgctgcagtttacttctggattagtacaccgagcttcctgttacccttttatagggaagcttttacgatgagtatgcaaagccaggggcttgttttcaactcgtttaaagagttggaaggtacaaaattgggtttaatcaaggagaaattcgctaaacattatagggtttggggtgtcggccctttgccgccggtgaaagtttgtgacgaagggttaaatgag

SEQ ID NO: 8182 - DNA, 377 bp, Gossypium hirsutum
  Clone ID: uC-gsronu33B047g06b1
gggctcacgtactggatgagtgaccacagattctaccacgagtataaccgtgctatattcatgattgttgaaacattacatgctatagaggtagccctgataggtagagctccttatagaagctgtaccaacagggctcaggcattggaaaagttctacacacggtaagattcagtggatcccacccacagaaggaccatactgacgtgatgtatgtaatatagtgcatacgttttgccctagaaacccgagccttgcatctgagaatcccaaatatctgatgcgatcctttcaatgttgctggaggttacttctggattagtacaccgagcttcctgttacccttttatatggaagcttttacgatgagtatgcaa

SEQ ID NO: 8183 - DNA, 265 bp, Gossypium hirsutum
  Clone ID: uC-gsronu33B047f05b1
cccatttttgggctaacgtactggatgagtgactagagagtctcccacgggtttacgcctgatctatccatcatgcttgcaacattgcctgcctcagatagatcacaaatgcaagatcttctcatatcctttcttccccacattgataacgccttgggaaaactctaccaccctttggttcaatggtttcgagcccaacaattaccatccgttgcgatttttatagatatagtgcatacttttttggactgctatacctctcctt

SEQ ID NO: 8184 - DNA, 647 bp, Gossypium hirsutum
  Clone ID: GOSHI-09MAY01-C11040_1
caatttctcgccttttcttcccaagcaaagcacatattttccaacaggtaaacaaaattaattattcaataaataaaaaccctaagtaattttggtggaaatgtcgggtaaaggagcgaaagggttgattacggctggcaaatccgccaaagacaaagataaggacaagaagaaacccatctctcgctcatctcgtgctggtctccagttcccggtgggtcgtgtccaccgtctgttgaagacaagagttaatgcacatggaagggttggagcaacagctgctgtatatactgctgccatactggagtacctgactgcagaggtgctagaactggcaggtaacgcaagcaaggatctgaaggttaagcgtataacgcctaggcatttgcagcttgcaattcggggtgacgaagaacttgataccttgatcaagggaaccatagcagggggtggcgttatcccgcacattcacaagtcgcttatcaacaaatcctctaaggagtagtgtatgttaattggtttctctgttggcttttgtttgtagccatattaagctctgaaaatgtttttggggcctgcttgtttctggacaaggtggataaattgttttcgagtagataattatggaaaatttaaggatttgaatt

SEQ ID NO: 8185 - DNA, 1050 bp, Gossypium hirsutum
  Clone ID: GOSHI-09MAY01-C11070_1
gtccttcacttccaacatttgagaaacaagcaaagaaagatggccaatcttagaagtctcacaaaacatttcatatgtgcttgtcagcttctcttgttattgcaagccaaagtcttttgttctcagtacaaggttggagatttagatgcttggggcattccaacatcagcaaatccccaagtatatgccaaatggtccaaaaaccattccttcaagctcggagactctctcttgttcctatacccaccaagtcaagattcagtgatccaagtgacggaacaatcctacaacagttgtaacctcaaagatccaatcttgtacatgaataatggcaactcactgttcaacatcactaagcctggggagtatttcttcaccagtggggagcctggtcactgtgaaaagaagcagaagctgtacatcgccgtgctttcaggcaacggctctgcagcacttgctccttcttacggtccatctgcattaccggacactgcatcgtcaccgtcttacacgactgtcttcggcaacatccctcaaccgccttcttcatcgccgtcactagggttcccattattcgttacagctgttgttgcatcagccacatggggaataatcaatgccatgatatgaagaaggggacatagttactcgatctctactgtcaaattgtcaaaccattccatttggcattttatttatttttcattcaaatgttatttctagaatttgggttttattcttcggatttgtgattcatttttcggtgatgaaacttgcaaagagaatacgaacagtgaaatgggagatctagacagtgttgtattgtattgtataatagcttattctttctgtgttttcatccatatagatttttacagacgggacaggaaagaatctatgagcttgaaaagaagagattttggaaaaaaacaaccttcttatgataaaagccgaaaaacaacaagtcgattatgaaaagaacatgatagccttctataagaaacaggctgttggccctcaacaagatgaggaggaatcagagaagtctgc

SEQ ID NO: 8186 - DNA, 711 bp, Gossypium hirsutum
  Clone ID: GOSHI-09MAY01-C11060_1
ttgaacaccacaaagaacttaaacgccacactgttcgaagaactgaaagcgggcatgcagaactcaagtgagtatgccagcaacagtttggccatcgctgctaaattcttgggtttgttgaccaatttccgtatcccgattcaccggaggttgcttgggttccaaaaagctgcaccttcagagttcccagcttgggttagtcccactgaaaggagactgttgcaggagtccaagcctaccccaaatgtaattgtggctaaagacggttccggccatttcaggacgattaacgaggcggtgcaattggtgggaaagaagaaccaatcgagattcgtgatctatgtgaaggaaggcaagtatgttgagaatgtgaatctggataaacacaggtggaatgtcatgatttacggggatggcaaaactaagactataatttcccgcaggccgcaactttggtgatggaactgccacctttgattccgcaactttcactggggcaggaaggggattcattgccaaggaccttaaggtcggaaacccagcaggtgcagcaaagcaccaagcagtggctatgcggtccggttctgaccgctcggtattctacagctgtgcattcgatgcctaccaggacactctctatgctcattcaatcgtcagttttacagagaatgtgacattttgggtacaattgactttatttttgggaaatgc

SEQ ID NO: 8187 - DNA, 569 bp, Gossypium hirsutum
  Clone ID: GOSHI-09MAY01-C11000_1
aggcagactagattctccggtttctcaagttagatcacagttaaaggattcaggaaatggagagaaggcctctgtagcaaaactctttgaacaagtgggattgcaaaagatcttgtcactgcttgaagctgaagatgctgatgtgcggattcatgctgtgaaagtagtagcaaatttagctgctgaggaaactaatcagcagaagattgtagaagctggaggtctaaagtccttgctgatgctgctgggaagctctgaggatgaaaccatacacagagttgcagctggtgcaattgccaatcttgcaatgaatgaaaaaaaccgggaacttataatgtctcaagggggcattagcttattatcaacgactgcaagccatgctaaggatcctcatacacttagaatggttgctggggccattgccaattctgtgtggtaatgataagctgcttactaatctaagaggtgatggtggtattaaggctttgcttgaaaatcgccaaatgtggacacttcagatgttcttgcctaaggtgctcgtggaatagtgaactttgctaattgtgagt

SEQ ID NO: 8188 - DNA, 1559 bp, Gossypium hirsutum
  Clone ID: GOSHI-09MAY01-C11390_1
caatcctattcagaaaatcaaaatcccctcgcccattgatcttttgatcttctagacacttctcttcctcgttgtgtgtctcttggtttgccctggtaatggcgtctgctttagaaaccaaagccaaagaagcatacttcgatgaccacttcgaactcgccctcgatctctactcgcaagccatcggaatcaaccctaaaaaggccgagctctacgctgaccgtgctcaagccaacatcaaactcaacaatctccctgacgctgtggcagatgctaacaaagcaattgagttggatccgtccatgtctaaatcctacttgcgtaaagctactgcgtgtatgaagcttgaggagtatcaaactgctaaggctgcgttggagactggggctgctttggcaccagaagactcgagattttccaagttgattaaagaatgtgaagagcgcattgcagaggaaaatggtgagttaccgaaggagaccttggaagtggtgccaacaaatgttgtacctgcgaaagacgtctcttctgtccaggatgtacctgatcccatgactgttgcagcaccacccaaatcaacttacaggcatgaattttatcagaaaccagaggaagtggttgtcacaatatttgccaagggaataccacccgagtgtgttaaagttgattatggtgaacaaatactaagtgtcgctgtcaatgcacccggcaaagatgcttatcatctccaacctcgcttatttggaaagataatacctgacaagtgcagatatgatgttttgtcaaccaaaaattgaaattaggttagcaaaagctgaaccaattcaatggacatccctcgaatttagcatggaagttgctgtgccccaaaggattaatgtatcttctgttgctgcaaatcaaagaccatcgtacccatcctccaaaccaaaaagggttgattgggataaaatcgaagctcaagtgaaaaaggaggagaaagatgaaaagctagatggtgatgcagctttgaataaatttttccgcgacatttatcaggatgctgacgaggatgcaagaagggccatgcagaaatcctttgtggaatcaaatgggactgttctttcgacaaactggaaagaagttggtgtaaagaaggtggaaggaagtcctccggatggtatggaactgaagaaatgggagtactgagctctttgttctcaatggtatgctgttttggcctccattatccaaatgttggatactttctctgcaatctaattacaatgcgtcacttggctgtgcttgattgtccaaaattgctcctaagtaaaagtagatggattttctttttccttttactttgttttgtacccttcgttttaaagctttcttttggagtttgtgtagttatactttggtaaaaccttccaacacttttaagctttgcaatgaagaatgtgaccgtattttgtttttccaaaaaaaaaaaaaaaaaaaccccgccgcccccactggagctcgagctcccatttataactttaaagaaggtgaggaatggacaaaaaaacatatttgtg

SEQ ID NO: 8189 - DNA, 633 bp, Gossypium hirsutum
  unsure (1)..(633): unsure at all n locations
  Clone ID: AI727474.1
gacaagtgcagatatgatgttttgtcaaccaaaaattgaaattaggttagcaaaagctgaaccaattcaatggacatccctcgaatttagcatggaagttgctgtgccccaaaggattaatgtatcttctgttgctgcaaatcaaagaccatcgtacccatcctccaaaccaaaaagggttgattgggataaaatcgaagctcaagtgaaaaaggaggagaaagatgaaaagctagatggtgatgcagctttgaataaatttttccgcgacatttatcaggatgctgacgaggatgcaagaagggccatgcagaaatcctttgtggaatcaaatgggactgttctttcgacaaactggaaagaagttggtgtaaagaaggtggaangaagtcctccggatggtatggaactgaaaaaatgggagtactgacctcttcgttctcaatggtatgctgtttcggcctcccttatccaaatgttggatactctctctgccatctaattaccaggcgtcactgggctgtgctcgattgtcgcaaattgctcctagctcgaggtagatggattttccttctcccctcactttggtctcgtacccgctcgtctcggcgaccctcttcctggagtttgtcc

SEQ ID NO: 8190 - DNA, 709 bp, Gossypium hirsutum
  Clone ID: GOSHI-09MAY01-C111308_1
cccactcgtccggttgacccacccaatagttagatctcagtttcctttgctaccaaactttggcaatggcggatccagcacttcaccaccaaatccaacccatcaaagaaatagccatagactacaccccagaggcctgcacccactgccctgtctccaactccatcacactcacctttgatcatcgtggaggcgccaggtggcgttccaccactcgcttcctctacggcactttcacttccctcatccaatgccctaaaggcaacaccagtggtctcaacttcaacatttacctttcctcactcgaaggcgacaaatcgcaagacgagatcgacttcgaattccttggcaaagacaaaactattgtccaaaccaattactacactacaggaactgggaacagagagcagattcatgatctgggttttgactgttctgatgggttccatgaatacaccatcaagtggaatcccgattctatagagtgggttattgatgggaaggtggtgaggaaagcagaaaagaaggaaggtgaggcatttcctgagaaacccatgtttttgtatgcttcagtttgggatgcaagctacattccggagtgtcggtcggctcctccttcgggcgagttcctatgttgcttataagatatcaggcctgctcactgtgcagtgtctggatctgactgctctatttcgcactggtatcgggg

SEQ ID NO: 8191 - DNA, 425 bp, Gossypium hirsutum
  Clone ID: uC-gsronu33B146c03b1
tgctggtgcgcctgcgggggccgccccggcattcctgggtgggacctattcgtccggctttttttgctaccaaactctggcacaggcggatgcggggctttaccaccaacttcggccggtcacaaaaatagccacagaccacaccccacaggcccgctgccactgccctgttggcaaccacatcacactcacgttcgatcatcgcgtaggcgcctggtgtggtgccaccactcgcttgctgtacggcactttcacttgcctcatacaatgccctagaggcaacaccagtggggtccacttcaacatttacctttcctcactcgaaggcgacatatcgcaagacgagatcggcttctaattccttggcaaagacaaaactatggtccaaaccaattactacgctacaagaactgggaacagagagc

SEQ ID NO: 8192 - DNA, 375 bp, Gossypium hirsutum
  Clone ID: GOSHI-09MAY01-C11270_1
tgacactcaagggagaatgaaagaaacaaagtgcttttcggaattggtggtggggactacgcacctcggcatatggatatagtcatgtaagtaattgttaccgttagctttttctacattggccatgcacctctagatcttgaattttcttcctgttatctcctgttattccaaacttattgacatgcctttttaagttttttgtgttctcctgtttctaggaaaagaataataaactttctttttttgtaaactactaactgcaggaaagaaggtgtttgggtgggccacctgctttcaggatattctttgccaatggaagatccaagtcagtcaaaagagaacggaaatactgatggtattggtgggacatgg

SEQ ID NO: 8193 - DNA, 481 bp, Gossypium hirsutum
  Clone ID: GOSHI-09MAY01-C12990_1
ttttcaatttaactcagctcagctcagctcaactcaactcacttaaatcttttctgctgcggtggcgatgggggcggcgatgttgtcggagttggcgacggagatcgtggtgccagtgtgcgccgtgattggaatagctttctcgttggtgcagtgggtgatggtgtcgcgcgtgaagcttacctccgagcgccatgcgtcgtcggcgaatagtagcaagaatggttacggtgattacttgattgaggaagaggaaggaatcaatgaccatagcgttgtcaccaagtgcgctgatattcaaaacgctatctctgaaggtgcaacatcctttctttttactgaatatcagtatgttggcatcttcatgattgctttcgctatcctgattttcctcttcctgggctctgttgagggcttcagcacgaagagccagccttgcacctatgataaggagaagatgtgcaaaccagcttttgcgact

SEQ ID NO: 8194 - DNA, 395 bp, Gossypium hirsutum
  Clone ID: GOSHI-09MAY01-C12980_1
gcggaggatcaaattaagcggctggcgaaggatccgcaagtcgttccggctctcgggcagcaccttcgcactggcaagactcccaacgtccgtcaactcgccgcagttctcctaaggaagaagatcactggacactgggctaagctcgctcctcaggttaagcaacttgtcaagcagtccctcattgaaagcatcacaatggaacatagtccaccagtgaggcgagccagcgcgaacgtagtgagtatagttgcgaaatacgctgttccggctggagaatggcctgatctgctgccgtttctgtttcagtgtagtcaaagtccacaggaagatcatagagaagtggctttgatacttttcagctctttgactgaaacaattgggagcacctttag

SEQ ID NO: 8195 - DNA, 393 bp, Gossypium hirsutum
  Clone ID: GOSHI-09MAY01-C12950_1
tgaatcttgatgatttacgccaattgtggcttcaccttcaatacaatctagtcagggtcatcatttgctctgctagggtagtcttcgggttaacagtctatatcatgacccgaccccgaccggtttaccttgtcgattattcttgttaccgtcctcccgaccatcttaaagccccgtacggtcgtttcttggagcactctaggttgaccggggattttgatgagtcgtcactcgagttccagcgcaagattttggagcgctcggggctgggagaagagacttatgtgcctaaagcaatgcatagtatttctccgacgccgtctatggcggcggcaagggaagaagctgaggagggtatgtttggggcattggatactctttttcgaaacacga

SEQ ID NO: 8196 - DNA, 487 bp, Gossypium hirsutum
  Clone ID: GOSHI-09MAY01-C12880_1
gaaggtcttttctccactttctcttgtatcaaaacctgccaattttgctttctataaaaaaggttaattttatttactttttgttttttgttttgttcgattttcaaaataaaaatggcaacagcagcagcagcgacaaagacaatttctcagatttcttgtttctcttcaatcaaccggagatttcagctctatcatcgttcaacttttcgtccggttactcgctcaaagtcatttgttgttacaagtgttgatgggcatggtgctgaaactactggcaatcaacctaaaactacgccaagctatattgctggagaatcaaaagcatttatagaagatatgcctaggacatacccaaatgcagaagagcatgttcctgaaaatacaactgatttacaagaggaacatggtatcatccaacaaaagagggcagcaagaatccatgatttctggtctggcattccttatggtggtcttgttctaagcg

SEQ ID NO: 8197 - DNA, 514 bp, Gossypium hirsutum
  Clone ID: GOSHI-09MAY01-C12850_1
ccggggcggccgaggcgccgcccacgcgtccgtgaagagaaacctttattaggctttcttaatgaagtgtgtggggaagaaataatcttctccatgtgtcttttcctggattggaacccagcagccacatctatctcagtcggactttctgatggttctgtttcaataactacacttgcagagtccaaaatagaaaaattacaagagtggaaggcacatgattttgagctttggacaacttgctttgacattcaccaaccacaattagtatatacaggatcggatgactgcaaattcagctgttgggatatgcgggataatccatccgggatggttttccagaattccaaggtgcataagctgggaggtttgttgcattgccaagagccccaccgacccaaataccatacttacaggtagctatgatgaatacttgagggtatgggatctaaggtgcatctcaagaccagtgaatgaaacttcagtttgtcttggaggaggagtttggagaatc

SEQ ID NO: 8198 - DNA, 811 bp, Gossypium hirsutum
  Clone ID: GOSHI-09MAY01-C12860_1
gggcttttgctacgaacggggtgtttatatcctcatgtataactgtctgtgaggcttttaaatctcccatctggtctcaaacgactatacctgaggcagatctagcattcttctatcaaaggctgcgtcaaactgagctatgatgccctccgtcgccccggtataactgattccccttttggtataaaagatttcgggtactccatatgcaccataacgcacagcaaaagaaccggcattgatctattgtacccctttcaagaacccaggacaaagacaaaagatatggctactgtcttcctcttcaagtctgcaccgaggacaccaagcgtactttgttactttcttagatcttagattaactagtaaatgaatatagttccaggaaattcgccagaccagtatctttattttacctggtatctgtaaatcctataatttctaatagaaatttcttgtttcgggttgtaaaagataaacattaggattcaagctagcattatgtaatggtttataggcgcttctgactgagaactcccctgaatgcttctctctccacacctggcagtcatcatgaatattcaggattttctacgctatgcccggctgagatgtattgttgcaaaccatcactccatcgttatattatgacctctatgcttgagaagattatttacaccttctacgccaataaagatacttacacctatgggactgctctcgctaaaagttaaactagacactaaggtggacgctttctttctctctattatctctccagaatggatacagttaaagtactataaatatt

SEQ ID NO: 8199 - DNA, 1549 bp, Gossypium hirsutum
  Clone ID: GOSHI-09MAY01-C12830_1
ccgtaagcgaccttcacgagtatcgtcaagcgtatggtggccgcagggttcgttgaagagtgctctcacgtttacagcacctgccgaagagagttcctcgaagagagcatctcgaggctcggtttgcagaagctgagcatcgatgaagtccagaaaatgccgtggcatgagctcgaagacgagattgaacgctggatcaaagccgctaacgtcgcccttcgtatcctcttcccgagcgaacgccggttatgcgatcgcgtcttttttggattctcttccgccgctgatctctccttcatggaagtctgccgtggctccaccattcagttacttaatttcgctgacgccgttgctatcggtagccgatcgccagagaggcttttcaaagttctcgatgtgttcgagactttgagagacttgatgcctgaattcgattccgttttctctgatcaatactgtttggttcttcgaaacgaagcggttaccatttggaagagattaggagacgcgactagagggatatttcatggagttagagaatctaattcggcgtgacccagctaaagcagctgttcccggtggcggacttcatccgatcacacgttacgtaatgaactatctccgcgcggcgtgtcgatcacgacagacattggaacaagttttcgatgaaagtaatgcggttgttccatctaataagctagatgatcgacgggcatcttcgtcttcgatgtcggttcagatggcatggattatggagcttttggagagtaatttggagatgaaatccaagatttacagagactctgcattgtgctctgttttcatgatgaacaatggaagatatattgtacaaaaagtgaaggatagcgagttagagtcacttcttggtgatgactggatccgaaaacacaatgccaaagtccggcaatactgcaccaactatcaaagaagttcatggaacaagattattggaacattaaagctcgacaatttcctcgatagcatcgaatgcgattgccaagtccatgaatcaaaagatcaaatcattcaatacccaattcgaggacgtatgtaaaactcagtcatcatggattgtattcgatgagcagcttagagaagagatgaggatatcagtgtctaggcttttgttaccagcttatagaaacttcatagggaggctccaatgtatgcctgaaatcgggaggaacactgataggcttatacggtacaacccggaggatatcgaggcgaggattaacgagttgttggaagggaacaatggatcatctggtgtcaggaagtagatgcacatttcaggtattctttttggtgttggaatatgaatgggtaaatgtaaaatgatttgcagtatggtacaacattaggtgttgttatatgcatgttgcacaatctttttcctgctttctatttgtgaattgaaaaaaaaaagccatggttagctcgcctgctttctaatcatataatggcgttattttcttggttttttgtatatatagcaaattctaatcatatacatgagatatttaat

SEQ ID NO: 8200 - DNA, 445 bp, Gossypium hirsutum
  Clone ID: GOSHI-09MAY01-C12550_1
gttcgttttcttcctcccaactaatccgtggaataaaaaaccctaacactttaaaacccttaaccattaattcttaacagagagacgggaagtcgattactaattcttgtttgtttgtattaatatttactaattgtttataatctctccgataacagcaccgaaaatgagtcgatacgatagccgttccggcgatcccacctcttaccgcgatcgtagaagtgactcagggtttggtggggcttcagcttatgacggttcagtgcggtcctcatcaagcagaagggattatgatggtgctgaaccgcctaggaagttggatttggatgggttgaccccttctgagaagaatttttattttgagtcaccatcagtggcggcaatgtctgatgcggaggctgaggattatcggcggcgaagggaaattacggttgaaggtcgtgat

SEQ ID NO: 8201 - DNA, 574 bp, Gossypium hirsutum
  Clone ID: GOSHI-09MAY01-C12560_1
attttcgattatgccacaaaaatggtggcgatttctttgtacagagggaacctccacagagcaccggaggtatcttggcgcgggctaatgccgactcccaaaatctctctcaaagacttcaaatctctcttgcaccgccgcgacagagctctctctcgtctccgttcctcttcttcttctaaccctaaccctaactctgttttaaagcatcaaattcaatctcccgtgtcctgtgagcctcctattgagccgaaattgaaagccaaactggaacctgaaccgtccgagggtttgaaaactggaccacctctccaggaggtcaaggtggacatagttggaggatccgacggtggagattgtttggtgaagtcggaagatgagcagaccgagaaagatatcaatttgcaagtggatgagaagctgcctgaggaggctaaaacaaatgtagaggtaagcgataaaataaatgatttcaatggaaaagaaaaaaggaaaagggatgttgaggagaaattacaggttttgaatgcaaaaaagcatattttagtacaagtactaaagcagatcttgaatc

SEQ ID NO: 8202 - DNA, 1172 bp, Gossypium hirsutum
  Clone ID: GOSHI-09MAY01-C112518_1
tgatgttcattgttgattgcaaattgtatttctctaactggttcatgttcattgcttcatttagcccagagggtaactcaacttttcatctgaagcattgcggttttctttaatcagaaatttatcagctctgtcaagactttgtataaggcgtgtgttcattaaattggttttttgacaggctggatactattgctcagtttgcgtgtgtgttgtgaaagattctgctaactacttggatcacatcaatgggaagaaacatcaaagagctttaggcatgtccatgcgagtagaacgggcatcccttaaacaggttcaagagcgatttgagcaattaaaaaagcgaaagcctcctggaagcttcacagagcaagatcttgatgaacggatcatcaaacagcaggaagaagaggaagagcgaaagcgccaacgacgagaaagaaagaaagagaaaaagaaagagaaggccgcagaagaggaacctgaaattgatcctgatgtggcagctatgatggggtttggtgggttcggatcatctaaaaaatgatcgcatttgtttatgtatgattacatattgttttatttgactctagttattcaggcttttggtggttgactgacttgtaaggtttcccggctcagaagggtagaaaagtaaaaattgctcaacatgctccatgtcgtcttccagattccgagttcagtcatggaaaaattactaaacttgagcatctatggatgcatgggtagatctcctggcgcgtgacaatggtttatgacttaattatttaaaaaccatgcctgtttatgttatgccatgcagtatgctacttttatggggttctatgctcagtgcttgccctatagagccatggaattcgggtaaactgtacactgttattaattttttatgtggaagaatggagatgagttgaagtagagaaataaagagtatggaccagggaagggtgtcaatggaaccaacttggtgatttttctttttagtacatggtttttggagataatttctttctttttctcgaccaataaattgggtggtttatgccatgtctagaaacaaaggtattttctattttaatgtactatagagacacttgtttttaaaaaaaaaaaaaaaaaaaaaaaaaaaaaaaaagggcggcgctcgcgat

SEQ ID NO: 8203 - DNA, 1156 bp, Gossypium hirsutum
  Clone ID: GOSHI-09MAY01-C12450_1
cgcgcgcctcgggctttttggacaccgtgagaatcggagaccgagaatccgtctttttagggtttggttcggattttaatttttgtagcaatggcggaggattcggagagtaagcagtcggcggtggagtcggtgatggagaagatcagcgagaagattcacggcaatgattcatcgtcatcttcggattcggatcatgagaaaccggcttccccttcctccgttaaggctaagatttatcggttgtttggaagagagagaccagttcatcatgtgcttggtggtggaaaacctgctgatgtgttcttgtggaggaacaagaagatttcagctggtgtccttggtggagcaaccgcaatttgggtcctttttgagttgattgaataccacctacttgctttaatctgtcacatttcgatactctgtcttgcactactgtttttgtggtccaatgctcataccttcatccacaagtccccacctcgcatccccgaaattcatttgccagaggagccattcctccaagttgcctctgcattggcaattgaacttaaccagggattgaaacttctgcgagatattgcatctggaagaaatctgaaggagttccttatggttatagctgcattctgggttctgtcaattgtgggaagttggtgcaacttcttgaccttgttctatatatgtttcgtattgctgcacacggtacctgtattatacgagaagtacgaggataaggtagatccatttgcagagaaggctgcaatcgaggttaaaaaacaatatgcagtttttgacgccaaggttcttagtaaaattccaatgggccctttgaaggccaagaaggtttaacaaggaaaggggggttcagtctccacctctccggcaacatttggctagttctgggatgtggttttatgtgctgaattcacattagctagaggcatttcgtcctcaaatcaaattgttcacaaatgttttggtttgcaattcaaaatatcatatatgagtaagaggcaatatcagttgttagggataggccaagcttacagatggcaccactatcaggtgatgattttattatgacattttgtttcatttggataacaatcagcttttttttatgtatgttttcctccagattttgtgctgtttt

SEQ ID NO: 8204 - DNA, 632 bp, Gossypium hirsutum
  Clone ID: GOSHI-09MAY01-C12440_1
cccacgcgtccgtccaaatctcttctcctcgtctatcgaatatgatgcaacaaccaccagcaggaggtgtagctccgccgccgtccatggcagccgatccgtctcaaacccagcagtaccagaaacaacagcagtcgcagccgtggatgatgatgtctcaacaacagcaggcgggtcagccagttcctccacctgcaggttggaatccgcaacccgtccctccgccctctcagatgcagcagtactccgctggttccgcgaccgtcggatccggcgaaattcggtctctctggatcggtgatcttcaaccgtggatggatgagaattacctcattagtatcttcgctcaaactggagaggtggtttcagctaaggtgattagaaataagcaaacggcactgccagagggatatgggtttatcgagtttgtatcacgtgctgcagccgagagggttttgcagttgtataatggggtgccaatgccaaattctgagcagaattttaggttgaattgggcggctcttggatatggagaaaagaggccagaagagggtcccggattacacaatttttgttggggatttagctgcagatgtttctgattacatgttacaaggagacttttaaagctg

SEQ ID NO: 8205 - DNA, 711 bp, Gossypium hirsutum
  Clone ID: GOSHI-09MAY01-C12420_1
tcgcccacgcgtccgcccacgcgtccgttcagctgtcgttaagcagtgtctcggccgtgtctttcgtttgtttgacgaggttcgtgaaaaaacatggtctgaggaggttcttgttccttgataagctttgtgatgaaagtgagactgttaggaaacaatacactgttcagctcaataggtcactgaagattgtgtcattttttgtcctgccgtgtttcatagctgagactgcatacaaagtatggtggtatgcctctggtgcttcccaaattcctttcttaggcattgtgtggttgagtgacacagtagcctgtgtcatggagttatgttcctggctctaccgaaccacggtcttcttcctcgtgtgtgtcctgtttcgcctcatctgcaatctccaggttctccggctccacgatttcgccaaagttttcaatgtcgattccgatgtgggttcggtgttgcgcgaacacctcaggatcaggcggcaattgcggatcattaccataggtatcgagcatttatagtatggtgcctcatcttggtgactttcagccaattcacttcattgcttatcactacaaagagtaattctcgattgaatatttacaaagctggagagcttgctttgtgctctataactcttctcacaggactctgtatattgcttcgaagtgcaacaaagataacacacaaagcacaatcagttacata

SEQ ID NO: 8206 - DNA, 847 bp, Gossypium hirsutum
  Clone ID: GOSHI-09MAY01-C12710_1
ccatatctcaatttttatttatctcttgggaaaaatcatctctgatctcctcgaggttgtaataggttatgctgaagaaacagataaactgagtgtgtaaggacatttgagggattttctctttcagactttctcaaagagagggaaatgtcaactggaagaaatacccattggtgttatagatgcaggcgcccagttatccttcaggggcatgattcagtttgctgctattgtggtggggggtttgttcaagaactggatgaaatggtgcctatcagtcccatggatttttttggagttcctggtgatgaagatcgtggtcagagatttggtctcatggatgctttttctgccttcatgaggcagagattggctgatagaagttttaaccataatatcaggggaagaacagattcaattcttgagcataatccaccatttggtcctttgttggtgtttggtggccaaattccttttaggttgtcagggaatggtgggtttgaagctctgtttaatggggctcctggaattggctttacaagaggtaatgctggaaattatttcataggtccaggattagaagaattgtttgaacagctgtcagctaatgatcgtaggggccctcccccagcaactcgatctttcaattgatgcaatgcccactgttaagattactcggaggcatcttcattctgactcgcactgccctgtatgcaaagataaatttgaattggtgtctgaaccaagacaaatgccatgtaaccatttatatcattcggattgcattatcccatggctgttgcaacacaactcgtgccctgtttgccgtcaagaattgccaccacat

SEQ ID NO: 8207 - DNA, 931 bp, Gossypium hirsutum
  Clone ID: GOSHI-09MAY01-C12680_1
aaaagaaccgaaaaaagcagtccgcaaaccgacactaaacaaggacaccttggtgcgactatcactctctcttacatgttttatttgtcttgtcttaaacactaaacacctttgcgctctctcacacttttcctcttacgcataaggctgctctaactcagacacctccattgttacctcaacctcagcttttagctttagtttctcccttcgttaccctaatttgttctcatcaaccatggctgctactttactgttttcactgctcattcttgccatcactgcaggccactcaagtggtgcgacgggcaaatggtgtgtttgcaaagatggtgtgggtgatggaaacttgcagaagacgttggactatgcttgtggaaacggtgctgactgtaaccctatccgttcaaatggaccttgttacaaccccaacactgttaaagcacattgcaattatgctgttaacagctatttccaaaaaaaaggccaaggtcaaggctcctgtgaatttgctggcacggcagctatcactacaactgaccctagctctggtggctgttcttacccctccagtgccagtggtggaggcacgaccttaacaccaacaacaccgggcacgacaacaactccatcatcatcaacaaccaccacgccctccatcatgaccccaggcaccaacaccccaacaagcactaccccctacagttcaacaacacctaccggagtgttaggaggagtcggcaccggcttaggcccatccggaaccacctccaccaacactgattacagccacggaggattccggctccaacccatttctttcttcacaaccctcctgttttcaggcgtcatgctgattggggttgaatactacaaaccagcaatgagcctatatgtaatattcagatgtttatctaaggacatgtaaagc

SEQ ID NO: 8208 - DNA, 905 bp, Gossypium hirsutum
  Clone ID: GOSHI-09MAY01-C12650_1
aaattctctgctttttcttattcaaactttggaacccattgctgttaagaatatctgaaaaaatccacaggaaaaggaaaatgaacatcttcagcaaaaaacccaatcccaaagagctcttcgcgagagtaagagagaaatggcgcatgctagtagaggtatagagaaggaaataggaactttacagttagaggaaaagaaacttgttgctgaaataaaaaaaactgctaaaaccggaaatgaggcagcgactaaaactctagctcggcagctggtacgacttaggcaacagatagctaagttacaaagtagtcgagctcaaatgagaggcattgcaactcatacgcaggcaatgcatgctcaatcttcagttgctgttggcatgaaaggtgccaccaaggccatgtcagccatgaataagcaaatggccccagaaaaacaagcaaaggttattcgggaatttcagaagcagtctgcccagatggatatgactactgaaatgatgtcagatgccatagatgatgctctggacgatgatgaggcagaagatgagactgaggacctgacaaatcaggttttagacgaaattggtgttgatgttgcctcacagttgtcatcggctcctaaaggtaggattgcaggaaagaatactgaaggtgttggcagttcgggtgttgatgagcttgagaagcggttggcagctcttagaaatccatgagctaaagacactgaaccccaacctttccttcattagtattgagttcccttgaattaatacctatgcgcactacttttgtagatatgactgaacattcatgtttccgaagttaacgcattgtgcactgtaattctgcaaatatttgctggaattgagattgtaaatattgattgctcttggttaccgt

SEQ ID NO: 8209 - DNA, 415 bp, Gossypium hirsutum
  Clone ID: LIB3166-055-P1-K1-A6
gggggggcccacgcgtccccccacgtttgcgcccacgcttccgaaacattttcagaaaaaaacccaatcccaaaggggctcttcgagagagtaagagagaaatggcccatgctactagaggtatagagaaggaaataggaactttacagttagaggaaaagaaacttgttgctgaaattaaaaaaactgctaaaaccggaaatgaggcagcgactaaaactctagcgcggcagctggtacggcttagacaacagatagctaagttacaaagtagtcgagctcaaatgagaggcattgcaactcatacgcaggcaatgcatgctcaatcttcagttgctgttggcatgaaaggtgccaccaaggccatgtcagccatgaataatcaaatggccccagaaaaacaagcaaaggttat

SEQ ID NO: 8210 - DNA, 530 bp, Gossypium hirsutum
  Clone ID: GOSHI-09MAY01-C12660_1
accagcaacaactgaatccaactatttttcagtgtcagcgttccacatgggcagctttgatttcggccaaaatgtgcagacttcggaatctgaacttacagaaataatctctgccccagcttcagttactaattcacccattgtcgccctcgatatttcatcactcgagaagctggagttcgatcaaagctccccatttgataatcctgagttcttcactaattttttacagcaagctctcagtctgcattagaaaatagattgtcaagtgtcaatgttttgggtgtgaccagacttcaatatcagtcgattaggaagctcaatttttggaaatattttgttttcccttcatttgctttgagctattcatttttactttttagctttgaaagtgtttttgtcccgattcaaatcgtaaaaagaattgtaatttcttatgtaaaaatttggtcaaattctgctattagcccttgtcctttaagtgagttgtggatttagtcaaatttaacccttaaacttttcaaggcccc

SEQ ID NO: 8211 - DNA, 715 bp, Gossypium hirsutum
  Clone ID: GOSHI-09MAY01-C12630_2
cttcaattctctctcactcttcaccttccatggctttacctacgaaaagggcctcgtttttcccttttcttcttcttcttcttctcgttacgatatcaatattcttggttaccccatcaaactcagccactgataccttcgtcccccgcggccgttcccagctcaagttcatttcaggctccccttatgaatataacgtcaactccatcctcacttccctagtcaactcagccatgttcacctcttacaacaacttcaccatctcagcctctcaggacaccgtctacggcctcttccagtgccgcggcgacctcgaaaacggtgactgtggccgctgtgttgctaaagcggtgagtcaactcggcactctttgccttgactccacgggtggcgggttgcaactcgaagggtgtttcgttaaatacgataacgcaacgttcttgggcgtggaggacaagagtgtggtggtgaaaagatgtgggccgttgatctcgactgactccgacgcgttggctcggcgtgatacggtgttggatttcttgggagcgagtgacgggacatacaagccgtttcgggttgccgagtcaggggatttacgaggtgtggcacagtgtgttggggatttgagtccgaccgagtgccaagattgcttatcagaggcaatcggacggctcaaaacagactgtggggcattcaagtggggtgacatgtattt

SEQ ID NO: 8212 - DNA, 938 bp, Gossypium hirsutum
  Clone ID: GOSHI-09MAY01-C12630_1
cccacgctgtccgtcccttttcaaactccttctttttctcacacactccccatggcttttagctaccgaaaacggcggcgctgtttcttcttcttctcgctgtatggtgtttcttcataacaccatcagattcagccaccgattccttcgttttcggtggctgttcgcagcttaaatacacgtctggctcaccttatgagtccaacgtcaactccatactcacttccctggtcaactcagccatgtacacctcttacagtaactttacccttccaggagccagcaatcaggacactgtctacggcctattccagtgccgtggtaacctcaacagcggtgattgtggccgctgtgtggcgaaagccgtcagtcaactcggcactctttgccttgactctacgcgtggcgtgttgcaactcgaagggtgtttcgttaaatatgataacacgactttcctgggggtggaggacaagacggtggtggtgaaaaaatgtgggccgtcgatttcgtcttactcggacgcattgggtcggcgtgatgcggtgttgggttacttgggagcaagtgatggtacctacaagccgtttcgggtaagcggttcaggggatgtacaaggtgtagctcagtgtgtaggggatttgagtccgagcgagtgccaagattgcttatcagacgcgatcggaaggctcaaaaccgactgtggggctgccaaatggggtgacatgtacttagccaagtgctacgcgcggtactcagaaggtggagaccactcccacggccaaaaagatacaaataacaatgatgaagagattgacaagactctggcaattctaattggactcattgctgcagttgctttgatcatactcttttatcattcttatcaaaactgtgtgacaatggcaaaggtgctaaataaaacaatcaattcagggatc

SEQ ID NO: 8213 - DNA, 792 bp, Gossypium hirsutum
  Clone ID: GOSHI-09MAY01-C12130_1
gtcgttgttgcttggttccaggtcaccattctatctcgaaggaaaggtggactttatgaatatattgagaaacgactcaaacaaaatggacatatggtcattgtgattgctgaaggagccggacaggatcttctttccgagagcttgcagtccgtggaccagcaagatgcttctggtaacaagcttcttcaagatgttgggctgtggatctctcacgggataaaggagcattttgcgaagaagaagatgcccattaatcttaaatatatagatcctacatacatgatccgggccattcctagcattgcttccgataacgtctactgcaccctacttgctcatggtgcagttcatggagcaatggctgggtatacaggcttcaccgttggtcccgtcaatggcagacatgcttacattccgttcaatcgaatcatcgagaaacagaacaaggttgtgattaccgacaggatgtgggcaaggctgctctcttcaacaaaccagccaagcttcttgaaacctagagatatagctgaagccaagaaagagaaatatcctgcgaatggcatcttggatgggaagtttgtaaagacaatgtcaatgaattgaccaaagacatgcccttgtaagttccatcgcatagtataccgtcactagatatgtaaatatttggctaccattaatggttcagaaactttagacgttcctttgctgttacaggccactgatacaaatcatagtaatttaacagtggattacaaaaaaaatgcattgtgtatgccaacactagatatg

SEQ ID NO: 8214 - DNA, 415 bp, Gossypium hirsutum
  Clone ID: GOSHI-09MAY01-C12120_1
cttttgtttgtggcttcatttctgatttggttggagatatatggggccgatcaagtagcgtaattcaacttgcttcagcttctgaagctacagtgagcagcacgtatgaggtttctgtatggcgttcactttggaatgaccttttttcccaggtttttcgtgctgtcagaagtatattaaatggatttgttgccttcttcgcggcctgcaacagacatcgcctaagcatttataatcacgtacaggatgtcattcaaagacgctttggtggagtcccaagatcacagacctcagatcctagacgaagcaaatcaacctgtggaaatcaatgtcaatcagaagtaaggagaagagtccatagtaaaaattgtagtcctgcaacattgtcattttgagtccaaaatattcaagaaag

SEQ ID NO: 8215 - DNA, 491 bp, Gossypium hirsutum
  Clone ID: uC-gsronu33B090e02b1
agcgctttctctcatattgctccctgctgataggggtagaaagggtttctgtaggaatttattagttttgaaaacatggcagtcatttctttcagggttcttatgagagttgtgaccatctttgctcttatttttgctattgtctcacccaaagttgaagctcagtctgctgcacctgctccttctcctacaagtgatggaacttcaattgaccaagggattgcttacgttctgatgcttgtggcactggtgcttacataccttatccaccctctagacgcatcctcctacaccttcttttaaatcatattattcattttggtaaccgaggactatatggataaatctatcaagttcctttctatttccctttctttttgggagatggatggaggggctcaatgtttgacatgcctgtgatgaagaacatcacacggttgttaatgaacggaacccctgggactatgtctacgtcgccgtccttacccacc

SEQ ID NO: 8216 - DNA, 462 bp, Gossypium hirsutum
  Clone ID: uC-gsronu33B090e08b1
agcgctttctctcatattgctccctgctgatagggttagaaagggtttctgtaggaatttattagttttgaaaacatggcaggcatttctttcagggttcttatgagagttgtgaccatctttgctcttatttttgctattgtctcacccaaagttgaagctcagtctgctgcacctgctccttctcctacaagtgatggaacttcaattgaccaagggattgcttacgttctgatgcttgtggcactggtgcttacataccttatccaccctctagacgcatcctcctacaccttgttttaaatcatattattcattttggtaacagagtactatatggataaatctatcaagttcctttctttttccctttctttttgggtgatggatgtagcggttaacggtttgcattggttttgagagattgattgattaatgtgattcctgaaatgatagcctact

SEQ ID NO: 8217 - DNA, 1010 bp, Gossypium hirsutum
  Clone ID: GOSHI-09MAY01-C12340_1
cggacgcgtgggctgttacaaacgtggagttgatcgtatttttgttgatcacccggtgttcctcgagaaggtatggggcaaaactggatccaaaatctatggccctagagcaggtctggactacaaggacaatcaattgcgatttagcttgttatgtctggctgctttggaggcaccaagagttctgaatttaaatagcagcaaatatttctcaggaccatacggagaaaacgttgtcttcgttgccaatgattggcacactgctcttcttccatgctatttgaaaagcgtgtatcaatcaaggggaatctatatgagtgccaaggttgctttttgcatccacaatatagcctatcaagggagatttgcctttgaagattactcacttctcaatttgcctgatcaattcaagagttcatttgacttcatggatgggtatgataagcctgtcaagggaaggaaaatcaattggatgaaggctggaattttggaatcacacagggtattgactgtaagtccatactatgcccaggagcttgtttccggtgaagataaaggtgttgaactcgatcacatcattcgtaaaaccggcatcactggaattgtgaatggcatggatgttcaagaatggaaccctaccactgacaaatacatcagtgtcaaatatgatgcaacaactgtaacgtatgcaaagcgattattaaaggtagctcttcaagcagaacttgggttgccttgcgatgagaatgttccattgattgggttcatccgtaggctggaagagcagaatggctcagacatcttgacagctgctattccaaaattcattggacagaattgtcagattgttgtccttggaactggtgaaacggccatggagaagcagattcaacagctggagaccctatatcctgcaaaagctataggagtagccaaattcattgccccattggcccatatgattttcgcgggtgctcattacctcttggttcctacttgatttgaaccat

SEQ ID NO: 8218 - DNA, 801 bp, Gossypium hirsutum
  Clone ID: GOSHI-09MAY01-C12370_1
aaaaccctaatcccccctttcatgcgctgcacgacagatcatcgcccccttttcggagactcctcgaaccttgcccccaagctccgatgacgatggtagaaagagcaacggttcagtcgcgaggtatgtctctttcctttttgttttattctttcaaaggcggtcgggttgataaaaaataaaagaaaagaaagaaagaaaaaactgcgaaagaaaaaagagatccggaaatcaccttttggtgtttttgtattccgattgcgaaaaaaatccaggttgtagcctattctcagtcttttatagtgtctattttacaaaatataatgacaaaatcaaaaataaatcaccccgttctgccccttttcattttctctctctgttcctttttgtgtgctgttggagtctgctgtgttgctggtttgtgcgtctcttgcaggtacggagtgcagggtctaggatgtggcatgtacgggtgggcgtggccgcgtgcgtacggaggcccgtgcaagtggtgctacgtgcgtaggaagtggctcggggaaggcggcggttgaagaccccagaaaccctagggtttctgcttgtttcagttttgggttaggggtatcgggccattgtaattgggccgtttgggtttaggctagttgggctatcaggtgttcagactagaatttaggtttgcattgggccatttataaatgggtttggtttgtatttcgggtcttggtatattattattatttttggtaaactgatctgagccaattgtaaatagactgtttttttgacttaattttattt

SEQ ID NO: 8219 - DNA, 387 bp, Gossypium hirsutum
  Clone ID: LIB3166-051-P1-K1-B4
cgtccggcattttttaattgtggcaagtgaatctcttccaataatgactgattgccatccccgggggcctttattcggactgctctccaacaagccactgcttcaatggctaatgaatgcatagtatctttgccattactaactttttcttcgtgtattcttttgttacggactccccatatggcccataaagcgcagcaaaataaacgacttctgcatggattgagttgtccaaaaacccattgcactctctgaaaatatgttcaatgtttcggcttgtgcttcacatcgagggcattgtgtgatgtttaaaagctttcctgtgcttcatattcacttttgtaggcaagttattccattataatctccatattggaattgcaattt

SEQ ID NO: 8220 - DNA, 285 bp, Gossypium hirsutum
  Clone ID: LIB3146-050-Q1-K1-H6
gtgaatctcctccaataatgactgattgccatccccgagccactccgattcggactgctctccaacaagccactgcttcaatggcgaatgaatgcagagcaaaataaacgacttcggcaaggattgagttgtccaaaaacccagggcactctcggaaaatatggtcaatgtttcggctcgtgcttcacatcgagggcatgttgtgatgtttaaaagctttctgtgctgcatattcacttttgtggatgaggaaatcttcatgaggcgttcgtgccagagggatcc

SEQ ID NO: 8221 - DNA, 613 bp, Gossypium hirsutum
  Clone ID: GOSHI-09MAY01-C12320_1
cggacgcgtggggccaaaaccaaaatatgaagatactatgccttcacgggtttagaaccagtgggaagttcctgcagaagcaaatcagcaaatgggatccttctctttttcttcatcactttcaaatggattttcctgacgggttatttagtgccggaggaaagtcagacatagaaggcatattccctcctccatactttgaatggttccaattcaacaaggaattcacagagtacacaaaccttgaggaatgcatctctcacttgtgtcaatatatcacccacaatggcccttttcatggattgctcggcttttcccagggtgcaactcttggtgctcttctattgggctacaaggcacaggggaaggtgttaaaggagcatccacctttcaaaatgtttgtatcaatatcaggatcaaaattcagagagccaagcatatgcgaggtggcttacaaagacaaaatcgatgtgaaatcagttcacttcatcggagctaaggattggttaaagttgccttcggaggatttggctactgctttccatgatcctcttatcataaggcacccccaaggtcatactgtcccacgtttggatgaggtttccatagagca

SEQ ID NO: 8222 - DNA, 402 bp, Gossypium hirsutum
  Clone ID: LIB3135-011-Q1-K1-A10
cccacgcgtccggccatttcttgcttcattcgactctgacattcctccccttcatccaaagtcaggtggcttgggacgagagagaatcaaacaaccaatcggcttgggaaggggctgagtgggcccttactggttcagcgtgtgagaaggaggtatgccgaaatagtgcagtacaataacatcaaatttcaagtgtgggatttaggtggacagacaagtatcaggaagaggagctgagaggagcagcagttcttatttttcttatttttgcaagtaagcagattggttgaaggtagcaacaagaaggggaaaaatatcactcaagggtgtgctaaggtaacaacaccctcccaatgtctttgttgtaaagtggttatgcgttcaactttggaaagatgaaat

SEQ ID NO: 8223 - DNA, 357 bp, Gossypium hirsutum
  Clone ID: LIB3166-050-P1-K1-B8
cccacgcgtccgttcctccccttcatccaaagtcagcgtgctgagtgggggtattaaggtggcttgggacgagagagaatcaaacaaccaatcggcttgggaaggggctgagtgggcccttactggttcagcgtgtgagaaggaggtatgccgaaatagtgcagtacaataacatcaaatttcaagtgtgggatttaggtggacagacaagtatcaggaagaggagctgtgaggagcagcagttcttatttttcttatttttgcaagtaagcagattggttgaaggtagcatcatgaaggggaaaaatatcactcaagggtgtgctaaggtaacaacacccttccaatgtctttgtt

SEQ ID NO: 8224 - DNA, 723 bp, Gossypium hirsutum
  Clone ID: GOSHI-09MAY01-C12270_2
gaggtcgcccacgcgtcccgtgacctcgaagcatccaaagcattgaaataccctccttcaatttcccgattccaacaagtgatttcaaaaaaccctaaccctatctccagtttcaaccacgtcttgagttcgtttcgcttttcttttcgtaggtcgttgctaattctctcttttcttaatcgatggcggctaaacctcttacgagtgaagcaatcgccctcacagaaaagaaaatggacatgacattggatgatatcattaaaatgtcaaaaaatacttcacataaatctaagaaacagcgaaggataccgaataaaatccagagacctgtgagtaatgctgctaaagataaggccttgaaggtacgacagtacatggactcgcgggcctctgttagacagggggttctagctcaaagaaggtctaatttccaggggaaccggtttccttttgcggctgaggctgcacgtagggctgcagttgctccaatacgcaatagagcatttaatactagcagggtggctaatttgaacaagccaagggttggagcaccacctgtccaaaggagggctacaaatgggggttttactgccaagccacaagcggcagcaaccaacaactacaggcaggaccacaagaggacaatagtacaaaacaaaggcctaaaacattggattccctctttgccaatatgaaagaagagcgattgagggtattgtcaca

SEQ ID NO: 8225 - DNA, 1100 bp, Gossypium hirsutum
  Clone ID: GOSHI-09MAY01-C12270_1
cccacgcgtccgcccacgcgtccgcccacgcgtccggctactgcttgtgaagctttactctccgttgattgcaatgaatgtccagagtggggtttaggtgcatgatcatgttttgaaattgaaaaagttttgcggaaaataaagggagtagtacagattgtttgttttgtctttctgtttactggaaataaatagtcttcctatgctggtaagattcccaattctcaactttttgttgatggctgccggcatgttgggtgaaagcatagttcctccctggacttacctctgtattgttttgtaatgttttccctcgcctcccatggtttttgcttctcggtgtagggttggagcaccacctgtccaaaggagggctacaaatgggggttttactgccaagccacagcggcagcaacaacaactacagcaagaccaacaagagaacatagtaacaaaacaaaggcctaaaacattggattccctctttgccaatatgaaagaagagcgattgagggtattgtcacatcagaacaatggtgtacaacctaatggccgtggccgacaaagaatgccctggggaagaggccgttttggcaactgatatatgagatactacgagtgttatatgataggttgtttgttgcccttggttttctcttttcatgtctgcatgccaatggggatattgtaaaccaaaggatggctgcatcttgttttctttgacttgcgctatcaacttgtcagtcaagactgtttttcttttatatgttgggaaatgtgggaattcagtatgttcaactgaaattaggagggatgttgtatggtagctatatttcacttgctagcaatttaccattggatttgttacataatggtgttttagttaaatgagaaatccattggggaaccctttatttgtaatttgtagagcttgggtgcctagctgcaaggggctaagttttgttggaattcatatattgtcttcaccctgagtaccatccgacttcaaaataaaaaaaaaaaaaaaaaaactccccttttttctcttttctccttccttctctttttatacattcttttcccccctcttcttctttaat

SEQ ID NO: 8226 - DNA, 364 bp, Gossypium hirsutum
  Clone ID: LIB3166-050-P1-K1-D9
cccacgcgtccgattaaaatgtcaaaaaaatacttcaaataaatctaagaagcgggcaaggataccgaataaaatccatagacctgtgagtaatgctgctaaagataaggccttgaaggtacgacagtacatggactcgcgggcttttgttagacaggaaccggtttccttttgtggctgaggctgcacgtagagctgcagttgctccatttcgcaatagagcatttaatagtaggagggtggctaatttgaacaaaccaaggtaaattatggatcttctacaatattgatgacctctggaatgtgttcctggtttacttatttcaagttgcatgttatgtggaacacctaatatttgatcaca

SEQ ID NO: 8227 - DNA, 326 bp, Gossypium hirsutum
  Clone ID: uC-gsronu33B100a06b1
gacggacggacccagcgcgatcgcagcattaaatccggatgaaggtggataccatgtactgcttgctaacatatacgcaacagcttcgatgtggggtgaagtagccaaagttcgaactacaatgaaaagaaagggcttcagaaaacgcccggctgcagtgtagatgagatgcgaaacgcaagttacactttctactttttaattataaaccccccccagcttaccaagaattactgcttacctcgaggagcttggaaataagatcctagctgtcggttatgttcctgacacaagttcgattcatgatgtggaagactacattctaa

SEQ ID NO: 8228 - DNA, 285 bp, Gossypium hirsutum
  Clone ID: uC-gsronu33B100a12b1
tcgttgcattaaatccggatgaaggtggataccatgtactgcttgctaacatatacgcaacagcttcgatgtggggtgaagtagccaaagttcgaactacaatgaaaagaaagggcttcagaaaacgccccggctgcagtgtagttgcgttgagaaatgaagttcacagtttctactctgtaaccacaaaccaccctcagcctacatagatatatgcttttctttaggtgctaggaaataagatcaaagctgtcgatcttgtacctgacacaagtttcatttctt

SEQ ID NO: 8229 - DNA, 470 bp, Gossypium hirsutum
  Clone ID: GOSHI-09MAY01-C13980_1
cctagagaaaaagaagaatgaagactagtaatctatgcatgccaaggttcaaaggcaacaacaaaaacaaacgtttgtcgccgatgacccttttcgaacggttccgagaggcgatttttcgtctcataatgctatcggctctcactaagacctcgtcggatcaacactttaaccctttggctgtccctcagagatgttaccaccagccagatgacgcccgtcgcagtgaagacatggcggattgcattgagttcatcaagagaaaggcattcatagaagaaaatcgggagtcgagtgatcgtaattcgactgcgaatgatgttggtggtgatgttgccatgcaggttctgtgatgccattcttttaaccatttttttcttcatttaaatgtgagatttgaacattagaggtgtgtggtatagatttggaactttttgtattttaattctgtattttttaaaattttttat

SEQ ID NO: 8230 - DNA, 446 bp, Gossypium hirsutum
  Clone ID: GOSHI-09MAY01-C13900_1
gttcccctttcttcttcttcctccataatcaaaagctctctctcaaattttttaaaaaaacttaaaaggctcccttttttttaaagaaagatttaaatggccgtcgattccgcaatctcgtctcctttgggtccgccggcatgcgagaaagatgcaaaagctttgcgattcatcgaggaaatgactcggaacgccgacccggttcaagaacgagttttgtccgatatcttaactcaaaactcccaaaccgagtaccttcgaaggttcaaactcaatggggcaagcgatcgtgactcgttcaaatccaaacttccggtcattacttacgaagaccttcagcctgaaatccaacgtatcgctaatggcgaccgttccgccattttatcagctcacccaatctcagaattcctcaccagctcccggactttagctggtgagaggaaact

SEQ ID NO: 8231 - DNA, 466 bp, Gossypium hirsutum
  Clone ID: GOSHI-09MAY01-C13880_1
agtcaactaggggtcaagtgcagtagagattcatgttcccgacaatggagagtttcgggttttgtttccttatgcttacaatcgcaattttggcatcacccgcactttccgatctggtcctttccaaagtcgatcgacgcatatatttgacatcacatattgttcggatttcttcaactatgaaggtggagaatgcaggttccgaaaaggagtccaaggttttgctggcttttcctgagcaacaagccaaaaatatggcatatttgattgctactccacatgaagggaaagggaaaggaaaaaaccctgttgttgttctccctgttgaggctgccaacccaaaagacatgcctgctgctttgacattctattcagtatctttgcctaagggattagctgagggtgatagcttcacttttgatgtcttggccgtatttacccatgccttgcgacctattcctgagca

SEQ ID NO: 8232 - DNA, 611 bp, Gossypium hirsutum
  Clone ID: GOSHI-09MAY01-C13870_2
atcgactctaaatttcatctctcaacatctttctttcatatggcttctttccccgcggccgcttttttcatcgttttgggcgtggcatttggtgtatcaaactcggaagcatgtactcatgactcggagtgtcaattgaactgtgatcatctcggcctttgtgacttaaaaaccaataaatgtagttgcttgccagtgactgagccattaccctttgatggtgtaccgatggcgaatgctaaatgcagcacggatgacgattgcaaggatgcttgtccaccaaattgcacacctaaatgctttcattgcttttgcttatgttattgtaatgcttgaaaaatatattgttttcattcaaaagacttcaaatttaagcctttcaataatttgtattaaaaaattggtacataaaatgaatgaatagataaaggtgttgggagaaaaattttttaaaaaaaaaaaagggcggacaataataaaagatccaaacttacataaaacgtgacatgcaacgaaataacaacttctataatgaaaaactaaaataaaagggggggcgccttttaaagaacccaactttacctccgcggacttcgaaggtaaaaattttt

SEQ ID NO: 8233 - DNA, 596 bp, Gossypium hirsutum
  Clone ID: LIB3543-037-Q1-K1-D10
cccggtcgacccagcgtttccttactctaaattcactctcagatctttcaaacaatggcttcttttggtgttgcttgttttttcattgttttgatcgtggcatttggtgtatcaaactcggaagcatgtactcatgactcggagtgtcaattgaactgtgatcatcttggtctttgtgacttaaaaaccaagggggggggttgcttgccggtgtctgagccattaccctttgatagtgtaccaatggcgaatgctaaatgcagcacggatgacgattgcgggattcacaaagtaggagcaccttgttggattgggtcatgcgtcgcatgcttagtaaggtttgaacccctcccctttatatggcacctaaggatttgaatcaaacaaacccctcaacaggtcgctattgtctttggatcaactcatgttttgtgtcccaactctacggcaaacttgagcgcctgagactacttgaagagacaatggattcataaagcagaagtgcctcatttgcctgtggtagagtatgaaaaccagaacctatatcatataggtcacctgattaagtggcaatgtatgtgccctaatgcaaatat

SEQ ID NO: 8234 - DNA, 337 bp, Gossypium hirsutum
  Clone ID: LIB3189-018-P1-K1-D6
cggacgcgtgggcggacgcgtgggtttcataatattatttactctaaatttaatctctcaacatctttcaaacaatggcttcttttggtgttgcttcttttttcatcgttttggtcgtggcatttggtgtatcaaacttggaagcatgtactcatgactcatagtgtcaattgaactgtgatcatttcggcctttgtgacttaaaaaccaattaatgtagttgcttgccagtgactgagccattactctttgttggtgttccgatttctaatgctatatgcttctcggtttacttttgtatgaattttgttctactttttgcttactttatatttct

SEQ ID NO: 8235 - DNA, 497 bp, Gossypium hirsutum
  Clone ID: GOSHI-09MAY01-C13800_1
cagcaacactactaattttgagtatataaagtagagtgatctcgttttgtcgcgacaaggtggtcaggagagcaaaactgatcctccccggacactgacaaatagcaccagaaatggctgttggaggttttggcggcgtcgatggacctgtcagcagcttcaatggcaagatcacagcttcggtggtgatcacctgcattgttgctgcttcaagcggcctcatatttggttatgacattggaatttcaggaggtgtgacaactatgcaaccatttctccagaaatttttcccatcagttttaagaaaagcagcagaggctaaaaccaacatctattgcgtgtatgatagccaagttttaacatcctttacttcttcactgtacattgctggtttagctgcctcactggttgctagccgcctcagtgcggcaattggtcgacgaaacacaatggtcttaggtggtctcaccttccttgctggtgctgccatcaatggc

SEQ ID NO: 8236 - DNA, 819 bp, Gossypium hirsutum
  Clone ID: GOSHI-09MAY01-C13570_1
cccacgcgttcgcggacgcgtgggctagatcgcgtgcttctgcccttttatttttcgaggaaccgttcacctccgcccaaccatgaacacctctattcgaagcaaagtttttcccagaaaattaaggaatttcgcatgtgaaaacacgtacttcaattgtatataataatatatgtacatataatataaccctaaaatcgagattccaaaacccactccattaagctttcaaaatacaaagaaaaactcgggatttcatcttccccaaaataatggctttcaagagtttcccaaagctctccattcttgctggtgtttttaccttactattatcccaccacctatatgaagtctccgctgctaccggtggtcggatgggtggctcttctttctcttcagagagcccgccatcacaccgtaatgatgatgattatcatcattacaatcatcatgatcttcatcaccgtcaccatcatcattatcatcattcccagcctggtttcccgaggagcgccgatcaagagagtggtcctacgtcggcggctgtttcttatttaattttaaccattttcatgggagtagcttcagttattgtatacagtagcaccgtgcaaaatcgaacaagtattcttcaagttcaggttggcttgtctgcgaaagcccgttcgttgcaaaaggaactcaccgaaattgcctccacaacggacacttctactgcaaagggatggaacatcatattggaagaaaccgtatcatcattgcttcaccatccacattgctatcttcatggctattcatctgtaactcatcactggactg

SEQ ID NO: 8237 - DNA, 897 bp, Gossypium hirsutum
  Clone ID: GOSHI-09MAY01-C13460_1
cccacgccgtccgaaaaaaataagatcactcctaaagaaaatttatactttttttggccaacgagaaaattattactttaaatccctaaaacttgtcatttgctccttctctctcttacccaaatctgacactggttttggattttccatttcaattcagtgttttcaaaccgcattgttggatgattgtgggcttgtagcagagcaatgaatggagtaaaaaagtctacctcagcaaaaataaaattgaggggcttattgaatcaatctgataatcgcacttgtgctgattgtggtgctccagatccaaagtgggcatcagcaaatattggagtctttttatgcttgaaatgttgtggtgtgcacagaagcctcggtacacacatatccaaggttttatctgtggcattggatgaatggtctgatgaagaaattgatgccatgattgaagttggaggaaattcctctgctaattcaatctatgaggcttatatacctgaaggttatacaaagcctggcccaaatgctagtaatgatgagcggaggaaattcattaagtccaagtatgaacttcaagaatttttgaggcccagcttgcggatcacatcagggaaggattcctcttcttcttctactcaatcgaacatttctggaaagattttggatactatcctatcaaatgcctctcggtacggaggcatgctggcattcattcggttcctgtagggcaaagtagtaaaaggcacaaatttagctgtccgggatatgatgacgagtgatccttatgttgtcctgactcttgggaagcagactgttcagtcgactgtaatatcaagcaacttgaatccagtctggaatgaggaattaatgttatcggttcctagcaactatgggcct

SEQ ID NO: 8238 - DNA, 388 bp, Gossypium hirsutum
  Clone ID: LIB3197-046-Q1-M1-B3
cttttgcgctttcaaacgttttcatcttttacccctttttttcccccaaaattgataaattggttgtctgtttctgggagaatgaaaatgtattgaaatattaaataaaatatatattgggttctatatcattctcccactcgtagctctagcgttcatttaatttttctattcgtttgacaataactgactttatagttttcaaaccgcattgctggatgattgtgggcttgtagcacagcaatgagtggagtaaaaaagtctacctcagcaaaaataacattgaggggcttattgaatcaacctgataatcgcacttgtgctgattgtggggctccaaatccaaagtgggcatcagcaaatattggaatctttttatgcctgaaat

SEQ ID NO: 8239 - DNA, 612 bp, Gossypium hirsutum
  Clone ID: GOSHI-09MAY01-C13780_1
gtcgtttcgttcaaagactacgaaagaaagccgcatctcttcacaatgtaagtttagaacaagggacagtaacatctctacttgaagaaaatggtattgtcaaaggagtgcactataaagataagagtggtcaattgctaacagcttatgctcctctcaccatcgtctgtgatggttgtttctcgaatttgagacgctctctctgccattctaaggtggatatcccttcttattttgttggttttatcttgacgaactgtaaacttccaaaagaaaaatatggagtttttatattagcagatccttcacctatcctattttatcccattagtagcacagaaattcgttgcttggtggatgttcctaggcaaaatctaccctcttgtttccaatggggaaatggctcattacttggaaactttggtggctcccaaggttcttcctgaattatacaattcctttatatctgcaatagagaagaaggacaacataagaataatgccgaacaaaatcatggctggtgctccacacctcactcctggtgcttttttgatcggcgatgcattcaatatgcggcatgctataactggagggggaatgactgttgcttta

SEQ ID NO: 8240 - DNA, 607 bp, Gossypium hirsutum
  Clone ID: GOSHI-09MAY01-C13690_1
gacccacgcgtccggtagaaagaaaacaacggtaaaccctgtggaaacaagccgactgcaaaacgctgcagctgaagccctaacttttccgctcacctctctgcaccagccgctcctctattcgcatcttccatggctacgataccagttaacccaaaacccttcttgaacaatttgactggaaagactgttatagtgaagctcaaatgggggatggaatacaaaggttttcttgcatctgttgattcatacatgaacttgcagcttggcaatgctgaagagtatgttgatgggcaattcactggaaatttaggggagattttgatcagatgcaataatgttctctatcttcgtggggttccggaagatgaagatatagaagatgctgacaaggactagatggttcacatgtggttgaaatagaacctttggtatttgattagaggtgctgtaacttttgtttatcatggttgaatgtcattatgtcatttagtcgcccggacagacaaaccgcgatgtagttaattgtgcttttgcttgaccgctattgccaacattatttggaatattgcttcttttaatattcaagccggatgtattaatggag

SEQ ID NO: 8241 - DNA, 458 bp, Gossypium hirsutum
  Clone ID: GOSHI-09MAY01-C13670_2
cacttgcggaggctgcattccttattggtctggaaaagaacagcgatgttgtgcatatggctagctatgcaccacttttcgggcgcgccggtgacagacggtggaacccagatgctttcgtcttcaactcctttcaggcgtatggaactcctagctactgggtgcagcgttttttcacagaatcaagtggagcaattcttcttaatgcaacactgcaaaaagattcctctaattcccttgttgcatctgcaattacttggaaaaattcagaggctggtcaaacctacataaggataaaggttgtaaactttgggagcaattcagtcaacctccaaatttctgttgatggattggatccaaattctgtaaagctgtctggatcaacaaagaccactcttacatctgctaatctgattgatgaaaattcctttaaggaacctaaaaaagtctcacctatt

SEQ ID NO: 8242 - DNA, 668 bp, Gossypium hirsutum
  Clone ID: GOSHI-09MAY01-C13670_1
cacgccgtccgcgacctcttaatctcctcaacaaaaacaaattgccggcactgcaagagaagattcattctaaattccgcttgttgccattctgccaattacttggaaaaattcagaggatggtcaaacctacataaggataaaggttgtaaactttgggagcaattcagtcaacctccaaatttctgttgatggattggatccaaattctgtaaagctgtctggatcaacaaagaccactctcacgtctgctaatctgatggatgagaattccttcaaggagccaaagaaggtcgctcctaatcaaacactgctggaagatgcgcaagagatgagtgcgctactgcgaccacattctttcacttcatttgatttgttaaaagagtctgtgaatcttagaattacagaagatgattcttctctcgtatcttccatctgaaataaattaatgggaagtagtaatatgcaaaacgtaaaagatgcgtgggtctatatatattaaaataatgatagttcaccagcgctctggtggatatcaagtctttgcattcaatcagctatgtatataaagtctcctctgccatttggttttcattttagggttcatcaaatataacataacattccgtaatctcacatccctgaataaaattatgtgtttgggtttt

SEQ ID NO: 8243 - DNA, 294 bp, Gossypium hirsutum
  Clone ID: LIB3135-011-Q1-K1-G11
ctcgtatcttccatctgaaataaattaatgggacgtcgtaatatgcaaaatgtgaaagatgcgtgggtctatatttattaaaataatgatagttcaccagcggtctggtggatatcaagtctttgcattcaatcagctatgtatataaagtctcctctgcagaaaacaacaaagaagaagtacctagatatgctggcaagcagatggcttatatatacaaggccgccgtgaactaggatggatcacactatcgctgcctttggggaaaagtaactagacctcatggcaacagtg

SEQ ID NO: 8244 - DNA, 458 bp, Gossypium hirsutum
  Clone ID: GOSHI-09MAY01-C13190_1
gtacgattaaccccaaggtcatagagtgcgagtatgctgtccgtggtgagattgtcacccttgcacagaaattgcaagaagagatacagactaagccagatgctcatccctttgaagagatactgtactgcaacattggaaatccacaatctcttggtcagcagccaataacttttttccgagaggttcttgcattatgcgaccatccagccattttggacaaaagtgagacacagggtttattcagtgctgactccattgaacgtgcttggcaaattcttgatcaaattcctggaagggcaactggtgcctacagtcatagccagggtatcaagggattacgagatactattgctgccggaattgagggtcgtgatggttttcctgctgagccaattgatattttcttgacagatggagcgagccctgcattgcacattatgatgcacttgctgata

SEQ ID NO: 8245 - DNA, 593 bp, Gossypium hirsutum
  Clone ID: GOSHI-09MAY01-C13130_1
aattaattaaacgttaaaaaaaaacaaccgctttcttctacttactaactgttctttaatccttcatttttcttctttttccagatttggatttgaagctctcttctttcccactaaaaaaaaactgaaattttttacataaaaatatgttctttagactttaaagtttcaatcttttctccatcttgttcttcaatggcttacttaacccatttcatccttttattactcataaatttagctgcggcccaacaaatctcaaacacgtgaatcatcatcatcaacaacaaccaacccaacaacaacagaagattgttacaaccgttggatctacatcagaaacctcccatcaaggttcaatcttgatcttctgacaaactgtatctgaatacccaattgttgatgatttttgtccgtacttagctaatcatggtttaggacaaaataacccataccaaatctcgtagttggtatagaactgaccctttattacttgaacttatcttccatagacgaatccaggaattaccctttgtctacaaatgatcctaatgatttccaatgctatgtttttttcttattattttgctata

SEQ ID NO: 8246 - DNA, 769 bp, Gossypium hirsutum
  Clone ID: GOSHI-09MAY01-C13070_1
gttgccaaccctatttttcccttgttttgtacagaaacaagcgaattttcttttttgttttaaaaaatttgaaaagtaaaaccgtagaagagattgatcaatccaattctgtggctctctttctctctctcttcagagagttcttctttgaatgtctccgatctcttattttctatcagttgaatgcataaataaataaaaatcttcagaagttttctcaaatttcagatctaaatcatagaagtactttttcatttccccgtaacttatccgaagagagataaagagaaaagaggtagataaatcgagaaaaaaaatgatcacaattccgtatttgaccgctttaaccacgtatttcagctatggccttctcttcgcgtttggccaattccgtgatttcttcaggaacatcttcgattggtggcacgccagcaatcttgagggatatgcgccgatctgtttaggacttgaagatttctatattcggcgcttgtatcttcgtattcaggattgtttcggaagaccgatagcgagtgctccagatgcttggtttgatgtagtggagcgctactccaatgacaataataaaacattgaagcgaactgacaagataagcaggtgtcttaacttgggatcatacaattatcttggcttcgcagcagcctgaatattgcacgccccgtgtaattgattcattatgtagattttcggcaagcacttgtagtactcgtgttgaaggaggaactacaacactgcataaagaactgga

SEQ ID NO: 8247 - DNA, 534 bp, Gossypium hirsutum
  Clone ID: GOSHI-09MAY01-C113398_1
gtttattcaagcagctagggttttcgacgatttggctgtcggtttggtttccgggttggacaatgatgtcgggtataatttgagctcagttgaactacctgctccctggttcatatactcttttatgggaataggaattacgatatgtcgtcttgctctcattggttgcatagctgctgaatctattaatggatgctgcctttgtttctatacacttctcaaaattattctcgttctaatagaagctgctttggtagcatttattgcaattgaccgtagctgggagaaggatcttccgttggacccaactggagaaattgatagcttccgatcctttgtcgaagacaacattgatatatgtaaatgggttggcatcagtgtggtcattattcaagcattagcaatgctagtggcaataattttgcggactatggtttctgctagaagaagagacatcgatgatgaagatgaatatgactatgaaagcattacaggtacgacttgggagccatgctaaaccctagtctagccact

SEQ ID NO: 8248 - DNA, 1105 bp, Gossypium hirsutum
  Clone ID: GOSHI-09MAY01-C13370_1
gccagcttttgcttggttatggtatggacttatggctaaataagtataaaatctctaacagaaactaaaaaaaaaaaaaaattataaagaaagacgaataaggaaaaaagggtgttaaagaccaaaggccaaagccattttttctttcttttggtttctggggagagaccagtttgggcaaagatggtgaagaattggaaaaaggctttgattttggtgctgtttacagtctgcattctggggtttaagccaagatgtgtcaatggcgaaacagatcaagcagatgcttctgctctaggggttatgtataccagcttaaattcaccacagcagctaacaggttggactgctagcaatggtgatccatgtgggcagtcctggaaaggtgttacttgctcgaacaaacgcgtcactgaaattaaactgtcaaatcttggactttccgggtcggtgggttacagctttcaaagtttgacatcattgaaagaattggacttgagccacaacaattttgcaggagatataccatattttactcttccgaacttgcagcgattaaatctcgagtataatcaatttactggcagcgtcccttttgccatcagtcagatgccttctcttcagtacctaaatcttgctcataatcagttgcagaatgcgctgaacgacatgtttggaccactttcttccctctccacactggatctctctttcaattctctgaacggtggtctgcccgagagttttaagaatcttaccagtataagctctatgtacttgcaaaacaaccagttttcaggcactattgatgtcctcgcaaatcttcccctcgatactctagatgtttcgaacaaccgttttactggctgggtacctgatcaactgaaaagtatcaatttgaagaaggatggtaattcatggagctcagggcctgcaccttctcctccacctggtactcctcctgccactagaaatagaaagcacaaatctggcagcgatggttctgcatcagatagtggttctggtggtgggagtagcagctcaggaattggaggtggagccatagctggaatagtgatatcaatccttatatcggggctatagt

SEQ ID NO: 8249 - DNA, 733 bp, Gossypium hirsutum
  Clone ID: GOSHI-09MAY01-C13310_1
aagaaaagtccacttttcttatagattactcgtttccttcaagctagctctctctttatttagatcttgaagtgtgagatggcgacaacatcagcaacaaccttctcaattgggtcgactgtctccttcggaagcaggggaaatccacttccacaatctaaaccttttgttgcgaggttcacctccccaaattcacttgcaagttttagtggtctcaaggcagcaacatatgtgaactgtgagtcagagtcctcattcttcagcaaggaaagcagcgccgctcttagaggctcatttgtaccaaaagcacagaaagcaaaccagaagtctcagaatggtctacagcctgtggcatcttacaaagtcgcaatacttggagctgctggagggatagggcagccattagcccttctaatcaagatgtctccattagttgcagccctgaacctctatgatatagcaaatgtcaagggagttgctgcggacctcagtcactgtaatactccgtctcaagttcaggatttcactggtgcttctgaatagaaattgtttgaaggtgtaaatgtagtgggtattcctgctggagttccaagaaagccctgtatgactcgtgatgacttctttacattcatgccacatcgtgaggaccttgtgagcgtgctgatattgtccgatgcctcatcatatatagcattccagtactcacagtccaatgttgcgagtctgaacaagg

SEQ ID NO: 8250 - DNA, 426 bp, Gossypium hirsutum
  Clone ID: GOSHI-09MAY01-C13320_2
ctggaattatcttctgcagtcaactccaccatattcctaagtttctctctcaagctctttgcgggcccagggggagaaataaaaatcttcttgggtttgtcttttattgccttccatttttcttttattttcagaagaaaatggaaggacatggcagccgaggaggctcttgacttgtcaactttgcagtctcagctaagtgaaactcatgaaatgtggaaccaggagatggaaaaacaccaatgccaggtagattttttacaagacaaaattatggaggtaaaggcttgcttacagggtccggaggaggaatcaaaggaggtagatgttctttggcgtatggtaaaaactactgcaactttgttggcttacttgaaatcaaaagcaagagtgatggctgttcctgatttagcccataagtcatgc

SEQ ID NO: 8251 - DNA, 630 bp, Gossypium hirsutum
  Clone ID: GOSHI-09MAY01-C13320_1
ataaaagagaaaaaaaaaaagcaaataaaaaggggagaaaaacagaactgttcttctggaacgaagacgatcagcgatatcaaaagcacttccccagtctcctggaattatcttctgcagtcaactccaccatattcctaagtttctctctcaagctctttgcaatcccaaaaggagaaataaaaatcttcttggggaaggacatggcagccgaggaggctcttgacttgtcaactttgcagtctcagctaagtgaaactcatgaaatgtggaaccaggagatggaaaaacaccaatgccaggtagattttttacaagacaaaattatggaggtaaaggcttgcttacagggtccggaggaggaatcaaaggaggtagatgttctttggcgtagggtaaaaactactgcaactttgttggcttacttgaaatcaaaagcaagagtgatggctgttcctgatttagcccataagtcatgcggcatcaaaatattagaaggggtagggctcgtggataaggaaggtacaccgttgtctggatggtcaaggagtgctgatctcgcttcatttgactgtgtagatgaagaaacttggactggaattagtagacaacaagattctctggatgaac

SEQ ID NO: 8252 - DNA, 1157 bp, Gossypium hirsutum
  Clone ID: GOSHI-09MAY01-C13230_1
gcggagtataaataacaaagaacaacaaaactgccgcatcgacggtagacggaagctactcccatctacgatcaccgcgaccttccaaactccaccaccaaaatgcaaaatcaaaccgaaccaccgccggaaactaactcggacaaagacgatcaagcgattgagtttgatttatcatccaccaccgctctcgatctcaccagcttccagctccacgatctcgactcggtggaattgccgtcaagccttaccgagttggaccttactgcgaatcgcttgtcgaaattggaccctcggattgcgaatctcattaacctcagaaagctctcttttcagcagaacctcatcgacgatgctgctatcgagtcgatctctagctgggactcattatctggtcttgaggagttagtactcagggataataaattgatgaaagtaccagatgtcagcttattcaagaagctcttggtttttgatgtttctttcaacgaaatcacttctcttcatggaatgtcgaaggtctccagcacactgaaggaactctatgtatccaaaaatgaagttactaagatggaggagattgaccacttgcatgagttgcaaattcttgaacttggttcgaacagattacgggtaatggaaaatttgcaaaatttcacaaaattagaagagctgtggctgggaaggaatcgaattaaagctataaacctttgtgggctcaaatacatcaagaagattagcttgcaaagtaatcgtttaacttctatgataggattggaggaatgtgttgctctagaagagttatatttgagccacaatggcatttcaaaaatggaaggtctatcaacattggttaacctccgagtattagatgtttcatcaaataagctaacatcagtaaatgacgtacaaaacttgacaaggttggaggacttatggctcaatgacaaccaaatagaatcacttgaaagcgtagctgaggcggtttctggttcaagagaaaagctcaccactgtctatcttgaaaacaatccatgtgcaaaatctccaaactaccaagctaccctgagacaaattttccccaatatcgagcaaattgattcaagcatatttgcctagaagtttttacagttctgactggaatgttggtgcttaaa

SEQ ID NO: 8253 - DNA, 420 bp, Gossypium hirsutum
  Clone ID: GOSHI-09MAY01-C13220_4
gtcctcttattatatataaaccctacggttctcgttttttctcttagctcaatacagactatttggtctgtttggaggattttaatcttactgagtgcatctgttgcagttaggtgcagggaaaagagcgatggcggcagttcccggacagttgatttgggaggtagtgaagaagaacaattgctttttggtgaggcagtttggaagaggaactgctagccttcagttcagcaaagaacccaacaatctctacaacctccactcctacaaacactctgggttggcaaacaagaaaacagtcaccattcaaagtgggggcaaagaccagtctgtgctgctagcaaccaccaaggctaagaagcagaacaagccttcggccttgcttcacaagtccctcatgaaaaaggtgttccccaggat

SEQ ID NO: 8254 - DNA, 569 bp, Gossypium hirsutum
  Clone ID: GOSHI-09MAY01-C13220_3
tattataaaccctaaaaatcaacagagaaaatggcgacagttccaggacagttgatttgggaggtagtgaagaagaacaattgttttttggtgaagcacttcggaagaggaactgctgcccttcagttcagcaaagagcccaacaatctctacaatctcaactcctacaaatactctggggtggcaaacaagaaaacggtacccattcagagtgggggaacagaccagtctgtgctactacctccccccaggactaggaaccagaacaacccgcctaccttgcttcccaaatctgccctgaaaaaggagtttccccggatggcccaggctgtccaaaaccaggtgacagaccactactacaggcccgacttaacccaagcagcccttgcaaggctgagtgctgtgcataggagtccgaaagttgccaaatctggtgtcaagaagaggaacagacaagccttgaagatccatggcaggaagtaagctagacagtttaagttgtattgagctgcggtttccgttgttctagacagaccccctttttttttttttaattgttttacggaatc

SEQ ID NO: 8255 - DNA, 720 bp, Gossypium hirsutum
  Clone ID: GOSHI-09MAY01-C13220_2
cccacgcgtccgcccacgcgtccggatatttggtctgtttggaggatttgacctcttattatatataaaccctaagttaggtgcagggaaaagagagatggcggcagttcccggacagttgatttgggaggtagtgaagaagaacaattgctttttggtgaggcagtttggaagaggaactgctagccttcagttcagcaaagagcccaacaatctctacaacctccactcctacaaacactctgggttggcaaacaagaaaacagtcaccattcaaagtgggggcaaagaccagtctgtgctgctagcaaccaccaagactaagaagcagaacaagccttcggccttgcttcacgagtcctttatgaaaaaggagttccccaggatggccaaggcggtcaaaaaccaggtgacagacaactactacaggccagatttaacaaaagcagcccttgctaggttgagtgctgtgcacaggagtctaaaggtagccaagtctggtgttaagaagaggaacaggcaagcattgaaggttcgtggctggaagtgagctagacctttcaggttgtatgagctctgctattttcattgccccagacatttttttactccttttttgaatttgtcttatttttcatggtttgaactgagttgttgaaactttatatctagatagattttgaaacaacagagatttggagctatttagccctttaattt

SEQ ID NO: 8256 - DNA, 837 bp, Gossypium hirsutum
  Clone ID: GOSHI-09MAY01-C13220_1
ccccaccctccaattgttcatcccttcattaaaaaaaaaacccctaaaaatccagcagtgaggtgcagggaaacagaacacaaaatggcgacagttccaggacagttgatttgggaggtagtgaagaagaacaattgttttttggtgaaacaatttggaagaggaactgctggcgttcgattcagcaaagagcccaacaatctctacaatgtcaactcctacaaacactctggtttggcaaacaagaaaactgtcaccattcaacctgcaggcaaagaccagtctgtgctcttagccacaaccaagtctaagaagcagaacaagccttcgagcttgctccataagtctgtcatgaaaaaggagttccctaggatggccaaggcagtcaaaaaccaggtgacagacaactactacaggccggatttaacaaaagctgccctagcaaggttgagtgctgtgaaccgaagtctgaaggttgccaaatccggtgtcaagaagaggaacagacaagcatcgaggatccatggcaggaagtgagcttttttacacaacttcacaatcattttgctgcaattttcgttgtttccgatactttttcatccttgtttcgtggttttagcttgttggtgtattttataactagattttgaaacaaaaaaaaagtgagaatcatggtggtttcgagttttgtttttcggactataatatcctaagtttgataaacaaaactcgaaaccaccatgattctcactttttcatccttgtttcgaggatttagcttgttggtgtattttataactagattttgaaacaaaaaaaagtgagaatcatggtggt

SEQ ID NO: 8257 - DNA, 383 bp, Gossypium hirsutum
  Clone ID: LIB3149-034-Q1-K1-C7
gacaactactacaggccggatttaacaaaagctgccctagcaaggttgagtgctgtgaaccgaagtctgaaggttgccaaatccggtgtcaagaagaggaacagacaagcatcgaggatccatggcaggaagtgagcttttttacacaacttcacaatcattttgctgcaattttcgttgtttccgatactttttcatccttgtttcgtggttttagcttgttggtgtattttataactagattttgaaacaaaaaaaagtgagaatcatggtggtttcgagttttgtttttcggactataatatcctaagtttgataattttgccctttaatttcctctttgactttgttgagaacattaagctcttttttgtttttttgcc

SEQ ID NO: 8258 - DNA, 279 bp, Gossypium hirsutum
  unsure (1)..(279): unsure at all n locations
  Clone ID: LIB3189-011-P1-K1-C10
gtccggtttggaggattttaatcttactgagtgttcttgttgcagataggtgcagggaaaagagcgatggcggcagtgcccggacagtagattttnnangtatnaaataacaacaattgccttttgaaagacaaggagtaagtactaaagtgttccatactttgatgactacacctttggaacatgacaacatacgctcgtaataagacttcttgaatggaaagaagctatcagaagatatctaatgtggggtcctatacaattcctctccatttttga

SEQ ID NO: 8259 - DNA, 780 bp, Gossypium hirsutum
  Clone ID: GOSHI-09MAY01-C8993_1
cccacgcgtccgcccacgcgtccgcccacttttccgggagttaataagctctagggcgagaggttttgctgtatcttttggttctttaattggatttttgccttaccgaaacctggctgctaaatggaagttcttagctttcgaagcatggttgagacagaggggtttagacccatctgcttataagcagaacttaggagtcattggaagttctgatgtaatgagcaagaactcttctctagattcaacctcagattcagaaaacaagcaacagtttgagggaaaattttcaccggatatgaaattggaagatcttttgaggatttatgatcaagagaagcttaaattcttgacctcatttgtcggtcagagagtcaaagtaaatgttctaatggctgacagaaagttcagaaaacttatagtttctctgaggccaaaagaaaaggaagagttaatagagaaaaagagaaatgttatggccaagcttcgtgttggggatgttgtaaaatgctgcatcaagaaaataacttattttggtatatttgtggaggttgaaggcgtgcctgctttgattcaccagacggaagtatcatgggatgccaccttggatcctttgtcacatttcaaaattggtcagattgtcgaggccaaagtccaccaattggatttcacacttgaccgtatatttttatcattgaaggagataacgccagatccactggttgaggccttggagtctgtggttggtgatcatgataacttagatggaagattacaagc

SEQ ID NO: 8260 - DNA, 724 bp, Gossypium hirsutum
  Clone ID: GOSHI-09MAY01-C8973_1
caaaatccttataagcatgatgaggagctcccaaccgcacttcacagggaccaaatgaaggggattatcatttgatatattggaactgatggggctttttaactcacagccagtctaaaaaagtgctacatgtttcattcactcattcattaattaatttgtaaatagacagttttaactcttcttgaatcataaagcccctgtacctgatattggaaggaatgggttcttttttgttgaggaggaggaatacttttttccatgttatagtttactccggctactttgctccttggtgcttacctgaactgttgaagcaatggcatagataataccaggaaccagtccttgaatcatttcagtcctaatctcttggaaaatttgatcccatgccctgaatcatcatcctgttcgaataattgatgccaatcatttcccaatagaaaatcctttttcaaatgattctgcagttatggtataagtgtttgaccttagttgcatatattcttggctatgtataaattagaactgcagtttctgggagtaactgcctgtagaagaggaccaaagagacagtaatatatgcatgcatgcatatatatatttgaggacaccctcttgaagtcttgaactccctttgaaattattgtttcaaaaattaattattcccttttgtgacaactgaatttacaccctttagatataagttaatgatccaaaaaaa

SEQ ID NO: 8261 - DNA, 729 bp, Gossypium hirsutum
  Clone ID: GOSHI-09MAY01-C8903_1
gttatcacatgacatgtggtgtgggcacgagttctgttattcttgtggtgccgagtacagggacagccagcagacctgtcaatgcgccttttgggatgaagacggctctgaaggcttggccacccattctgtccaagaatcggaacaatgggcttgggagactttcaattcactccctatgctcatggatgcatactcagaccaagaaagatcacagctggcactaatccaaaggttccttgctggggggttcagtcttagtgagcatcatccatatcaatcaccaccccgctgtacggattcatatgtggatgccatgaaggacctccgtcagcttccttggctcgagagatttgtctctgtaataagtgacaactactacgaagactatatccaatgaagctgtgtagatgattccaatgttaggtaataagttgcttatcagtccaacaaggtttacaatagagcccaagagtttctcactctattggctccattttcatttacacaaattcctatgtggttcttgttgcataagagctgaagcaaagatttctgtgcatgttagttgctttcctcccggaagaaaaagaaagataatagggtaaacacttgttgatgtcaccagattgaaaaaaagttaatgaaacaaatcatcttttcaatctaaaaaaaaaaaaaaaaaaatataattatttaataataatataaaatagtattttttttaat

SEQ ID NO: 8262 - DNA, 446 bp, Gossypium hirsutum
  Clone ID: GOSHI-09MAY01-C8933_2
cccacgcgtccgcccacgcgtccgggtttatgcagtcttttatgttgccagtccagaagctggtgctgcaattttgtggaagactgccaaagcttcgcctaaggcagctgagaagcctgcactttcttcaaccagcaaccaagggataagaagtcccaaacagagcatgaaaagcatgtgatggatctgcatggggaagtgatggcatgtgcatacgaagatgtccaagtcatgtggtccattcttgacaagtccaagtccatggcttgtaacatcaagccttaggattccctttttaccctttctctttttttttcttaaatttaaattttctttattttattttgcatgtgatgtagataaagctacaaaatcgattgcaaatttgggggaaattaggagattggggaaaagagggcattattgtaatttttgatggagagaat

SEQ ID NO: 8263 - DNA, 1759 bp, Gossypium hirsutum
  Clone ID: GOSHI-09MAY01-C8933_1
gtcaaggtgaagctattgcccacaatttgaggaatgtttggtctgaaggtcccaattgtttctattgttattggggaaggtggctctggtggtgccttggccattggctgtgctaataaattgttaatgctggaaaatgcagtcttttatgttgccagtccagaagcttgtgctgcaattttgtggaagactgccaaagcttcgcctaaggcagctgagaagctaaggattactgccccagagttgtgcaggctgcaaatttgccctgcgtccggcccggagccactggggggtgcccatgcagatccagcttggacttcacaacaaataaaagccgcaattaatgaaacaatggatgagctcacggcaatggacacagaaaagctactaaaacatcgcatgcataaattcagaaaactgggtggcttcgaagaaaatgcccaggtagatcccaagaaaaaggtcaatatgaaaaaggaggaggaccaaattgtttgtacaacccctaatgaggagttggaaggtgaggttgaaaagctgaaacagcaaatcttgaaagccaaggaatcatccagcaagcctcctgagatggctctgaaggacatgatagaaaaattgaaaaaggaggttgatcatgaatactctgaggccatcaaagccacaggcttgaaggacaggcttgatatgctgagagaagaagtttcaaaagtaaattcaagggaccaactcatgaatcctgctataagggataagattgagaagcttaaagatgaattcaaccagaagctatcggcagctccaaatcacccaaccctacaatataagcttgacatgctgaaggagttttctaaagccaagagtctctcagatgctgctacactgaagcaagaagttaataagaaattcaatgaaatcatgagtcggcctgagataaatgagaagcttgaagcattgaaggctgaggttcaaaattcaggttcatccagctttgctgatttagatcaagggcttaaggacaaagttctgaatacgaggaaagaagtagaactggaaatgattagcgctctcaagtccattggtttggttgttgagggtgtaaaatctaatgaaaaagtcctaagtgagaaagattcaccctcagtcttcaaaaataaggtggatcatttgaatgaagaaattaacaagaaaattgaaaacgttgtcagttcatcggaattgaaaaatatgattgagttgttgaagctggagatagcaagggcaggaaacaaacctgatactgagtcaaaaagtaagattgaggctatacaaaagcagataaagcaaagactttctgaagctatcatctcttcagaattaatagagaagtatgaagacttgaaggaaaaaaattctgaagtcgaacggtcttctgctggggctgatgaaagtttgcaaaaggaaaccaagtatgaggaacctagactagagatcaatttgggtgcaaacagcagcttcgctcagtgatcttgatttctgtcggaatgttactgaggtagatgttatagaaagagatggtgtttgaagtctgattgaagaactaaaattgcatcagatgaattattcaaaaactcaagcccttgcagagccaccaagtccacactcttctgcaggccagaggacacaaggttttgcatctattaaaacactgattggttatgacgaacaattactgtccagtctctttttctttttcttttctaagctgaatttctacgttctg

SEQ ID NO: 8264 - DNA, 924 bp, Gossypium hirsutum
  Clone ID: GOSHI-09MAY01-C8923_3
tgccccacgccaaaaggaaaatctccattttagcagactatcttcgccgcctcctcttcctcctatctcatagcagccatgatcattccagagaagaaccgccgcgagatctccaagtacctctttcaagagggtgtttgctatgcaaagaaagattacaacttggcgaagcacccagaaatcgatgttcccaatcttcaagtcataaagctgatgcaaagcttcaagtcaaaagaatacgtgcgtgaaacttttgcatggatgcattattactggtaccttaccaatgatggcattgagttccttaggacatatctgaatcttccttctgagattgttcccgctactttgaagaaacaagctaagcctgctggtcgtcccatgggccctcctggtgaccgcccacgtggtcctcctcgctttggtgacggtgagaggagatttggtgatagagatggctaccgtggaggtccaagaggaggaggtgattttggtgacaagggaggagctccggctgactatcagccttcattcaggggccctggaacaaggcctgcctttggtcgaggaggtggtggttatggtggtgctggacctgcaggtggtgcaggtcttccttgagacagatgctttttcatgacagatagttttgtcagtctaggtggttgttgaagttgatagaagtttgtgttatgcttttcaatttagttatttgatgcttataaaatattgctactcttcggttcatccgaaaggaatttaggaccaatgttttctttgctatttgatcatacacattttgtggtgtttgttgcactgtagtactgaaattttcattcaagcttgtaacattatggaatcctgctctcatcaaacatataattctacatgttttatgaagtataatttttttatttttttttt

SEQ ID NO: 8265 - DNA, 872 bp, Gossypium hirsutum
  Clone ID: GOSHI-09MAY01-C8923_2
tctgcgtgtcaaggaaaaacaaaagcctcttccttagctaactgtctaagcggctactttataccgcatctcaaccatgatcatcccagaaaagaaccgccgcgagatctccaagtacctcttccaagagggcgtttgctatgcgaagaaagactataatttggcgaagcaccctgaaattgatgttccaaatcttcaagtaataaagctgatgcaaagcttcaagtcaaaggaatacgtgcgtgaaacttttgcttggatgcattactattggtaccttacaaatgatggcattgagttcttaaggacttacctgaaccttccttctgagattgttcctgctactttgaagaaacaagctaaacctgctggtcgtcccatgggccctcccggtgaccgtccacgcggcccaccacgctttggtgacggtgagaggagatttggtgacagagatggctatcgcggtggtcctcgaggaggcggtgattttggtgataaaggaggagctccagctgattatcagccttcattcaggggccctggaacacggcctgcttttggtcgtggaggtggtggttatggtggtgctggacctgctggtcttccttgagagatgatttttcatgatggataattttgtcagtttaggtttgttatcatatggagttcatagaagtacttggcttatgcttcaatgttcggtaattttggtttgatgcttaaaaacgctgcttctctttggttcattcatggggaattctgaaacaatgttttctttgcaccaagtgcttgatatttctgttctgttcttacgagctttgttgcattaattttttttttcgatcagaactgagttatgttaattttcccat

SEQ ID NO: 8266 - DNA, 873 bp, Gossypium hirsutum
  Clone ID: GOSHI-09MAY01-C8923_1
ccggtcgcccccgcgtccgcccacgcgtccgctgagaactaaaggaaacaaaggccttcttcttagcactccgccgcccgttatctcatcgcaatcatgatcatcccagaaaagaaccgcagggagatatcaaagtacctctttcaagagggtgtttgctacgccaaaaaagattacaacttggcaaaacacccagaaatcgatgttccaaatcttcaagtaataaagctgatgcaaagcttcaaatccaaggaatacgttcgtgaaacttttgcttggatgcattattactggtaccttaccaacgatggcattgaatttttaaggacataccttaatctcccctctgagattgttcctgctactttgaagaagcaaactaggcccggtggtggtcgtcccatgggtccttctgatagccgcccacgtggtccgccacgctttggcgacggtgagaggcgattcggtgacagggatggataccgtggaggtccacgaggaggcggtgatttcggtgataagggtggtgcgcctgctgattatcagccttcattcaggggccctggttcaaggcctgcttttggtcgtggaggcggtggttatggtggtgccggttctgcaagcggcgcaggtcttccatgagttttgtcagtttaggttgaatggcacttcctagttcattttggggtgtgcttttttgcactcaaatgattgagattatctatgttcttttttcccccttgtttttgatgcttttgttgcattgattttccttgtttcaattagacagtaaataccgaagttgtgcagctcaatttcggaagaaacattaattattataatatataatgaaatcggcatctttggcctttt

SEQ ID NO: 8267 - DNA, 648 bp, Gossypium hirsutum
  Clone ID: AI055707.1
cttctgtagcactccgccgcccgttatctcatcgcaatcatgatcatcccagaaaagaaccgcagggagatatcaaagtatctctttcaagagggtgtttgctacgccaaaaaagattacaacttggcaaaacacccagaaatcgatgttccaaatcttcaagtaataaagctgatgcaaagcttcaaatccaaggaatacgttcgtgaaacttttgcttggatgcattattactggtaccttaccaacgatggcattgaatttttaaggacataccttaatctcccctctgagattgttcctgctactttgaagaagcaaactatgcccggtggtggtcgtcccatgggttcttctgatagccggccacgtggtccggcacgctttggcgaccgggagatgccaatctgtgacagggatggattccggggaggtcacgaggaagcggtgattccgtgataagggtgggcgcctggtgatattagccttattcaggggccctggttaatgccttgctttggtcatgatgcgctggtttggggtgccggttctgaagctgggtaggtattcctgatagtgccagctaagtagatgggccttctcaggaatttgggatcgctattcagacacatggtgatttctatgtcg

SEQ ID NO: 8268 - DNA, 490 bp, Gossypium hirsutum
  Clone ID: uC-gsflnu33B062b07b1
gcgaaaaaaaaagttatcatacagagatgtgtaacaacatgacttggagcctatctcatacgatcttagtggtgatatcagagggtctctttcaagagggagtttgctacgccaaaaaagattacaacttggcaaaacacccagaaatcgatgttccaaatcttcaagtaataaagctgatgcaaagcttcaaatccaaggaatacgttcgtgaaacttttgcttggatgcattattactggtaccttaccaacgatggcattgaatttttaaggacataccttaatctcgcctctgagattgatcctgctactctgaagaagcaaactatgcccggtggtggttcgtccatgggtccttgtgatagccagccacgtggtccgccacgctttggcgacggtgagaggcgattcggtgacagggatggataccgtggaggttcacgaggaggcggagattttcgtgaaagggtggtgcgcctgctgattat

SEQ ID NO: 8269 - DNA, 417 bp, Gossypium hirsutum
  Clone ID: GOSHI-09MAY01-C8853_1
aaacaccataaatatttgcctttcctctatccgggaaaaaatgccgccggtctgccggagtgaaggcgccactgctcccagggagcaccaaatcggcaccagcaaagcctccatcggtttctggcgcggtgtttaatgtgtccacaagcatcatcggagctggaataatgtcaatccctgcaacactcaaggtgttaggggtacgtccagcatttgtgatgattggggttatagcttgcttagcgggtatatcaggtgaatttttgatgagatacacacatgctggggacacaactacgtatgctggtgttatgagggaatcatttgggagggttggatccatccttgtccaaatatgtgtgatgatcactaatctggctgcctcatcatttttttgattattataggtgatgttct

SEQ ID NO: 8270 - DNA, 465 bp, Gossypium hirsutum
  Clone ID: GOSHI-09MAY01-C8843_2
aggcgtgcctcttcatcatttcatatttgccttcctaacactcgcattctgcgccacttctgcagtggccgccgccgccgcttcaaaggagcaaactttaaacacccaagatgctgaattctttaacccaaagcttcccccacgaacccttgcatcctccaaaaggttcgaaggctcgtcgaatcttgtcgaccttcgttaccatatgggtccggtcctttcttcttcgccgataaacatttacctcatttggtacggtcgttggtccctttcccaaaaactcctcatcaaagactttattacctctatatccccttccgccactccttcgccgtccccttgcgtttccgagtggtggaaaaccgtttctgtttacaccgaccagaccggagccaacgtttcccggactctcgttgtagctaaagaacactcctatacgcgttactcccatgggtatcacctcac

SEQ ID NO: 8271 - DNA, 1565 bp, Gossypium hirsutum
  Clone ID: GOSHI-09MAY01-C8843_1
ttcactcgtccgaaaagagtgcgcacccacacgctgcagctcagcagctgtctccagcccatttccctcgctttcgcgcgaccccattcccctctttatatacacccgaaatccccccatttctctatacctcctcctcctccaccgccgtcgccgccaccaccaccaccaccaccaccaccaccaacccattttctctttcatctccaccgctcaaaatgtctcttcaccatttgctctttcccattctaatactcgcattctccactgcttcttcattagctgccactgcaaaagaccaaactttaaacactcatcaagctgagttctttaaccccaagcttccacccagaatcctttcctcttccaaaaagttcgaaggctcatcggacattgtcgacctccgttaccacatgggtcccgtcctttcctcgtcgccaatcaatatctacctcatttggtacggtcgttggtctgtttcccaaaaactcctcatcaaagacttcataaactcaatttccccttccgcgacgccgtcgtttccgccgtctccttccgtttccgactggtggaaaaccgtctctctttacactgaccagactggagccaacgtttcgcggaccgtcgtcattgctaaagaacactccgatacgggttactcccacggttctcacctcacgcgcctttcagtccaacaagttatcgccaccgccgtcgaagccgctcctttccccgtcgaccaccgtaatgggatctacttaatccttacctcccacgacgttaccgttgaagatttttgccgtgccgtttgtggcttccattacttcacgttcccatccatggtgggtcacactttgccctacgcttggatcggcaactcgggtaaacaatgccccgaggtctgcgcttaccccttcgccgtcccgggctacatgggcggcggcggtccgggttcgttggccccaccgaacggagacgtcgggttggacggcatgatcagtgtgatcgcccacgagttagccgagctctccacaaacccactggtgaacgcatggtacgccggagaggaccccaccgcaccgacggagataggagacctctgtgaagggttgtacggtaccggcggcggcggagggtacatcggtcaagtcatgagagaccagaaagggaaaacgtataacatgaacggcaacaaaggaaggaaattcatggtgcaatggatttggagccctgttttgaaagcttgtgctggtcccaatgctttggattaaatttaatattatttttctgggttttttttccattgaaatcatcagattcatttccatggaatcttgatttttgcatgtcaatttagggtttgagatagttatatgtattgtagagtcgtataaacaggtcgatgataaagtgcaaatttaatgctttgggttttagaagaatcctggtaaaaaaaatgcaaaacagtgcatagtctgagctttacagtgagtgtgttcccttttcactctctttgctttcaattatgcttgttaaagtgttatgacacttgccactttcagttt

SEQ ID NO: 8272 - DNA, 476 bp, Gossypium hirsutum
  Clone ID: uC-gsflmaxxa027d03b1
cccactcgtccgccatttcctctttcatcgccaccgcttaaaatgtctcttcaccatttgctctttcccattctaatactcgcattctccgctgcttcttcattagctgccactgcaaaagaccaaactttgaacactcatcaagctgagttctttaatcccaagcttccacccagaatcctttcctcttccaataagttcgaaggctcatcggacattgtcgacctccgttaccacatgggtcccgtcctttcctcgtcgccgatcaatatctacctcatttggtacggtagttggtctgtttcccaaaaactcctcatcaaagacttcataaactcaatttccccttccgcgacgccgtctccttccgtttccgactggtggaaaaccgtctctctttacactgaccagaccggagccaacgtttcgcggaccgtcgtcattgctaaagaacactccgacacgggttatcccgc

SEQ ID NO: 8273 - DNA, 1174 bp, Gossypium hirsutum
  Clone ID: GOSHI-09MAY01-C8833_1
cccacgcgtccgtgggaaagtgcagcaaggatgattgctgatgtatcaaaatccaacaaaatcgtcgtcgagaaatcgacggttccggtcaaaacagccgaagctatcgaacggatcttgacacataacagcaaagggatcaaatatcaaattctatccaacccagaatttcttgccgaagggactgcaattcaagatctgtttaaaccagacagggttcttattggtggaagggaaacccctgatggtttaaaggcaattcaagcattgaaagatgtttatgctcactgggtacctgaagatcgtatcattacgactaatctttggtctgccgagctttctaagcttgcggctaatgcatttttagctcaacggatttcatcggttaatgcaatgtcagctctatgtgaagctaccggtgccgatgtttcacaggtttcccatgccgtcggtaaggactcgaggattggaccaaagttcttgaatgctagtgttgggtttggtggatcttgttttcaaaaggatatattgaatttagtatatatatgtgaatgcaatggattagccgaagttgcaaattattggaaacaagtgattaaagtgaatgattatcaaaagaatcgatttgtaaatagggtggtctcgtcgatgttcaacacggtttccggcaagaaaattggtataatgggatttgcattcaagaaagatacgggtgatacacgggagactccggctattgacgtatgtaaaggcttgttgggggataaggctcggttgagtatttacgatccgcaggtgactgcggatcagattcagcgggatttgacgatgaacaagtttggttgggatcatccaattcatcgtcagcccatgagtccaaccggtgtgaagcaagtaagtattgcttgggatgcttatgaagcaagcaaggatgctcatgctttgtgtattcttactgaatgggatgaattcaagacgcttgattaccggagaattttcgacaatatgcagaaaccggcatttgtgtttgatggccggaatgtggtgaatgtggagatgttgagggacattggttttattgtgtattccattgggaagccgcttgatccttggcttaagaacatgcctgctgtggcatgatcgacctatctttctctttataactatactacta

SEQ ID NO: 8274 - DNA, 344 bp, Gossypium hirsutum
  Clone ID: LIB3166-006-P1-K1-G3
gcgcccacgcgtccgcccacgcgtccgcccacgcgtccgcaaagttcttgaatgctagtgttgggtttggtagatcttgttttcaaaaggatatattgaatttaatatatatatgtgaatgcaatggattagccgaagttgcaaattattggaaacaagtgattaaagtgaatgattatcaaaagaatcgatttgtaaatagggtggtctcgtcgatgttcaacacggtttccggcaagaaaattggtataatgggatttgcattcaaaaaagatacgggtgatacacgggagactccacctattgacgtattgaaaaggcttgtttgggggataaggctttgg

SEQ ID NO: 8275 - DNA, 642 bp, Gossypium hirsutum
  Clone ID: GOSHI-09MAY01-C8593_1
tgctcgcctcctgcaccgccgcgccttactggccgggcccacccaggccggtcaaccggaatcctcgtacttatctgctgtttcgttgaccggaagcagttttctttggatatttcaacgaagttaggaagcagtttctctttggttccgttcattattgtggttgcattgtgcacaattttggctatggtagcgacgttaccgcttgcacagctattcttctttcacattctactcataaaaaagggaatcagcacatacgattatataatagctttacgggagcaagagcaagagctacaaggtgtcggcggccaacagagtccacaaatgtcccctgccagctcgcttactggattaagtagtgctagttcgttttctactttccaccggggtgcatggtgtacacccccacgcttgttcctcgaagatcagtttgacgttgttcctcctgataccggatctgtaagttcgttcgggaaaaaaatggtccgggaggaacccgttaagaagaagaatccaggtgcagttaagatcagtccgtggacattggcacggttaaatgcggaacatgtttcaaaagccgctgctgaagcaaggtaaaagtccatattcctgcaccccgtggtgagacgtgatgcc

SEQ ID NO: 8276 - DNA, 736 bp, Gossypium hirsutum
  Clone ID: GOSHI-09MAY01-C8543_1
gatctcttgagggctgtaattataggagctgtgggcactccctaccatgatggtctcttgttctttgatgttttcttccctgctagctatcctaaaggaccccctcaagtttattaccactctggtggactgcgccttaatccaaatttgtacagttgtgggaaagtatgccttagtcttctaaacacatggtctggtaataagaatgagaagtggatacctggtatgtctaccatgctccaagttctggtatctattcaggctctaatcttgaaccaggatccgtactttaatgagcctggttgggctcatcataaaggcacgccacaaggtgaattactgtctcgacaatacaacgaggatacattcatattgtcactgaagacaatgatctactcaatgaggaggccaccaaagcattttgaggattttgtagtgggccatttctaccgtcgtgctcaagatatacttgtggcatgtaaagcatacatggatggtgctcaggtaggttgcctggtaaaaggcggggttcaagatgttgatgaaggtgacaagagctgctcacagaagtttaagaactctgtctccggatgtgtaaatatgctggtgaaggaatttacggtacttggagtaaaggattgtgagaaattcctcattgtccctaaatgtcaaaacaatcgagttgatagtattcccaaggttccactatcgtgaactacttttaaaacaaagatcc

SEQ ID NO: 8277 - DNA, 1792 bp, Gossypium hirsutum
  Clone ID: GOSHI-09MAY01-C8783_1
cccacgcgtccgcccacgcgtccgcccacgcgtccgggacattataaggactccagcatgtccatctcgggctttgcctaggatattacgtggaggagatttctatgaggaacctgaagaagatgatgcacgagaatcaaaagaagtggcaaaggaaatcactaggcatatgcgtgaaaatcttatgggtcacaggagggatgaaacattactttcttctgtgttttccaatggttacaccggtgatgataggtcatgcaatagatctgaaaatgagtatcctgtggaaaacctcagtgattcagaagtcatgtcaccaacttctagacattcatgggattacatcaataggtttgctagcccttattcttccacacccttcagtcgcgtatcatgttctcctgagtcctcggtttgtagggaagcaaagaagcggctctcagagagatgggccatgatgacttcaaatggtagttctcaagaacaaagacatggcaggagaagctcaagcacattgggtgagatgcttgctctttcagatacaaagaaattggtgagatctgaagaagagggaagtagtaaggaacaagaatgtaggggatcaacttcctgtgtagctagtaatttgtatgaagaagaaagtacaagtgattctcccaaaaatattctgaggtcaaaatctgtgcctgggtcttccacaatgtatggtgtcaggcttaacaatgaaattccagatcctgaatctagcaaagaacaagttatgaagacaaagagcatgaaatcatctttaaaggggaaggtttcaattttatttttctcaaagaataagaaaacgaataaagaaaaatatagtggatctcaatctacagatgaatctccatctgtgactcctggaacaccagggtcacccataattcaccctcggaagattagcaatgatgcatctcagtgtgttaatgacagttacatccaacagtgtttgtctcctgttgtaggtggatcagcaagtaaaactcctttaccagatctgattggcataggacagaagctaggcatgatcactacggagggaggtctgtctgtagcaaaaccttcaatgcctgtccatataagtgagaatcaggaacagccggccccctcctcggttttagaacctccatttgaggaggatgagaacatgatttcagagtcctctggtggaaccaaaccggtgcaccgaggagtgggggtgccacctagatctaacttaattgagaagtcaccacctatagaatcaattgctcccaccctctcatgggatgattcttgttcagagacagccacattattatatccatcaaagctctcttcagtttccccaggcgccaaggaagaagaacaagattggtttttatttgtccaattattattatcagctgctggtctcaatggtgaggtgcagttagattcattttttgccaggtggcattcggctgaaagcccattggacccatgtttgagagagaaatatgccaacttgaatgacaaggagcctctgcatgaagctaagagacgacaatggagatcaaacaggaagctcatatttgactgtgtcaatgcagcattactaaaaatctcgggttatgggtcagacaggtgcatgaaagctatgtcatttggcaggcccaaatgatagcaaggaaggtgcatcacccatgctggttgaccatgtgtgggcccaaatgaaggaatggtttccggtgaagtgaaatgtttgggatgtgatgaatgggaacatgacagcctgttggtc

SEQ ID NO: 8278 - DNA, 660 bp, Gossypium hirsutum
  Clone ID: LIB3543-012-Q1-K6-D2
caacttctagaaattcatgggattacatcaataggtttggtagcccttattcttgctcttccttcagtcacgcatcatgttctcctgagtcctcggtttgccgggaagcaaagaagcggctttcagaaagatgggccatgaccatgatggcatcaaatgggaattctcaagaacaaaggcatgtgaggagaagctcaagcacattgggtgagatgcttgctctttctgatacgaagaagttggtaagatctgaagaagagggaagtactaaggaccaagagcctaggggatcaacttcctgcacggctagtaatccgaataaagaagaaaatacaagcgattctcccaaagatcttctcaggtcaaaatctgttcctgtgtcttccactgtatacagtgcaaggcatagtgttgaattatcagatcctgaatctagcaaagaacaaatttctaaggaacttacaaaggcaaagagcatgaaatcatctttaaaggggaaagtttcaagtttctttttctcaaagaataagaaaacgaatatagaaaaatgtacctggatctcaatctacagatgaatcgccatctacaactcctgggaagactcggtcacctataagtcatcctctaaagattagcatgatgcatctcagagctttaatg

SEQ ID NO: 8279 - DNA, 1253 bp, Gossypium hirsutum
  Clone ID: GOSHI-09MAY01-C8743_1
tcgttattcggggtctcaaaaggaataaaacgtggggaaaaaccctcgcgtccgcttaaacccgattcacataacgcatttccactcgcaatgggagagaaaaagaacggaaacaagcaaggaggagcggatgggaaaaagaaggaaatgagttcttcaacctctgttttcaaatttgagtgtctctgtgatggttgtgcttccaaaatcctcaaatgcattaatcactttgaaggggtggagacggtgaaaccagagatgagttcaaacaaagtgacggtgataggaactgcggatcccactgccattaaagagaaactcgacaagaaaacgaagaagaaagttgagctcatttcttctcaacccaagaaagatgataacaaagaggaaaaaaaagagaaaaaacctgaccaacagaaaaaccaggattctgataataaatcagacaaaaaacccaaagaggccccggtaacgactgcggatttgaaggtgcaattgaaatgccagtgtgatggatgctttgataggattcgcaaaattgtctctgaaaccaaaggtgtccaagagttgaaagtagacaggcagaaggagatggtcacagttaaggggactatggatgttaaggccttggctgaggctttgaaggacaagctgaagaagcatgttgagattgtagctcctaagaaagagaaggatggcaacaaggagggcggcgacggagggaagaagaagaacaagggtggtggtgaagatggtgggaacgaagctaatggtggcaagatggaagggaaccgaatggagttcatgcttccaccccaatttgggcacatgcctagttacattccgggttatcccggatacgggcacccagcttacgcgtatggaaacccgtatccgcacccacacgggcatggttaccccgggtatgtgccaggttacccggtgtatgttaatccacctcaccagatgtttaacgatgagaacaccaatgcttgtgctatcatgtaaggaggaatggggtttacggtataggtttaggtcaaggaaaatggaaaaaaaaatagtgtaaataggaaatagacaagaaagtttacttggagaagaaaattttcttatatatgttggattccagggttttgatcttgttatttgttgttaaaaaagttttactgttgtcatttttaatataattagtgttcttaaactatgtgaccaatgtgttcatatatatatacatacatatgttcattagt

SEQ ID NO: 8280 - DNA, 539 bp, Gossypium hirsutum
  Clone ID: GOSHI-09MAY01-C8773_2
atcttcatcttctctgttcgtccttccagaaaaagaaattcaggttgggagtattgcacagctttcttttggttagctcctctttgtccaccatttttgcccccaatatgaagatcttgttcacgaaagttctaacgaacaccgatgtagagaaaagattggcggttcccaacaattcactgaagcatttcgagcttgaaaatggtaattgctccaaatcttttgaagttaaagatgaaaacggaagcacatggacttttcgttgctatgttcgtaacgacggtgcctacaagaagcctgttttatccagtggttggcgtcaatttgtcctcaataaaggagttcaccagggagatttgatcacactctataaggatgttgtagcagaagcttcgtataagaatcgaagctcagagaataatcaagttattaggcatggagtgctggtctagtctggaaccagaccatcctacatgcgcaacatcacaagctcagagataaatcctgttatttgcaaggagtgctgtattttctggaac

SEQ ID NO: 8281 - DNA, 929 bp, Gossypium hirsutum
  Clone ID: GOSHI-09MAY01-C8773_1
gggacgcgtgggcgcttaacttcgcgcgattgctagcttcatcttctctgttcgaccttcccaaaaaaaaaaaaaaaagaaaagaaaaattcaggttgggagtattacacagctttgttttggttaactccttttcgtccaccatatttgcccccaatatgaagatcttgttctcgaaagttctaacgaacaccgatatacagaaaagattggcggttcccaacaattcactgaagcatttcgagcttgaaaatggtaattgctccaaatcatttgaagttaaagatgaaaacggattcacatggccttttcgttgctatgttcgtaacgacggtgcctacaagaagcctgttttatccagcggttggcgtcaatttgtccttaataaaggagttcaccagggggatttgattacactctataaggatgttgaagcagaagcttcgtataagatcgaagttcagagaaaaatcaagttattaggcaaggagtgctggtataatctggaaccagaccaacctacaggcgcaacagcacaagataagagaaaaatcctgttatttggcaaggagtgcggctattttctggaaccagaccccccaacagacgcaacaggagaagttattcaagactagtagtcctgccggatgtttaacaatatatgattgttaggtatgggatgatgtttctggagctgattcatgactagcagtttgtgaaacatatcttagcagtctgaaatgaataaattacttcagtaatatctgtcatccccatatgttatatttaaattgtgcacaatttgttcaaatgtaagtgaaagtctgttcttcataaaaaataaaataaataaaaaataaagggggtgggcccggtcccaattcgcctatgtgagtcgttacaatcactggcgtgtttacacgtgtgat

SEQ ID NO: 8282 - DNA, 267 bp, Gossypium hirsutum
  Clone ID: LIB3272-007-P1-K1-E4
aaaatccccctttctgaatctcttctctcaaaagtgtgaaaggaaaaagaggagggcaacagagtctttgaaacgatgtctttttcgtctcccatgaggaaaacctcctgcctgcccccaatatgaagatcttgttcacgaaagttctaacgaacaccgatgtagagaaaagattggcggttcccaacaattcactgaagcatttcgagcttgaaaatggtaattgctccaaaatttttggagttaaagatgaaaacggaagcacat

SEQ ID NO: 8283 - DNA, 337 bp, Gossypium hirsutum
  Clone ID: GOSHI-09MAY01-C8723_1
gtcaagctcaagcctttctcttgggtccctcccccaaaacaaacactcttttcaactccaccaccatctttaaccctgaccaacctcatccccaaatcttcccattttttgttccctataaaattttgatcacttaaattgtttttttttccaaattttggggggttaaagatgagttcgagttccgatttggtgggttttggtgaatcggtattgggagtgtccgtagagggttcggtaacggattctatgatagtggtcgcgacgacgtcgttagccgggattctggggcttttggtgtttttctggaagaaatcgggttccgaaccgagccgtg

SEQ ID NO: 8284 - DNA, 658 bp, Gossypium hirsutum
  Clone ID: GOSHI-09MAY01-C8693_1
ccgggttctgacccacgcgttcgtcctgcttcttagagcctcatggttcaaagcctttgaatgggtggaggaatgtgaggtgtacgatgatttggaagaattattaccattattatccttacccttgtgaagatgatgatgatgaggaagaagatgaagtttactacagaagttcgcctagtctccgcatcggcaatcggagatggggtgacaatggatatgtaagatcggggcgccgagaagccaggcctgttcaacgatcatccagcagttcccagaactctgatgcttcatcttcaagtgagcccaagaagaaagaagtttcgaaaagtataatggggcgacgggcaaagagggcactgaagcgtgaggctgctgataaggcagctgctgcagaacatcaagagcatttgatgaggctggggcggaagtgatttctttgacgcaatgtcttttttatggaacattgtagcagaggaattagggtggtttgataacccagattcgctgtatcatatcctggctttgtacagtatttccctttctttcccttgtgctgtgggaacaaacaccaataagtggaggaactctttaacttaggggatgaaaatatgggaatattttgtttttcaggataaccattatttttggtggtctg

SEQ ID NO: 8285 - DNA, 660 bp, Gossypium hirsutum
  Clone ID: GOSHI-09MAY01-C8653_1
gtgacagctatctttttcctgctagtgggaacagtagtttggattttggagcataggatgaatgatgagttcagaggccccccaagaaggcaagtagttactattttatggtttagtttttcaacttggttcttcgcccacagagaaaatactgtcagtgtacttggtcgcataattcttatcatctggctatttgtggttctcataatcaactctagctacacggccagccttacctcaatccttacagtgcaacaacttagttctcccatcaagggcattgaaactttggtatcaagcaaggatcccattggctaccagcagggatcatttgcccgaaattatttaattgacgacctaaaaatcgatgcatcacggctggttgcacttaattccccggaagaatgtgctaaagctttgaaagatgggccccacaagggtggtgtggctgcaatggtggatgaccgtgcttatatagagctctttctctccaccagatgtgaattcagtatcgtaggccaagagttcaccataaatggatggggatttgcctttccacgggactctcctctagcagtggacatgtcaactgccatcctcactcttgcggtgggtggagatctccaaaggatccatgacaaatggctgttaagacgtgca

SEQ ID NO: 8286 - DNA, 551 bp, Gossypium hirsutum
  Clone ID: GOSHI-09MAY01-C8673_1
tttggttagattccctgtttacatcattcctgctttagctcatgcgctcacttataaatcggcctctccaagaaagaatgcaggtgagaaacttccttgcttcctcccaagctggacagcaatctatgcggtgaacacagctaccgtgatatgggttttcgtagtcggattccgattaggagggtgggctagcatgacgaatttcatcaagcaagtagatacgttcggattattcgccaagtgctaccaatgtccaccttcaccatcatcaaaacatcactgatataaatactccaatttgaaactcgaaccccttttttgtagcaccggcatcaccggagtctcagtatattttcagtgtgtcgcagcttcttctactgtttggtcttaccttggtctactaagtaatcaatgattgtgaaagggttttatggtattccctatatatatatatatattggtctatggaggcaaaaaagtatcctgttttcaagctggaattttcttcacatggcttgtttggatccaaaagaaaacaaattagttacagt

SEQ ID NO: 8287 - DNA, 709 bp, Gossypium hirsutum
  Clone ID: GOSHI-09MAY01-C8603_7
tttaatttttggctgccgcaggtaccttattgacgaagatgttccttcctgctaccacaatgttcgccgccaagaagaccaagaagacccatgagggcattaacagcagaatggctccctgaatgaaaagtggaaaatacactttgggttacaaaacctgttctcaaatctctcagaagctgcaaaggtaagatgatgattattgacaacaactgccctcctcttaggaagtcggagaacgagtgttatgccatgttgtgcacagttggagttcaccactatattgggaacaacgtagatttgggaactgcttgtggcaaatatttcagagtgtgctgcctcagcattattgaccctggtgactctgatgttggtaagagcatgcctagggaccactaagctgcagcgggtgacatatcttcataggttttgttctgatatagtttcttctattttttgggtagtttgaaacattaatgatactctgaaattcagaactttctttgttgccatcttgatgttcgacttgtgatgatgatattattggtctatgttctggaaatttgtgagtcaatttcgttttaagactattgccatctttgtattttgttctggtttacttctgcatctggataatctgttctatcttgctatcaatttgctcatttgtagtgttggaaaaaaaaataacaaaatatattttttattt

SEQ ID NO: 8288 - DNA, 528 bp, Gossypium hirsutum
  Clone ID: GOSHI-09MAY01-C8603_6
atcccgtctttgggttctcagatttaagcagtttacgaagctccaagatcgaattttctgaaagttaagattcgtaagatttgggtttttctcgcggtttttaagaagatggatatcatttcccaattacaagaacaagtaaattctatagcagccctaactttcaacacatttgggacactgcaacgagatgctccacccgttaggctctcccctaattacccagaaccccctcccaaccccaccgaggactctgccaatttcgccgaccaacctaagctcatgagtgctgctcttgttaaggctgctaaacagttcgatgcattggttgctgcacttccaccttcagagggcggtgaagaagctcaacttagaaggattgctgaactccaagctgaaaatgatgctgtaggccaagaacttcagaaacaactggaggctgctgagaaggaactgaaacaggttcaggagttattcagtcaagcagcagataattgtctcaacctgaagaaaccagattgaattcat

SEQ ID NO: 8289 - DNA, 609 bp, Gossypium hirsutum
  Clone ID: GOSHI-09MAY01-C8603_5
gaaaaaaccggggggaccaacgctttcgaccattgcccacgcgtccgatttgtagctgctgttgtctctcccccgccgcctccatcccgaagccgtccccatcctccgacgacaatggtggccgctaagaagaccaagaagacccatgagagcattaacaacagattggctctcgttatgaagagtggtaaatacactttgggttacaaaactgttcttaaatctctcagaaactccaaaggtaagttgattataattgccaacaactgccctcctcttaggaagtcagagattgaatattatgccatgttgtgcaaggttggagttcaccactataatggagacaatgtcgacttgggcactgcctgcggcaaatatttcagagtgtgctgcctcagcattatcgacccgggcgactctgatattattaagagcatgcccggagatcactgagcaacagcggacgacacatcatactaggttttgttccaatttagtttatatttcttttgggtttctggaaacattgatgttaaaggcatcttattccgaaatttggaacttcctttgttatttgacttgtgtactagaaatttgtgaagtaatttc

SEQ ID NO: 8290 - DNA, 763 bp, Gossypium hirsutum
  Clone ID: GOSHI-09MAY01-C8603_4
ccgaatcgattctccaccccaccccaccctctccctcccaacatcaacagaagctgccagcgaatcaaacctccagttcccttctcgccgaagatctcctgtcctccgacgacaatggttgcagccaagaagaccaagaagacccatgagagcattaacaacagattggctctcgttatggaaagtgggaaatacactttgggttacaaaactgttgtcaaatctctcagaagctccaaaggtaagttgattattattgccaacaactgccctcctcttaggaagtcggagatcgagtattatgccatgttgtgcaaagttggagttcaccactacaatggaagctgaaaatgatgctgtaggccaagaacttcagaaacaactggaggctgctgtgaaggaactgaaacaggttcaggagttattcagtcaagcagcagataattgtctcaacttgaagaaaccagattaaattcatttccttgaacaatccctccttccatgtttaattttattgtctttatattcgtttaatcctaggattctaaaggtttatttatgtacttaaaaagttagtacaaaatgttccatctgggcttctgattctctgcactagaattcaatcaaattactctttcttgtttgtaaatagaacaattacactatataaaacctaaagaatatagaaggaaaaatgtataatattctctattgatttgatttacaccagtatatatgcgggggttctatcaactctaacatt

SEQ ID NO: 8291 - DNA, 521 bp, Gossypium hirsutum
  Clone ID: GOSHI-09MAY01-C8603_3
cgtcaacgaagctcaatgtacaataatgatgctgtaattgctaaaagcacgtggctatcccggtgcaaaattatctattatacagtttttagcatgctgtttggaatggtgggatctcgtgcacatcttgtaatggtcaactcttcatgggctcagtctcacgtcgagaagctttgcggtagtcctaagcgcattaagcgacgttatccaccttgtgatacttcaggacttcaggcacttcctttggaaaggtcggtggaaactccaaaaatcatatctgttgcacaatttcgtcccgagaaggcacatagtcttcaacttgaggccttttctgttgccataaaaaaactagatgaacactctcgaagacctaagttgcagtttgtaggtagtttccgaaataaatcagacgaggaaagactccagaattgaaagacaaagcagtgcaattgaacattcatgacaatgtggaattccataaaaacgtgatgtatagggacttggtaagtcttttgggcggg

SEQ ID NO: 8292 - DNA, 657 bp, Gossypium hirsutum
  Clone ID: GOSHI-09MAY01-C8603_2
cggccttcccgtttcgaccccgctttttggttgccgccaaaacctaaagggggggggggggtgaacaacaaattggctctcgtttgaaagtgggaaatacactttgggttacaaaactgttctcaaatctctcagaactccaaagtaagttgattattattgccaacaactgccctcctcttaggaagtcggtatcgtgtgtggtgccgtgttgtgcatagttggagttcaccactacaatggaagctgaaaatgatgctgttggccaggaacttcagaaacaactggaggctgctgtctcacatcgagaagctttggggtagtcctaagtgcattaagcgaggttatccaccttgtgatacttcaggacttcaggcacttcctttggaaaggtcggtggaaactccaaaaatcatatctgttgcacaatttcgtcccgagaaggcacatagtcttcaacttgaggcattttctgttgccataaaaaaactagatgaacactctcgaagacctaagttgcagtttgtaggtagttgccgaaataaatcagacgaggaaagactccagaatttgaaagacaaagcagtgcaattgaacattcaagacatgtgggaattccataaaaacgtgatgtataggggacttggtaagtttttt

SEQ ID NO: 8293 - DNA, 631 bp, Gossypium hirsutum
  Clone ID: GOSHI-09MAY01-C8603_1
gatattggtttaggttttagggtttcttcgcttcttgtggtgaaccagttgttgctgccgctcgcacttccccgctcccatctcaccgaagctctcccgtcgacgacaatggttgccgccaagaagaccaagaagactcatgagagcattaacaacagattggctctcgttatgaagagtgggaaatacactttgggttacaaaactgttctcaagtctcttagaagctccaaaggtaagttgattatcattgccaacaactgccctcctcttaggaagtcggagattgagtattatgccatgttgtgcaaggttggagttcaccactacaatggaaacaacgtagacttgggcactgcttgcggcaaatactttagagtgtgctgcctcagcattattgaccctggtgactctgatattataaagagcatgcccggtgatcactaagctatggggggataacttcctaggtgctgatttagtttcaatttttgggtgtctaaaaacattgttgatgttaaagacaaacttattctgaaattcagaactttctttgtagtgtttgtgggacagtggatggtattggcccatgtattagtgatcttttggagtggatttcgcttaaaaatct

SEQ ID NO: 8294 - DNA, 422 bp, Gossypium hirsutum
  unsure (1)..(422): unsure at all n locations
  Clone ID: LIB3135-022-Q1-K1-B6
cccacgcgtccgctgtcgcagttcccttctcgccgaagatctcctgtcctccgacgacagtggttgccgccaagaagaccaagaagacccatgagagcattaacaacatattggctctcgttatgaaaagtgggaaatatactttgggttacaaaattgttttcaaatctcttagaagctccaaaggctgaaaatgatgctgtaggccaagaacttcagaaacaactggaggctgctgtgaaggaactgaaacaggttcaggagttattcagtcaagcagcagataattgtctcaacttgaagcaaccagattgaattcatttccttgaacaatccctccttccatgtttcattttattgtctttatattcngttaatcctaggattcttttcctaggattctaaacgtttatttatgtact

SEQ ID NO: 8295 - DNA, 286 bp, Gossypium hirsutum
  unsure (1)..(286): unsure at all n locations
  Clone ID: LIB3145-030-Q1-K1-G7
cccacgcgtncgcccacgcgtccgcccacgcgtccggtttatccgcttctgccttttggggaaccatttgtagctgctgttgtctctcccccgccgcctccatcccgaagccgtccccatcctccgacgacaatggtggccgctaagaagaccaagaagacccatgagagcattaacaacagattggctctcgttatgaagagtggtaaatacactttgggttacaaaactgttcttaaatctctcagaaactccaaaggtaagttgattataattgccaacaact

SEQ ID NO: 8296 - DNA, 415 bp, Gossypium hirsutum
  Clone ID: GOSHI-09MAY01-C8143_2
tcgcaccaggaggcccatcattcattgtcccgaaaaacctggtctgggccccagggaggtgttgccgataggatctcaaacagcaatttccttgccaatggacccgttccttcaactccaactcgttcaaaggtgaggcggcatacgatttcggtgtttgttggggatgaaagtgggatgattaataggattgctggagtttttgctagaagagggtataatattgagtcacttgcggttggtttaaataaagataaggcactttttaccattgttgtgtctggtactgatagagtgcttcagcaagttgtggagcagttacaaaagcttgtgaatgtttggaagggtgaagatctctcaaatgagcctcagggtgaacgtgagctaatgctaataaagtgaatgcagacccaaa

SEQ ID NO: 8297 - DNA, 1188 bp, Gossypium hirsutum
  Clone ID: GOSHI-09MAY01-C8143_1
tgccgtcatggcggctctctccactgttccacacctacagatccactgctcaaagaccgagtcagactcagttcataaacccattactttcccttcaaaaacaataagacccatcatccatgtcccgagaaaactggtcttttccccaaagagtgtcgacgataagatctcaaacagcaatttccttgccaatggacccgttccttcaactccaactcgttcaaaggtgaggcggcatacgatttcggtgtttgttggggatgaaagtgggatgattaataggattgctggagtttttgctagacgagggtataatattgagtcacttgcggttggtttaaataaagataaggcactttttaccattgttgtgtctggtactgatagagtgcttcagcaagttgtggagcagttacaaaagcttgtgaacgtttggaaggccaatgacattttgtagactttcgtggaagaagtcgatctcctgtcaacacaccttatcgaagttcttaagtctcccaagattgtccattatgatatcttaaaaggggtgcatgacatttttatatatgtaaatttattaaattgacttactttaatatcagtggataggttgaatatctctaaaatgatcctcacgttgaacgtgagctaatgctaataaaagtgaatgcagacccaaagttcagagctgagatcatgtgggtagtggacatcttcagggcaaagattgtggatatctcagaacattcactaactattgaggtaacaggagatccagggaagatggttgctgtgcaaagaaatttaagcaagtttgggatcaaagaaattgctagaacaggaaagattgctcttagaagggaaaaaatgggtgcatctgctccattctggcgattttcagcagcttcatatcctgatcttgaagaaacagtacctgataacgctcttgcaggggctagaaagcaatcagtatttagcgaggccgatgtttctggatggggagacgtctatccggtggagtcgcctgatggctttacaatcaatcaagttcttgatgctcattggggtgttctcactgatgaagatacaagtggacatcaatctcatactttatccatgctcgtaaatgactctccgcggagtcctaacctgttacaggttgttttgctcgaagagggctatatcttc

SEQ ID NO: 8298 - DNA, 358 bp, Gossypium hirsutum
  Clone ID: LIB3048-035-Q1-L1-B2
ggacattttcttggccaagattgtggatatctcagggcatgcactaactattgaggtaacaggagatccagggaagatggctgctgtgcatagaaatttaagcaagttcgggatcaaagaaattgctagaacaggaaagattgctcttagaagggataaaaatgggtgcatatgctacattctggcgatgttcatcagcttcatatcctgatcttcaatacgcagtgcctgattacgctgttgcttggactcatatgcattattggttccccacagaaattcaaggcttatggggagacttctatccggtggagccgcctgatggctatacaagtaatcaagttctagatgctcattg

SEQ ID NO: 8299 - DNA, 410 bp, Gossypium hirsutum
  Clone ID: GOSHI-09MAY01-C8123_1
ctctccacaaaacccgaaggaaaaaggaaaatccttttttcctctgtccttccctttcaacgcagaccgaaagagaaggcggagtcctcccacaatttcttgtggccaccaatcacgctctactcttaagggaagtcagcatggatcaggctcaacacccaactgtcatgcagaaggtagcagggcagctcactcgttttagcaattcccaagattttcaagggtatgatgggtctttccgtaggcctgctctctaccaaagaaatgttgcatatcaaaattgctccaatgctgcactgcagtaccctattgtccgagcttgtggagttaccagtgacatgcctatggttccatcaacagcatctgctatttgtattcaagctcctgctgagaaagggtttaccggcttt

SEQ ID NO: 8300 - DNA, 542 bp, Gossypium hirsutum
  unsure (1)..(542): unsure at all n locations
  Clone ID: uC-gsflmaxxa061e06b1
atttgggtataaagcaaaagaagaagaaattgagttctccaatgctgccagtggtggtgatccagttcaaaatggtgctgctctggcatcattaccaaggactggtcactcgccgtctaccaagatggctctgctgctgttgggagaagtggtggcaatctctctcttgatgccttagccaaagctaaaaaggctttacaaatgcagaaagatttagcagagaaactgaagaagatacctttgttgaataaaggcacaggctccagttcagtggcgactagtgtaacagttcagggaccagtctcatcagtgactacagcaattgcaagtggtccatcaagctcgtcagtgctttcttgtacctctgcatcagcagcttctatgaagccaccagctggtggggtggctgctgatcctggtcttgcttcaatatcaaacttagaagcntgtgaacgtgctcaagaattggctgctaagatgggatatcgcctggaccctcagtttgctcctctaataaactggttcccctgacaggtgcaagc

SEQ ID NO: 8301 - DNA, 631 bp, Gossypium hirsutum
  unsure (1)..(631): unsure at all n locations
  Clone ID: LIB3543-056-Q1-K6-D9
cccagcgtccgccccgcgtccgactggtcacccccttcctaccaagtatcttcgatttctactgctngaaaataaagcatatagtgttaccggatctcatgaggttactggatctagtacagatggctcttcttctactgggaaaagtggtgctaacctctctcttgatgccttagccaaagcgaaaaaggctttacaaatgcagaaagaattagctgagaaactgaagaagataccctcattgaacaaaggccctagctcgagttcagtagtgactactggaacagttcaacgaccagtctcaactgtggctacatctgttgccactggaccatcaagctcatctgttccccctgcctctgcagcagtagcttctgtgaagccacctactactggcatgcctgctgttccgggccttgagtcaatacccaatttagaagctgttaaacgtgctcaagagctggctgctaagatgggattccgccaggaccctcagtttgctcctctaataaacttgtttcccggacaggtgcaagtagatgttccagttgcgcagaaacctacgaaggcacctcttctccgtgttgatgcacttggtagagaaattgatgagcacggtaatatcataaat

SEQ ID NO: 8302 - DNA, 392 bp, Gossypium hirsutum
  Clone ID: LIB3165-024-P1-K1-C1
cccacgcgtccgcccacgcgtccgggactggtcactcgccgtctaccaaggtatcttccgtgtctactgctgaaaataaagcatatagtattaccggatctcatgaggttcccggatctcttgatgccttagccaaagctaaaaaggctttacaaatgcagaaagatttagcagagaaactgaagaagatacctttgttgaataaaggcacaggctccagttcagtggggactagtgtaacagttcagggaccagtctcatcagtgactacagcaattgcaagtggaccatcaagctcgtcagtgcttccttctacctctgcagcagcagcttctatgaagccaccagctggtggggtggctgctgttcctggtcttgcttcaatatcaaac

SEQ ID NO: 8303 - DNA, 408 bp, Gossypium hirsutum
  Clone ID: GOSHI-09MAY01-C8393_1
gcttgaatggcattacatggccagatcgaactcctcatcccaccttacacgaggttaagtatgtctatcaaccgatcaaggtttatctaagggaaagcacagttaagataaagaacactaatttttatgagacaacagaaggattggtgtttgaatgggctgttcttggggatggctgtgaacttggatgtggaattctctcccttcctgtgattgaacctcagagcagctatgatatcgaatggaagtctggcccatggtatcctctaggggcttcctcagatgccgaagaaatatttttaacaatcactactaaacttttgcactccaagaggtgggtagaagccggtcatgtggtttcatcgacacaagtccagttgccttccaaaagagatattgtacctcata

SEQ ID NO: 8304 - DNA, 397 bp, Gossypium hirsutum
  Clone ID: GOSHI-09MAY01-C8383_1
cccacgcgtccgctctgatctaccccctatttggccgtcctcagaccaaaggctgagtctgtcgttaatctggccccccgagctgctggcttcagtgtcttccttggttctggtgggagtggctctgatgtgtaccagaaagaagaggatgagtcatctactcgagcggattatgaatcagaatctgatgattcttcactcaataattactcagttttgtcagggaatgggagtgatcaaggggttagcaggaaaatggttgagttggagcttgaacttcatgaaatgaaacacaagcttcggatgctagaggaagaatatacagatggttcagtaagaggggcagaatgtaataattccgaacttcttgctagaattagggagtatgaagaaaaac

SEQ ID NO: 8305 - DNA, 584 bp, Gossypium hirsutum
  Clone ID: GOSHI-09MAY01-C8353_1
cccacgcgtccgtccacgcgttcgcacgaatacctagcccctgaaataatcaaaggagaaggccatggaagtgctgttgattggtggacctttgggattttcttgcatgaactgctatatggtaaaaccccctttaaaggttcaggaaaccgcgctacactattcaatgttgtagggcaacagctgaaatttccggattcaccagcaaccagttatgctagccgcgacttaatccgtgggttgctggtaaaagagccacaacaccgattaggggtgaagaggggtgcaaccgagatcaagcaacatccattctttgaaggtgtgaattgggctctaatacgatgcagcaccccacctgaggtgccaagaccaatggagagcgagatgcctaggatgcctgggaaactcgggccagtggagccagttggagttggtagcaacagtaaaaggatggtaggtcaggtaggaacagacgtgaaatctgggggtaaatatctggactttgagttcttctagttttcttaattacaggaagccgtgttgtattagtatccatttactcaatccccccgaaagtttgttca

SEQ ID NO: 8306 - DNA, 1303 bp, Gossypium hirsutum
  Clone ID: GOSHI-09MAY01-C8343_1
ggaattccggggcggcccaacccgtccgccaacccttccggtgccagaaaccgaaatggaagttaacggcggcgcagtctccgatcccggaactatccgatctcagttccttcaactactccgtaccagacgaaatgctcaagttcctatgactgtggaacctgcgaaacctgtggttaagcctttgttccaggaggttaccccgccaaccttcagtgaggcaatggaatcttgtccaaaggctaacattggaaaccttaaggaactgctcaaagaggaaaatctatatctccatactgaggccggagatcaaggaaaattgcccgtgttgattttaagtacgaaaggaaacaatcaagaaaagaggcctgctgttgtttttctgcatagtactcataaatgcaaagagtggttacgcccattgcttgaggcttatgcttcacggggatatgtagccattggagtcgattcccgctatcatggtgaacgggccagcagtctaactacttatagagatgccctggtatcatcatggagaaatggggatacaatgccattcatatttgatacggtgtgggatttgataaaacttgcagattatttaaccgggagagatgacatagatcctactaagattggaattactggagaatcacttggaggaatgcatgcatggtttgctgcttttgctgacacccgctatgcagtggcagccccaataattggtgttcagggatttcgatgggcaatagataatgataagtggcaggctcgagttgacagtataaaggctgtatttgaagaagcaaggactgatttaggcaagaatgaaattgataaagaagtggtggagaaggtttgggataggattgctcctggtctagcctctcagttcgatgcacctaacacggtgccggctattgcacctcgccctttgttaattgtaaatggagctgaagatccccgttgccctcttgaaggcttagaaattcccaagacaagggcatacgaggcttatggagaggcccattcagacaactttaagcttgtggctgaacctggaatagggcatcaaatgacaccattaatggtgaaagaagcgagtgattggtttgaccagttcctcaaataataattgtaagggcctctgtctgtgttgttattgtttgtagatgtaatgtatttcctaatatgtatgcttcatcatgaatgatttgatgaactcagagatcaaatctcttaatgtacttataattcttaataataagaaaataattcccttcctttgatgtaaatatttttt

SEQ ID NO: 8307 - DNA, 503 bp, Gossypium hirsutum
  unsure (1)..(503): unsure at all n locations
  Clone ID: uC-gsronu33B090a12b1
cctacgcgtccgcagaaaccgaaatggaagttaggggcggcgcagactccgatccggaaactatccgttctcagttccttcaactactccgtaccagacgaaatgctcaacttcctttgactgtggaacctgcgaaacctgtggttaagcctttgttccaagacgttaccccgccaaccttcagtgaggcaatggaatcttgtccaaaggctaacattggaaaccttaaggaactgctcaaagaggaaaatctgtatctccatactgaggctggagatcaaggaaaattgcccgtgttgattttaagtacgaaaggaaacaatcaagaaaagaggcctgctgttgtttttctgcatagtactcataagtgcaaagagtggttacgcccattgcttgaggtaatctgaancaaacctttgaatttgccgatatcttcttattgtctataaattaagttgtcttcttttgtaggcttatgcttcacggggatatgtagccattgg

SEQ ID NO: 8308 - DNA, 586 bp, Gossypium hirsutum
  Clone ID: GOSHI-09MAY01-C8263_1
atttcttctcgcctactcaacacctcctccgccgccgccgcaactgcgctactaaagtccaagtccagagttcataatagacatacctcaatccctcttcttcctctcaaacacccattctcccctctcactttgaaacaaatgagtaacaattcccagtcaacgctttcttgttcctctcttccccaaaacaacccatcttccccttcaaccgcatcaggtcggattggagaagtgaaaagggtaacgaaagagacgaatgtgtgggttaagataaacttggatggcaccggagttgctaattctagtacaagtattccctttctcgatcatatgttggatcaattagcctctcatggtctgttcgatgtgcacgtcaaggctactggcgatattcatattgatgatcatcacaccaatgaagatgttgcccttgctcttgggacggcattgctttagtcacttggtgatcgtaaagggattaaccggcttggtgatttttcagctcctctcgatgaaacattggatcatgtttcactggatatatctggccgaccgcatttagttatgatttaaacattcccac

SEQ ID NO: 8309 - DNA, 688 bp, Gossypium hirsutum
  Clone ID: GOSHI-09MAY01-C9933_1
tccatttttaagccccctcttcttgcttccccctcttcattcttctccctttcttacaactttcattcttcctctcttacttacccatggcccaggagactcttaactctgaatcaccacccgctgcccccgcccaggaattgtctgtggttgtcgagaagcctcaagttactgagaaagagccacaaccctccgcacctgctcccctgccggagcctgaggttcccgagaagccggctgttgttgctgttgaagaagaagctgttgaagttgagaagcccaaggttgaagaaaaggaagaaactaagataacccagtctgtttccttcaaagaggaaactaatatcgctggtgaacttcctgagcctcaaaagaaggcccttgatgagcttaagcagcttattcaagaagcccttaacaaccacgagttcactgccaaacccgaagcagaagaaaaacctgtagctgagcctgagccaaagaaagaagatgaagaaaacatggaagagaagaaagaagaaaaagaggaagagacacctgctgctgcaatttcagaagaacccatgatagtaaccgatgcacccgccgctgttgaagtcaaggtagaagataatactcctcctccaccaccaccagccgaggctccgccggccgaagtgggttgtggtggaaacagaggtcgctgaaa

SEQ ID NO: 8310 - DNA, 778 bp, Gossypium hirsutum
  Clone ID: GOSHI-09MAY01-C9883_1
cccacgcgtccgctctttatttctccccaaattttcaatcctaaatactcgatccaattgaaactcaattttgattttttaatcattattcttattatttattcgatgtgatcatgcccgcgacggattatcaaggaacttcgtcaccgttgacaaatatcggccgttcgttattaccagtgaggagggatcaagtacacgccatggaatcgccgatcggtggatcggcgtctaacgaggcggagatcgagtcctttcaaaggcaagtagctgacagatttcacgatttagcttctgtcccttccgatgaattgctttctctgccgtgggttcggaagttgctcgacgttttcctctgttgtcaagaggaatttcgggtcatgctttttaacaacatagctctagtgaagaagccgcccatggaccgtttgatcgccgatttttacgagcgtactgtcaaggcgcttgatgtttgcaatgcgattcgcgacgggattgaacagatcaggcaatggcagaagcttctagaaatcgttctttgcgctttgggtgatagtaatgttggttatcagagaagtctaggagaagggcaattccgtcgcgcgaggaaggcgttgatagatttagcaattgggatgcttgatgagaaagattcaggtcaagccttggctcataggaaccgttcctttgggagacacaacactagcggcagtcactccaaggatcatcaccatcgatctttgggtcatttcaggtccttgtcttggagcgtttcaag

SEQ ID NO: 8311 - DNA, 311 bp, Gossypium hirsutum
  Clone ID: LIB3166-040-P1-K1-A7
cgcgttcgctctatctttcgcccagtttttaatcctaaatactcaatccagttgtaacggagtgttgattgtttaatgcattattcttattatttattcgatgtgatcatgcccgcgacggattatcaaggaactgcgtctccgttgacaaatatcggccgctcttttttaccagtgaggagggatcttgtacacgccatggtatcgacaatcggtggttcggctttttcgtggcgtccatctgtgttttttaaacgacccgcttacatcgcattaaggaatgcttttcgtctcgggtcatcgaacctgtt

SEQ ID NO: 8312 - DNA, 454 bp, Gossypium hirsutum
  unsure (1)..(454): unsure at all n locations
  Clone ID: LIB3543-020-Q1-K1-B10
ctgacgcgtatgttgaaactacaactcccattatataatcatcattcttatcctttattcgatgtgatcatgcccncccggactatcaaggaactcactcaccgtgtgacaaatatcggacgccctctattaccagtgaggagggatcaagtacacgccatggaatcgcccatcgcgcgatcggcgtttaacgaagccctgatcgaatcattgcaaaggcgaataactgacatataccacgatcaatcttttgccccttccgatgaattgctgtctctgacatacattcgaaagcagctcgacgcttagctgtgttgcaagagaaataggactcatacttttaacaacataactctagtgaagaactcgaccatggaccgtatgatcaaccattgacacgagcgcactgccacagcacttgatgtaggctatgcgattatctactggatcgaac

SEQ ID NO: 8313 - DNA, 308 bp, Gossypium hirsutum
  Clone ID: uC-gsronu33B012c09b1
tctaacataattctcattgccgtggacgctgatcgaagatcatttaataccggtgcttattatttattcgatgtgatcatgcccgcgacggattatcaaggaactttgtcaccgttgacaaatatcggccgttcgttattaccagtgaggagggatcaagtacacgccatggaatcgccgatcggtggatcggcgtctaacgaggcggtgatcgagtcctttcaaaggcaagtagctgacagatttcacgatttagcttctgtcccggtgatcctacgtggctagctttcttaggagggactatgggc

SEQ ID NO: 8314 - DNA, 523 bp, Gossypium hirsutum
  Clone ID: GOSHI-09MAY01-C109858_1
cgaatacaagtctgcctcttgcgctgccaaaaaatgcattgcacccactccaatcatgccttctttaccagcctacaacgacaccaacactgtcaccgccttcagccaaagctttagaagtcgagaaaaggccgaagtcccaaccgatatagatgaaagcctgttcttcacaatcggcctcggactcaacaactgcccacccaatttccgaaaacgtcgttgccaaggacccaacggtacacgtttcacagcgagcatgaacaacgtctcattcgtgctcccgcgcaacttctctctgttgcaagctcaccagcaaggaattccaggcgttttcaccacagatttcccagcaaaccctccattgaaatttgactacaccggaaacctgagccgatcgctctttcaacctgttccgggaaccaagttgtacaaattgaagtatggctcaagggtacaaattgtgctcaagacacaagcatagtgacccctgagaatcatccaattcatcttcatggatacgatt

SEQ ID NO: 8315 - DNA, 798 bp, Gossypium hirsutum
  Clone ID: GOSHI-09MAY01-C109808_1
cataggaatacaattttatattattattttagaaaaagcacaaacacaactgctttaaaaaaaacgaaaggggaaaaatctacagataaatttttggcggagatgtagtaaatgagacattctcagtagcttaaattaaattttagataatgcatggggcaaaagggccttattatgggtggcatggtttggtacacatcttccattgctcaaaatctccattaacaaaatcatagtaacctcctcttagtgtcaatgttccattcaccactgcccgccgcgcgggcggatacgtcagtagatttcccatcgagttcttcactgattccttttcgcaaagcgttctttgttgttcgggacacaggtcaccagcttcttccagtacctttttctttgctggcaaaccaattttcacccactcatcaatgaagtcatatgtttgagtttgatctggaagactcataagcctctttatgccaccacaacggctatgtcccattatcaatatgttgtccacctgaagttctttaactgcatactcgatgactgaaccaatttcagtgtgtctcaactggtcaaattgaggaaccatattagcaatattgcggccggcgaaggcttctcctggtttgaaattcaaaacgactgaagggcttactcgtgaatccgagcatgaaatcaccaagaacttgggatgctgatcttctgcaagtttcttgaaacattctcggtttttgtcaaatatgttggttttgaagaagtgaaagccatcgtcaagcctttgagcatcatggtcaa

SEQ ID NO: 8316 - DNA, 601 bp, Gossypium hirsutum
  Clone ID: GOSHI-09MAY01-C9553_1
cttcggaagtttaatttacccattacttttttaagggaaaaaacagagctcgctcttgggggtttgcttaggggtttcttttaatcaaaactaatctgattctgctttctactccaaaatcaccaaaagcccagatttcgtttagaaattagaaaaccccaccgtttatagcgctgttattaaatacctccataaacatcatcccctcaaaaaaggagaagctgctctctcccattaaccctaactacacaagaaataaaattacctcaaaacaataggatggcagaagcagaggtaggatctggtgaaggaaagccccaagagatgtcgttgaaggataaagggaatgagtttttcaaggctgggaactaccttaaagctgctgctctttacactcaggccattaaacaagacccttcaaatcccactctttatagcaatcgagcagcagcgtttctacatttggttaaacttaacaaagcgctggctgatgctgagacaacaattactttgaaacctcagtgggaaaagggtgttttgcgatattgctgcgtttttttcgaaaaggatgcattttagaggctatggaacgatatgacga

SEQ ID NO: 8317 - DNA, 608 bp, Gossypium hirsutum
  Clone ID: GOSHI-09MAY01-C9533_3
gaaccttcgtgcattgctttcaactttgcaatacttaaaacccgagctttcttgatttgacggatccttggcccagagagtggttggcagccaattccgttaaccgaagttataacttcagctgccgttaagaaagcatacagaaaagccactctttgcgtccatcccgacaaattacagcaacgaggtgcaagcattcatcagaaatacatttgtgaaaaggtcttcgatcttctaaaggaagcttggaacagattcaattcagaagagcggtaaaatgcaatcttttttttttttaaatacaggtgcgattggcttcattacaattaaactatggtgctgtaaattttacactgttagcatagtaaatgatcctctttttgtctattctatgtttctacggcatgtacttgtgtgtaattcaactatttataagcccaaagaaatagatgcaaagattcttagttaaaagaccatggaacacgaactccatgttattgggtttattttaactgttcattggctggacatgtttgttcctgccaactctttactcgagttcgagatttgttataatatggtattcgggtttattttttggtcttatt

SEQ ID NO: 8318 - DNA, 1137 bp, Gossypium hirsutum
  Clone ID: GOSHI-09MAY01-C9533_1
cccacgcgtccgagaaatagagagggaagacaagaatattattgagagccttacacctgaagataaggaggctcgctaaagagagagagagaactggaacttgttcgccttagtaagatagaagaagaaatagagagggagagagaaagggaaaaagataggatggctgttgacagcacagttctcgaagctcgtgaaaggggatatgctgaagcccgggagagggcagagaaggctgctctagaaagagcaactactgaagctcgtcaaagagcaatggcagacgcacgtgagagattagagaaggcatgtgcagaagctagggagaagtcttctatggaagccaggctcagagcagagcgtgctgctgtggagagagcaactgctgaggctcgagagcgtgcggtggagaaaataatggctgaaagggctgcttctgaggcgagagagcgagtagaacggtctatgtcagataaattttcgacttcttctagaaacagtggaatgagaagcagctattcatcctctgatctgaaggatcagcattttcagagcaccaattcttttggtggtttaagatatccgtatgcctccgcatataatggggttgaaggtgaatcagctcagaggtgtaaagccagattggagagatatcaacgaacagctgaacgtgcagctaaagctctcgaagaaacgatcatgcgcgatcttattgctcaaagagagcaagctgaaagaaatagattagcggaatctcttgatgcggatgtcaagaggtggtcgagtgggaaagaagggaaccttcgtgcattgctttcaactttgcaatacgtatgtactattatccaaattctctccaatcaagcttttataatcatttcctttgtttactgggtcgtttaattgacttaatgcttaatcttccatcattcggaataatatcaaaatttctcattgctaatgtactttgatatccttacaacaagttaaaacccgagctttcttcatttgacggatccttggcccagagagtggttggcagccaattccgttaaccgaagttataacttcagctgccgttaagaaagcatacagaaaagccactctttgcgtccatcccgacaaattacagcaacg

SEQ ID NO: 8319 - DNA, 428 bp, Gossypium hirsutum
  Clone ID: LIB3166-015-P1-K1-E1
cggacgcgtgggcggacgcgtggccggacgcgttttctgacgcgtgggtgaagcccgggagagggcagagaaggctgctctagaaagagcaactactgaagctcgtcaaagagcaatggcagacgcacgtgagagattagagaaggcatgtgcagaagctagggagaagtcttctatggaagccaggctcagagcagagcgtgctgctgtggagagagcaactgctgaggctcgagagcgtgcggtggagaaaataatggctgaaagggctgcttctgaggcgagagagcgagtagaacggtctatgtcagataaattttcgacttcttctagaaacagtgtaatgagaagcagctattcatcctctgatctgaaggatcagcattttcagagcaccaattcttttggtgggttaagatatccttatg

SEQ ID NO: 8320 - DNA, 348 bp, Gossypium hirsutum
  Clone ID: LIB3166-034-P1-K1-H1
cccacgcgtccgcaccaattcttttggtggtttaagatatccttatgcctccggtgtaatggggttgaaggtgaatcagctcagaggtgtaaagccagattggagagatatcaacgaacagctgaacgtgcagctaaagctcttgaagaaaagaacatgcgcgatcttcttgctcaaagagagcaagctgaaagaaatagattagcagaatctcttgatgccgatgtcaagaggtggtcgagtgggaaagaagggaaccttcgtgcattgctttcaactttgcaatacatccttggcccagagagtggttggcagccaattccgttaaccgaaagtataacttcagct

SEQ ID NO: 8321 - DNA, 618 bp, Gossypium hirsutum
  Clone ID: GOSHI-09MAY01-C9453_1
tcgttcacgcgtccgctttaaaattaaaaaaaaaagaaaaagaaaaaaagataagcaatcattttccattgctttcctttttcttgttttctggttttctttttccccatttgtttcccattagaaaaaaaatggcgacaatcaatggtgagactgcaatggaaaaggccttggggtctataggaagctttagtaacaacaacaacaacaaggaggtgtttcttagagcagataagatagatttcaagagctgggatttgcaactggataagcacttgagcagggcctggtctagggacagtgatggttcaactctcacaaagaaggaagaatgggaaattgatttggctaaacttgatataaggtatgttatagctcatgggacttatggcaccgtttaccgtggcgtttatgatacccaagatgttgcagtgaaggtattggactggggggaggatgggattgccacggttgctgaagctgctgctcttcgggcgtcattccgacaagaggttgctgtttggcataagcttgaccacccgaatgttacaaagtttatcggagcttcaatgggaacttccaaccttaaaatcccgacaaaagatggaactagcgaga

SEQ ID NO: 8322 - DNA, 513 bp, Gossypium hirsutum
  Clone ID: uC-gsflnu33B108h04b1
tttttcttttctttgtttatcgttatggcgacaaacaagggtgaaggggctaaagctgtagataaaacagagacaaaccctatagaggaaaaggctttggggtgttccattgggaacctcagcgacaacaaggacgtgtttacaagagctgataagatagattttaagagctgggatttgcaactggataagcacttgagcaaggcttggtctagggacaaagatgtttcgcttgtgactaagaaggacgagtgggaaatcgatttggctaagcttgatataagacatgttatagctcatggaacttatggcatagtctaccgaggtgtttatgataaccaggatgttgcagtgaaagtattggattggggggaagatggggattgctacagctgctgaagctgcagctcttcgggcatctttccggcaagaggttgctgtttggcataagcttgaccacccaaatgttacaaaggttattggagcttcaatgggaacttccaaccttaagat

SEQ ID NO: 8323 - DNA, 703 bp, Gossypium hirsutum
  Clone ID: GOSHI-09MAY01-C9723_1
catggatgttgcctttggaatggagtatctgcatggaaagaatatagtgcactttgatttgaagagtgacaatttacttgtcaatcttcgagatcctcaccgtccaatatgcaaggttggagatttgggcctatctaaggtgaaatgtcaaaccccgcgctctcgtggggtccgtggaacccttccatggatggcaccagagcttctgaacggcagtagcagtcttgtctcggagaaggttgatgtcttctcattcggtattgttatgtgggagcttctcactggagaagaaccatatgcagacttgcattacggggctattattggtggtatcgtaagtaatacactacgaccaccggttccagaaggctgtgacccagaatggagatcattaatggagagatgctggtcatacgagctaccagagagaccgagtttcaccgagatagcaaatgagttacggtcaatggcagcaaaaattcaaccaaaggggcaaatcccataaaataaagaaagcagaaaactcaaccctcaatttttcaaaatgattttggtcaatctggttattgtatggcatactcttgtttcctttgcattttgcatggcagatggaggaagaataatatggtgttcgtcaatgtgctgctccttggcatgaatgttgacagcacaaagaaaggaagggaaccatgatttctttttc

SEQ ID NO: 8324 - DNA, 863 bp, Gossypium hirsutum
  Clone ID: GOSHI-09MAY01-C109688_1
caaagatataaccatagacaatttctctgtatcagctcgtgggaaagaacttcttaagaatgcctcggttaagatatcccatggtaaaagatatggtttggttggaccaaatgggatggggaagtctaccttgttaaagcttcttgcttggaggaagattccagttccaaaaaatattgatgtgctcttggttgaacaggaagtggttggtgatgatagaactgccctccaggctgttgtttctgcgaatgaagagttatttaggctacgggaagaagttgcagctttgcaaaattcttctgcttctaatggagaggatgaaaatgacctcaatggagatgatgcaggagaaaggctcgcagaactgtacgaaaagttgcagattttgggttcagatgctgctgaagctcaggcatctaagattcttgctgggttgggtttcaccaaagcaatgcaaggtcgtccgacacgatcatttattggtggatggaggatgagaatatctttggccaggcactttttgtacaaccaacacttctgttgttggatgagcccactaaccatcttgaccttaggctgtactttggctggaggaatatttatatccgttgaagaaaaccttggttggtgttttctcatgatcaaaatttcctcaatacagtttgcactgaaattattcatctccatgatatgaagctcaagttctaccgtggagactttgatgactttgaatccaggtatgacagcgtcgtaaagagatgaataagaagtgtgaaatttatgagaagccagtaaaagctgctaaaaagtcaggaatcgatttcagcagaaaggtaaaaatcactattttgcggcgcaaaaga

SEQ ID NO: 8325 - DNA, 1204 bp, Gossypium hirsutum
  Clone ID: GOSHI-09MAY01-C9653_1
gcaatgtcagtgatgtcagctgttggtggtttaaggttggagttgatgcaattgagcaagatgaagtggtgatgatatcagttgcctttcttgtgattttgttcagtgtacagaagtttggaacaagtaaagtgggacttgctgtaggccctgctttgttcatatggttttgttctctagcaggcattggaatttacaatcttcttaagtatgacaccagtgtcttgaaggcatttaatcctgttcacatctatttatacttcaagaggaactcagttaaagcttggtatgctcttggcggttgtctcttatgtgcaacagggtccgaggcaatgtttgcagatctttgctatttttcggtgcaatcaatccagcttacatttgtttttctcgtattgccttgcctaatgttgggttatctggaattatggtagtaagcttaagtatgaaactgaagtgaagcaaaagctctcaatggatttgatgcgagaattgggctgcaatcttgggacaattagagctcctggcattggtttggtttacaatgagctggcaaaaggagtaccagctatatttggccattttctagctacactccctgcaatccactccatgatcatctttgtctgcataaaatatgtccctgttcctatggtgcctcagagtgaaagattcctgttcaagcgagtcttgcctaagaagtaccatatctttcggtgcattggcaagtattgttataaggatgtccgtaaagaaaatcaccagacatttgagccactggtgattgagaagtttgagaagttcaatcgtcgagaaacttacggaaagccattggaaagcgatagcgattaaaacactgattatgaagaggatacctctctctcaaaggttctcatagctccccatggaaagtttactcacttgctggtgcactgttggctgagttctggagctgtagtaataataccatttctgaacaagcacctcataagaggtgattggagaatttcctgtagaaacctcaatttttgatgccgagcatggtttatataaggagctatttttatactcacaattatggaatctgaggtgtttatattcttggcatgagaaattatgccagaaagaattctgggtattaaaaaccaatttcaatactctattcctcctttaaaaaataatgggggggttcaaattatttgcg

SEQ ID NO: 8326 - DNA, 675 bp, Gossypium hirsutum
  Clone ID: GOSHI-09MAY01-C9673_1
taaagtaaaaaacttcggaaaaaatctcaaatccagaacccaaaatctcatctttccattagagcgcagctctcattcctctcgattttctttcactttgttcgcctcttcgattatcaattccgctctcagattcttgaagcaagcgaagttcaattctccaccctacatcagaagaaaactctgattccccaaaattagggtaatctcaatccctaaaagatgccggccaccgcagggagggttcgaatgcccgcgaacaaccgggtgcatagtagcgccgccttgcaaacccacgggatttggcaaagtgcaatcgggtatgacccttatgctcctaataaagatgattcaaaaaattcatcgagtcagatgactgccgctgctgaacccgatggtgaaaacccatacgctagctttcaagggcttctagcccttgcccggatcacgggttcgaatgcaaatgaggctcgtggagcttgtaagaagtgtgggcgtgttggtcaccttacttttcagtgcaagaatttcgtgagtttgaaggagagtaaggagaaagaccctgaagcgatccaggctgcggttttgaatggacttgataagttgaaaggagggaactgaatgggaaaaaggagatggagagtgaaaaaaaagatgacgatgagagtgagagtt

SEQ ID NO: 8327 - DNA, 400 bp, Gossypium hirsutum
  Clone ID: LIB3146-037-P1-K1-D12
cccacgcgtacggccacgcgtccggccactcgttctatacttcctacattatatgaaaactctgattccccaaaattaggtttatctcaacccctaaaagatgccggccaccgcagggagggttctaatgcccgcgaacaaccgggtgcatagtagcgccgccttgcaaacccacgggatttggcaaagtgcaatcgggtatgacccttatgctcctaataaagatgattcaaaaaattcatcgagtcagatgactgccgctgctgaacccgatggtgaaaacgcatacgctagctttcaagggctcctagcccttgcccggatcacgggttcgaatgcagatgaggctcgtggagcttgtaagaagtgtgggcgtgttggtcaccttacttttcagtgc

SEQ ID NO: 8328 - DNA, 394 bp, Gossypium hirsutum
  Clone ID: GOSHI-09MAY01-C9623_1
cccacgcgtccgcccaattcaccaatgtttgcaaattttcatggcgattcctatccctctgttgttctcttctccctctttcctttcctctcccaaatccttacctttattcttcaaacccaaaattaacacctccaaatccttcaatcttcactttcatgctaatgttgcctcctcttccactttgactgctatggaagtcggtgaagatttaccgcttgattatggtgattggcttcccaaacccgatccagaccagcgccgaagagctggcattttgctccacccgacctcgtttaagggagcttatggtattggtgattttggtgaagaggcttttcgattcattgactggcttcatttagcgggctgctccgtttggcaggtgcttccc

SEQ ID NO: 8329 - DNA, 730 bp, Gossypium hirsutum
  Clone ID: GOSHI-09MAY01-C9113_1
taccggtaccgccttcccggtcgcccagcgttcgtcacttccgaattttatgacctgaaaaactgaatcacagttagaatcccataaaaaacctaagttgcgtccggtccgattcggtcccagcgtcgaactgaaagcgtgagcctgatgaaaggaaggaaaagttggctgaggagcttgaagagaatgctgttcaaaatagtgcactacatttggctgctttggagcaaaaaagggctgatgaaaatgtaatgaaattggctgaagatcagaagaggcagaaggaggaacttcacaacaggataattcagcttgagaaaaaattagatcaaaaacaggcattggaactggaaattgagcaactgcgaggatcactgaatgtaattaggcacatgggagatgaagatgatatagaagttcttgagaaagtggatgcaagtcttaaagagttgagagaaaaagaggcagagcttgaagacttagaagcattaaaccaaactcttattgtaagagagcgcaagagcaatgatgaactgcaggatgctcgcaaagaattgattaatggattaaaagaaatatccacccgttcacaaattggtgtcaagagaatgggagagcttgacagtaaaccattccttgaagccatgaaaagaaggtataatgaggaactagcagaggagagagcttcagaagtctgctcattgtgggaagaatatctgaaggatcctga

SEQ ID NO: 8330 - DNA, 630 bp, Gossypium hirsutum
  unsure (1)..(630): unsure at all n locations
  Clone ID: LIB3825-019-Q1-K6-A6
ngagtgcaagggatcacttccagaggatttttnagtgaccatgaaaaactgaagtcacagttagaatcccataagaaagacctagagttgcgtggagttgaacttgaaaagcgtgaggcactgaatgaaagtgaaaggaaaagttggctgaggagcttgaagaggtgctgtgcttcattcttgattttcacttttgcttgttgatcccttcagttttatattcaagtgtgtttggcactactttcatctcatagtcaggtcgtatgaccactctggaatggctgccatcagaactcatagtattggtacagagtttttggttttgcaacaatccttgtgaagcatcagaatgctgttcaaaatagtgcactacatttggctgctttggagcaaaaaagggctgatgaaaatgtaatgaaattggctgaagatcagaagaggcagaaggaggaacttcacaacaggataattcagcttgagaaaaaattagatcaaaaacaggcattggaactggaaattgagcaactgcgaggatcactgaatgtaattaggcacatgggagatgaagatgatatagaagttcttgagaaagtggatgcaagtcttaaagagttgagagaaaaagagcag

SEQ ID NO: 8331 - DNA, 580 bp, Gossypium hirsutum
  Clone ID: GOSHI-09MAY01-C9133_2
tccgggccgatctcgttaggttggaaggtaatgcaatgtgctcccctggcttttcttgtgattcagccttgcaggtaacgtacattgttaagggcagcggtcgtctccaagtggtgggtgtggacggaaaatgggtcctggaacccattgtgaaagcaggtaatctgttgattgtgccaaggttctttgttgtttcaaagattgctgatccaggtggtttgtcatggttctcaatcatccccaccccaaaccctatgttcacccccttggctggaagcattggggcatggaaggctatatccccagaagttcttcaagcagcattcaaggttcctgctgagacagagaaacttttccgctccaagaggaccaatgatgccatctttttccccccccctaattgaagcaaactaaagcaccccctcacccctctgctagtttctctaaatacgcttgagcttctattagtaataattagttttgaattataatcttttattattgtttctttagtacttatcaataaaagttaaatttagagttaaattataaaaaaaaaaaaaaaaaaaaaagggcggcc

SEQ ID NO: 8332 - DNA, 1413 bp, Gossypium hirsutum
  Clone ID: GOSHI-09MAY01-C9133_1
atatcttccatttcacgcctataaatatcctttcaatcacacctcaataaatcattgctcgcgcccccccccgcgctccattccttctgtcattttgggttttactcttcttctttttttttgtgaaatcaagatggatcttgatctttctccaaagctggcaaagaaagtgtacggtgacgatgctggaagctactacgcatggtgccccgatgaacttcctatgttgcgtcaaggcaacattggtgcagccaagttggcccttgagaagaatggctttgccctccctctttactctgattcttccaaggttgcttatgtccttcaaggggctggtgttgctgggattattctccctgaatcagaggagaaagtgattgcaatcaagaagggtgatgcaattgctcttccatttggtgtcatcacctggtggtccaacaaggaggacactgaattggtggtccttttcatgggggatacctcaaaaggccacaaaccaggccagttcactgatttcttcttgacaggcgccaacggcatctttactggcttcacaaccgattttgtgaagagggcatgggatgtggatgatgacactgccacggccctaattggtaaccaaaagggcaaaggcattgtcaagcttgatgccaatttcaagatgcctgaacccaagcccgatcaccgcaaaggaatggccttgaactgtgaagaagctccgttggacaccgacatcaagaatgccggcaacgtcgtgctcttgaacactaaaaacctccctttggtcggccaggtgggtatgggggccgatctcgtcaggctggaaggtaatgcaatgtgctcccctggcttttcttgtgattcagccttgcaggttacgtacatagtcaacggcagtggtcgtctccaagtggtgggcgtcgacggcaaaagggtcctggaaaccattgtgaaagccggcaatctgttgattgtgccaaggttctttgttgtttcaaagattgctgatccagatggtttgtcatggttctcaatcatcaccaccccaaaccctatgttcacccacttggctggaagcattggggcatggaaggcgatatcacctgaagttcttcaagcagcattcaaggttcctgctgagacagagaagcttttccgctccaagaggaccaatgatgccatcttcttcccaccaccaaaatgaaggccatccgtttagctgtcttctgccagtttttagtgttttgttttttttccaaataaaatgggttttagtgactactgggttggagtattagtgataataaatgtttttcttcatttggtatatgtcaatggatgatatgaatatcaatgaattaggtgtttgtaagtttcataactaaatcataatcttaaaaaatctaaataatt

SEQ ID NO: 8333 - DNA, 345 bp, Gossypium hirsutum
  Clone ID: LIB3145-028-Q1-K1-D2
cccacgcgtccgctactttcaattcttcattccttctgtcattttgggttttactccttttttttgtgaaatcagggaaatggatcttgatctttctccaaagctggcaaagaaagtgtacggtgacgatggtggaagctactacgcatggtgccccaatgaactccctatgttgcgtcaaggcaacattggtgcagccagttgctgcaccggttgctaagtctccaacagtgcaatctccgtcatccgtagcagtacgtgtttccctcaaagaattccattattaggagtattggtgtctaatcttcatcactttatgacgataatcatctgcctacacccagt

SEQ ID NO: 8334 - DNA, 419 bp, Gossypium hirsutum
  Clone ID: GOSHI-09MAY01-C9083_1
ctgaacagtactcttctttgcttgcttaaatacttgaacaaaattcatttaaagaaccaaaaatatggggaagaagatgctgaattttgaagaacagtgtaagatagtcaacttattgaaatcttcatctgagcagaaatcaatcgaagagacgctcactgaattcttcaccaatcccaagctccggcatttcaatgtctgctattctctttcactcttattgcaggacaaaatgatgctcagttctactgaacgattggttgcatttgctattcttcatcgaagctattcctctcaaaagtctgctgcaaacccatttatatcttttcttgtaaatgctgcatgtgatgagggagctgaaaattatgaaagggcatttatcctccatttgctaggctttggcaactccaaaagcaata

SEQ ID NO: 8335 - DNA, 574 bp, Gossypium hirsutum
  Clone ID: GOSHI-09MAY01-C9053_1
gtttctctgtttctcgagtgttttctggatgacttctgccagtgtggttttgattggtaacaacgttaccctctctttcgatgatattgaagctaattttgctccggcaatcaaagggtcaggggaatgcggagtattatatttggcaaatcctcttgatgcctgttcagacttgagtattaaagttgatgaactttcaaatggttcgtccccatttgcattggttattagaggagggtgtagttttgaagagaaagtaaggagagtgcaaaaggcaggatttgaagccgctattgtctatgacaatgatgatgatggtgtcttggttgcaatggcagggaatgcagctggcattaagatacatgctgtctttgtttccaaagcttctggtgaaatactcaaaaagtttgctgggtctactgatatggaactgtggctaatccctagctttgaaaactcagcatggtcgatcatggccatctcctttatttctctacttgccatgtcagcagtgctggcaacttgtttctttgtacgcagacatcgcattaggcgaagaactccacagtcctct

SEQ ID NO: 8336 - DNA, 619 bp, Gossypium hirsutum
  Clone ID: GOSHI-09MAY01-C9073_1
tctacgcgtccgcatggatggcgatggacatggaagtcatacagcagctattgccgctgggaataatggtattcctgttagattgcatgggcatgaatttggaaaagcaagtggaatggctccttgtgccaggattgctgtctacaaggcaatatacaggctttttggagggtttgtcgcagatgtggtagctgcaattgaccaggctgttcatgatggtgtggatattctcagtctctctgtgggaccaaatagtcctccaacaaacacgaagaccacatttttaaatccttttgatgctacacttcttgcagctgtcaaagctggtgtttttgtagcacaggcagctggaaatggaggtcctttccctaaaactttggtttcttatagcccgtggatagcatctgttgcagctgcaattgatgatcgtagatacaaaaaccatctgaacttgggaaatggaaaagctttagctggacttggattgtccccttctactcattcaaatcaaacctacaccatggttgctgcttatagatgtgctactagattccttagcgacaaagtttagtccctcggactgccaaaggccagaagttttaaacaagaaatttggtga

SEQ ID NO: 8337 - DNA, 475 bp, Gossypium hirsutum
  Clone ID: GOSHI-09MAY01-C9003_1
agacatggaagtggctgttgagcttgaagatgatctgttttttgcagactggagcaagcaaatctctttgctaatcatggatgatgaagacccagttccaacatgtccttcagtttccggccagacattttctgcagcaaattatctaataacacaatctccatatctccaagaacaaatctgcagaagagaaagcaaaggcactggagtttttatcccaaaggcatcacatcctagaaggaagcataggcaaggcagatatagttcattcaacaggaagtctaacaggcaccatgataacactacaaaaatggcttctcagccatcttatgataattctttttacccaaggaaaggctaaggattcacatcttcatcaagtgtatgacttaataaaaggaaaatcactactaaaccccttgtcaacagctgctcaaggcaagacaaggcaaggcaggtttaaggatcttataat

SEQ ID NO: 8338 - DNA, 365 bp, Gossypium hirsutum
  Clone ID: LIB3166-008-P1-K1-H3
cccaccgtccgtaaaaaccccactctaataagattttttagcttttgaggacagacatggaggtggctgtttgagcttgaagatgatctgttttttgcagactagagcaagcaaatctttttgctaatcatggatgatgaatactcagtttcaacatgttcttcagtttccttccagacattttctgcagcaaattatccaataacacaatctccatatttccaagaacaaatctgcatttttgaaagcataggctctgtagtttttatcccaaatgcatcacaattctatattgaagcattatgcaaggcatatatatttctattaatcagaacattctacatgctcaatgtttactcttctaa

SEQ ID NO: 8339 - DNA, 690 bp, Gossypium hirsutum
  Clone ID: GOSHI-09MAY01-C9033_2
gttgggttaagggatcctcctcggaaagaggttcgtcaagcaattgaagactgcaaaggagctgggattcgtgttatggtcattacaggagacaataagaacacagcggaagctatttgtcgcgaaattggtgtattcggatatcgtcgaccttgcgccggaagatttctcttccaggagcttaacggggaaggagtttatgagatcatcctgatcagagaaatcacctgagacagaatggaggtcggggattttctcgagctgagccaaggcacaagcaggaaatagtgaggttgctgaagcaggatggtgaagtggttgcaatgtctggggatggagtgggtgatgctcctgccttaaagttggctgatattggagtagcaatgggcatcaccgggacagaggttgcaaaggaggcctctgacatggtgctagcagatgataacttcagcactatagttgctgcagttggtgaaggcagatccatttacgacaatatgaaggcttttataaggtacatgatctcctccaacattggtgaggttgcttccatattcttaacagctgctttgggtattccagaaggcatgatcccagttcaacttctctgggttaatcttgttactgatggacctccagcaactgctcttggattcaatccccaagacacagatataatgaagaagccta

SEQ ID NO: 8340 - DNA, 1576 bp, Gossypium hirsutum
  Clone ID: GOSHI-09MAY01-C9033_1
gttaggttgctgaaggaggatggtgaagtggttgctatgaccggggatggagttaacgatgctcctgccttgaagttggctgatattggagtggcaatgggcattgcggggactgaggtatccactaccctttcctattatatccatgatgtccatatggttacttgctaattgtatattgtcagctctccttgtgaaatagcattatgggtgatgattcagagacccggttgaatgcaatgcagtatgcatggttgggctgctttttattcagaatgtatatatgttggaacagctatacaactataccactatttccagacattctatagatattgatctgagtcacctacttattctagacatttgataggatttcatctgtagttcttttaaaaatcttagtacttcattgcctattaccaggcgattatagtaaaaattcggcatcccaaaacctagtatgttagcagttagtttaagttattcatgaatgcataattttcttattatatactctatctctatcccttgcttgattcttttcaggttgcaaaggaagcatctgacatggtgttagcagatgataacttcagcactatagttgctgcagttggtgagggcagatccatttacaacaatatgaaggcttttataaggtacatgatatcctccaacattggtgaggttgcttctatatttttctctcccgcccgggggattccagaaggcatgatacctgttcagcttctgtgggttaatcttgttactgatggacctccagcaactgctctagggttcaatccccctgacaaagatataatgatgaagcctccaagacgaagtgacgactcactaatcactgcttggatcttgttccgctacctggtgattgggctctatgtggggatagccactgtcggggtcttcatcatatggtacacccaccatagcttcctgggcattgatctgagtggagatgggcatagtcttgttacctactcccgacttgctaactgggctaaatgcgattcttgggaaggtttttctgtgtcaccattcacagcaggttcccaagtgttcaaattcgattccgacccatgcgactactttcagtcagggaaaatcaaagcctcgactctttccctctctgtcttggtagccattgaaatgttcaactcccttaatgccctatctgaagatggaagcttgttaacgatgcctccttgggtgaacccatggctccttttagccatgtcagtctcatttggactgcacttcttgattctgtatgtgccattccttgctcgagtgtttgggattgttcccctcagcaccaatgaatggctgctcgtaattgccgttgctttcccggtaattctaattgatgaggttctcaaattcatcggcagacgcacaaccaggttgcgctaccctgctgtaccaaaatcttcgaagcagaaagccgagtgattattgttatacagcacttgtaataacattttagaggataaacttagaatcttgtagttgctttattttgaacttcagttatttttccacttaatttgatttc

SEQ ID NO: 8341 - DNA, 736 bp, Gossypium hirsutum
  Clone ID: GOSHI-09MAY01-C9393_1
cacctctgcaaggggaacagtcaagattttagcttcgattctcacaccacctctatgcccatccccactatctttgaaatttagagtttctgttctactacatggtctgccagggtgtgggaagaggactgttgttagatatgtttctaagcgactgggtctacatgtagttgaatatagctgccacgacctaacagcctcttctgagaagaagacctctgctgctttgactcaagctttcaacagttcgcaaagatactcaccaacaatacttcttctacgccattttgatgtttttcggaattttgcctcccatgaaggtttgccaagtgaccaatttggactttcctctgaatttgcgtcaggcatcagaaagtttactgagccagctgctagtgatgaagacggcaatgcggaagacatgtcaaacggtgaatttgctgtaaaggacagtggaaatgtgggtaggcaccaggtgctgttggttgcagctgctgacagttctgaaggtctgccaccagctatccaggcgttgtttcagccatgaagtaagcatgggtcccttgactgaagagcaaagggctgaaatgttgtcacagtcactgcaaggtgtttctgaacttctttctgatactcgcttagaggattttgtgaaggacatagtggggcagacttctgggttcatgcctcgtgatttgtgtgctttagttgctgatactggtgctaaactaatctc

SEQ ID NO: 8342 - DNA, 610 bp, Gossypium hirsutum
  Clone ID: GOSHI-09MAY01-C9383_2
gtttgccggcgtctttccagaacacaaatacgaaattgtgaggaaattgcaggagaggaaacatatatgtggaatgactggagatggtgttaatgacgctcctgctttaaagaaagctgatataggtattgctgttgctgatgctacagacgccgcacgaagcgcttcagacattgttcttacagaacctggattgagtgttattatcagtgcagtgttaactagtagagctattttccagacgatgaagaactatactatttatgcagcttccatcacactccgtatagtgttgggagttatgcttattgctctcatttggaagtgcgacttttcaccgtgcatggttttgatcattgccattctaaatgatggaactattatgaccatctcaaaggacagagtcaagccatctaccttgcctgatagctggaaactgaaagaaatttttgccactggtattgagcttggaggctacttggcattgatgaccgctgatttcttctggattatgcatgataaagacttcttttcggaaaaatttggtgtatgtctgtcatgaagatggatgaccaaatgatgggtgctttatatttacaaatgagcattg

SEQ ID NO: 8343 - DNA, 930 bp, Gossypium hirsutum
  Clone ID: GOSHI-09MAY01-C9383_1
cccacgcgtccgcccacgcgtccgaggagaggaaacatatatgtggaatgactggagatggtgttaatgacgctcctgctttaaagaaagctgatataggtattgctgttgctgatgctacagacgccgcacgaagcgcttcagacattgttcttacagaacctggattgagtgttattatcagtgccctcgcgtccgcccacgcgtccggttaactagcagagccattttccaaaggatgaagaactatactatctacgcagtttcgatcacgatccgtattgtgttcggatttttgtttatcgctctcatctggaagttcgatttttcgccgttcatggttttgatcattgccattcttaatgatggaaccattatgacaatctcaaaggatcgagtcaagccatctcccttgcctgatagctggaaactgaaagaaatttttgccactggaatcgtgctcggaggctacttggcattgatgactgtcatattcttctgggccatgcatgataccgacttcttctcggacaaatttggtgttcgatctctacgggaacgagagcatgagatgatgggcgctttatacttacaagtgagcattgtgagccaggctctgatcttcgtgactagatcgcgtagctggtcgtacgctgagcgtcccggactactattggtcactgccttcatcattgcacagcttgttgcaactttgattgctgtatatgcaaactggggatttgcaaggatcaaaggaattggttggggatgggcttggtggcatatggctctacagtatagttttctaccgtaccattggatataatgaaggtcgccatccggtacattctaagcggaaaagcttggcttaacctactcgaaaacaagactgcatttcccacaaagaaagattattggcaaagaaaaagg

SEQ ID NO: 8344 - DNA, 451 bp, Gossypium hirsutum
  Clone ID: GOSHI-09MAY01-C9353_1
cggacgcgtgggcggacgcgtgggcccggatttcctaccaaacccggagaaacaaaggatcaacgattcactgttccaattttttgcttaccccttttgatttctatcaaaaagggaatgacagatcccaacaacaaacctagaactgtaatctgcgtaggggacatccatggctacctcaccaaactcctcaatctttggtccaacctccgatcccaaatcgaccctgactccttcaacacctccaccgttatcttcctaggcgattactgtgaccgtggacccgacacgcgcaaagtgatggattttttaatcaccttgcccaagcgatatccaaatcagaagcatgtttttttatcgggaaaccatgactttgctttcggcgggtttgtgggggcgttggcaggtgagtttgaagcgaaggagacatggcaggagtatgctgataatg

SEQ ID NO: 8345 - DNA, 445 bp, Gossypium hirsutum
  Clone ID: GOSHI-09MAY01-C9343_2
ttttatttcttctttaaccaggctttaacctttgggccaaaacctctccacgcctgggtgatccgaggctgggatgcctccattcagagttgctatctcggagtgcatgactgccttcggtgcgaggatctccccctcctcgttccgtacgagcaaacctgtagtcgatctggacgatagtcggttgaaggctgcctcaaaataaaactgtgatcctttccccttctacctatttgttgagtattttcagctggttgaagaattaaccaaagaccacaacaaaatagccggatctactcatctgttcctttatcaaagacctagatggacattgttgaaaaatatgaagtgtgtactattcttctggcgaaatctaggacattgggcatccaccacaaccctcttgagcctaaggttgacaagagatggaatgagttccaagata

SEQ ID NO: 8346 - DNA, 728 bp, Gossypium hirsutum
  Clone ID: GOSHI-09MAY01-C9343_1
tttcacttcacaacttttcatttcttctttcacgcagtctggagcttttggccaaaaactctccactgcttggtgaaccgaatctgggattcctccaatcaggtaaaagctttctcttctcttaagggcttcatttgctataacatgagcgtagacattctttgccttaggaataaaatgaaagtcgatctcttggaatctgtcttttttgctttgtatgtctctgataattgctccaatgaccgatttgtctgtatcaatactttggcatttcttaatgatagttttcgaatctcccactacttctattttgtttaaccccatagaaatccctaattttattgcctgtaatattgcatatacttctgccgtgaacggagttgctatctcggagtgcatgactgccttcggtgcgaggatctccccctcctcgttccgtacgagcaaacctgtagtcgatctggacgatagtcggttgaaggctgcgtcaaaataaactgtgatccttccccttctacgtatttgttgagtattttcagattaaccaaagaccacaacaaaatagccggatctactcatctgttcctttatcaaagacctagatggacattgttgaaaaatatgagtgttgtactattcttcttggcgaaatctaggacattgggcatccaccacaaccctcttgagcctaaggttgacaagagatggaatgaagttccaagatattc

SEQ ID NO: 8347 - DNA, 334 bp, Gossypium hirsutum
  Clone ID: GOSHI-09MAY01-C9243_1
cccacgcgtccgccaaatctctcgttcccttaactcttcccaattccacggtcatctcgagagaggtcattttcattgcttttggttggagttagaggaagcagctatgttggacttcagatggagatatggtgctgtctgtaatgatttttggactatgtatttgtgagatttgaacctcgttcctaatggcctcaaaggtttccaagacaagcaaatccgagctggctactctcgaatcggtagggactacatcgaaacaagttgtgggagaggcttccgaaaagaaaaggtcactgattttagatcaaaatggttctgttgaatctttaac

SEQ ID NO: 8348 - DNA, 880 bp, Gossypium hirsutum
  Clone ID: GOSHI-09MAY01-C4983_1
gcgaagagagcagcccctcttccacacaaccctaaagagaccaaaccctagccgccatgtagccgccggaaacggcggtcgacggagggtggtcttctcgttctttaaccccgtttagacccctattcgaggatttgacactttccaccacgaagaatcaaaaagaaagttcccacctttgttgggttcgattttaatggagaagaactccgatgatacaccaacgattcaaggctcgggtaagtgactttcctttatcatttccctcttattttctttagtaaataatccctataatacagaaacaagaaaaaacttgccagaaagaattgcgaaatattaaatcgaaaaaagaatcactttttttgcttggagatggttttgattaatatgctgtaaaaaaaaagatccctattacatcgtcgattctggcttttatagcctttacaacactgtgtatttgctattaaattttatgcattttatctttgttgctctgcttttgttcttgttgtccttctttgtcgtgtttgcaggtctacggagggtcaatgaaggaaaaccttgctatttcggtgcaaggaagcaaccatcgggcagatggtacgctgacggaggcacgtggggtgcggggcgaccgaggctgcggcgctggagtggatagaaaccctagggtttctgaaaatttcaaatattttggggcaatcgggccttgtaatgttgggcttgtgtctgggttagatttgtaaatggactgtctaattttgttttgggtttaattttatttttggttttttttttgttctttgtttatgtgggtcgggcaaatttggtccattacaaatacttagtgaaaaatcaaaccacattgcctttgtat

SEQ ID NO: 8349 - DNA, 441 bp, Gossypium hirsutum
  Clone ID: LIB3189-014-P1-K1-B10
cccacgcgtccggtaatacaatatttttacgtttgaggcttcttatagccgaatataaaaaagggaatctatatttgctactgggcggctctgctctttcctgttctcccttctttgtcatgtttgcaggtctatggagggtcaacgaaggaaaaccttgctatttcagtgcaaggaaacagccatcgggcggagggtacactgacggaggcacgtggggtgcggggcgaccgaggctacggtgctagagtggatagaaaccctagggttttttgaaaattttttatattttgggccaatcgggccttgtaatgttgggctcgagattttgagttgtgttttgggtcttaatttgggctgatggtataggttaggtattgagtcttgtaattgaattgtaaatattttaggcccgggcaaaatttgagtcctacataagtc

SEQ ID NO: 8350 - DNA, 319 bp, Gossypium hirsutum
  unsure (1)..(319): unsure at all n locations
  Clone ID: LIB3493-007-P1-M1-F10
gaaagagagcagccccttcttccacatttctgcgaaccctaaagagaccaaaccctagccgccatgtagccaccgcaaacggcggtcgacggagggtggtcttctcgttctttaaccccgtttagacccctattcgaggatttgacactttccaccacgaagaatcaaaaagaaagttcccacctttgttgggttcgattttaatggagaagaactccgatgatacaccaacgattcaaggctcgggtctacggagggtcaatgaaggaaaaccttgctatntcggtgcaaggaagcaaccatcgggcagatggtacgc

SEQ ID NO: 8351 - DNA, 920 bp, Gossypium hirsutum
  Clone ID: GOSHI-09MAY01-C4943_4
ggaaacccgcggcgacccacgcgtccgcccacgcgtcctgtgaagggatttcttttgccaccggtgcggcttttacatccgggggtaatatggaggttttgaagagaaccaattgcgatcacgtcactttggcatttttcggggatgggacttgtaacaatggacagttctttgagtgtttgaatatggcagcgttgtggaaattgcccatcgtgtttgttgttgagaacaatttgtgggctattgggatgtctcatttgagggctacttctgatcctcagatttataagaaaggaccggcgttcgggatgccgggtgttcatgtgaatgggatggatgtattgaaagtgagggaagtggctaaggaagcaattggcagagctaggagaggagaaggtccaacattggtggaatgtgagacatataggtttagcccacgcgcccgggctgaccctgatgagcttcgtgaccctgctgagaaagctcactatgctgccagagatcccatcacagcactgaaaaaatacctcattgagaacagtctggccagtgaagcagacttgaaggctatagataaaaagattgatgaggtggtagaggaagccgtggagtttgcagacgaaagccctgttcctcctcgaagccagctgctcgaaaatgtatttgcagatccaaaaggttttggaatcggacctgatggccaatatagatgtgaggacccaaagttcactgaaggcactgctcaggtctaagctttcaaaataggaggttgatcaaaactatttttgtcaacttatttattatttcatggtcacatatgtttagtttgtggtagcagtcacgcgttcacttgattttagtgtttattgcgtaccaagtattgtgttccttaggttgcctatccatatgaaaatttgggg

SEQ ID NO: 8352 - DNA, 592 bp, Gossypium hirsutum
  Clone ID: GOSHI-09MAY01-C4943_3
atcgttcacgcgtccggcaattggtcgggctaggagaggagagggtccaacgttggtcgaatgcgagacatacaggcttagaggacactcattggctgaccccgacgagcttcgtgaccctgctgagaaagctcactatgctgcaagagatcccatcacagccctgaagaagtacctcattgagaacagtctggccagtgaagcagatttaaaggctattgataagaagatagatgaagtggtagaggatgctgctgagtttgcggatgaaagccccgttccttctcggagtcagctgctcgaaaatgtctttgccgatccaaaaggttttggaatcggaccagatggtcgatatagatgtgaggatcccaaattcactgaaggcactgctcatgtcttagctttcaaaggacaagtaaccaaaccatttatgcacaccttttggcctttcttgatctcatatatttagttcatgatagcaatctccggtttcttttgtttcattggttcttgtgtaacaagtatacgttccttatgttatctgtctatttaaaattctggtttctttatttaatctccatttgttacttgg

SEQ ID NO: 8353 - DNA, 739 bp, Gossypium hirsutum
  Clone ID: GOSHI-09MAY01-C4943_2
ctcgtttcttccgccttctccccactttcttggctctttgattatatcgctctccctcccccttctttctcttcctctctcactctctgtcggactcagaactgaagtaacaaaatgaatagcgcttcttgtgcagccaagatcagtacgcagcctttctctctcaatcccacttcccctacatctcacgacaaccccctcgttttccccaaacccacctcctttttcctcggatctacccgcaaactccgcctcagttcttcttccaaattgaatctccaccgtcgatctgggaccgtcgttgccgtctccgatgttgttaagcaaaagaaatccaagtccacccccagtctcctaattacgaaagaggaaggattggaattatacgaagatatgatactgggaagagcatttgaagatatgtgtgctcagatgtattacaggggcaaaatgtttggtttcgttcatctttacaacggccaagaagctgtttcaactggttttattaagctcttaaagcagcaagattctgtcgtaagcacataccgtgatcacgtgcacgccttgagcaaaggagtccccgcacgcgccgtcatgagtgagctcttcggtaagaccaccggctgctgccgcggccaaggtgggtcaatgcatatgttctctagggaacacaatctgctaggggggtttgcttttattggtgaaggaattcccgttgccacgggggcggcttttacct

SEQ ID NO: 8354 - DNA, 1269 bp, Gossypium hirsutum
  Clone ID: GOSHI-09MAY01-C4943_1
tctctcctaaataccaacatccttccaacgctctctgcgaccattcccccgccctttccccttgttttctccgcccccattgtttctttcctctcttttatattctcctccccactttctcttccttcttcacctcccattttctctccttttccttcttccctccccattaggaagaaaatggctacagctttctcaccttccaagttcgctgcccaaccattccctctcaacaccacttctcaaaacaaccctcttacaatccccactatcgcctcacccttcctcggatccacccgcaaactcatccgcctctgttcttcttccaatttgaatctccgccgtcgatctggtaccgtcgtcgccgtctccgatgtcgtcaaggaaaacaaatccaagtctacccccaatctgttaattacaaaagaggaagggttggaattatacgaagatatggtattaggaagagcgtttgaagatatgtgtgctcagatgtattacagaggcaaaatgtttggtttcgttcatctttacaatggccaagaagctgtttcaactggtttcattaagctcttaaagcagcaagattccgtcgtcagtacttaccgtgatcacgtgcacgccttaagcaaaggcgtctctgcacgtgctgtcatgagtgagctcttcggtaagaccaccggctgctgccgtggccaaggtggatcgatgcatatgttctcgagggagcacaatgtgctcggggggtttgcttttattggtgaagggatccctgttgccaccggtgcggcttttacctccaagtataagagggaggttttgaaagaagcggattgcgatcacgtcactttggcatttttcggggatgggacttgtaacaatggacagttctttgagtgtttgaatatggcagcgttgtggaaattgcccatcgtgtttgttgttgagaacaatttgtgggctattgggatgtctcatttgagggctacttctgatcctcaactttataataaaggaccggcttttgggatgccccgtattcatgtggatgggatgaatgtattgaaagtgagggaagtggctaaggaagccattggcagagctaggatgttaatgaattggttagttgaagttgttatacgacccgttgatccccagttagtctgtttcccagttgttataggagccgttactcgtaggtcctataaatattatagtcccgatgtccaggccaagataagtagtttaaatccagaaataatttctccc

SEQ ID NO: 8355 - DNA, 357 bp, Gossypium hirsutum
  Clone ID: LIB3166-057-P1-K1-H10
aaaacaaccctcttacaatccttactttcgcctcacccttcctcggttccacgcgcgaactcatccgcctcagttcttcttccaatttgaatctccgccgtcgatctgggaccgccgtcaagaaagcaaatccaaatctacccccaatctgttaattacaaaaaaggaagggttggaattatacgaagatatggtattaggaagagcgtttgaagataagtgtgctaagatgtattacgataggaaaatgcttggtttcgttcatctttacaatggccaagaagctgtttcaactggtttcattaggctcttaaagcagcaagattccatcgtctgtacttaccgtgatcacgtgca

SEQ ID NO: 8356 - DNA, 1032 bp, Gossypium hirsutum
  Clone ID: GOSHI-09MAY01-C4973_1
acgctccaccaccgtcgtatcatttcctccgctaccctctcctaaaaactatcagtctcttatcaatggcttgtacaaggaaagatgttgataggattaaaggtccatggagtccacaagaagatgaggctttaaagcgtctggttcaaacctacggttccaggaactggtctttggtaagtaaatcgataccgggtcgatccggaaagtcttgtaggctacggtggtgcaaccagctttcccctgaggttgaacaccgacccttcactcccgaggaagacgataccatagtccgagcccatactcgattcggtaacaaatgggctaccatcgctcgactccttaatggtcgaaccgataacgcgattaagaaccactggaactctacgctcaagcgaaaatgctcttcgatgaccgatgatttgaacgacgattcacctcagccgcttaaaaggtcagccagtctcaatactggtaatggcggatcgggtctctacttgaacccgagtagtccttcaggatccgatttgagtgattcgagtttgcccgttgcctcaccgataacaataacggggtctttggtgccttcaactcaaacggcatcctcggctactgatcctcctactttactcaccctctcgttacccggatcggatactagtgaaaccactgacttaggacccgtatccccacccggatccaactctttcccaagttctaccttggtggcagaaccagcaactgttccggctctgaagttgcagatggagaagcagtttttgaacgctgagttattggcagtgatgcaagagatgataagaaaagaagtacggaagtacatgagtgggagtgaatccaatgggctttgttttcgaacggaggccattagaaacgccgtcgttaagcgtatcgggattagtaagatcgagtgaacaacaaaaatcagcaggaaaagaagtgtttagcatccgtttctgagcattttagtttttaccgctcgtttaggtatgtttagagataataattttgtta

SEQ ID NO: 8357 - DNA, 1537 bp, Gossypium hirsutum
  Clone ID: GOSHI-09MAY01-C4963_1
cgagttttgaggtcttaagttcttaggatgagagaagcatatgaatgtgtgaaggatcggtccaaagttaccgggcatttatgcatcataggacttcatgcattccaaatgttttcaagtaccactacttgctgtctaaaacattgttgctcgaacaggttcgaggaacatggagatggatgcttggagtttcagctgtgccagctgtcattcagtttttccttatgctatgtttgcccgagtctccacgatggcttttcatgaagaatgagatagataaagccatagctgtgctttctagaatggatgacattgctcggttagaagatgaagtggatcacctttctgctgcactagaagaagaacagcagagaaagaatactgtcagatatttggatgtttttagaacaaaagaaattagacttgcttttctggctggggcaggactgcaggcttttcagcagttcactggcatcaatacagttatgtactatagtccaacaatcgtccagatggctggcttcaattcgaatcagctagcacttctgctgtctctcattgtcgctgccatgaatgcaggaggaactgttgtcggcatttaccttatcgatcatttcggaaggaaaaagctggctctttcaagcttatccggtgtcatcgtgtcccttgtcatccttgctggggctttctttgctgaaacacctggttcttctaatggaatttatggatggctggcagtcattggattagccctctacattgcattcttcgcacctgggatggggcctgttccatggactgtgaactcagagatataccctgagcaataccgagggatctgtgggggcatgtcggctactgtgaattggatttcaaatttgattgtggcccagacttttcttacaattgctgaagcagtgggaactggtgttactttcttgattctcgctggcatagctttgcttgcagtggtttttgtgattgtgtatgtgccggagaccaagggcttgacattcgttgaagtggaacgaatttggaaagaaagggcttggggaagcagttataacactgaaagccttctcgagcatggaaacgagtccgcctagtcgctatcgaaatcaaccccgcatgcgtttctacaaagtcggtatcctgtcccggaggcagttgaaggtgtgagcttcatctttctacacataaatgtcgaaaggtgaggcatcttaaaacatttagattgtttactgcattttggtcttgcatatttcaaagttgagaaggaacttggtggtgatgatagataaccttgtatatataagttgtattatcgccaacggcacgggacatcttttaagtaggcccggagttgaggcatgatccctgtatatgttctttagctcatgttttcaaagccttgttggaagcaaaaacggcagcattggaatcatgatggattgtttttattgtagtggacaccccgaaacagcatctaattggccttttaaaaaagaagaaaaacacagcccttttagaatgcatg

SEQ ID NO: 8358 - DNA, 907 bp, Gossypium hirsutum
  Clone ID: GOSHI-09MAY01-C4913_1
ggaaacccgcggcgaccgcacgcgtccggtagtgatgtgatggtgaatggtcatatataaaacattaatggagtcgaaaaggaaacccaggtgggaagtaacccggaaaatccttttccttcctataaagtgtcggttgattcatgcaattggcgccttcatcatctcatttctcttatctccattctttcaagtctaaaagaagaaacaacagaacacttgttttctcttctgaaatggatccgacaccgacgtccgataaccgacctgaaatctgttttttcgatttggagaccaccgtccctcagcggcgcggccaaggctactccgttctcgaatttggtgccattttagtttgccccaagaggctccttgagctccacagctactcctctctggtccgacccgacgacctctctcttatttcccctgcctctgtgcgctgcaacggtatcactctcgaagccgtcatttcggcaccttccttttctgaaatcgccgacgaagttcacgaccttctccatggaagggtttgggcgggtcataatatagtgaggtttgattgcgtgagaataagggaggcgttcgagaagattggtagggcggcgccggagcctaagggaattttcgattcattggcgttgttgactcaaagattcggaaggagagccggtaatatgaagatggcaactcttgccaattatttcgggattggagtgcagtcacacaggagcttggatgatgttcgcatgaacctcgaagttgtcaagtattgtgcaaccgttttgttcctggaatcaagtctcccggatatactcacatggaacccgagggttccccgatatcacctagtagtgatgatgggaagtattccgagcagctagtccaaacatgcacaccctttgtt

SEQ ID NO: 8359 - DNA, 1688 bp, Gossypium hirsutum
  Clone ID: GOSHI-09MAY01-C4933_1
cccagcgtccgccccgcgtccgatatctcccacctccaatcaattctatcactcctctttttggccctcttcgaattatccctcaccaaaaaatattcaaacgacgaccaccgtccaccgccgccgaagaggaaagagccgtttaaataaaatatggacacaattctccataccgaacctctatctctcactcgcttacgcgccacttcgaattccaccgcttccattcaccatatgccttgccagctcatcttccgtcctttccaccgcctttcctttcctttatccaccgtcaacgccggctccagttctcgcaggtcatccacttttgttgtcgccgcttgcggcactctcaccgccaattccgtctcgccaagaggtggagtatatacagttggggatttcatgacgagaaaagaggatttgcatgttgtaaagccaacaacaactgttgatgaagcactggaagctcttgttgaacacagaatcaccggttttcctgttatcgatgatgattggaaattggttggacttgtttctgattatgacttgctagcattggactccatatctgggcgacggactgagaatgacctgtttcctgaagttgatagcacttggaaaactttcaacgaggtacagaagttactcaacaagacgaatggccaggtcgttggtgatttaatgacaccagctccattagttgtacgtgaaacaactaatctcgaggatgctgctagattattgctcgagaccaaataccgctggcttccggttgttgatgtagagggcaagctggtgggtatcatcacaagaggaaatgtcgttagagccgcccttcgaataaagcgtgaaattgaaggaaaagcttaaacactcgagacttgagaggctttatcattgaaggatattcagggcgttggatagggcagtgcagcaatgaagttttttcctttctccattaaacaaaaaaagttcggagaaaggtgtgattacgtgctttttatatggtcagtcttgccctgcttttgtataatattacatatatcatttacattattaacactgttatagtcacaactatttaccaggattgacacattgggagggcagaagtttagcacggattcttgtcaatgttttcaatctatgttgctttagactttctccttaaatacgttcagtgtttctattcgacatattcaaaaacaagtagaggtatgatttttcaaggacaacattgcacatatatatttgtaatatttgagttgcggcagccgaagttgtccatttagtatgtcaagttgattttgggttaacgtggatcatgtcaaattgggcttaaaagctattttgagtttgggttattttgggttctggtcattcaagtttaagttgttttaagtttggattgcttggaattcaaattgttttaggttttgggaagttccaagtttcttttcccttttggctaattttggaattttaaaccttaaggttcaagtttgggtcgttcgttgattttgggttgacgtttatgtcacttcaggttttaaagttttgtaagtcattttgattttggtatttttaagtttggaaacgatcaattttaatctgatactttgatccatacatctaaaggaatgaatctatattttcataaaaaaacaataaaataaaaccagaac

SEQ ID NO: 8360 - DNA, 615 bp, Gossypium hirsutum
  Clone ID: LIB3831-001-Q1-N6-F8
gtgtaaatgttgtccttgaaaaatcactctacttgtttttgaatatgtcgaataaaaacactgaacgtatttaagaagaaagtctaaagcgacatagattgaaaacattgacaagaatttgtgctaaacttctgccctcccaatgtgtcaatcctttctccgaacttttcttgataaatggagaaaggaaaaaacttcattgctgcactgccctatccaacgccctgaatatccttcaatgataaagcctctcaagtctcgagtgtttaagcttttccttcaatttcacgctttattcgaagggcggctctaacgacatttcctcttgtgatgatacccaccagcttgccctctacatcaacaaccggaagcctgcggtattttgtctcgagcaataatctagcagcatcctcgagattagttgtttcacgtacaactaatggagctggtgtcattaaatcaccaacgacctggccattcgtcttgttgagtaacttctgtacctcgttgaaagtctgcaaaattgaggatttccaagtgctatcaacttcaggaaacaggtcattctcagtccgtcgcccagatatggagtccaatgctagcaagtcataatca

SEQ ID NO: 8361 - DNA, 217 bp, Gossypium hirsutum
  Clone ID: LIB3165-046-Q1-K1-H3
cccatgcatccgttcactcgtacgaaaaaataatcattcttcgtccaccgttcactgctgagggagaggtgagagccctttaaataaaaaaatggacacaattcgccataccgaaccttgatctctcactcgcttacgcgccacttctaattccagcgcgtttcattcaccatatgccttgccagcttattttccgtccaatacaccgattgtcctt

SEQ ID NO: 8362 - DNA, 1711 bp, Gossypium hirsutum
  Clone ID: GOSHI-09MAY01-C4873_1
cccagcgtccgcccggccgccctttttttatttatcttttttctttaaaaatcgagctctcttttctcagtttccctttctctttttgacaaagagagagagagagagagagaagctaggctatggtggaggagcaacaactgcagatgaatgatgatgatgatgtggagtctatattggtgatgatgatgatgatgatgaagatggaatggctgctgttctgaaaatggctgaacaaagcaaaactaccaacaccaacaatgccaacactacaaacaccccaactcatctgcaacaccaacaagtaaaaccagcagcaatgtttcacgatttcctgggaatgaaaccttctaattcctctgtcgttttagcccctaaagccactgatgcaaggttttcagaggcttcaccgtctccttcagcctccgtcgccgcttcttctggtggtggtggtgctggccgtggacccatctcttccacctccgatctgggttctgaaaggcaggttggtaatcatcttgaggggattccatactatggtccaaggagtgaaatatccgggccagatataaacaacagtttggctggaagtaagagaagtttttcagattcggcctttatgggtcatgaatctcttgagagcttgcatttgatgaagatgcttcgcaatggggctggaggagagcggcctagaaggtccaacgaggacgaagtattccttggtatgaagtcaatgaggccttcttctacatctcttatattgcagcctcccgctggtagcagactcgaaggtaatgcttccaaatgggaacggtctgtcccctcagcagtacagtatgcttctcgtggtggtcactttgtgccttttgtgcatcaagtatcttcaaacaggttcaaggatacaactgttggtccttctgttatctctcaagcagctgccgatgaaggatctagaactggaattaaaggccctggaattttgagttctattaatgctagcggtgttcccactgaaaagggttcatctgcgatagtgccaagtgggggcaggcctaagactggggctcataattcacatcccgagcctttagttcctccgagtcgacagggattaacatctgccagccgacaaatgactatattttatggtggtcaggctcacgtctttgatgatgtgcacccgaacaaggcagatgtaataatggcattggctggatcaaacggaggatcttggtcgacaacctactctcctaaatctgctgtgagaacaggtgaaaattatgcaccaggcggggaacctgaagcagtaggaagcattgcgttctcacgtgaacttcggggaaagatggctgtttctggtaatgcaagtcaagcaactggttccggtgaacgaatcccaatacaaacaggggttcctcaaggcacaattgttatggctagagatggaagaaacctggaagctggtactgaagataaaagagaggtataaagtttaagcaaagttttcggaatagcttcaaatccagatattacagaaattgcagatttccaacccgctatcatctctacttattaggaatagtcccatccatttcatgtctctgtcattaatgcttaaaactttttcgaatttttaacttaatttctgggtagagcagcatataagaacagcttttgagtcgaatagcaatgaacccccctgcgtttgcgt

SEQ ID NO: 8363 - DNA, 495 bp, Gossypium hirsutum
  Clone ID: GOSHI-09MAY01-C4593_1
cttcttgagagtgtaagtcaaattttcttagatgaggcaattagtacaagactgcatgtctctgagcatggtgttagcactgtacaggtccataggccatatccattcaaattggcaacaatggtacgatttgattgtgatatggtaaagataaaaactgaatttgcgtagctttatgtgcctcgtctttgatatgaaagtattttgcaggtgctttggctgtatgttaattgagggctatggcatgacagagacttcttgtatcataaccttgatggatgtaggggacgtcttagctggtcatgttgggtctccacatgctgcctgtgaagtgaaacttgttgatgttcctgaaatgaattacacctctgaggacgagccatatcctcgtggggaaatttgcgtgagaggtcctattgtttttcacggctactacaaggatgaagtcaaacgagagaagtatttgatgatgatggctggtttcatacgggagac

SEQ ID NO: 8364 - DNA, 971 bp, Gossypium hirsutum
  Clone ID: GOSHI-09MAY01-C4583_1
cttttgctcgcgtgcgtgtcttctactctcgctctctcttcgcgttcccttttccatccagctaagtattctcagttttcttcttccttcctagcttgcttgcttgtctccgtttttttattaaaaaattcttcgtatagatctggtttagatctagggtttcttttggttctttgttactgctcggctgtttatgtgcatgtccgatctgcagttcgtaaaaccgtttcaatgattttagattttctatgaactctatcctcatgcgtcgaatccgtattcttcactcgttctcggtcgtcttcctttactggttctacgttttctcatgaattagcatctctttgttcatcgatcttcttatcttgatctaacccgactattaaaaacttcaaatctctaattgccattcaatttgttaattccaatttaaatactcttcccggatataaaaaaaacttttctcctatggctgctgtgcaaaggccagcgagttcttctgattccgacgagaggaaaaggaagagaatgctgtcgaaccgtgaatccgcgaggcggtcgcgtattatgaagcagaaccagctcgaggatttggttaatgaagtgagcgcattgcagaaagataacagccagctctccgaaaagatcaacgtcacaactcagcgctacgccgtgatggaatgtgccaacaacgtgttgagagctcatgcaatggaatcgaccgagcgattgctggcccagaactcggtgtctatcaacagatgattaagcccgaaaacttcgtgtttggacaatcacgggccggcaacaactgggctaaaggtcattataccgaacgagctgagatgaatgattctgctcttgatggtggaccgataaagaggctgaaaattgagattgcttgcaaggctttcagggatgccattcacttggaggaggtacagggcttaggcatgggaacttttctaata

SEQ ID NO: 8365 - DNA, 1077 bp, Gossypium hirsutum
  Clone ID: GOSHI-09MAY01-C4553_2
atactaattctttttaatcgaaataacatttagaagaatcgcacatttgctcccaagactacatgcattcaaccttatttaatgaactaatcctatcaaagatgtttgatgatattttaaaataaaaattgataattaggaggatatcacccatgtgatttggttttttgcaagtctttaatatggatatgcgttaatacaattatgttccccccttgtctaaagttttcatatatttgcatgaaaaattggacatacccatatatgttgtggatcaaagactcagtccattaagttcttgagatgcagtattttggatgacttgctgcaaacattgaatgacatgggagaagggagggcgttcagaagcctcacgagcccaacactgttcaatcaaggaagctacaactcggtttacatggcttgggatctcaagcctttcacctttgaaacctacagccgccacaacctgtggtgggtttaaatgcttccatggttgctggagtgtcataagttcccacagaaccactccaaagctataaacatcggatttctcatttgaattctcattgcatagaacttcaggtgccatccactccggtgttccggcagctgttttcgatagcagatgtggatatcaaaagcggagtatggcgaatctgggcctgccattgttcataggaagtgcttctagatatgagcttatgttaataaagaatgttcccttgtgcattttatggtttggcttggttttcgtttcgttttttttttttttttttttttaaaaccaagcaacattcctatcattataggataaaataattatatgtaaacactacaaagcatgctagcatataacaatacttataaaccacatctcacacattcatgatggacgaacccacgagaacaaacaaaacaaaatgaaaaccacacaaggtaacagcaaaagaacacaagcacatatctagaagcacttcctatgaacaatggcaggcccagattcgtcatactccgcttttgatatccacatctgctggaatgtactaagagaagctaaaatagcccacgcgtccg

SEQ ID NO: 8366 - DNA, 1394 bp, Gossypium hirsutum
  Clone ID: GOSHI-09MAY01-C4553_1
gcgcatttcttctgaatttcccccgcctccgcttcacttcatttcccacgcacgctcaggtcaatctgaagtatggcagacgaagacattcagcctcttgttgttgataatggtactggaatggttaaggctgggtttgctggagatgatgctcctagggctgtcttccctagtattgttggacggcctagacacacaggtgtcatggtggggatgggacagaaagatgcctatgtgggggatgaggctcagtctaaaagaggtattctcacattgaaataccctattgaacatggtattgttagcaactgggatgacatggaaaagatctggcatcacactttctacaatgaacttcgtgttgctcctgaagaacaccctgtgcttcttactgaagcacctctcaatcctaaggccaacagggagaaaatgacgcagataatgtttgaaacgtttaatgttcctgccatgtatgttgcaattcaggcagttctatccctttatgctagtgggcgtactacaggtattgtgctggattctggggatggagtcagtcacactgttccaatctatgaaggttatgcacttccccatgccatcctcaggcttgaccttgctggacgagatttaacagatgctttgatgaagatcctgacagagaggggttactcattcaccacaactgctgaacgagaaattgtacgcgacatcaaggagaaacttgcttatgtggcactcgacttcgagcaggagcttgaaactgcaaaaagcagctcatcaattgagaaaagttatgagctacctgatggccaggtaataaccattggagcagagcgtttccgttgtcctgaggtcttatttcaaccatcgcttattggaatggaagctcctggaattcacgagaccacttataactccatcatgaaatgtgatgttgatattagaaaggacttgtacggtaacatagtgcttagtggtggatccaccatgtttcctggtattgctgatagaatgagcaaggaaatcacagctcttgcaccaagtagcatgaagattaaggtggtagcacccccagagagaaaatacagtgtctggattggtgggtctattttagcttctcttagtacattccagcagatgtggatatcaaaagcggagtatgacgaatctgggcctgccattgttcataggaagtgcttctagatatgtgcttgtgttcttttgctgttaccttgtgtggttttcattttgttttgtttgtttttttattttcgtccatcatgaatgtatgagatatggtttataagtattgttatatgctagcatgctttgtagtgtttacatataattattttattctataatgataggaatgttgcttggttttaacaatc

SEQ ID NO: 8367 - DNA, 459 bp, Gossypium hirsutum
  Clone ID: LIB3828-027-Q6-K6-E5
tgttcataggaagtgcttctagaaatgtgcttgtgttcttttgctatccaccatgttgtcctgggtatttgctcgatacgaatcgagcaagggaaatcacagctcttgcaccaagtagcatgaagattaaggtggtagcacccccagagagaaaatacagtgtctggattggtgggtctattttagcttctcttagtacattccagcagatgtggatatcaaaagcggagtatgacgaatctgggcctgccattgttcataggaagtgcttctagatatgtgcttgtgttcttttgctgttaccttgtgtggttttcattttgttttgtttgtttttttattttcgtccatcatgaatgtatgagatatggtttataagtattgttatatgctagcatgctttgtagtgtttacatataattattttattctataatgataggaatgttgcttggtttt

SEQ ID NO: 8368 - DNA, 890 bp, Gossypium hirsutum
  Clone ID: GOSHI-09MAY01-C4543_7
gtgggtttagtaacaaataaagctctgaagcccatcaacaataaaatttctggttttatgcttttgtatcttgccagaggaaattaatggtggatttagctgaccagcagcacagttgatgtttttatagtttctaatacaagcaatcttcttctgaagatatatctcatatgactatcgttgtttcttatacatctcttgaataaagaaagggctactttttgttctgcaagaatggagaggtacaagttactcagggaagttggtgacgggacatttggttgtgtgtggagagctattaataagctgtctggtgaagttgttgcaattaagaaaatgaagaagaaatattgctcgtgggaagagtgtgtgaatctgagagaagttaagtctctgacgagaatgaatcatcccaatattgtgaagcttaaggaagtcatcagggaaaataatgttctgtactttgtgtttgaatatatggaatgcaatctttaccagcttatgaaagacagagaaaagcatttttcagaagttgaaatcagaaattggtgcttccaagtctttcaaggtcttgcattcatgcaccagtgtggatattttcatcgtgacctaaacccagagaatttgttggtttctagagacataatcaaaattgctgattttggtcttgcacgtgaaatcagttcacatcctccatacacagaatatgtctcaacacgctggtaagtttgatacttctgagaggttattttggtttccttttttttctggtctttttctattactactatctaaactttgacttgtttaggtatcgtgcgcctgaaatacttcttcaatcatacctgtatacttcaaaagttgatatgtgggcgatgggtgctataatg

SEQ ID NO: 8369 - DNA, 687 bp, Gossypium hirsutum
  Clone ID: GOSHI-09MAY01-C4543_6
cccacgcgtccgcccacgcgtccgcccacgcgtccggagagaagttaagtcactgcagagaatgaatcatccaaatatcgtgaagcttaaggaagtcatcagggaacatgacattttatactttgtttttgaatacatggaatgcaacctttaccaacttatgaaagacagggaaaaacttttttctgaagttgaaatcaggaattggtgtttccaagtcttccaaggtcttgcatacatgcaccagcgtggatattttcatcgcgacctaaagcctgagaatttgttggttactaaagatataatcaaaattgctgattttggtcttgcacgtgaaataaattcaaatccaccatacacggagtatgtctcaacacgctggtatcgggcccctgaagtacttcttcaatcatacctgtatacttcaatagttgatatgtgggcaatgggtgcaatcatggctgagttattctccttacgtcctctttttcctggaactagtggagcagatgaaatctaccaaatttgtggtgtgattagtgcctcaacttaagagataagggccgagaggcttaatattgcgagggctctaaactatacaaatcccacacagtcgcgttggtgcgcatgtgtgtgtatagacactatgagcgcgcagctgtgcactcactcataacacatctctgt

SEQ ID NO: 8370 - DNA, 865 bp, Gossypium hirsutum
  Clone ID: GOSHI-09MAY01-C4543_3
ccccgcgtccggttcgtgggatccttgcaaaggccaactgctgccgaggcccttcaacatccattctttcagggttgtttttatgttcctccatctcttcgtcccagaatagctgtttctagaactcctccatctgctggggttagaggaacattggaacagcaatctgttaggaggtattctggggctcagcccaatgggaaattcactggcagtttttcttctctgaaaacaaatgcttccttcagcacaggtgcgcaacgcaagcctgagttgcttaatcaggatctgagaaagaatgataaacccttgaagaactatagcaaacaaacaaggtattggccacctggaagaaggacaacaacaatatcaatgaacaaggatagaaatggacgtggagctggggcttcagaggtggtggagaagttgggaaatgtgacaattggaagtcggaggcagtatggtggacaaataggggcaccacctatgaaggctggggtgcagtggactgcggaatctaatgacatgtttctgaggccaacccaacagataccgtctggcagaacttttaccagaaaagtagcgggatgagatggctccgcgtcatgcctttatatgcttcatactgatactgctaataataaataacaattctactactactactaataataatgcatgtcattcaatacatggatacaaagaatgagtgctttggtttgttttcttttgttctgttggagtggttgtgcgtagcaataacccatacaataaaacatggtttctgttacaaccaagtgattggatttgcttcttcctattgacgttgcttgataatgaaatgtgagctgtttgggttttcttc

SEQ ID NO: 8371 - DNA, 799 bp, Gossypium hirsutum
  Clone ID: GOSHI-09MAY01-C4543_2
tctaaactacggatcccccgtctgcggaattctcacgagttacatcttttgttctgggatccttgcaaaaggccaactgctgccgaggcccttcaacatcctttcgttcgtggttgcctttatgttcctccctctcttcgtcccagagcagctgtttctagaactcctccacctgttggggtgagacaaaaattggagcagcaatcagctaggaggttttctggggttctaccgaatgcagggctcactggcaatctttctctgaagtcaaatgcttctatgggcacaatcacaggtgtgcaacgcaagctggagatggttaatcagagtgatcataaatccttgaagaacactgtgaaacaaacaaggtatcgaccacctggaagaaagagtccaatgtccatcggcaagcatagaactactgttggagcttcggatgtagtggagaagttggcaaatgtgaccattgtaaatcgcaggcaaaggccagccgcaatgaaagctggggtacagtggactgcgcaatctaagaatgacatgtttattagaccaacccaacagatgcagtctggaagaagttttaccagaaaagtagtggggtgagatgggtggtggcccagcatcttggtttattgttatgtatgtgtaatcggagtccaaataattttcttttatggaaatgaacgctgtttgagtgctttcgtggtaatataatacttggttttctgtttcggttatgaaatggagacgtttgttctacgcataaaaaaaaataatataaataataactttactcttg

SEQ ID NO: 8372 - DNA, 1926 bp, Gossypium hirsutum
  Clone ID: GOSHI-09MAY01-C4543_1
agcaccttgagcttggcatatgttgggcgtgaagcaaccattctggttggttcaaatcagtatgttttgtggagctcgtgtataacttctgttgatgcattattttcgtcttgaagctgtgggtttagcaccaaactatgctgtgaggcccatccaccttataacctctggtggatttagctgatctgctacgcatttcttttctctaatgttctattgtttcatttaatacaagcaatcttctactgaatataaatgtcacatgggtattgttggttctcatacctctcttgaataaagaaagagctactctttgttctgctaggcaatggagaggtacaaattaattaaggaagttggtgatggaacatttggtactgtttggcgagctattaataggctctctggtgaagttgttgcaattaagaaaatgaagaagaaatattactcatgggaagagtgtgtgaatctgagagaagttaagtcactgcggagaatgaatcatcccaatattgtgaagcttaaggaggtcattagggaaaatgacattctatactttgtgtttgaatatatggaatgcaacctataccaacttatgaaagacagggaaaagcttttttcagaagttgacattagaaattggtgcttccaagtctttcaaggtcttgcatacatgcaccagcgtggatattttcatcgtgacctaaagcctgagaatttgttggttactaaagatataatcaaaattgctgattttggtcttgcacgtgaaataagttcacgtccaccatacaccgagtatgtctcaacacgctggtatcgtgcccctgaagtacttcttcaatcatacctgtatacttcaaaagttgatatgtgggcgatgggtgcaatcatggctgagttgttcaccttacgtcctctttttcctggtaccagtgaagcagatgaaatctacaaaatttgcagtgtattaggtactccaactaagtattcgtggcctgacgggcttaaccttgcaagatctataaactaccaattcccacagttcgctggtgtgcatctgtctgtgttgataccatcagcaagtgatgatgcaatcaaccttattacatctctctgttcgtgggatccttgcaaaaggccatcggctgccgaggcccttcgacatcctttctttcagagctgttattatgttccaccctctcttcgtcccaaagcagctgtgtctggaactcctccatctgttggggtgaaaggaacatgggaacagcaatcacctaggagattctctgggtttctacctaatgcaaagctcactggcaatcattctactctgaaggcaaatgcatctttgggcacaggtgtgcaacgcaagctggagatggttaatcaggatcttaataagaatgataaatccttgaagagctttgccaaacaaccaaggtatcgaccaccaggaagaaagagtccatttgccacatccatcaacaaggataggaatgccattggagcttcagatgtagcggagaagttggcaaatgttacaattggaaatcggcggctgaatgttgggcaaataaggcactctgaatataaaggctggggttctgtggactgcggattttaacgacatgtttcttttgccaaccctactaatacttgatcaccggaaagaaggtagcgtggaatgatgagatggtctttttaataataatgcatatcttggggtattatatattgatggagtccaaatatcgaaatgagctagagagctttggttttatcagttatgtcttccgtttgtgtgttttcttaacaataaccatgatatgatacatgtgttgtgttctgttacaaataattgagagagtggcttggtgtttctattgacctttgctttgataatgaagtgccagtttgtcaatg

SEQ ID NO: 8373 - DNA, 612 bp, Gossypium hirsutum
  Clone ID: LIB3543-028-Q1-K6-C5
cgtccgcccacaagtacccgaaaacaaccaaattcattgacagataactgcgaaagctcttcaactcctctgacaatcgacaagcctatgaagcgcaaagtctttcagtttcttcttgatgctctcttgaagcagatgaaatttacaatatttgcagtgtagtaggcactccaactgaagattcatggccagattagtctctctgttcgttggatccttgcagaaggccaactgctgctgaggcccttcaacatcctttctttcagagttgcctttatgttccaccctctgtacgtcctagagcacctgtttctagaactcttccacctgttggggtgagacaaaaattggagcagcaatctgctaggaggttttctggggttctaccgaatgcagggctcactggcaatctttctctaaagtcaaatgcatctatgggcacaatcacacgtgatagattgtagaatatgtactaatgtttaaatagtttactaatgatatttgttatagagagcttgatctagtttttacccttgtctattgtgctggttatttcctagatgatcatacatagtggatttctaattatcattaattattgcaggtgtgcaa

SEQ ID NO: 8374 - DNA, 456 bp, Gossypium hirsutum
  Clone ID: LIB3828-025-Q6-N6-F3
atgttccacaagtacccaatcccttgcttaattgcacaactcaaaaggccatctaatcattccacgctaccggggggggggggaccaagtatcagaagggtgggcaaaagaaacatggcattagaatccggaggccacagaaccccagcctttatatgcagagagccttatttgcccaacattcagccgccgatttccaattgtcacattggccaacttctccggtacatctgaaggtccaatggcaatcctatccttgtccaaggatggggcaaaaggattctttcttcctgggggaagaaaccttggtagttgggcaaagctcctcaaggatgtatcattcttattaagatcctgattaaccatctgcagcttgcgttggacacctgggcccaaagctgcattggccttcagagtacaacgattgccagagaacttggcattagggagaaaccc

SEQ ID NO: 8375 - DNA, 425 bp, Gossypium hirsutum
  unsure (1)..(425): unsure at all n locations
  Clone ID: LIB3148-034-Q1-K1-F2
aattcccggagtcggacccacagcagtccagcccatcgcgtctcgctccatctcgtctcgagtgcctcctagaatgtactcnncttcaatcatacctagtatagcttcgaatagttagatatagtgaggccgatgaggtagcatatcataggcgtggagttatttcatccttatcagtcctnnctttttccttggaacaaagtgaaagcaagatgaagaatctacacaaattctgtaagtgtaatagagtaccctccaactaagagattcataggcctagatggagcttatatcttgcaagaggctatatatctatccaattcccacaagtttagctggtgtgcattctgtctgcattgataccatcagcaagcgacgatgcaatcagccttattacatctctctgttcgtgggatccttgcaaa

SEQ ID NO: 8376 - DNA, 378 bp, Gossypium hirsutum
  unsure (1)..(378): unsure at all n locations
  Clone ID: LIB3584-027-P1-K1-B5
cccacgcgtccgcccacgcgtccgcccacgcgtccgcccacgcgtccgcaaatatcgtgaagcttaagggagtcatcagggaacatgacattttatactttgtttttgaatacatggaatgcaacctttaccaacttatgaaagacagggaaaaacttttttctnaanttgggatcagaaattggtgtttccaagtcttccaaggtcttgcatacatgcaccagcgtggatattttcatcgcgacctagagcctgagaatttgttggttactaaagatataatcaaaattgctgaggggtggtcttgcactttaaataaattcaagtccaccatacactgagtatgttttaacacgctggtattgtgcccctggagta

SEQ ID NO: 8377 - DNA, 374 bp, Gossypium hirsutum
  Clone ID: LIB3583-048-P1-K1-A7
tccaagtcttccaaggtcttgcatacatgcaccagcgtggatattttcatcgcgacctaaagcctggtattctgtttaactttttcctacaaaattcatgtttatatttgtttcgtctactctaagaaatatcctgcaactaactgcccttctcttctagagaatttgttggttactaaagatataatcaaaattgctgattttggtcttgcacgtgaaataaattcaagtccaccatacactgagtatgtctcaacacgctggtatcgtgcccctgaagtactccttcaatcatacctgtatacttcaatagttgatatgtgggcgatgggtgcaatcatggctgagttattcaccttacgtcctctttttcc

SEQ ID NO: 8378 - DNA, 453 bp, Gossypium hirsutum
  Clone ID: GOSHI-09MAY01-C4573_1
gaaatattggagatggcttgacctcctgtaaagatgaataccccatatttgataaggagggtgtgaatggcgagaacgcaggtccgatatacaaattcctgaaggctagcataggtggagctctgggtggacttctgggggacgacatcaagtggaattttgccaagttcctggtggataaagacggacatgttgtggatcgttatgcccccactacttcccctattagcatcgagaaggatataaagaaactgcttggctgatgttttgggcttcgtcacctcaggctttgagggaataaaagttaaatgtttttaccaataaaatctattacgatggggtttctctcttcttcttttttccttccatctgttaagatgggttagactgtaccagaatttgcaagttgaaccctataacttaatatatttatacatattatatatattatat

SEQ ID NO: 8379 - DNA, 1043 bp, Gossypium hirsutum
  Clone ID: GOSHI-09MAY01-C4483_1
gtgaaaaggagtccgtcctcccagccattcgagaggcttgtcgagaatggggagcttttcatgttttcaaccatggggtacctacgaaactgttggatggtttgaggagagcctgtctttcttttttcaatgatttccagatggaggataaacttaaatatgcttgcaatccaaattttgctgcctctgagggatacggtagtcgtttgctagtaagctctgaaaatgaaactgttttggattggagggactatttcgatcaccatacgttacctctttcatgccgcaatccttcagcttggcctcattttcctcccgaatacagggaattgatggctaattatagcgatgagatgagagtgttggctcagagactattggcattaatgtctgagagtttaggactgaaggcgtcctgcattgaagatgcagtcggggagttctatcagaacataacagccagttattatcctccttgtccgcagccagatttgacgttgggcctgcaatctcattctgatataggtgtcatcacgcttctaatacaggacgatgttggcggccttcaagtgctcaaggatggggagtggctcttgggcgatccccttccaaatgccacccttgttcttgtggctggccaaactgagtttataactaatgggaaatacaaaacctgtgggccccgagccataacaaatgcaagcaaagcccgtctctcaatcgccccttttcatgacccagccaagactgtccgaatatcccccgtctctgtatcttgtgagtcaatcttccccccctttgttttttgggttttttaaaaagacaacttgttttcatgggactcaaacgcccctaaaggaaaacgaaattttgacaagctcctgcttgacccttcaaagtaaattgaaaacgcccgggctctttgcaacttaacccggtaaccagttcaggccctttcatttcaaaacccaaaaacattttcagctattgttttgccctgtatgcaataaaaaaaaggaataagacccgcccggggttatttc

SEQ ID NO: 8380 - DNA, 1542 bp, Gossypium hirsutum
  Clone ID: GOSHI-09MAY01-C4453_1
ccacgcgtccgagcttgcttagtgttcaccttagccccccatttctgtgcgaaaatggctttgaaatgcttcatccatgtccatcccgactcccatttccccatccaaaaccttccttacggagcattcaaaacccattctactacactcccccgtctcggcgtcgcaatcggtgactacgttttggacctctccgagatcgctaaatccggtctgttcaacagccctttactcgccggttccgattgcttccttcagcctactttgaacaaatttttggctatgggacgacctgcttggaaagaagcacgtgatactcttcaaaagctattgtcatctacagaaccagcctcgcgtgataatatggaggttaggcagaaagcactggtgccaatgagcgaagtggaaatggttcttcctatggaaattggagattacacagacttcttttcatcaatgcatcatgcttagaactgtgggaacccatatttcgtggacctcaaaaccccattccacaaaactggttccatcttcctattgcctatcatgggcgagcatcatctattgtcatctctggaactgacattattagaccaaggggtcaaggccatccaactggtcactctccaccatattttggaccttcattgaagctagattttgaacttgaaatggctgctgtggttggtccaggaaatgaattagggaaagccatagatgttaatgaggctgcagatcatatctttggacttgtcttgatgaacgactggagtgctcgagatattcaagcatgggaatatgttcctcttggaccctttcttggaaagagttttggtactacaatatccccttggattgtgacacttgatgctcttgaaccttttgcatgtgatgctcctaagcaggatccccatccattgccatatttggcagagaaaatatccaaaaactatgatattgaattggaggttcaaattaaaccttctggacaaacggattcatgcgtggttacaagaagtaatttcaagaacctatattggacagtgactcaacaggtagcacaccacacaatcaatggttgcaacctgaggccaggcgatctccttggaactgggaccattagtgggcctgcatttgaatcatttggatgtttgctggaactaacatggaatggacaaaaaccattgccattaaatgggacaactcgaaaattcttagaagatggagatgaagtaaccttctctggttgctgcaagggagatggttacaacgttgggttttggaacctgtgctggtaagattgtcccaccacgcgattgaggaaacttttttactttggagataaaagaagatcacgtgccactcactcaagtcgtcgttgatttaaaagagatcttactgggaattcagagagctgatgaaatggtgtgtttgttgtatatgtgttgattgatctctcctacgatgttaatatagttgtagtacttgatggtatgctggaacttgggtttgcccattaagtaataatatttactagctagc

SEQ ID NO: 8381 - DNA, 471 bp, Gossypium hirsutum
  Clone ID: uC-gsflnu33B112a09b1
gcgccgattagggattccattcccgtttcttattttctattccagtttctgccctcatcaacttcatcttctcagacatttccctttcatattgcaagcctgacaagtcgttacatcactcttttagcagctcgcactcttcccctgtttattttacaggttcaaattaaaccttctggacaaactgattcatgcatggttacaagaagtaatttaaagaacctatattggatagtgactcaacaagtagcacaccacacaatcaatggttgcaacctgaggccaggcgatctccttagaactgggaccattagatgggaatttgaatcatgtggatgtttgctggaactaacatggaatggacaaaaacaatttccattaaatgggacaactcagaaaattcttagaagatggagatgaagtaatcttctctagttgctgcagggagatggttacattgtggttttggac

SEQ ID NO: 8382 - DNA, 795 bp, Gossypium hirsutum
  Clone ID: GOSHI-09MAY01-C4463_4
cccacgcgtccgcccacgcgtccgcccacgcgtccgggaatggtggccgcatctcggattgcctaaagatcaaggccctcccccttataagaaacctcatgacttgaagaaggcttggaaagtcggggttctcacagcagtaatcaagcacatgtctcccgatatagccaagattcgcaagcttgtaaggcagtctaagtgcttgcaggacaagatgactgcaaaggaaagtgcaacatggcttgctatcatcaaccaggaggagaccttggctcgagagctttaccccgagtcctgcccacctttgtcctccggtggaggaagtggatctttggttataaatgactgcagtgagtatgatgttgaaggggcagacaacgagccaaacttcgatgtgcaagagctcaaacccgggaatctaaattcatctgatttgagtgtggatcgaatgagggccatccaacaaccaccttattctattaagggagaagttgtcaataatttggactttatgcgaaagaggaaaccaagcaatgattcaaacatcatggaacataagatctacaaatgcgagttcgtccaatgtccctatagtgaacatcgcttaggttttcatgacaggattgccagggacaatcatcaattaacatgtccgtatcgaaactcctctgcactgtttagtggttcaagttttaatgttaacgaggtgaaacctgtaattttgcctcaagcatttgcgcaatccaagccaactgcaacagcggttacttccgtctcaacaccatttgatctttc

SEQ ID NO: 8383 - DNA, 772 bp, Gossypium hirsutum
  Clone ID: GOSHI-09MAY01-C4463_3
cccacgcgtccgaacggcttaaagatcaaagtaagggaaaggacggggttgatacatccaaacaacgccagtcgcaagaacaagcaaggaggaagaagatgtcgagggcgcaagacgggatattgaagtacatgttgaagatgatggaagtgtgtaaggctcaaggttttgtttatcggattatcccggtgaagggaaagccggtaactggggcatctgacaatcttcgggaatggtggaaggataaagtcaggtttgatcgtaatggtcctgccgctatcgccaagtaccaggcggataatgcgattcccggcaactatgatgggtgtcacaccaattggtccaataccacacaccttgcaagaacttcaagatactacgctcggttcccttttgtctgcactgatgcagcattgtgatcctcctcataggcggattcctttagagaatggttgtcacccaccgtggtggcctactggtaacgaggaatggtggccgcatctcggattgcctaaagatcaatgcccttccactataagaaacctcatgacttgaagaacgcttgtaaagtcggggttcttacaacagttaatcaatcccatggtttccgatatagccaatattcccaagcttgtaatgcagtctaatagcttgcaggacaagatgactgctatgtaaagtgcaacatggcttgcttcatcaaccatgaggagaccttgcttcagaccttaacccaatgctgccactttgtctacgttgatgagtgtatctt

SEQ ID NO: 8384 - DNA, 695 bp, Gossypium hirsutum
  Clone ID: GOSHI-09MAY01-C4463_2
catgtcagtatatgatacaacattcaaggcaacaagaacatgaatcctagtaacaatctagttaccaaaggtcaaaacgtcttcagccaaaaatccaacatcagcaagatgaattcttccgtggtcaaggagtcatgatggaaggaaacttcttcgaggactccagcatgctccataatcatcagatgttctcacaaggggaagctcagtttgagcggtttaagggcttgaattctccattagacagcaaccacaataacaacaacagcttccagttgatgttcgggtctccattcgatttggcttctttcgattacgaggaagatctgcatgcagttgggatggattccatgccaaagcaggatgtttcaatctggttccagtaacaaaagtctcccccacttaagtgctaatgagcaccagcaaaaaagcccttttgttttttacttggtttgtttttcatcctgtttgtagatgtagaagtttagcaagttttaacaggttttcatctgggcttcaataaaaaaacctggaaagcccccatgatcctgcaatcccgttaccgatttacaaatagaatgtgattgtctcataaataagttagtgttattatttacctgggtttttatttctaccatatgatgttgggatagggaatctgtcatgtaatggtgggaagatgatgagtggaaact

SEQ ID NO: 8385 - DNA, 2385 bp, Gossypium hirsutum
  Clone ID: GOSHI-09MAY01-C4463_1
caataactctctctctctctctctctctacactagtagaaaggttccaacttataaagcgagactaaaggaataatattctttttccctctctctctctctctctctctctctctctctctctctgtctgaaaatcttctgtttgttgctgaatttacttctttcagctttttggaataaacccaaactgtgggtttttcctggttaacaaaggcttgtttgtgggtgatttgaatttatatcagcacttactggtaacaggagaaaacatagttttggggaagttgaagcttattggttgattgagagattcccttgagtttcaggcttatcttggaacaatgatgatgtttgatgatatgggaatttgtggggatatggatttcttcagtgctccttttggggaaaaagatgcggccacggcaacgttggcggctttgcgtactgaaccagaggccacagtggaagatgattatagtgatgaagagattgatgtggatgaacttgagagaaggatgtggagggacaaaatgcgtctcaaacggcttaaagagcagcacaagggcaaggagggggtcgatatcgcgaaacagcgccagtcccaagagcaggcgaggagaaagaagatgtcgagggcgcaggatgggatattgaagtacatgttgaagatgatggaagtgtgcaaggctcaaggttttgtttacgggattattccggaaaagggaaagccggtaactggggcatctgacaatcttcgagaatggtggaaggataaagtcaggtttgatcgtaatggtcctgctgctattgcgaagtaccaggcggataattcgattcctggcaagaatgatggctgtaacttgatcggtccaactccacacaccttacaagaacttcaagatacaactcttggttctcttttgtctgcactgatgcaacactgtgatcctcctcagaggcggtttcctttagagaaaggtgttcccccaccatggtggcctactggaaacgaggaatggtggccacaactaggattgcccgaagatcaaggccctcctccctataagaaacctcatgacttgaagaaggcttggaaagtgggggttctcacagctgtgatcaagcatatatctcctgatattgccaagattcgcaagcttgtaaggcagtccaagtgcttacaggacaaaatgacagcaaaggagagttcaacttggcttgccatcattaaccaggaggaagccttggcccgagaactttaccctgattcctgcccacctttgtcctcaggtggtggaaatgtatctttggttataaatgactgcagtgagtatgatgttgaaggtgttgaagatgagccgaacttcgatgtgcaagagcgcaaacccaggactatcagttctaatttggtcatggagagaatgagggctatccaacaaccaccttattcgattaagggggaagttgtcagtaatttggatttcacgcgaaagaggaaaccatccaatgatttaaacatggttgaacaaaaaatctacacttgcgagttcctccagtgcccttacagtgaacttcgcttgggttttcatgacagggctgccagggacagtcatcaattgacttgtccgtatcgaaactcctccgcactgtttggtggttcgagtttcagtgttaacgacgtgaaacctgtaattttgcctcaagcatttgcgcaatccaagccaactgcaccagcggttacttccgtctcaacaccatttgatctttcaggacttggagttccggaagatgggcagaaaatgatcagcgaactcatgtcggtttacgataacaacattcaaggcagcaaaaacatgaatcccagtaacaatccaatcgccgaaggccaaaatattcttcacccgaaaatccaacagccacaggatgaatactttcgtggtcaaggaaacttcttcgaggactccagcatgcccaataaccatcagatgtttccacaaggggaaggtcaatttgaccggttcaagggcctgaattctctgtttgagaccgaacataacaacaacaacagcttcccgctgatgttcgggtttccattcgatttgtctactttcgattacaaggaagatcttcaaacagttgggatggacaccatcccaaggcaggatgtttcaatctggttccagtaagactgtaacgcctgtcggaacatgcactagctgaaaccctttttttttcacttggttattgtaattttcttccttgtgtgtagctgtaggaagtttaagcaagcttagcagctcttcatatggggctccaattaaaacacaaaaaaaaaacatggaaagcaccgtaggatcttgctactgatttacataggatattact

SEQ ID NO: 8386 - DNA, 364 bp, Gossypium hirsutum
  Clone ID: uC-gsflnu33B050f04b1
tgttgggatggattccatgccaaagcaggatgtttcaatctggttccagtaacaaaagtctcccccacttaagtgctaatgagcaccagcaaaaaagcccttttgttttttacttggtttgtttttctcatgtttgtagatgtagaagtttagtaagttttaacaggttttcatctgggcttcaataaaaaaaccaggaaagcccccatgatcctgcaatcctgttaccgatttacaaatagaatgcgattgtctcataaataagttagtgttattatttaccctggtttttatttcacatacagacagattttaaaggcaaacaaatttttttttggacaaatccgaggcttgaaacaatttg

SEQ ID NO: 8387 - DNA, 209 bp, Gossypium hirsutum
  Clone ID: LIB3048-030-Q1-L1-B9
acttgatcggtcctacaccgcacactttacaagaacttgaagatacaactcttggttctcttttatctgcactgatgcagcactgggatccaacttaaaagccggttcccttaaagaaagggggtccttcggcctggtgggctaacggaacccaagaatggtgggccgaacttggggtatccaaagaaccaaggccttccttcttatag

SEQ ID NO: 8388 - DNA, 732 bp, Gossypium hirsutum
  Clone ID: GOSHI-09MAY01-C4773_2
ccccgcgtcccccccgcgtccgcaagccaagaaagcttatagctttgcaaccatttcaccaccttcatttacattcagtcacacatttgctaaatcttccattgaatctagacacctttacgtccgcttcttcatctgcaaaaaaagaagaagaaaaagggtttttcaatctgagccatcttttttcttgctatatcagctaaggagcttcaatggattcatgttgtgtagcttttaaacccaattctcctttattgaatacaagaaatggctatggctatggctatggcaatggagatattaaaaatacatttttaggggaaagaacaagagggagtgtttggttcaatcagctctcaaacacattgagaggtgatgataagaaggaaaataagataaaatctggtgtttctgctgttcttacatcagatacaccaagggaagctgtgacattgaaaccacgtcggtttgaaagaccaagagttgaccccaaaaatgtagcttcaatcatattaggaggtggtgcagggactcgtctttttccacttactaaaagggctgctacacctgctgttccagtcggaggatgttataagctgattgatattccaatgagtaattgtatcaatagtgggatcaacaagaatttttgttttgactcagttcaactcggctttccttaatctgtcaccttgttctgtacatatttatggccaatgggaatcaattttt

SEQ ID NO: 8389 - DNA, 2090 bp, Gossypium hirsutum
  Clone ID: GOSHI-09MAY01-C4773_1
cccggccgacccagcgtccggctttgcaaccatttcaccaccttcggttacattcaatcacacatttgctaaatcttccattgaatctagacacctttacttccccttcttcaactgcaaaaaaagaagagaaagctaaggagcttcaatggattcatgttgtgtagcttttaaacccaattctcctttattgaatacaagaaatggctatggctatggcaatggagatattaaaaatacatttttaggggaaagaacaagagggagtgtttggttcaatcagctctcaaacacattgagaggtgatgataagaaggaaaataagatcaaatctggtgtttttgctgttcttacatcaaatacaccaagggaagctgtgacattgaaaccacgtcggtttgaaagaccaagagttgaccccaaaaatgtagcttcaatcatattaggaggtggtgcagggactcatctttttccacttactaaaagggctgctacacctgctgccccgcgcccgccccgcgtccggctgattgatattccaatgagtaattgtatcaatagtgggatcaacaagatttttgttttgactcagttcaattcagcttcccttaatcgtcaccttgctcgtacatattacggcaatggtatcaattttggagatggttttgtcgaggttctggcagcgactcaaacatcgggagaagcagggaagaaatggttccaaggaaccgctgatgctgtgagacaattcatttggttatttgaggatgcaaagaatagggatatcgagaatatacttatcttgtgcggtgatcatctttatcgaatggattatatggagtttctacagagtcacgtcgacaataatgctgatattacaatctcgtgtgtgccagtggacaacagccgtgcatcggattatggactggtgaagatggatggaaggggtcgtattgtccagtttgccgaaaaaccaaagggtgccgatttgaaagcaatgcaaaccgataccacgcttctcgggttggctccccaagaagcctgggatcctccttacattgcatcgatgggagtttacgtatttaggacagatgtgttattaacccttctaagatggagatatccgacttcaaatgacttcgggtccgaaatcattcctgctgctgtcatggagcatgatgtccaggcatatattttcaaagactactgggaagatatcggaacgatcagatcattttacgaagccaatttggccctcactgaagagtttccgagatttgagttttatgatccaaagacacctttctatacatctccccgttacttaccaccaaccaaaatcgacaaatgcaggattaaagatgcaataatctcccatggatgcttcttacgagaatgcagtgtccaacactcgatagttggtgaacgctcgccctcgcgcccgggtgttgagcttcaggacacggtaatgttgggagcagactattaccggactgaacccgaaattgcttctctattggcagagggtaaggtcccgatcggaattggacgcaatagtaaaatcaggaactgcattattgacaagaatgctaagattggaaaagatgtggtcattgtgaacaaagatggtgttgaagaagcagatagaccagaagaaggattttacataacgtcaggtttaaccatcataatggagaaggcaaccatagcagacggcacagttatatacccacgcggccccttaaaaatgacatccatgggggcagctttgaagatcggaattcgagttgcgaaaaaagcaaccgatgaagattgaattcgagtctgaatgttggatatggcggcatgctgtacatgcagcatttgcctttgaagaaaaggaaatgaaagctgcaacttattatgtaaattacaagttcttttatgtagtgtaaaatatggttctcatagaaataagttcaagacaataagatggctagcgctttagcagcccttgttccctttttattagtagagtaataatatatcttttgagagactaaaatggctgatgctcgtttcttttatctacttttatccattctgatgtt

SEQ ID NO: 8390 - DNA, 1093 bp, Gossypium hirsutum
  Clone ID: GOSHI-09MAY01-C4733_1
cggaatcccggtcgcccacgcgtccgctctgctgcaaaacagcgccacacctctgcacgacattcaaagccgcgtttcatttcctttgtgttgttgtatctgaataaagtttagttctctttgcgcgtgtcccgttctcttctccaatcctccaaaacttgaacttaaaaccccattttagttgatcccaaagttgacccctttttttgtttcagtatagtaatataccaagcctttgcttaaatggaggttaagctatggaacgacaagcgcgagagagaaatgtatgagaattttgcggagctgtatgccattatcaaggcaacagagaaacttgaaaaagcttatgtgagggatattatatcatcatctgaatatgagactgaatgccaaaagcttattgcccatttcaagaccttggcttcaacactcaaagatactgtccctagtattgaacgttttgcagatacatataaaatggactgtccggctgctataaatcgtttggtgacctctggggttccagccacggtggagcaccgggccgcggcggctgcctcagcgactacctcggctgccattgtggctgaatgtgtgcagaattttattactgccatggattcattgaaactcaacatggtggctgttgatcaagtgtacccattgttgtctgacctctcagcatcactcaataagcttggtattttgccacccgatttcgagggaaagatcaaaatgagggaatggatttcaaggttggctaagatgggggcagcggatgagttaacagatacagcatgctaggcagctccattctgacttggaatcttcatacaattcatttatggcagctttgcctattgctggtacttggaagttaaacccaatacttccatatttttgtttagtgcttcaatctggtgagaacggatgttttaagttggtaaaacagtgtattcattttgagagttcttggattgtttaaagctcaagatgctatttgtgtgctgctgattgtcgttctatgagaatgaatatatgctttaatttggttttgtaaaaaaaaaaaaaaaaaacaaaacaaaaaaataac

SEQ ID NO: 8391 - DNA, 410 bp, Gossypium hirsutum
  Clone ID: LIB3120-019-Q1-K1-E1
cctataattatttgatctgtgaaaacacagaattttgtgagggctattatctcgttttgggatgaattaagtgaataaagtttagttctctttgcgcgtgtcccgttctcttctccaatcctccaaaacttgaacttaaaaccccattttagttgatcccaaagttgacccctttttttgtttcagtatagtaatataccaagcctttgcttaaatggaggttaagctatggaacgacaagcgcgagagagaaatgtatgagaattttgcagagctgtatgccattatcaaggcaacagagaagcttgaaaaagcttatgtgagggatattatttcatcatctgaatatgagactgaatgccaaaagcttattgcccatttcaagaccttggcttcaacactcaaagata

SEQ ID NO: 8392 - DNA, 677 bp, Gossypium hirsutum
  Clone ID: GOSHI-09MAY01-C4723_1
cgataacactacgaccactgccatcgttcaatacaaaggaaaatacagcaatccaacttcttcttcttcttcttcttcgttgccatctcttcctttctacaatgatacaaatgcggccttttcttttcttggtggtctcaagagcttagccgataaaaaacatccaagtgatgtcccattacacatcagaatcgaattttcaccacgatttccgttaactctttcccttgccgagacaataacacttgtgctgggtcctaatggaactagggtttgctgctagcatgaacaacataagctttgttaatccatcgactgctttgctccaagcttactatcagcacaccaatggggtgtatggggataattttcccgacatgccaccatttttattcaatttcactgacatatttcttcccttgaacttagaaactccgaaacgagggaccgaggtgatggtgctggactataacaccacggtggagattgttcttcaagggacggcattgatgggcgggattgatcatcctattcacctgcatggtaacaacttttacattgttggatttgggttagggaatttcgacatatacaaggatcctttgaagtacaacctcaaagatcccccgcttcgaaacacggtgagtgtacccatcaatggctgggtcaccgtgaga

SEQ ID NO: 8393 - DNA, 1295 bp, Gossypium hirsutum
  Clone ID: GOSHI-09MAY01-C4643_1
cccacgcgttcgcccacgccgcccccgtcgcttcgattttagtccttagatagaacattcacataacctttcggcatctctcagtttcttcctctgcattcaatttgcactcatcggagaaaacaaaagatgtcgggcatgggagacgggtacgtcggcacggcccaagatgccgttaggatccgccgtctcgagaagcagagagaaaccgaacgccgtaaaatccaagagcttaaaaccaagtccgcctccgctaaaggtcaacccggtcttctccaattcggttcaagtacttctgagattctcgagactgcatttaagaaggaaactgttggtttggttacaagagagcaatatgtagagaagagagttaatatccgaaacaaaatcgaagaggaagagaaggagaaactccagaagcttcaacaagaggaagaagagcttcaattgcaaaagcggaagaagaggaaagttaaggggaattctcgcctgtcttttgcagatgatttcgacaacggaagtgaagaggaagacgatgaaaacaaaacttcggaatcaaagaggtttagtcgtggaaaatttggcaaggatccatcagtggaaactagctttcttcctgacagtgagcggaggctgaggagcaagctgaacgtgaaaggttgcggaaacagtggattctcgaacaggagcaaattaagaatgaacccctgaaattacttacagctactgggatggagcaggccatagacgagtgatccagggtacgcaagggtgataccataggagaattccttcgagcagttcagcagcaacttgcaccagagtttagagagattcggacaacttctgtggaaaatctgctttatgttaaagaagatcttattattcctcatcaacatagcttctacgagctgattattaacaaggcgaggggcaaaagtggaccgcttttccatttcgatgtgcatgaagatgtgcgaacgatagccgatgctacaatcgagaaggacgagtcccatgccggtaaagtagtcgagaggcattggtacgaaaagaacaagcacatcttccctgcttcaagatgggagatatatgatccaacgaagaaatgggagcgatacaccatccatggagattgaataatcggcgaagccttgcgggacgagaggagaccgtctctgtactttaaagaagaaaaactgttctgattgtatatgaacagatggttttgttatctatttctcgtaaccatgaacttttaattataaattagattctttttcggaacgaagtgt

SEQ ID NO: 8394 - DNA, 819 bp, Gossypium hirsutum
  Clone ID: GOSHI-09MAY01-C4663_1
cccactctaacgcccacgcgtccgcccacgcgtccgacgaggcattcacagtggcaaaggagtgatgatggaggtgaaagttcagaaacagattcaccgagtgattcattgagagatatacatgatatttctttgaacctaaagttttcaatggatggagataggagtggagctagtggaaatgataattctttagattccgaagggaatgaccgaaatagtaagttggagaatgccgttttatcatggtcaaaaggtgttttaaaagatcaaaggaaagctggatccggagacagaattgaccatggttccagcacaggtaagtttccagcattaaggaggaggaaacatatttttgtcattgctgtggactccgactccaatgaagaccttcttgatgctatcagaaaggtttttgaggctgtcgaaaaagaaaggattgaaggctctataggttttatattgtcaacatacatgaccatatctgagatacagtcttttctagtctctggaggcttgaatgctaatgattttgatgctttcatctgcaatagcggtagtgatctcttctattcaactattaaccctgaagatggtccctttgtaattgacttctattatcactcacacatcgagcaccgttggggtggggaagggttgagaaagactttggtccgttgggctggatcggttactgataagatggaagggaatgaggagcatattgtcactgtagctgaacacctttcgaccaattactgttacacatttgaagtgaaaaatgcagtgagggtttcccttgttaaagagctcctaaag

SEQ ID NO: 8395 - DNA, 664 bp, Gossypium hirsutum
  unsure (1)..(664): unsure at all n locations
  Clone ID: uC-gsronu33B018d12b1
attattttgatgctttcatctgcaatagcggtatgtgatctcttctattcaactattaaccctgaagatggtccctttgtaatgcgacttctattatcactcacacatcgagcaccgctggggtggtgaagggtagataaagacttagccacggtgacctgtatcggtttccgttcggactggactacatggggagtgtatggggagacaagcatgatcattctggacttaatcagctggaacttaagtagttggttgaatccaaatgaggtttatcaaagtggagtgacggatggccaattcaaattgtgtaatgcttggagtatatgcttattggattgccgtactccattagaagattcactaagttgnggtctgtgattattcagagggggatatgcacctcttaatggatgactggatcgattgaaatatgattattatgaaatttttacatcggaaatgaaaaatgctttttttcaacttcagggtccatgttaccccggttttttttccaagtgtgaatgtttattgcagttgccaaatttttggtgggttttaaatgcatttttggggcaattggaacaattggtggagtgggattctaagaagattttattctcgttaaacctttcaggttttttaattttggtcattgtttaaa

SEQ ID NO: 8396 - DNA, 562 bp, Gossypium hirsutum
  unsure (1)..(562): unsure at all n locations
  Clone ID: AW187145.1
gtgaaatatgatgacttttgaagccaggcacaagtaaaaactaaacttgaattttgcttacatacgggctggactacaaagggaatgtatgtggtgacaagcatgctcatcctggccttcatcagctggaactcaagtattggttgaatccaaatcaggtttatcaaagtggtgtgaaggatagccaattcaaattgtctaatgctcggagtatatgcttgctggattgccctactccattagaagattcactaagttgggtctgtgattatccagagggggatatccacctctcaatggatgactggatcgatanaaattacgattattatgaaattcttaccccgggaatgaaaaatgcttctctccaacttcagggtccatgttacccagttatatttccaactgtgaatgtttactggagttgccaatatattgctcgtgcttcaaatgcatctttgcggcactggaaacagatgggtggagtggatattaaagaagatatcgtantaaataaatccattcacagttttatcaattctcggtcatctgtcttaaagcc

SEQ ID NO: 8397 - DNA, 472 bp, Gossypium hirsutum
  unsure (1)..(472): unsure at all n locations
  Clone ID: uC-gsronu33B018d06b1
cctttttgtccggtgctagaaaggtatcccatcactacagaagatggagggatcattagacacaacaggaaatgcagagatgttgcatttcttgtcatttttatagcattttgggttgctatgatcgttaactctagctttggatttaaccaaggaaacccattaaggcttacatacgggctggactacaaagggaatgtatgtggtgacaagcatgctcatcctggccttcatcagctggaactcaagtattggttgaatccaaatcaggtttatcaaagtggtgtgacggatagccaattcaaattgtctaatgctcggagtatatgcttattggattgccctactccattagaagattcactaagttgngatctgtgattatccagagggggatatgcacctcttaatggatgactggatcgatagaaattatgattattatggaaatcttacatcggaaatgaaaaat

SEQ ID NO: 8398 - DNA, 782 bp, Gossypium hirsutum
  Clone ID: GOSHI-09MAY01-C4053_1
gcttcttcacaatgtccttcactttaacccacagacttctgctttttcaccaccacaacgaacccatctcagattcaccttcaaaccccacacatcaaaacccatagtttcttcaccatcaaaactcagttaccttcccatagtcagttctctcagtcataattctgaacacttatcggtcactcaagcaaaacccagatgggagaacatgttatcgactgctgctagcttttaccctttgtatgtgactgttggtggcattgtggcttgttttaagccgtctgcttttgcttggttcgtggagagaggaccttcttcatatagcttctcgcttgggttgattatgttggctatgggtctcactttagaactcaaggacttgctcaatttgttcacccaaagacctctttctattctatttggatgtgttgctcagtacacaattatgccaacttttgctatggttattagcaaaactttggggctttcaccatctctttctgttggtttgattttgctaggttgttgtcctggtggtgctgcatccactgtggtgacctttattgcacgaggagacgtttcgttatcgacggtaatgacggtttgcactactctgggtgcagtgatcctcacacctcttttgactgtgattctagcaggaacatatgttcctgttgatgctattggactttccatcagcaccctgcagtggttgtggctccggttttgctcggttcttacctacaaagcacattttctttggtgtgaaaatgattacacca

SEQ ID NO: 8399 - DNA, 506 bp, Gossypium hirsutum
  Clone ID: GOSHI-09MAY01-C4373_1
ggagaatgacacgtggcaggaaatgaaggacgggatgaaagaaggttggaccggggtgagtgtggttgtgggcgacaggctgtttgtcatttcagaatacggtgattgcccgatgaaggtatatgttcctgatcgtgacgcgtggcagtacgtaggtggtgataaatttccacgtgaggcaatgcagaggccattcgctgtgagtggagtggaagggagaatctacgtggtgtcaagtgggctaaatgtggcaatagggacaccaatcgagggacaaaacggggagttcatagcgaagtgggaggtggtcgctgccccaatggctttccacgacttctcccctttgagttgccaagtgctttatgcctagaaatccctctttcatacaaaatgctacctataactgtaaggcagtggagttttacactttttacatgtgctcttttttacgtgtaaattgttcatgttcccggaggaatataagagctggtttacaaatcctttta

SEQ ID NO: 8400 - DNA, 687 bp, Gossypium hirsutum
  Clone ID: GOSHI-09MAY01-C4243_1
cacttatgaggaagaccatcttcttcaaggactcaacagttacaggacatcggcgaatctcccagcattcggcgagaacaaaaacgccgaatgcgtggccaagagaatcgccgacgacgtcagcgacgacgacaacaaccagcactgcaccaaccccagcaattcacctggcaataacgcaaccggattatcggcctatcccaaagccatatccaagtgcgacatcgatgccaacaccaccagcgatgtaatggtgctgcctgtttgcgtgccgaatctggttccaacgcttgttctaaccaacttcacacgcacccattactccaaatacataaacgattccaccttcactggaatcggactcagtgccgaagatgattggatggtggtggttctttcttccaataagccaactgggagcctcgccaatggagcttattccttgcttaataggaagcttggtttcagctattacatggtgttattgttgttgggttctctacgtcttttcgtcttgatttgcagtgaaaaatgcttggatttctttgtatatttgtctttagagtttgtgatttaatttgtcatatcttgtggatttcaatttgtatgagaagttatataaaaagaagaagtttgctttccgtttcgttttgtgtaaaaccggccgcgcccgcgatatgaaatctt

SEQ ID NO: 8401 - DNA, 676 bp, Gossypium hirsutum
  Clone ID: GOSHI-09MAY01-C4213_1
ttccacgcgtccgcccacgcgtccggtttgggcttgctgtaccctctacaactgttgatgaggaagagaaaaggaaagctcgtcttgcccgattttcaccatattccaaacctgacaccattgaaggagaaaaaaagaaaagcaagggcaatcaggttttcggatcccctgtcaacttctttagcacaggaggctcctgttgctggaaaggctgctggaggactctaaataaaaattaccatagttagaaggtctagtgtcctaacagcttgtgattcgctcagcagcttccttacaatgttttatttctaacatcaaaatttaagatgcaatactccatctccagatgaatttctaaagaattggcaatgttcttttggcagtttggaaggtgttttacagtgtctattcatttggtgaggcctattggaatcaacaaccacctggagtgttaacctctcttaaatcctacaaaaagcattagaaattctggagtaatggctataaattttctactttcccggttagataatttagttgagaaagtatgggggtggttattagattcatcctaacaattaatgagtttgtttatttgctgttgtaacaattgggcagcatcttatactgttttaagttgcataatatgatcaagtgtgagacagcagtagtattc

SEQ ID NO: 8402 - DNA, 598 bp, Gossypium hirsutum
  unsure (1)..(598): unsure at all n locations
  Clone ID: LIB3583-006-P1-K1-C11
cccacgcgtccgaggaaggctagagctgagaggtttgggccttgctgtaccctctacaactgttgatgaggaagagaaaaggaaagctcgtcttgcccaatttgcaccatattccaaacctgacaccattgaaggagaaaaaagaaaagcaagggcaatcaggttttctgatcccctgtcaacttctttagcacaggaggctcctgttgctggaaaggctgttggaggactctaaatagaaattaccatagttagaaggtatctttggagatatgcattgctttaatcatgtatatatctgcgtctgtgtcagaaatatacttgtttaaatatgtctatatcagttaacttagaggtcgcattattattttcttttccttttcaggtctagtgtcctaacagcttgtgattcgcttagcagcttccttacaatgttttatttctaacatcaaaatttaagatgcaatactcttatctccagatgaatttctaaagaattggcaatgttcttttggcnnanaaaaaaaaaaaaaaaaataaataaataaaaaaaaaaaataaaaaaaatttacaaaataaaatttatgttaaaaagaat

SEQ ID NO: 8403 - DNA, 497 bp, Gossypium hirsutum
  Clone ID: GOSHI-09MAY01-C5913_2
tatatttctaaaaaaaatcctcaaaataatccatacaaataaatagacacttaaaaccacattgcgatcggtccccccgcctccgcccgcgcgcccgcatctccccaaatttgcctgaatttccccgctttttcatttcaaagagtttagaagataaaagaaaatgcagggcggcagaggcggaagggatccattctttgaatttggtggtgatccctttggtggttttgggggtcataaaagtttactatccaatttctttaatggaagggacccttttgatgatcctttcttcacacgtccttttgatagcatgtttgaatcaagcttctttggccctggtcataatcctttccctgatatgcacccatctgggttcattggacaacaagccccagagccaaaacgaccaagcggtcctattatccaagaattagattctgatgatgaaaaagagatgaaagaaaatcccagaaaacatggtaggtctaaggatg

SEQ ID NO: 8404 - DNA, 1329 bp, Gossypium hirsutum
  Clone ID: GOSHI-09MAY01-C5913_1
tttttacgcgtccgagaagaagcatatacatggagtgagggtcgcgcaatctttgccagtggaagcccatttgacccctttgaatacgatggcaaagtctttgttcccggccaggcaaacaatgcttacattttccctgatatgcacccatctgggttcattgaacaacaagccccagagccaaaacgaccaagcggtcctattatccaagaattagattctgatgatgaaaaagagatgaaagaaaatcccagaaaacatggtaggtctaaggatgaacctcatgtcgaggtaccagatgatgaaactgaacaatctgagagaaggaatgggcatttgcagtatatgaatggctataatggttcatatcaacgacaacagcaaccacctcaaactcgtagctttacatttcaaagctccaccgttacgtatggtggtgctaatggggcttactatacttcatccaaaacaaggaggagtggaagtgatgggattacctttgaagaaagcaaagaagctaacacagctacaggtcaagcaagccaccgggtttcaaggggacttcatgacaagggtcattcggttacgagaaagctgaattcggatggtagggtggaaacaatgcaggccttgcacaatttgaatgaagatgagctttctggttttgaagaagcttggaatggaaatgctagaaagcatttgcctggctggtctggaagttctaatgtccatgatacaacagggacaagttggggtcagaatgggcaagcaagtcatggaggatgggcacttccttttaccgagcgttctcagcagtcgggaaaagcaatgatggatgccaaagacagtgcagggccatcacgcggccagaattctacaaaggcgaaaggtttgggagcccttaaagataagatttctcagacactagggaagaaaaagaaccaagtttgaactttgaagcactgagttgatcatctagagagtttatattgtgttctctcatataacatatcaacatgcccttttttggacataactacccatctagttcttcagttttcagaccatcgatagcatatctttgtcatgtgtctgtttctgtagtacaagacctttttggtgttgtggtggttaatgcagagaggtatagacaatttctgcaaatggcacccttttaggttatggatattacaacattataatatggattttttaatgcataaaactttgccttttcatggtttcttcctttttgcatttgtgttgaatatgaatatgatcctgttgttgaaagcttaaatgggtgaattgaattgaattggaaaattc

SEQ ID NO: 8405 - DNA, 409 bp, Gossypium hirsutum
  Clone ID: uC-gsflnu33B022d01b1
cgcgtgggtttgaactttgaagcactgagttgatcatctagagagtttatattgtgttctctcatataacatatcaacatgcccttttttggacataactacccatctagttcttcagttttcagaccatcgatagcatatctttgtcatgtgtctgtttctgtagtacaagacctttttggtgttgtggtggttaatgcagagaggtatagacaatttctgcaaatggcacccttttaggttatggatattacaacattataatatggattttttaatgcataaaactttgccttttcatggtttcttcctttttgcatttgtgttgaatatgaatatgatccctgtgttgcaattaactaacaccaattgattcgtcctatttaaagccatcttataattcttcctc

SEQ ID NO: 8406 - DNA, 380 bp, Gossypium hirsutum
  Clone ID: LIB3146-038-P1-K1-B8
tcgtccacgcgttcgggctatggcatccatcaatgagaaacctcttattatggttctatcgaaccctacctcgcaagctgaatgtacagcagatgaagcatatacatggagtgagggtcgtgcaatctttgccagtggaagcccatttgacccctttgaatacgatggcaaagtctttgttcccgcccaggcaaacaatgcttacattctccctggattcggtttgggagtgataacgtctggtgcaattcgagtacatgacgatatgctattgacagtctcggtagctttggcacgcacaagtgacagtggaacacttcaaaaagggactaatttacccaccattctgcgatattagaaagatttcagccaacattgct

SEQ ID NO: 8407 - DNA, 538 bp, Gossypium hirsutum
  Clone ID: GOSHI-09MAY01-C5893_1
gttatacttatgaagttgagcagcaaaagagaaaaatggaaaaaggagggataattggagtggagaaaagaatgagaaaaggttaaaagctttgttggactttttttttcttttcatttatttgattttgatttgtgatatgaattatggatttctgagtttttttttcaaaaagatctgtttttagctgttgggttttgtttttgagtgtttaaaagaaaggggaatggccggaagtaatgaagtcaacctcaatgagtgcaagatggtggttcccctaaatacatgggtcctaatctccagttttaagttggcttacaatcttctccgtcgaccggacggcactttcaatcgtcacttggcggagtttctcgatcgtaaagtccctgctaatttgaacccagttgatggagttttctcttttgatgtcctcattgatcgtgctacaggcctcctttgtcggatttacagaccagctactgctgaagagcctgagccgaatatcgttgagcttgaaaagcctgttgtatgggatgta

SEQ ID NO: 8408 - DNA, 581 bp, Gossypium hirsutum
  Clone ID: GOSHI-09MAY01-C5843_1
gaccgacgcgtgcgctttattattattattattcattttcctctgtcaaaaccctaaccctaaccctcaaattcgcttaaaaattcccccccctttgttcaaatcctttctctaattacactaaaagccccttcaatttttgataaattcaatttattgtaaaaatttccccattccttttttttttaatttgagaaatttccatggccgccgttgtagaagaaaccatacaatgattgaattattggggtttcgtttcaattgtatggggtttatgaaatgcctgagttgcgaaaaggtgtttgtagaggccgtgccaagttagcgcagcctcagcagccacaagaaacccggaaacaaacgaggaatcaaggtcggaaacgtgcggcggcggcggttattgaggtaggtaggccaaggacgagattggccgccaagagactaaaggaggaggaggaacaccctccggtcgttgtgatttctgagagagagagcgatattttgaaggagttggtaaaagacaataaagaaaagaagctgtgatggggacgatagcggtgggttgagtgctaataaggctg

SEQ ID NO: 8409 - DNA, 424 bp, Gossypium hirsutum
  Clone ID: LIB3583-030-Q6-K1-C11
cccaccgtcgctttataattattattattatttattttctttgccaaaaccctaaccctaaccgggaattccttaaaaattcccctctttgttccaatcctttctctaattacactaaaagccccttcaatttttgataaatttaatttattgaaaaattttccccattcctttttttttaaatttgagaaatttccatggccgccgttgagaagaaaccatacaatgattgaattattggggtttcgtttcagttgatggggtttatgaaatgcctgagctggataaggattttgagaggccggccagggggcgcagcctcatcatcatatatacccgtatatatctatgaattagggcgtatatgttttgaagcgtatgttatttatgttttacatttacgtcttcaatattccgtattcat

SEQ ID NO: 8410 - DNA, 1218 bp, Gossypium hirsutum
  Clone ID: GOSHI-09MAY01-C5873_1
atatttttgtttttttttaaaaagagaaaaagaaaaaaatagtacaaggcaatatgagattatttgttagtttggtagcagttttatgtatcgtgtgcagcaatgtcttagccgatcagattttcccatctcatgtagctagcacacttggtcgaagctcccgtgaaccaaaatacaagattgagttccattctgaagactctccctaccatcccgatgatgatcaggagtctgtttttatgcctaataaagatggaaagaattttttatgtttcttgcctaaggtggagaaaaccaagactctaaagccagttactcagcagaacgttagtaccatgattgtggaatctgagaaacaggttaaactgaagacgcctgatgagctgctggaagtactgaaagatcgatgctttatcagacaagagggttggtggtcttatgaattttgctatcaaaatcggttacggcaaatacatgtggaagaggataaggtggttcaggaatttgtcttgggtgtatatgatgaagaggccactgctgccttcaaccagaatctctctgacatatctgcattaaaagatcctcgctcaaaagatgcttcacaaaggtatcatgctcatcaatatacgaatggaccccaatgtgatcttactaatcagccccgagaaactgaggtgagatttgtctgctcggaagccaagagcaatgattagttcaattacagagttatccacgtgcaagtatgcacttactattcaaagccctatgttatgcaaacacccgttattccaagaagagagaccggtgtggcacaccattaactgcaatgtgcttgccaaggataccaaggttgaggaggacccgcatattactatgatcatggactcggaagatcaatctagtaattttgattcaagccaatgaatgttgtcgatcttcatacactttttagtcgtacattttgcagagttatttaacccttgtcaaagtattacagtatcaacttaaaggctttctaatacacactttaattttttccctgctcaaattacattcttttttgagaaaagtcatcctaaattgtctggatgatgaattcctttaaagaaaatagaagaaaaacagtaacatctttggataatgcagtggactgaaacaattactctgcattggcgacaaatctcgatgcttaacacaaggttttcttatttatgggtt

SEQ ID NO: 8411 - DNA, 867 bp, Gossypium hirsutum
  Clone ID: GOSHI-09MAY01-C5833_1
tgatgcagatagaggaggtgaaggcaaagctgaatggaaaggacaatgtttcagtgaaggaggaggtgaatgtgactaaaactgctaatagaacactagaacaaagtgaagcaccagtagaagtgaagtatgagagcttgaagaacaaccttttcctagacttaaaagacggttcatcagatagtgactctagcgctgtgttgaatgaagacaacaacaacggctcgaactacgtgggtgtatcttcatctggggttctacaaagccaacatgtttggatgtcaccgacaacagccccttcactcaatttcaactcctcttcatcttcttctatgaagtgcctccaaccccagcaatttgtgaagatggaagaacaaaatttcttcagtgcagatgaagcttgcaagttcttctcagatgaagaagctccaagtcttcattggtattgccctgaacactggaactaaaatcagcatgcatgtaatacgggatctaacccaaaatgcaaaaataaataaaagtagcaaaaaggttgggagaaggcttcacgtggggtggaggaggctatggcgataggtgacgccaaaatgaggaggtggacgggcatcttggttaggtcctaagttccctcaaatggagcgaaccaaaaatcaaaaatcaaaattatcatcatcatcatcatcatagttattatcaattatcattttcctgggcttcccccgtagtttctttatgcagaaaaaaattaatcagttattccaatttcagagttaatagattattttaatttaagatttctgtgtttatttttaaacaaatttagctctatttgctcttgaaagttaaaaaactttggccggaaaaacc

SEQ ID NO: 8412 - DNA, 360 bp, Gossypium hirsutum
  Clone ID: LIB3196-059-P1-M1-G2
ggtgaatgtgactaaaactgctaatagggcactagaacaaagtggagcaccagtagaagtgaagtatgagagcttgaagaacaacagcaagggatcaaatggggccatccttttcctagacttaaaagacggttcatcagatagtgactcaagcgctgtcttgaatgaagacaacaacaacggctcgaattacgtgggtgtatcttcatctggggttctacaaagccaacatgtttggatgtcaccgacaacagcctcttcactcaatttcaactcttcatcttcttctatgaagtgcctccaaccccagcaatttgtgaagatggaagaacaaaatttttttagtgcagatgaagcttg

SEQ ID NO: 8413 - DNA, 273 bp, Gossypium hirsutum
  Clone ID: LIB3148-045-Q1-K1-B4
cccacgcgtccgcccacgcgtccggagctgctcgccgcgcccaaacctataaggtgcgcaagaatttgtggaggaggctatggcgataggtgacgccaaaatgaggaggtggacgggcatcttggttaggtcctaagttccctcaaatggagcgaaccaaaaatcaaaaatcaaaattatcatcatcatcatcatcatagttattatcaattatcattttcctgggcttcttttgtagtttctttatgcagaaaaaaattaatcagttattcc

SEQ ID NO: 8414 - DNA, 587 bp, Gossypium hirsutum
  Clone ID: GOSHI-09MAY01-C105818_1
ggaagaaaaataaggaagttttcattaaacctgataaaattctttacatttatgggcataaacaaaaaaacaaaaaccttaaatacatatagtatgaccccatacccaaaaaagaagcaacaaatagggcttaaaaatatcccacacttagacaccgttttttaacctacttaactatgaacataaggttcaaacagtttcacacatggatttggatcaaactgcatgatatccgctgcgcgttcgaactcttctcgtaatacccttatgctaaacttgtccaccactctgcccagatcgtgagatgtctcgaatggatcctctatgcagattaagtgccgatcgttgccaattctcctcgtccaatccttttcttgcttactgattatgcttcctgtccgaacagatattactgaatttgcgtaatcatgaccgtatgcccaatagttgaagaaaccccaaaccagttgagcaacagtttccttgttagaagatccgaagttgtgaagtttttcgatttggtcaaagtaagcacactcgatattatccacggtgatattgtaggttttctccatcccctacacaca

SEQ ID NO: 8415 - DNA, 1349 bp, Gossypium hirsutum
  Clone ID: GOSHI-09MAY01-C5823_1
cccacgcgtccgattaaaataggagactccgcccatttttcttcattttcctccaaccataatcattatatttatatttcttcctctctcttctttatttcttcaagtttaaggcctcaaaatggaggcagccactgtggttggatcttctatgtctctacatcgaacttcatgctccgctgccagatccgcccttttagctgccaatggcccgctctttccacgtttcgctgctaaccctcgctcctccttctcgatcaagctttattcttcagtttcatattcaaaatcacggaataggagaatgggtttggggggtaggagaggcatggtggtaaaggcgtcttcatctcctgactcagctgaacccaatgctcaaattgcgtcacttcggatggaatctccaattggtcagtttttgtctcaaatcttgataagtcatcctcatcttgttcctgctgcagttgagcagcagcttgaacaacttcaaactgaccgtgatactgatgaaaagaaggaagagccgtctgcttcaggcacggatttagtattggataggagaattgctgaggttaaggctaatgagcggaaaagggcattagaagagattctctatgcattggtcgtacaaaagtttatggatgccaatatttccttggttcctgctataacttcttctgcagatccttcaggtcgagtggacacatggcctagccaagaagataagcttgagcagatccactcagctgaggcccatgagatgattcaaaaccacgtagcactcatcctgggaaatcgattgggtgagtcaacatctgtagcacagataagtaaactcagggttgggcaggtctatgctgcgtcggtgatgtatggatacttcctgaggcgggttgaccagcgatttcagcttgagaggacaatgaaagtccttccaagtgcttcagatgatgacaaaagtagcattgagcaaactgtgggggatgacacaagaccttctggtctaggggactcctatcaagctgcttcatcacaccctgaagtctcatcatggtctggtgggatcagtcctggaggttttggtagtgggataaagccctctcgactaaggacttatgttatgtccttcgatggggagacacttcagagatacgcttcaattagatcaaaagaagctgttggcattatagagaagcacacagaggctctatttggaagacctgagattgctataactcctcaagggactgttgattcatccaatgatgagcttattaagattagctttggcggtttgaagagacttgttttggaggctgttaccttcggttcttttctatgggatgttg

SEQ ID NO: 8416 - DNA, 599 bp, Gossypium hirsutum
  Clone ID: LIB3583-030-Q6-K1-A4
cggacgcgtgggcttgtcttctgcttctgcttttattctttttatctgacggaaatgatattttccaggcctcaaaatggaggcagccactgtggttggatcttctatgtctctacatcgaacttcatgctccgctgccagatccgcccttttagctgccaatggcccgctctttccacgtttcgctgctaaccctcgctcctccttctcgatcaagctttattcttcagtttcatattcaaaatcacggaataggagaatgggtttggggggtaggagaggcatggtggtaaaggcgtcttcatctcctgactcagctgaacccaatgctcaaattgcgtcacttccgatggaatctccaattggtcagatcttgtctcaaatcttgataagtcatcctcatcttgttcctgctgcagttgagcagcagcttgaacaacttcaaactgaccgtgatactgatgaaaagaaggaagagccgtctgcttcaagcacggatttagtattgtatacgagaattgctgaggttaaggctaatgagcggataacggcattagaagagattctttatgcattggtcgtaccaaaagttatggatg

SEQ ID NO: 8417 - DNA, 514 bp, Gossypium hirsutum
  Clone ID: GOSHI-09MAY01-C5543_1
gtccctggagggtatgtttaccagaaggcccgtcttgagtttttttgctcaaaggaaaaactagatgcacttgtcaataaatgcaagcccttgtcatctattacctacattgctgtcaacaaaaaagggaatttgatatcgaacattggcacgacagatgttaatgctgtaacttggggagtgttcccagccaaagaaatagtccagccaacagtggtggatcctgccagcttcatggtgtggaaggatgaagcattcgaaatctggtcaagagcatgggctgcactgtacccagaaggcgatccgtcgaaaaaattgctagaagaggttcagagcagctattatttggtgagtttggttgataatgattacattggtagtgatgtttttgctgtttttggagacctttaagatgagattgctgccttcaagccctgaacttaccaaagctcttaagccccatatagtatcattatgtttgagttggcaggttatttttttataatgatttttt

SEQ ID NO: 8418 - DNA, 517 bp, Gossypium hirsutum
  Clone ID: GOSHI-09MAY01-C5503_2
cccacgcgtccggaaaagaaaagaaaaatggagaggagcacacccgtgcgaaagccccacacctcaaccgccgacctgctgacgtggacggagggttcacaatctgcctcctccaactcagccgcttcctccgcctccgcccagcgttcctctggtcgttacaaccagccatcggatagaatcagtaaagtgctatttggaggtcaggtaactgatgccgaagctcaatctctcttgaacaagaagccatgctcgggttacaaaatgaaagagatgactggtagtggaatttttgctgctgatggtgccaatggggcatctgaaactactgctatgaattccactaacaaaacaggattgcggatgtatcagcaagcaatgaatgggattagccaaatatcatttactgctgatgcaagtgtttctcccaagaagcctacctctatccctgaggtagcaaagcagcgagagttaagtggctcattgcaaagagaatcagatggcaagaataaaaagc

SEQ ID NO: 8419 - DNA, 1166 bp, Gossypium hirsutum
  Clone ID: GOSHI-09MAY01-C5503_1
gcgttataccaatgaaatgacaggaaaaatgggggggagctcacccgtgcgaaagcctaacacctaaggggccgacctgctgacgtggactgccgtttcacaagcttcgtctactaagttgggcggtagctaagcctccgccctgggttcctctggtcgttacaaccagccatcggatagaatcagtaaagtgctatttggaggtcaggtaactgatgccgaagctcaatctctcttgaacaagaagccatgctcgggttacaaaatgaaagagatgactggtagtggaatttttgctgctgctggtgccaatgggcatctgaaactactgctatgaattccactaacaaaacaggattgcggatgtatcagcaagcaatgaatggaattagccaaatatcatcccccgcggccgcaagtgtttctcccaggaagcctacctctatccctgaggtagcaaagcagcgagagttaagtggctcattgcaaagagaatcagatgcaaagaataaaaagcaaatatcaaatgcaaagtataaggagattagtggacatgacatctttgcccctccggaaaataagccacgttcgttggctgctgtcacctctgaatcaagaggaagcaaagacatgggagaacctgcaccacgaaatgtccgcacatctgtcaaagtttcaaatcctgcaggaggtcagacaagtatcctattcacggacgaaccagttgtcaaggtgacaaagaagatacataaccaaaagtttcaagagctgaccggtaatggtatcttcaagggagatgtcccaccaggttctgtggaaaaaccacttagccgagctaaactgcgagaaatgagcggcaatgacatcttttctgatgggaaggctgaatcgcgcgactctttgggtggtgtacgtaagcctcccggtggtgagagcagcattgccttggtttaacttgatattaagctgcctgtataactatagtgtcatttgctgtacatcccagtttggggtgctatgttttgactatgaagtgttctcagtgttggatgacaatcgaatataggtattcgagtggtgtatgttagttgtggcttgtgattatgctgttttggtggtaccattagatcgagactctaggcaattaatatcggctaattgagtga

SEQ ID NO: 8420 - DNA, 855 bp, Gossypium hirsutum
  Clone ID: AI054759.1
agaaaattaaatataaatgataaaaatctagaataagattaaaacaatagttaggatatatagaagtatagatatacagaaaagtatatatatatataataactgatatactagataattctatatatagtataaattaatcattccaagagatagcaaatattgagactcgattgtagaattctaatttgatcttaaataggaatactagcaataaggggacatctgtaatggactatttctgagattacacaattcgtccaagccggtgaatgaaccggtcactattgctcatattgtaatctggcatgagtatgtaatatagaacattcatcaagggccaatttatatgagtggctatcattcgtcagattctgtctggaattgttcactattgctctttcaggaagccatgctcgggttacaaaatgaaagagatgactggtagtggaatttatgctgctgctggtgccaatggggcatctgaaactactgctatgaattccactaacaaaacaggattgcggatgtatcaggtatctgtttgatctccctcgcagaatgagcatgatcgttcaccagttgttgatgtaaatttaccattttaaactttggtgtgattttcagcaagcaatgaatggaattagccaaatatcatttactgctgatgcaagtgtttctcccaaaaagcctacctctatccctgaggtagcaaagcagcgagagttaagtggctcattgcaaagagaatcagatgcaaagaataaaaagcaaatatcaaatgcaaagtataaggagatcagtggacatgacatctttgcccctcctgaaaataagccacgttcgttggctcgt

SEQ ID NO: 8421 - DNA, 1213 bp, Gossypium hirsutum
  Clone ID: GOSHI-09MAY01-C5533_1
cttgcatggaagtttgttagaagacaaacctatttccgaattgtctgaggcatatccatttgagtctacatggcgagtaatacaagcggttcgtcaggtgttgagtgcatactggccaacattagcagataaactgccaacaaaattgaccgatcaaaaagctcctcctcatattttactatcaagctctgaatccgatgatgaggatgatgaagcttcgaaaatcatttcaaaagacctagttcaagctattgaggacgttgtagaacccatttcgaagttgaagattgaagataatcatgatgaagtaaatagtgccctgtggagatcaaagctatccaagactgacatttggtatgccagtttcggatcaaatatgtggaagtcaaggttcctctgctatattgaaggtggacaggtcataggcatgaaaaagctgtgttctggttctgtggatagaaaccctccaaaggagactcgctggaaagcttttcctcatcgtcttttctttggtcgtgattttacacaaacttggggtcccggaggggttgctttccttgatcctcgaagcaacagtgaagataaagcatacgtgtgcctctataagatcacgttagagcagttcaatgatgttctgctgcaggaaaatgttcctgatcatgacatgaattctcctttatttgatctaaatgctttagactcaatactcaatgaaggttcaattcctgtggaggctgtcaagagaggttggtaccataacgttgtctaccttggaaagaaggatgatatacctatactgactatgacgtgtcccctctctgtgattgaaagctttaagtcgggagagattcctttatgtgctcctagcaaagattatgctgacaccttagtaagaggccttgttgaaggcaaacaactttcggaaggggatgcgacgacttacattcaggtagcaccccccaaccccttatgattgcttattgcaactctttgttcccatattttagatgcaaatttctgaagtaattacccattaatggtacagagctaacccattctggtccccccaattgccaatagatgatagggtaatccccccgctattatgtgtgatattgaccccttttgtgtatttaaattggtatttaacgcacctgtataactaacaaatattttgattgtatgttacccgaattcaagtgagggttggatt

SEQ ID NO: 8422 - DNA, 668 bp, Gossypium hirsutum
  Clone ID: GOSHI-09MAY01-C5483_3
cccttggttcactgcagtaagttcttgcaactcgcggagctttatacgagtaatccggattacaagtgtgcattgcaagttccatataggtcattggatgaagactttgggattgcagatccaatagttaaagttccggcgttactgataatgggttgcaaagattatgtacttgtaatttcttgggatgcaaaggttcatatagtttggatagactaaagaacttgtacctaatttggatataatatatttgcctgaaggaacccactttgttcaagagcaatcacccgagctcgtgagcgagctaattctggacttctcgcggagccatatgtgatagtgtgccgtgtctgagatttgaatggtgtttgtatggatatcaaacacagttactgtaatgtaattaggggacatcaggctgtgtgtatggttttattgactggaataaatcagagaccctctggtagtggagaccctgaatgcaggataccattaattttttgaatcaatttcatctaaaaattaatggtatcttgcattcagggtctccacacagtggtctctatttattccagcaaaaaccaaccaagctgtgcccctatacatcagaatggttaatccaacaaacaccatcaatctagaccggcacacatccataggccccggag

SEQ ID NO: 8423 - DNA, 547 bp, Gossypium hirsutum
  Clone ID: GOSHI-09MAY01-C5483_2
gattcaagactgcattacaagttccatataggtcatagcagcagcaggtcgaccataccatcagggtatagagttgtgtagaatgcaacgcttataagtcattcgatgaagactttgggataacagatccaatagttaaagttccggcattactgataatgggttgcaaagattatgtcttgaaatttcctgggatggaagaatacataaagtttgggaaggcaaaagaacttgtacctgatttggatataatatatttgcctgaaggaacccactttgttcaagagcaatcacccgagctcgtgaacgagctaattctggacttcctccggagccatatgtgatagtgtgccgtgtctaagatttgaatggtgtttgtatggatatgaaacccagttactgtaatgtaattaggggacaacaggctatgtgtatggttttattgactggaataaatcagagacccactggtagtggagaccctgaatgcaagataccattaatttttagatgaatttgattctccgcgttgggtggttatttttat

SEQ ID NO: 8424 - DNA, 1175 bp, Gossypium hirsutum
  Clone ID: GOSHI-09MAY01-C5483_1
cccacgcgtccgcccacgcgtccgcctatccggtttcctattttttcaacgaagcttccccgcgcgtccgcccacccgaccccccgcaaaaaaaacgaagcttagcacataacaatggatcaaatccagcacaacttcatcactgtaagaggtctaaaatttcacgttgcagagctcggtgaaggttctaacgtggtactcttcttacatggattccctgagatatggtattcatggcgacaccaaatggtagctttagcgaatgctgggttccgtactcttgcacccgattacagaggttacggactctccgacataccacccgaacccgaaaagacaacctttgccgacctcgttgccgaccttgttgctatcttagatcacctgggaattaataaggttttcgttgttgcaaaggattttggggtcaggcctgcttatctgttaactctgcttcatccccatcgagtgtcgtgtgttgtaacattgggtgtcccacatgttcctttggaacctcggaagtatcgagagtctctcacggagggcttctacatttcaagatggaatgaacctggacgagcggaggctgatttcggacgattcgatgctaaaaccgttgtgaggaacatctacatactgttctcgagaagtgaaataccaatcgcagatgaaaaacaaggaggtcatggatatggtggatgcttctgttcctcttccaccttggttcaccgaggaagatctcgcaacatacggagctttatatgagaaatccggattcaagactgcattacaagttccatataggtcattcgatgaagactttgggataacagatccaatagttaaagttccggcattactgataatgggttgcaaagattatgtcttgaaatttcctgggatggaagaatacataaagtttgggaaggcaaaagaactcgtccctgatttggatataatatattcggccgaaggaacccactttgttcaagagcaatcaccctagctcgtgaacaagttaattctgtacttacttcttagccattttgtgttagtgcgccttgtctattatttacttgctttctatcgtttcttttattattttctgactctttatcttatttttctattcttttatatcttattatttcttcttccttccttttttttttatt

SEQ ID NO: 8425 - DNA, 535 bp, Gossypium hirsutum
  Clone ID: GOSHI-09MAY01-C5453_2
atttgggtctcgccccactacgttttatatcaccgcccatatcctactcttcgttttccttattttccgtctgagctaggttttagtccaatctaaaggatccgctttttccgaagcgaccatggccaaccgtacggacccggcggcgaagagcattaggggaaccaaccctcagaatctggtcgaaaagatcgtgcgctcgaagatataccagaatacgtactggaaggagcagtgtttcggtctgacggcggagacactggttgacaaggcaatggagctcgaccacatcggcggaacttacggcggaaatcggaagcccactcctttcatgtgcctcgtcatgaaaatgcttcaaatccaacccgaaaaggatattgtcgtcgaattcatcaaaaacgacgattacaagtatgtacgagttctgggagccttttatctgcgtcttacggggatcgactccgatatttatcgttatttagagctcttgtacaacgattatcggaaagtaaggcgaaatcacctgatggaaatt

SEQ ID NO: 8426 - DNA, 531 bp, Gossypium hirsutum
  Clone ID: LIB3585-045-Q6-K1-F4
cccacgcgtccgcccacgcgtccgcccttttttttttttttttctttctttcccttcttctttgactctgggggagcattaccatccactcctttcatgtgcctcgtcatgaaaatgcttcaaatccaacccgaaaaggatattgtcgtcgaattcatcaaaaatgacgattacaagtatgtacgagttctgggagctttttatctgcgtcttacggggatcgactccgatatttatcgttatttagagcctttgtacaacgattatcggaaagtaaggcgaaaatcacctgatggaaatttcatgttgactcatgttgatgaggttattgatgaacttctcaccagagactactcctgtgatattgctctaccacgtattaagaaaagatggactcttgaatcgcttggtgtactggatgcaagaaaaagcgtgctggaagatgattctgaggaagaagaagagaaggatgagatggagcaagatggtttagaagaggaggtagctcatgaaaaggattattaccgagcg

SEQ ID NO: 8427 - DNA, 585 bp, Gossypium hirsutum
  Clone ID: LIB3585-045-Q6-K1-E6
cggacgcgtggggcacttgtcaaccgggggaatacatataaggagaatggacgagtaaatgaagccatgcacgagtacatacgagcaatcaacattaggccggcaatggctgaagctcatgcaaatttggcttcagcttacaaggacagtgggcatgttgaagctgcaataaaaagctacaggcaagcgctggttcttcgccctgatttcccagaagcaacctgtaaccttctgcacacattacagtgtgtttgtgactgggaggatcgagagaataaatttcttgaagttgaaggcatactcaggagacagattaagacgtcagttattcctagcgtgcagcctttccatgcaatagcctatcctatagatccaatgcttgcactagaaatcagttgtaaatatgcagcacacagctctgttgttgcttcccgttattctcttcctcctttcaactatcctgcacccttccctggggagaatgggaatcgacgccttagggttggatatgtgagtagtgattttggcaaccatcccctatctcatctcatgggttcagtgtttggcatgcacaacagagaaaat

SEQ ID NO: 8428 - DNA, 402 bp, Gossypium hirsutum
  Clone ID: LIB3197-005-P1-M1-H10
gcacacattacagtgtgtttgtgactgggaggatcgggagaataaatttcttgaagttgaaggcatactcaggagacagattaaggttcatgctcaatctgctacatcagttattcctagcgtgcagcctttccatgcaatagcctatcctatagatccaatgctcgcactagaaattagtcgtaaatatgcggcacacagctctgttgttgcttcccgttattctcttcctcctttcaactatcctgcacccttccctggtgagaatgggaatcgacgccttagggtgggatatgtgagtagtgactttggcaaccatcccctatctcatctcatgggctcagtgtttggcatgcacaacagagaaaatgttgaggtattttgctatgcattgagtccaaa

SEQ ID NO: 8429 - DNA, 699 bp, Gossypium hirsutum
  Clone ID: GOSHI-09MAY01-C5463_1
aaaagattctccttttctgtgtttcaatcccaactgccgaagactggttcttgaaccgaatttctgttaacattaaaaaagaaacccagaaatggtggagacattgccggttgggcggtttcagttgcaacaacaaaggctggaacttaagagatggattccggcgtttctttcttcgcataaaacgctctttgttctcctctggatcgcagctttcggttcggtttttttctggcaatggaatatcggtgggagtgggttttcgatattcgccaaagttggaccgggtcggcctatgcccaagatgcgtcctttcgcgtttaatttgactgatttcggtggggtcggggatggggtcgccgatgaaacggcggcgtttgagagggctatcttggcgatttccaagtttgggaagagaggtggtgcgcagctcaatgtgccgcctgggaagtggcttacggcaccgtttaatcttactagtcatatgactttgtttctagctgaagatgctgagattcttggaatccaggacgagaagcggtgggctttaatgcctccattgccttcatatgggtacggaagagagcataatggatctcggtatgggagtttaatccacggccaaaacctcagagatctcgttattactgggcataatggcaccataaatggacagggtcaatcatggtggaagaagta

SEQ ID NO: 8430 - DNA, 603 bp, Gossypium hirsutum
  Clone ID: GOSHI-09MAY01-C5413_1
ggtactggctttatggcggagtgtactagaactgcttatgttagttctggaacagaattatatattaagaggaagaaagacagattacctgttggacaagtagtagatgtccctcctagagagtcgtctatcagactaagagttggagatttactaattatttcacgggatagtacatgtggcgaggataattcctatgggcacgcaagtggtgcttatagaataacatgttcatcgggctatctctttgatgcagtcaaacctggagagcgcataacttttgatgatggaaagatttggggagtcataaagggaactactatttcagagattgttgtctcaatcactcatgctggcctaagagggactaaacttggatcccagaagtccatcaacatcccagacagcaatattaggttcaaaggtgtaacttcaaaggatctagtggatcttgaattcgttaagtctcatgcagacatggtgggtgtttcatttattagagatactcgtgatattatagtgcttcgccaagaactggaggaaaggaaactttaaaacctggggattgttttaaaaattgaaacaaaaagtgggtttgaaaag

SEQ ID NO: 8431 - DNA, 763 bp, Gossypium hirsutum
  Clone ID: GOSHI-09MAY01-C5433_1
atgaagatgactcaacaattgaagttgatcacaacactggggcttcaagtcacaaggtatcaccatcttcttcacttgccccaactcctaaggcttctgcaagggtactagttccaggtagagcaaaagaaccagacactggtggtgttacagaaaaatctagttcaagctcccctggaaatgttctgggccttgcaaattatgcctctgatgatgaagatgatgaaattcaaagtgccaggccgccagattcaaggagtaatgatgctgttctgcagtccagcattaggaagctttcacaaggcattgatgtaacagagaatggcagttcacaggtcgtacttgatgagcacaggcgagttgaaaagaattttggaagtgatatgaagtctgaaagcagaagagacactactgatgacagtgcagagaggaactatgaaaattcattttcttccaagttgatttctggaaatgaaattaatattaatagtgggaagctgcagtatggaaataatggttctaagatggatgatattttgggcgcacgggttataaaaaaatctgattctgagctgcttgatgaaggtgttgttaaaaaatcaacaaaatctgaatcgcaaagtagggaaacaagactaaaatcagataagaatgatcgacatgaaagtagaaagagttctttaagtaaagaccctgatagtggtagggagttggaggtcattaagaggaggggagagcagaaaggagatgagaatcatatgag

SEQ ID NO: 8432 - DNA, 623 bp, Gossypium hirsutum
  Clone ID: GOSHI-09MAY01-C5793_1
gtcgacccagcgtccgtgttatttctaaccattctaaacagataaaccctagccttaaaatccctaaaattgctacatcgtttcgtttctagttctttttcgcaatggatggcgaagacgacgccccgaaatcattgatggaggagatgtacgcgaacggcatcgagggcgttgacgatgcgccgtcatcctcaacttcgacaacgatccggaagaaccggcccatcattagcggcgagcagctagacatcgaggcctacgctgcgctttactcgggccgtaccaagatcgtgcggctcatattcttagctgaccactgcgacaattcagggatgcaattggaggccctaaggatggcttacgatgagctcaagaagggggagaacactcagctattccgtgaagtggtccagaagatcgacggtcgactgggtcccaactattcgacggatgccacgtggtgcgctatggttgatcgaaaagccgaccaaaggaaagataaactcgagagcgaactcaatgcctacaggacgaatttaatcaaagaaagtataagaatgggatacaatgattttggagatttttactatgctcatggcgcactgggggatgcttttaaaagc

SEQ ID NO: 8433 - DNA, 641 bp, Gossypium hirsutum
  Clone ID: GOSHI-09MAY01-C5733_1
gtcagtctctgctgaggttaaggacttgttgaggaagatgatttgcagagatgtttccaggagatggtctgctgaacaagtcctgaggcacccatggatcttgaatggaggggaaacaatttcaatggactgatttaatcaaagtgttggaaagagcattaattagagcttattaggaacaccccctcccccttgcccccttccccccaccgccccaaaaaaaaaaaagaaaaaaaagaagagagcttatcaatgtaaatattaggcactgtctgcatatcaagaatcctcataagaagggtcccccaagtaagcatctctacaaagcaaaagtcaaaatcaagcaaagcttccagtttttgcaaggccatggaagttacacacaagagagcagagtttcatcacatgggggggtccaaaccaaccaccatgatcaacctaccggtctttattaatatcttttttggttttttgtttttgtttttggttaatgtttttaagaactaagcatatagagtgtacatagataaaaacagtaagttgagactccacctcctgtacttgggggttttttattaatgaaaggtcgatggaagtgagaaaagcccccccttttccaaaaccatagaaaaatgagcctg

SEQ ID NO: 8434 - DNA, 757 bp, Gossypium hirsutum
  Clone ID: GOSHI-09MAY01-C5723_1
tcactactcactagtcgactcgcaactgataggactgagttaggtataaccaccaaaaaaaatttcctaagtaaaaaagagatggctccctcttttgtaactaacggcggtgtggccgccgttaaaacgactccgttcgcaggacgtctcgcctccgtttacagcgaggtccaaacgagtcgtatcgaccacgctcttcctgtaccttctgttctcagaagccccttcaaaattgtcgatggtcccgctagttccgccgccggcaaccctgatgagatcgcaaagctgtttccgaatatgttcgggcaaccctcgtctatgctggtgccgaacggagtagacaatattggatctgatcagaagctaaagatcggcgtcgttttgtctggagggcaggcacctggaggtcacaatgtgatttgcggaattttcgattacttgcaggagcgtgctccaggtagcactttgtatggttttaagggtggtcctgctgggatcatgaagggaaaatacgtagaattgactgcagattatatttacccttacagaaatcagggtggctttgatatgatctgtagtgggagagacaagattgaaactcctgagcagttcaagcaagctgaagaaacagcagcaaaacttgatccggatgggcttgttggtattggtggggatgactcaaacacaagggcttggcctcctggtgaaaacttcaagaggaaaaatctgaaaactcgagtgattggatgcccaaaaa

SEQ ID NO: 8435 - DNA, 687 bp, Gossypium hirsutum
  Clone ID: GOSHI-09MAY01-C5643_1
ttcacgtgtccgcaatccatttacaggacttgccttattaagcacgacagaagaatctccccttccacaggtacgaacaccattcatatcttcctcctgtcgacgtatctccaaaccaaactctacaatctcgacgatggctcactctcattctacccaaaacccagtgattgagcagcagagaatgataattccgaacaagcatggtgaaaaactggtgggattattgcatgaaacagagtctaaagagattgtaatcttatgccatggtttcagatccagaaaggattacaatactatgacgaaccttgccgctgctttagaaatagaaggaatcagtgtcttccgtttcgattttgctggaaacggagaaagtgaaggttcatttcagtatggtaactattaccgagaagctgatgatttacacgctgtaattcaacacttctcaggggaaagtcatgtcgtaagtgcaattcttgggcatagtaaagggggaaatgtggtgcttctttatgcttctaagtatcaagatatacgtatagttgtaaacatttctggccgctacgacttgaagagaggcattgcagaacgcttgtgaaaaaactttatggaaataattaataaggatgtccaacattgatgtgatagaataaaaccagagtgctatgaataaccgtatcaatttac

SEQ ID NO: 8436 - DNA, 353 bp, Gossypium hirsutum
  Clone ID: LIB3120-022-Q1-K1-A3
tcgatttcgtttcttttataactttattatggttccattttgtttttaatgtaaagaatgtttttttgatagaattaatgtaaagaattttgaaaataaaaaaaaggaccctttttttttctacattttagtgattgagcagcagagaatgataattccgaacaagcatggtgaaaaactagtgggattattgcatgaaaccgagtctaaagagattgtcatcttatgccatggtttcaaatccacataggtcagttgcgtcatttcatctctatcaccttgctttcattagcaaatatattacgtggaaatgcctgttcatggaggaatagtaatcatttatggaaagcagc

SEQ ID NO: 8437 - DNA, 644 bp, Gossypium hirsutum
  Clone ID: GOSHI-09MAY01-C5163_2
cccacgcgtccgcccacgcgtccgtaacttaatagaagttgcaggtagaagcgtggggatttactttgtaaagctgatgtatttcaatcttttaggtcaatgcttttagagaacgaagggcacttgccttgacactgaatgataccaaaacagctgtgaacaggcttcatcggatggtggacgttttggttggcatcatcatagtggttatttggctcctcatacttgaaatcgcctccagcaaagtccttgtttttattagctctcaactgcttctaggtgcattcgtattgtgggaacacctgcaagacggtattcgaagctattatattcttgttcggtatgccccccttcgatgtgggtgacaggtgtgaaattgatggagttcagaaagaattcattttgaagattgatgacagaagccacgacggtagtatttctactccttccggtggagcaactgccggcgatggaggtaagatttggggtgagccaagctatgatttttgcaaagacggtgagaaaatcaacattaactggaaaaaggagaatgccaactcctcctcctgctaccccaccaccagctccattggcttctcctccagccacagtcccagctatctctccagtacaaacaccattgt

SEQ ID NO: 8438 - DNA, 996 bp, Gossypium hirsutum
  Clone ID: GOSHI-09MAY01-C5163_1
catctatttggaggacattgaacgttttctgcaagaagatgaggccttgaagactatgagcttctttgaagaagcatctgaaagcaagagaattagcaagaaagccctcaagaattgggtggtcaatgcttttagagaacgaagggcacttgccttgacactgaatgataccaaaacagctgtaaacaagcttcatcggatggtaaacgttttggttggcatcatcatattggttatatcgcccagcgtccggctcctcatactggaaattgcctccagcaaagttcttgtttttattagctctcaactgcttctagttgcattcgtatttgggaacacctgcaagactgtatttgaagctattatattcttatttgttatgcacccattcgatgtgggtgacaggtgtgaaattgatggagttcagatggtagtggaggaaatgaacatcttgactactgttttcctaagatatgacaaccagaaggtcataatcccgaacagtgtcctggctaccaaggccatccataactaccatcgtagcccagatatgggtgatgccgttgaattttgcatccatgtgaaaactcctgcagaaaagattggtctaatgaagcagagaataatgagttacatcgagcacaagagtgaccactggtacccggatccaatgattattttcaaggaacttgaagagttaaacagagtgaggatagcaatatggctcacacacagaatgaatcatcaagacatgggagagaggttcacaagaagagccctcttgatcgaagagatggttaagattttcaacgacttggatatcgaataccggttatatccaattaacatcaatgtgtgtatcgtgcctcccatggcatctgatcggcttcctcctaagtggaccggaccagccagctgaacaaaataacaagctagctgtaaaccatgtcttcaatgtcaaagctgtgagtagattttactacttgtgacattgtt

SEQ ID NO: 8439 - DNA, 334 bp, Gossypium hirsutum
  unsure (1)..(334): unsure at all n locations
  Clone ID: LIB3584-031-P1-K1-G6
caagtngttaactctgtatatcgaaaccntctttctcgattttctctttagccaaaaaagattcatatcttcggcggtactctaaccaacaagacgatcactctcgaggtcgatagctccgacacgatcgacaacttgaataccaaaatccaagataaggaaggcattcctccataccagcaacttttgatcttcgccggaaaacatcatcaagactgccggaccttggccgattacaacatccaaaaggagtcaactctccacctagttcttcatttgcgcggttgtatgcaaattcttcatgaaaaccttatccgtcaagacaatcaacttt

SEQ ID NO: 8440 - DNA, 229 bp, Gossypium hirsutum
  Clone ID: uC-gsflmaxxa090e05b1
tgattttttctttctcgattttctctttagccaaaagagggggcatatttaagtcaagactctgatcggcaagacgatcactctcgaggacgagagctccgacacgatcgacaacgtgaagaccaaaatccaagataaggaaggcatcccttcaaaccagcagcgtctgatcttcgccggaaaacagcttgaggacggccggaccttggccgatttacaacattcaaaa

SEQ ID NO: 8441 - DNA, 881 bp, Gossypium hirsutum
  Clone ID: GOSHI-09MAY01-C5073_1
ggataacagatttacctccgccgctaaggctggcggccggacagatttgcgtcctcttcccaacacaatcctaatactgtgattagttgtttctttctcttaatggaggggtatctgcaataatagatggggaattcattggccaagaaacccaacatcaccgaactcgatcgagcaattctctcgctcaagactcagacacgcaagcttggtcaataccagcaacagctggaggctgttatagaagcagaaaagcaagctgctagagacttgattcgtgaaaagaggaaggatagagctttgttagctttgaagaagaagaaagctcaagaagaactattgaagcaagttgatacctggcttattaatgttgagcaacaattggcagatattgaactagcaagcaagcaaaaagcagtttttgatagtttgaaagcaggtaacaatgcaattaaggcaatacaaagtgagatcaacattgatgatgtgcagaagttaatggatgacaccgaagaggctaaggcttatcaagatgaaattaatgcgatcttgggggagaagttatcagcagaagatgaagaggagattttggcagaatttgagaacttggaaactcagatggccgttcaagatatgccagaagtgcctagtaaagcaggatctgaagaacaaaagttggatcttcctgatgtgccaaccaagaaaccagttgcttccaatgcagctacagatgatgctgaaatttccacaaaaagaagagttacggaggaacccctacctgcatgattgagaaaaagacgtgctgtttcatgataaggagcttgcgattattaattaccattttcccgcttgcttcgcctatatttaaactgatctggtta

SEQ ID NO: 8442 - DNA, 408 bp, Gossypium hirsutum
  Clone ID: LIB3585-044-P1-K1-C12
cccacgcgtccgaagactcatagacgcaagcttggtcaataccagcaacagcatggggcggtaatataagcagaaaagcaagctgctagagacttgattcgtgaaaagaggaaggatagagctttgttagctttgaagaataagaaagctcaagaagaactattgaagcaagttgatacctggcttattaatgttgagcaacatgtaattgaaacctgaattttcatggtgtttgattttgattaattttgtttattatttgatatttttgctaagtttaatttctatgcaattctttttgttgattaatgtaataaggttttgtcctaatttcaatattatacttttttatgactattatacaaaactagattttgacatttgttattaactatttttacttataca

SEQ ID NO: 8443 - DNA, 514 bp, Gossypium hirsutum
  Clone ID: LIB3584-030-P1-K1-A7
gtcattttactacagtattactgagctttcactccttctactccttcaactttttctgctatttggaaggcgatcttacatttgctttaaacctgtggttaacagaggtggacgtgctggtggttacaaagaacttgatgaagaagagatagaggaaacaaggcgacgtctacgtgaggcagaagaagtcaaaatacatctctgttatcattacttgaagcttagttcattgaatatcttaatttgatggtaattatttatgtgttaatctcaggataatggtgaggtgtatgatgagtttggcaatctcaagaaaaagttccgagcaaaaacacaacaagctgaagctgctcgagtgctaccaggttcatgttgtgctggctgggaggttgatgaactaggtattgggttcattatgttgacaactacttcatttggcattgcattgttttaaataccgattgtcatacatgtcaaggttatttaaataactggacaaacttgaaatgaaaga

SEQ ID NO: 8444 - DNA, 407 bp, Gossypium hirsutum
  Clone ID: LIB3145-053-Q1-K1-A12
tgattggcctttccctatgtgtggtaacatcaactgggctaagcgtatgaaatgcaatatttgcaacactaataaacctggtcacaatgagggtggtgtgagaggtggacgtgctggtggttacaaagaacttgatgaagaagagatagaggaaacaaggcgacgtcgacgtgaggcagaagaagtcaaaatacatctctgttatcattacttgaagcttagttcattgaatatcttaatttgatggtaattatttatgtgttaatctcaggataatggtgaggtgtatgatgagtttggcaatctcaagaaaaagttccgagcaaaaacacaacaagctgaagctgctcgagtgctaccaggttcatgtcgtgctggctgggaggttgatgaactacgtgtaattg

SEQ ID NO: 8445 - DNA, 585 bp, Gossypium hirsutum
  Clone ID: GOSHI-09MAY01-C5033_1
tgataaactggaaactgatttcttgaaaatacatcttcttggttttaatatcagtaatgatcgcgtcggggactgacttgtctttcttcattgactggcatttcctcaaaactgtgcgtgaatcccccattaacgttactaagggaaaacccaacgaagctcctaggttaattgcataaaagtcccgcataagcctcgctgcaaaaagagatggaacattggtgttaagaaaggtccttgttgttaacagtttccccgttcgattccaaaccaccacgctcgatcccgatttgaaatttctcttaatcgaaagctgcgtcgaattgaatcatgaccctgcaataggtggcttgctgactatggcttctgtctgtattcacgagccccaaacgacctacagcctgcaccagaatgtacgacactgtttcggggtacttctcttaaagagccagtgccgaaagacgtgggagttgtcttcttccccaagaccgtacctaaggcatactgtaaaatcagccactcatttgtactttaaattaactagagtaggaatttagttctaggatatcctccatattgaaatta

SEQ ID NO: 8446 - DNA, 543 bp, Gossypium hirsutum
  Clone ID: uC-gsflmaxxa003d07b1
tctttctggcagggccaacactgtttggacatgtgatcaacatagcttccgtagttgcctgtgactctctttccactggtgctaaaaaatactttgttttgttgataatcacggatggggttataactgacctccaagaaaccaaagatgccctcgtaaaagcatctggtctcccattgtcgatcctcattgttggagttggaggagctgacttcaaagaaatggagattttagatgcagacaaaggagaaagacttgaaagcacaactggatgtatagcttcacgtgacatcgttcagtttgttccatttcgggatgtacagagtggagaaatttctatggttggagcacttctagcagaattaccaacacaatttttaacctacatgcgacgcagagatattaaaccaagcacttaattttttgtgtatatatatattttctaacttcctttcacgccttgagtttgcctcttatcaatgcaaccatggccttttttaaataaagaaaaagataaagagacatgtcgatacggtgcattaa

SEQ ID NO: 8447 - DNA, 359 bp, Gossypium hirsutum
  Clone ID: LIB3584-039-P1-K1-H6
tacgcgtcacgcgtctagatcgatcctcattgttggagttggaggagcagacttcaaagaaatggacattttagatgcagacaaaggggaaagacttgaaagctcgaccggacgtgttgcttcacgtgatattgttcaatttgttccatttagggatgtacaaggtggtgaagtatctattgttcaagcgcttttggctgaattaccgacacaatttttaacctatatgcgaagcagagatattaaacccaggatttgattttgtaaaagcattgtaaatatcaaaatccatttattctgttttcgttttcacacctgagtttgtctcttatcaagtgtcataatgtttcagttttttg

SEQ ID NO: 8448 - DNA, 660 bp, Gossypium hirsutum
  Clone ID: GOSHI-09MAY01-C5353_2
atcttttctcttttccccattcagaaaaatccaatatacccaccaatgaatatgcaagagcagtatttatccttgatcagcaacccataaggtttcttttctgtttttgtttctctgtcaatcaatcaaccatgacaggcaaagccaagcccaagatgcacactgccaaggaaatcgcagccaagatcgatgccgccactaccaaccgaggcggtggcaaggctggattagctgaccgttctggggtggagaagggtggacatgccaagttcgaatgtcctcactgcaaaacaactgctccagatttgaagactatgcagattcatcatgatgccaagcatcccaagcttccttttgaagaatcaaagcttgtgaatcttcattctactcatggtgccgattcttccaagcctcgtcccggtgttaggggtagtttaaaaaagtgatattaataaataaatttagccgttttctttatgatttggtgctttgcggttgtttttgaatcggggtttggtttcttaactattagttctagtaggtttgggtaaaaaaagatgatgatgataatgatgtatgttaacccaccttgaatatgatgatgatgttgactgtgttatagcttccttatttaattctaatgaagtgtttttggatcat

SEQ ID NO: 8449 - DNA, 680 bp, Gossypium hirsutum
  Clone ID: GOSHI-09MAY01-C5353_1
cccacgcgcccgcttttacgccccccttttatttagggtttttgattccttcatctttatcttcgatcaatcaaccatgactggcaaagccaagccaaagaagcacacagccaaggaaatagcggcgaagatcgacgccgccacaaccaatagaggcggcggcaaggccggatttgctgaccgttcgggtgtggagaaaggtggacatgctaagtacgagtgtcctcattgcaaaataacagctccagatttgaagtcgatgcagattcatcatgatgccaagcaccccaaggttccctttgaagagtcaaagcttgtgaatctacatgctgttcatgtggttgagacttccaagcctcgtcctggtgttaggggcagccttaaaaagtgataaaaaaccccaaaaaatgtgtttttcgtcaagctttggtgttttgtgatgtttcgaaatatgggtttggttcctttttcatcttttaattgtttgtcacgcttgcagtagagatgggaatgagaaaggggttggggtgaaaaaagttggattattcttgtaagggtcccccttgatttgatgtcgatgatgaatggtgttgttatagcttcctcatttaatgctaatgaagtgtttgtgcaataaatgttgtgctcgtttttcttattactattattaacaaatcata

SEQ ID NO: 8450 - DNA, 499 bp, Gossypium hirsutum
  Clone ID: uC-gsflnu33B070f02b1
agcaagagcagtaaaaatccttgatcagcaacccataaggtttcttttctgtttttgtttttttgtcaatcaatcaatcatgacaggcaaagccaagcccaagaagcacactgccaaggaaatcgcagccaagatcgatgccgccactaccaaccgaggtggtggcaaggctggattagctgaccgttctggggtggagaagggtggacatgccaagttcgagtgtccctcactgcaaaacaactgcttcagatttgaagacgatgcatattcattatgatgccaagcatcccatgcttccttttgaagaattaaacgcttgtgaatctttattctactcatggtgctgattttttcatgccttgtcccggtgttagtggttgttttcttttttatatttccccatatactcatttctttttctttttactttattttcttctctctcctttctttttcttatctttctcttaatattcatctttttccatcttcttta

SEQ ID NO: 8451 - DNA, 482 bp, Gossypium hirsutum
  Clone ID: uC-gsflmaxxa098a01b1
cctttttgtccgcccacgcgtccggggtttttggtggcttattaaaatctgtagtggtatattcaatcaatcaatcatgactggcaaagccaagccaaagaagcacacagccaaggaaatagcatcgaagatcgacgccgccacaaccaatataggcggcggcaaggccggattagctgaccgttcacgtgtggagaaaggtggacatgctaagtacgagtgtcctcattgcaaaataacagctccagatttgaagtcgatgcagattcatcatgatgccaagcatcccaaggttccctttgaagagtcaaagcttgtgaatctacatgctgttcatgtggttgagccttccaagcctcgtcctggtgttaggggtagccttaaaaagtgataataaaaaaacccaaaaaatgtgtttttcgtcaagctttggtgttctgtgatgtttcgaaatatggtttggtcctttttcatcttttaat

SEQ ID NO: 8452 - DNA, 419 bp, Gossypium hirsutum
  Clone ID: LIB3149-001-P1-K1-G5
ggcaaagccaagccaaagaagcacacagtcaaggaaatagcggcgaagatcgacgccggcacaaccaatagaggcggcggcaaggccggatttgctgaccgttcgggtgtggagaaaggtggacatgctaagtacgagtgtcctcattgcaaaattctaaatatattttaaaggatgaaaatgcacagcatggtggagataatagctcaagatatgagatggtatttgatggggatgctcccgagactcctcagcaaggaaaaatggatctgtcccatgagtctgatggcaatgagcgcagatacaaaataaacaggaaaagttctcatactatggaggggaaagacttcaatgataaggataaacagagaaacagaagtagagattacagagcggatatgagtcgatctggtgggtgg

SEQ ID NO: 8453 - DNA, 883 bp, Gossypium hirsutum
  Clone ID: GOSHI-09MAY01-C5373_1
aaaaagttgaaaaaaagccaacccaaaattaaaaaaagagccgccttttctattttttttgctgcttttcgccaaggaagcttttttttttcccccttttactactgttattcttcatttctctctacttaattgagaggaaaggaaaaaggttgaaattttggaagatgaacggttttcagcctcctcgaccagatttggctgatgaagctaatcatggtgatggtttcattagaacttataaagcttggaaaggcagcaatgtatttgttttgggaggaagatttatatttggacctgatgtgagatcccttttcttcaccatcttcttaattgttgctcctgttgctgtcttctgcgtctttgtagcaagaaaattaatggatgacttccctcatcacctcggaatatcaataatggctgttgttgtggctctcactttatctgatataactcttcttctactagcctcaggaagagatcccggtataattccacgaaacttgcacccgcccgaacctgaaggttatgaaggaatgactgaagttcggcctggccaaactccaccattacgattaccgcgtacaaaggatgtgattgtcaatggtataagtgtgaagatcaaatattgtgatacatgcatgctgtacagacctccccgatgttctcactgttctatatgcaataactgcgttgacagattcgaccaccactgcccttgggttggtcagtgtatcggactgcggaattaccgattcttcttcatgtttgtcttctctacaactctactttgtttatacgtgcatggattttgctgggtttatatccggaagatcatgaatggcgaggaggctacaatctggaaagcgatgactaaaacccc

SEQ ID NO: 8454 - DNA, 814 bp, Gossypium hirsutum
  Clone ID: GOSHI-09MAY01-C5363_1
cggacgcgtgggaaagtacaacaaacagtaaatgagaggtttggtaaatgcttgcttgaactaagtggaaacaatgcaataattgtcatggatgatgctgacataaaattagctgttcggtctgtactatttgctgctgttggtactgctggtcagcgctgtaccacatgtcgtagactgcttcttcatgaaagtatatatcggactgtagttgaccagctacttgatgtgtacaaacaagttaagataggggacccattagaaaagggtaccttgcttgggccattgcacacttcttcttcaaggaagaactttgagaaaggaatagagataattaagtcacaggggggaaagattcttactggtggcggtataatagagtctgaggggaactttgtgcagcccacaattgttgagatttctccagatgccaatgttgttaaagaagagctgtttgcaccaagttctttatgtcatgaaatttaagactttgaaagaagcatttgaaattaaacaactcttgttccctcggggggtgcgggcaagtcccattctatctaataaacctttgtattcatatacagagggatggcccccaaagggaaaacccttgtttttaatagggaaaccacaccaccagggtcgaaaaaatggtgttcttttggagaacaccctaggaggggcaggaatcgtgagtatttttgagataaattctggcaaggtaacctgcacataatataccgtaggattccgttgcacaagaaatatctggtagatatccactgggagcgcaggaactattgttttccaaaag

SEQ ID NO: 8455 - DNA, 912 bp, Gossypium hirsutum
  Clone ID: GOSHI-09MAY01-C5333_1
gatctctctctctctctctcttcgtctctctctctctctctctctctatctttataaaaaaacctccggctattggggtttttggtttcgtagattcgtttcgcttcatttttgtctcgttttaaacagtaatttccttctttttttttcattgtttttttcttggaatttttgaagtgtttaataaaaaaaaatggcgttagtttcattcgtcgggagggttcttttcgcttcagtgttcatcctctctgcttggcaagagttcaatgaatttggtgttgatggagggcctgcagctaaggcactcaaaccaaaattcaatgtcttctcaaagactgtgacagctcatacaggggtggaagtaccagaatttgatattaaggttctagttgctgctgctgtagccttcaagggtgttgggggtatcctttttatctttggcagcactatcggtgcttatcttctggctctgcaacaggtaattgttactaccatattgtacgacttctacaactatgacacggaaaagaaagaatttgggctactcttttcaaagttctcacagaacttggcattgctgggggcattactcttcttcatcggcatgaagaactcaatccccagcagacaactcaagaaaaaggctcctaaaaccaaaacagtttgaaggaggaacatctggtaaaccaagggtctattgctcaatctctacgttttccttagtcaacccagatttattttttgtatgctttgtatcaaggctttgttcttcaatattaggtggggaaaagggcatactactttcattatgatactgttaactaagttgatgctgatttaattgagtttgagaattttatctcctaataaataaatatactcattatttttttattttaaaatttaaaaatt

SEQ ID NO: 8456 - DNA, 444 bp, Gossypium hirsutum
  Clone ID: LIB3135-049-Q1-K1-B10
cggacgcgtgggccagaatttaatattaaggttctagttgctgctgctgtagccttcaagggtgttgggggtatcctttttatctttggaagcactatcggtgcttatcttctggctctgcaacaggtcattattactcctatattgtacgacttctacaactatgacacggaaaagaaagaatttggcctacttttttcaaagttctcacagaacttggcattgctgggagcattactcttcttcatcggcatgaagaactcaatccccaggagacaactcaagataaaggctcctaaaaccaaaacagtttgaaggaggaacatctggtaaaccaagggtctattgttcaatctctacgttttccttgtatcaaggctttgttcttcaatgtttaggggggaaaaaaggcatactactttcattttgatacttgtaactact

SEQ ID NO: 8457 - DNA, 697 bp, Gossypium hirsutum
  Clone ID: GOSHI-09MAY01-C5253_1
cccacgcgtccgcttttgctctaataatcccttcagccctagcaatttgcatatcttagaagttgtcagcacccaccaaagagaaagggtgacgtctgaatcttgaacacccaccaaatatggaaggaggtgaaagagggagctcagccatccctgaatctgtgatgaattcagtgaagacaacgctagtaaacgttgaaaacctaaggacccatttgctcgaattcttgtccctctctgaccccgatgtccttgctcaaatgccccctcttcaacgcgctcaggctttcttcacccttgccaaagccaccactactcttttcgctttgaagttgagatgcagtggagtgcacccagatgaacatcctattaaatcagagcttgagagattaagcttgtatcaagagaagctagagcggttcatagacttaagtaaagcaccgttgcgaccttcaaccaccttgaactctcaggccgcaacccgtttcattgagcattcgttaccagacctgacccctgtgcagaggcaaagtatgaggcaaatcagtaaaggggaggggccaacgataaaatgttctggtagtaatgttaaaaagaagagaaaatatcaatcctctgaaaaacaatctgttgaagatgctgctaaagaattcctggggcgcagctcgtgagctttttgtgataaaaagatggttta

SEQ ID NO: 8458 - DNA, 514 bp, Gossypium hirsutum
  Clone ID: LIB3585-034-P1-K1-B9
acgcgtcgcgtaacaattctggcttgagctctaagaatctaattaatgccctagcaatgtgcagatgatcacccttgagagctcacaccgcgaatcattcgaggctgatgaatcgggggcagtcggagtcatatggaaggaggtgaaagagggagctcagccatccctgaatctgtgatgaattcagtgaagacaacgctcgtaaacttagaaaacctaatgacccatttgctcgaatacttgtacgtctcttacacagacgacctgactcaaatgccccatgttcaacacgctcacccttgcctagtcaagccaagcaaccatctctctttgagctcattatggcagaggcctatttgaacatcacaggctagctggatctcactcatagcttgagagattaagcctgtatcaagagaagctagaacggttcatagacttaagtaaagcaccggtgcgaccttcaactaccttgaactttcaagccggaacctcgttcattgagcatttcgtt

SEQ ID NO: 8459 - DNA, 565 bp, Gossypium hirsutum
  Clone ID: GOSHI-09MAY01-C5243_3
attcaatctcccccaaaataggcaataacatgtttttgcttccataaattcattattcttctctgttttccgagaaaattgagaaggaacggtttttgaaatctctgtgagcttaagatattgttttggagttgaggtcaccaagtatacgactcctcacaattcaggctccgacatttcagcttcagtctgcagaatcaggaaatggttaacaggtatggagtgttttgatgcgcggagaatatcatgttgcagtgcttagacggattgaagcatttatttgcttctgtattgcactgttgtgatattgatttgtgcaagcaatccagaggtctcgaggatcctgaacttcttgcaagagagacagtttttagtgtaagtgaaatagaagcactctatgaactcttcaagaagataagcagtgcagtgatagatgatgggctgattaacaaggaggagtttcaattggcgttattcaagacaaacaaaaaggagagcctgtttgcagatcgggtgtttgacttgtttgatacaaagcataatggaattctaggtttcgaaaagc

SEQ ID NO: 8460 - DNA, 1085 bp, Gossypium hirsutum
  Clone ID: GOSHI-09MAY01-C5243_2
gttttcttttctctgtttgtttctcgagaaagtacctaacttttttcttttcttttttgaaaatctacgtgagcttaaaaaattcagattcttacattttgagcttcagtgcagaatcaggaaatggttaaaaggtatggagtgttttgatgtgtggaagatatcatgttgcagtgcgtagctggtgtgaagcatttatttgcttctgtactgcaatgttgtgatattgatttgtacaaacaatctagaggtctcggtgatcccgaacttcttgcacgagagactgtgtttagtgtaagtgaaatagaagctctttacgagctgttcaagaagataagtagcgcggtgatagatgatgggctgattaacaaggaggagtttcaattggcattattcaaaacaaacaaaaaggagagcttgtttgcagatcgggtatttgacttgtttgatacaaagcataatggaattctaggttttgaagagtttgctcgtgcgctctctgtcttccatccgaatgcacccattgacgataagattgagttctcttttcaactatacgatctcaagcaacaaggtttcattgagaggcaggaagtgaagcaaatggtagtggctacgcttgctgaatcaggcatgaacctttcggatgatgttatagaaaacctttgaggaagctgatacgaaacacgatggaaggattgacaaggaagagtggagaagccttgttttacgacatccgtcccttctgaaaaacatgaccctgcaatacctcaaggacatcacaacaacattcccgagcttcgtttttcattcacaagttgatgatacctgaatgcaactggattcaaagcttgttcctatccgtggaggtatcaaatcaaaatggccaaaagagccgtttgccgttcgacgttcgagtctcggacatgctggaatccagtgttttttttcccctcaatggtgttacaatgtaaattttattcttttttcaaaaggattcttttcatttttattttcgatatggaaccacttagtagtggatgtaaataaacttggatgtggcaaataaattacttttcaccatc

SEQ ID NO: 8461 - DNA, 1308 bp, Gossypium hirsutum
  Clone ID: GOSHI-09MAY01-C5243_1
cgacccacgcttttttatcgtgttctctccccccaattaactcacacccagtttcatagattttctgtactaccccaacattactctctccagattcttacattttgagcttcagtcagcggaatcaggaaatggttaaaaggtatggagtgttttgacgtgtggaagatatcatgttgcagtgcgtagctggtgtgaagcgtttatttgcttctgtactgcaatgttgtgatattgatttgtacaaacaatctagaggtctcgatgatcctgaacttcttgcacgagagactgtgtttagtgtaagtgaaatagaagctctttatgagctcttcaagaagataagtagtgcggtgatagatgatgggctgattaacaaggaggagtttcaattggcattattcaaaacaaacaaaaaggagagcttgtttgcagatcgggtatttgacttgtttgatacaaagcataatggaattctaggtttcgaagagtttgctcgtgctctctctgtcttccatccgaatgcgcccattgacgataagattgagttctcttttcaactatacgatctcaagcagcaaggttttattgagaggcaggaggttgaagcaaatggtagtggctaccctggctgaatctggcatgaacctttcagatgatgttatagaaagtataattgacaagacctttgaggaagctgatacaaaacatgacgggaggatcgacaaggaagagtggagaagccttgttttgcgacatccatcccttctgaaaaatatgaccctgcaataccttaaggacatcaccacaacgttcccaagctttgttttccactctcaagttgatgatacctgagatcagcaattcgattcaagcttccatagaccggcttgtttcattctagacagtatggtggtttcaaatatgaatgcccccaagagcgtagtgtatgtgatattctggtttattggttaaaaacaattcctagtgtgggtctaaattcaacaagagttgaacaatcgtcatcttctttttcttcttcttgtcagtgttattggataattggtacttccagacgtgctgaaatatttaggttgtatttttcactatggtattgcaatgtaaaaagtgatgctccctttggttttttatttttaaaataaaaaaaaaaaaaaaaaaaaaaaaaaaacaatttaaaaaaataaaaaataatatacaaataaattaaacataaaaaacttttatataatttaaacataaattaaattttaattatcaaccttctaaaaaaaatattactttaaaaac

SEQ ID NO: 8462 - DNA, 555 bp, Gossypium hirsutum
  unsure (1)..(555): unsure at all n locations
  Clone ID: LIB3828-001-Q1-K6-A8
ctaaatctgatttagttgaagtcatatctcttgtaattttcattatctcgtttctagtttttacatgttaagttttggagcttttcaacagacctttgaggaagctgatacaaaacatgacgggaggatcgacaaggaagagtggagaagccttgttttgcgacatccatcccttctgaaaaatatgaccctgcaataccttnaggacatcaccacaacgttcccaagctttgttttccactctcaagttgatgatacctgagatcagcaattcgattcaagcttccatagaccggcttgtttcattctaggtggtttcaaatatgaatgccccaagagctagtgtatgtgatattctggtttattggttaaaaacaattcctagtgtgggtctaaattcaacaggtgaacaatcgtcatcttctttttcttcttcttgtcagtgttattggataattggtacttccagacgtgctgaaatatttaggttgtatttttcactatggtattgcaatgtaaaaagtgatgctccctttggttttttatttttaaatc

SEQ ID NO: 8463 - DNA, 425 bp, Gossypium hirsutum
  Clone ID: LIB3135-053-Q1-K1-D9
gtgatattgatttgtacaagcaatcaagaggtcttgttgatccagaacttcttgcgggagagaccgtttttagtgtaagtgaaatagaagcactttatgagcttttcaagaagataagcagtgctgttatagatgatgggctgatcaacaaggactttgttttttcatagttctcattttgttatataagtgatatcttttgttttgtttgtcaagtttttcggcttgatgatcactcctcatcttgagttgggtctttccatctcatctttgtaggatttaagtttatttatattactatttgacaggaggagttccaattggcgttattcaaaacaaacaaaaaagagagtttgtttgctgatcgggtatttgaacttgtttgatacaaaagcataaaggaaattttatggtttgaaaaagtt

SEQ ID NO: 8464 - DNA, 242 bp, Gossypium hirsutum
  Clone ID: LIB3135-053-Q1-K1-D3
gtgatattgatttgtacaagcaatcaagaggtgttggtgatccagaacttcttgcatgagagaccgtgtttagtgtgagtgaaatagaagcactttatgagcttttgaagaagataacacagggtggtctagatgatgggctgatcgacacggcctgggatgtttgatacctctgatctggttctataagagatgtacaccgttttgtgagcccagagcttatgcttggagatgactaacta

SEQ ID NO: 8465 - DNA, 1419 bp, Gossypium hirsutum
  Clone ID: GOSHI-09MAY01-C5213_1
gaaaaggcatgttatcatcaatggaaaaaagcatagctgagctaagggaaaccttcaaaaatggaggaactaaaagcatttcatggaggaagagccaacttaaggctttacttcaactcataaatcaaaacgaagactccattttcaaagcattggatcaagatcttggaaagagtcctgttgaatcttacagagatgaggttggggttttgaagaaatcagtcacttatactttgagctgcttggagaaatgggtggcacctaaaaaggctgaagtgccattgctttttttccctgctaaagctgaagtgatgcctcaaccactcggtgttgttctcattttctcatcttggaatttccctttcacactggcattggacccattgatcggagcaatatctgccggcaacacggttcttttaaaaccatctgatctggcaccggcatgcatgtcgtttctcgtcgagaccatccctaaatacttggacaacaaagccattaaggtcgttgccggtggagcagatatcggtgaacgactgctccagctaaaatgggacaaaatattcttcaccgggagtccacgagtgggtcgcttggttatggctgccgctgcaaagcatttgacgccggttactttagaacttggtggcaaatgccccgctattgtggataccctctccactactccttcaaaagcaaaggtgactgctaaaagaattgtagggggcaagtgggggccttgccaccgccaagcttgcattgcaattgattatcttcttgttgaagaaaaattagcttctgctctgattgagttattaaagaagacaatcaagaagctttatggtgaaaacatcaaaagcttgaaaagcatttccaggattgttaacgagcaccagtttcaaagattggttaatcttttaaaagatcccaatgttgcagactcaattgtttatggtggttcagttgatgaagaaaaacttgttattgagccaacaatctgattagatcccccacttgattccgagatcatgagtgaagaaatctttggcccattacttccaataattacattgaagaacattgaagaaagcatcaacttcatcaactcgaagtcgaatcctctcgttatttatgctttcactgaggatgaaaccttcaagaaacgaattttatcagagacatcttcaggaactgtgacgttcaatgattccatggttcaatttctatgtgattctttaccatttggaggagtgggtcaaagtggctttggaaggtatcatggcaagtactctttcgacacttttagccacgaaaaatcgatcttacatcgaggtttttatccggaaatagaaccaaggtatcctccatggaccgattttaagcttttgttcatcaaattagcttacgaatttgactact

SEQ ID NO: 8466 - DNA, 402 bp, Gossypium hirsutum
  Clone ID: LIB3120-034-Q1-K1-E10
cccacgcgtccgcccacgcgtccgttattttggttttaaatacaggctgaagggccattgctcttttttcctgcaaaagctgaagtgatgcctcaaccacttggtgttgttctcattttctcatcttggaatttccctttcacactggcattggacccattgatcggagcaatatctgccggcaacacggttcttttaaaaccatctgatctggcaccggcatgcatgtcgtttctcgtcgagaccatccctaaatacttggacaataaagccgttaaggtccttgccggtggagcagatataggtgaacgactgctccagctaaaatgggacaaaatattcttcactgggagtccacgagtgggtcgcttggttatggctgccgctgcaaagcatttgacg

SEQ ID NO: 8467 - DNA, 791 bp, Gossypium hirsutum
  Clone ID: GOSHI-09MAY01-C5233_1
tcgtttcctttcaaaacacacgcacctcttctcttaatttccaataccgctatcatcgtgttgttctttccaaatcaccatgggaaattacgtttcctgcactttggccacccctttaatcaaaagcggtaaagctgcaagggtgatccttcccggcggcgaaatccggcaattccgggaacccgtaaaggctgccgagcttatgttggagtgtcccaattttttcctcaccaattcccagtctcttcacataggcaagagattttcagctctgaccgccgatgaagaattggagctgggcaacgttttcctcatgttcccgatgaaaagactcaattccgtgatcaccgcagccgatatggctatacttttcatggcggcgaactcttcagccaagagaatttcaagtggaaaagtggggggtttaccggagaccggaaacgttgaagaagagaaagaaaagtcgatgggaggatcaaggttgagcttagaaggggttgaagaattcaagcataggttatctgtttgtaggtcaagaaaaccttcattggaaacaattaaagaagaacctgtttgctcaaggtgaatattagaccatgttttgggtcagttaatacaaagataactctttcttttcttgtttcgttctatttgctaatatattttcagcaaatagaattctttttcttttcatttttgatttgagagcatctgtaatatgactaacatataatgtgaaaatttatccatgaaaaagtaagattttcagtgaatgaagttgagttttgttc

SEQ ID NO: 8468 - DNA, 476 bp, Gossypium hirsutum
  Clone ID: LIB3584-036-P1-K1-A12
ctttgatcagtagctaattgattttccccttattttcggccaaccggttcttgcggcaccaccttcatcaaacttaaatatttcaccacacaaatggaaacgtaggagaagaatgtgcggttttaaaccaaggaaggctcatagaatctcttcactggtgcatgatttttgagaaattaatatataagttggtcagtgagtgtaggccattggtgcctcttgatttttgggtgaattgggggagaatagaagagctttgtttctgataattcaacatatagaaagctgaatattcagacaggcagtggaaggggctggggcttagggaattggttggcgatgtttacagtataaaatgttccaaagccttcaatcagctattacccttttatatcgggattcaaaggtgagtgtaatatgttggtatatgttgttaccactatattttttcatatatatatatttaaggttacaac

SEQ ID NO: 8469 - DNA, 343 bp, Gossypium hirsutum
  unsure (1)..(343): unsure at all n locations
  Clone ID: AW186785.1
cggtcgcgtcgacagtgtaggccattggtgcctcttgatttttgggtgaattgggggagaatagaaaagctttgtttctgataattcaacatatagaaagctgaatattcaggtaattaaagtgtaatttattaaaagccttttggccttcccataatagctgtctcatcttttgttctctttcaaacaggcantggaaggggttggggcttanggaattggttggcgatgtttacagtataaaatgttccaaagccttcaatcagctattatccttttatatcgggattcaaaggtgaaaaaaaaaaaaaaaaaaaaaaaaaaaaaaaaaaaaaaaaaaaaa

SEQ ID NO: 8470 - DNA, 650 bp, Gossypium hirsutum
  Clone ID: GOSHI-09MAY01-C6983_1
ttatatcccaacttcgaaaaaccccgtccgcccacgcgtgcgaattttcatcccacatacatcactcttctcccacccacccaaccactttcctttctatcccaccattttctctttcttttgctttctaaaacatggccaaaacactacttaacaaacctctcattaccttcttcttctttttcttcttcagcttctttattcaaaccaagcaagataacccatgtccgtatccatgtttcccaccaccaacaggcaccggcggcggaggcggcggcggcacagtgacacaaacacctccagctagttactcaccaccctcccaaacaggagcataccctccacctacagggaacttaccatattactatccaccaccaccttatggtggaggtaattctttatatggtcagccccctcctgaccctatcttgccttatttcccatactactatagaaaacctccacaccaaacagatgatcagtcagcagcagcaacagttggtcctggaaggtcattactcatcaccactgctaccacaaatcttggtgtatttattattctagttatttctagtttagggaatttctagctagtgaaaggagaaaaaaggaagttcttgtgtaaaagtaattatgattaagccatg

SEQ ID NO: 8471 - DNA, 363 bp, Gossypium hirsutum
  Clone ID: uC-gsronu33B163a02b2
cccatgcgtccgctttccttcactttctcgagaaaaggaaatgtcttcaggttgcaggggcggatctagctgcagctgcggcgacagctgatcatgcagaatgaacctaaacacgatatcctatgtgcggacacactggacccaccaccaacaggaaccgtgttgcgccagtgaagatacacttacacaaacaccttcagatagttacttaccacccctccaaacaggagtatatcctccacctacagggaacttaccatattactatccaccaccaccttatgggggaggtaattcttttatgggcaagcccccttccgaccctaattttgcctaattcccatacaccattggaaaccctcc

SEQ ID NO: 8472 - DNA, 378 bp, Gossypium hirsutum
  Clone ID: GOSHI-09MAY01-C6883_1
cccacgcgtccgaaagatttaagagtcgtagtggtgcaaaatggatttaatagaggtttgggattttctggattatagtttcatcgatgaaaatacatctccagatatacttttgcccaattacagtagcggtagggaaattgttgttcatgaagaaaaggaattcgtcgatagagattgctcgcgcaagaggggacgcagtggatcatgcagcaggccagggactaaagcttgccgtgagaaattaagacgggagaaattgaatgaaaggtttctggatctaagctctactttggaacctgggagacctgccaggactgacaaatccgcaatactggatgatgcaatcagagttctgacccaactaagaactgacgc

SEQ ID NO: 8473 - DNA, 608 bp, Gossypium hirsutum
  Clone ID: GOSHI-09MAY01-C106858_1
ccttgtttcccgccatggaagtcgactcgcaagagcagctgcagagaaaacagtccacttacctctctttagatgagaatttcgagattcagaaggaagtttacagaggccaacagtacagtcaaatttactttgctcgtcttcacatgatgagaactttgctttactccctcgtgcccaactggaaatcccatctccccgtttgtacagttttagagctcaaagaaggcaaagaatgcatcatttttggtactctttacaagcatatgaaactcaaaccttgcattcttgatgaatactctaaggagagatctgttgcccctcttataaaacctcataattttatgcatcaagatgactacttggttttggaagatgaaagcggacgagtgaagcttggtggtactaagctttcaacctcagtttatgtaacaggtgttgctgttgcgttgcatgggaaggaaaccagtgcaggagccttctttggttgaagatgttctcgaagctggcttaccacctcagattaaacgaccgctaaaatcaagagaagacaagtatgttggttttgtctctgggcttagcatcgggaggagctcctctaatcccct

SEQ ID NO: 8474 - DNA, 449 bp, Gossypium hirsutum
  Clone ID: GOSHI-09MAY01-C106808_1
gttatggattccttgtcgattcttcccctcgttccttttttcttgggcttggaggttgccagaggttaaatcacactatcaaactattgatcgatatataaacattttaaagtatttttaagtctttggcatgcatggggactcgtttaattgttattaagttgctacgagttggcctaaaatactgacctatgttatttgaaggtctctattgcataaagtcatttaatgtagatagtcttgactatgtttgtaatgttttgatgcgatgtatgtttatgtctcggttttaaatgattacaagtactcaagtccagtaataccttgtaccttgttccgacgtcggatacgggtaaggggtgttacataaaatgttaaaattgtgtttatgttgttataggcctcggtaagatgcttgattaagtaaaatcatgactaagttattaaaa

SEQ ID NO: 8475 - DNA, 338 bp, Gossypium hirsutum
  Clone ID: uC-gsflmaxxa060h02b1
gttcgttatataaaggttttaaagtatttcaaggatttggcatgtatggagactcgtttaattgttattaagttgctaggaattagcttaaaatactgacctatgttatttgaaggtctctattgtataaagtcatttaatgtagatagtcttgattatgttattaattaaatgatgcaatttttgaatgtgcatgcttgcctatgtgtgtggttgaattaaagcatgatatgggcttgtaagctctttttaagggacatcttgaatgtgtttgaaaaagttttaaattaaagtgaaattatgaatacgattttatacgatgattagtgattaagttc

SEQ ID NO: 8476 - DNA, 516 bp, Gossypium hirsutum
  Clone ID: GOSHI-09MAY01-C6513_1
tcccacgcgtccgtaaatacccaagtatctataaatttaaatatataaattaataagcaccaatctatggctcaactagggtcgtctctgtcagcagaaaccgagacactgagcaatgtcctaagcctggtggaggccttcagagcatttgattcagacaacgatggcgcaatcaatgctgcagagctagggggaatcctgagttcgctggggtacaacgctagcgagcaagacgtgagggccatgatgcgagaaggggacaccaacaaggacggattgctgagcatggaagagttcctagagatgaacaccaaggacatggagcttggggagcttgccaatttcctcaggaccgctttccaagcttttgaagtcgaaggggatgatgctttgactgctgccgacttgtatgaggttatggggaaccttggcatcgatcagctttccttggaggattgccagagtgttattgcctccatggatgctgatggtgatggagctgttagcttggaggac

SEQ ID NO: 8477 - DNA, 594 bp, Gossypium hirsutum
  Clone ID: GOSHI-09MAY01-C6413_1
cccacgcgtccgcccacgcgtccgaaataatattactagttttgcttgaacccgacatccatggctacacacgcaagtctagctccttcaaggatccctgcaacaaccaggcttccttctaagaccactcactctttcccctctcaaattcaatgctcttccacgagactgcaagtgactgaattctctggactgcgatccagctcatgcgtcacctttgccaagaatgttagagatgcttcctttttcgacgtgctggctgcccaacttactcccaagagtgcaggtgtaccatcaccatctgttaggggagaaacagttgccaaactgaaggttgcaatcaatggatttggacgcattggcaggaacttcctccgatgctggcatggcaggaaggactcacccctcgaggttgttgttgtaaatgacagtggtggtgtcaagaatgcttcacacttgctgaaatatgactccatgctgggaactttcaaagctgatgtgaaaatagttgacaatgaaaccatccgtgttgatgggaagcccatcaaggtcgcttctaacagggaccatctaaagcttgcttgggctgaactt

SEQ ID NO: 8478 - DNA, 740 bp, Gossypium hirsutum
  Clone ID: GOSHI-09MAY01-C6433_1
cccacgcgtccgcccacgcgtccgatgaatttcaaaaaggtcatagccatatgggggttgttgtaagaaagtgcaacaaaacagaccagccgccttctagcaactcatctaggagccctttgccggaagtgaaggttgacattgatggtgagaaatatcctcaagaaaacgctgtaagacgtaaacgatcactgaagaagtggaagagctttcccacttcgaatgattcttttaaaagtggttcccggagccggaaatggtcaaagggtactgattctgacatcttacatctaaatggcaatccactcccacagctccctgaagaagaggaggctgttggcattataacaatggaagatgtcattgaagagcttttacaggaggagatctttgacgagacggatcatcactacgatgactcatgacatttgccttacttcgtcgcacagtttttctacggcactgattatttgttgtttcttgtttggcacgcagtagaatttggtttgttagagcttattgtagacacatgctggttgtatgcgaaatgcattaggcattcgagttaatggaaactatatatttttgtaagtaggacaaaagcaagcattccatttataaatgtatggtaatgtaaaaactcgaatttattttcttttgttctagttattcgcaattttataatttaaaaaaaaaaaatacaagtaccaggctccaaaccatggctgtatacccttttt

SEQ ID NO: 8479 - DNA, 421 bp, Gossypium hirsutum
  Clone ID: GOSHI-09MAY01-C6423_1
gaaacttgggagtcatcacttaattctctcctaccccaaccatgaccggcaaagaagcccaacaacccgaagagctacctgtagtcttcgttcatcgtccaccctcattcatccttccttttggggaccatttacgttctcaattccatgtcctggacccttatgagtcgcctgagccgtacgactcctttctggcccgtcatgctccctccataagagctctcatgactatgggccccaccctagtttccgccgagtttctcgaccgtctgcctgttttggagctgatagtggctacaagtgctggccttgatcatatagacctccccgcttgtcgaagccgaggcatcgttgttactaacgctagctctgccttcgcagaggatgcagcggattgtgcctgttgggtgttgatcgatgt

SEQ ID NO: 8480 - DNA, 936 bp, Gossypium hirsutum
  Clone ID: GOSHI-09MAY01-C6613_1
gctcagcacagcacttctccaagcatttaagcacccccacatcttcccctctttctcctcaatttctttctccccacgcgtacgattccttccacccgcctgctttgttccacctctttctttctttttctccaaagccatcatgaatctcattaataggctcagccccaagcgtctctttcgatctaataaaaaagatagatccatcgtctccaagttcgacccctcctcctatagttccggttccgccgtttcctcctcttcctcctccgaatccgtctcttccaccctcaaagaacatcagtacccttccacggctaccgctggcttcgtaacgcccaccagtgttttgccccaaacatcaggtgactggtccgattttcccgctaatttttatctagaactttgccaggcgtttaaaatgttagacaaagataacgacggggttatatcgagaagcgagctcgaggctttgcttggcaaggtcgcaaggcagccgcccagccgggacgaggtttccttgatgttgagcgaagtggacggtgacggcgacggctacatcaacctggaaacgttgatgaaccaggtggttggaccggcttgcgacgaacccgcctgcgaaccggaactgagggagacttttgatatatttgacacagatcatgacgggaagatcacggcggaggagttgatggcgttttttaaggacaaaataggggatgagcggtgcacgttagaggattgtcggcgcatgatagcgagtgtcgataagaacgaagatggatttgtctgcttcgaggacttctccagaatgatggagctgcagcgatgatcatatgattatgggtttttatccgtttgtgtttgataatcatgtgataagagatgcacttgatttgagaaatacagaaatgaaaatttgtcttggtttttttt

SEQ ID NO: 8481 - DNA, 258 bp, Gossypium hirsutum
  Clone ID: uC-gsronu33B039g09b1
tgtggtgcacgttagaggattgtcggcgcatgatagcgagtgtcgataagaacgaagatggatttgtctgcttcgaggacttgtacagaatgatggagctgcagcgatgatcatatgattatgggtttttattcatttgtgcttcataaacatcgtgttaagcgatgtactcgattttgtgttaatcttaaattttttattttttatttttttttttttttttttttttgtatttctattttatatttttcatttttt

SEQ ID NO: 8482 - DNA, 1018 bp, Gossypium hirsutum
  Clone ID: GOSHI-09MAY01-C6603_1
caaaaagaacactcggaaggcattcgaacatacagaaacacacgtaccccagccagaacaagaaaacaagtagtgtattaattaacagaagctgcatattgtagagaaacacaatagttacttgccatcaatggaagctgcaaggaaatttctctctcttcctccatctttttctacgagaacccaacttaagaattctgtctcttcatcaccatcttcttcagtttcaatgtttcacgagcaagcggctgctgctgctgcaacatctattccgattaattcggtagctaggcattttcctacatcagttctctcacaagagcagcgcgatgactgcagacctctgcctatcttgcaatactttaaggaagataaagcatattcagggccaacagacaaacagcaggttgagaatgggacaacacttcatgaagagaaggcctcaacaactttgaacagcagatgctccaagggcctgatttaaggcaattattgtcagtcttggaattaggggaaaatccatcatcttccttgtatatgcagtctgttgcagctgatactgaggagattatgaatgttgaaccaagtactatattggcccttgctaagaatgctttgtcagcttctaaacaagctttagcattagctgaggacctcaaattagaccttgatgattcaatttctaatagtttggggtcggctaattcatttacattgccagtcgaggaggacgaagcacctacagttaggtcaacaagacgtttagagagacagtctaaacgaaggaggataccatctaaatttatgatttctgagacctatagttcacgaaagacaaatgtaagaaaaaaggctagtggaagttatgatcccaacgatccccttagattgttcttaaggggtcctgagacaacacaactcttgactgctaaagaagagtccgaattaatagttcaagttcaggatttgatgagattagagaagctgaagagtaagcttcaatctcagtttgggtgtg

SEQ ID NO: 8483 - DNA, 666 bp, Gossypium hirsutum
  Clone ID: GOSHI-09MAY01-C6623_1
cccacgcgttcgcccacgcgttcgcccacgcgttcgcccacgcgcggacgcgtgggttttcattttcaaaccccactccccccatggctggtctcaagcttatttgtggcctagtattgttgtgcatgttggttttggaacccatggccacaactgctctcacatgtggacaagtggcaagccaaacgggtagttgtataaggtatttgcagcgtggagggaaccctccagctgcttgctgcaacggagttaggaacctaaacaggcaagctagaaccacccgtgaccgtcaaactgcatgcagatgcttgcaaactgccgctaggaccatctccggtatcaatactaaattggctgccggtcttccggccaaatgcggtgtcaaaattccttacaagatcagcccctccaccaactgcaatagagtgagatgatcatggatgaagtaagcagcttgcaggaaatgttatatatatatatatataagcgtgaaataaagattttgggatggatgcttattccaaaatccaaattagtgtcttgattaattatttgtttatctttgagatgttggctctaattatgttgtctatgtatggaatgttcagtgttttatgaggtaaaaagcctatgttttattatattacatgatatctggattgtttc

SEQ ID NO: 8484 - DNA, 722 bp, Gossypium hirsutum
  Clone ID: GOSHI-09MAY01-C6193_1
aagaaaccgatttactacccttttgcctttgttccatcgatttctagagcttcatggctgaaaccgcctctaactccgccccttctacctctaccaccgccgaggcgccagcgcctcaagaaaccaaaaagaccaccgaggcaccagtaagatgggccgatttggaagacgaagcttcggaagaaccgagcacttcatcggaagacaaaggtgcgccggaactcggagttgaaaacctaaaaatcgatgaaagcaaaaagatcaacaagttcctcgacgaacccgaggactccaacatcaaagccgtcacagctggggagacaccatacacttcagcatttacgtttgaggaattgaatctgtcccctgaattgttaaaagggctatatgttgagatgaaatttgaaaagcctagcaaaatccaagctattagtttaccgatgattttgacgcctcctcacttggatttaattgctcaagctcacaatggttctggtaaaaccacttgctttactcttggaatgctgtctcgtgttgatccgaatctaaaagctcctcaagcactttgcatttgtcctactagagaactggctattcagaatttggaagtgcttaggaagagggggaagcatactgtgataacatcagaatgtgctattcaatggatagttccaattatattccaattaataaacgggcacccattatcgctcaagttgtta

SEQ ID NO: 8485 - DNA, 210 bp, Gossypium hirsutum
  Clone ID: uC-gsflmaxxa002b07b1
gttgatccgaatctaaaagctcctcaagcactttgcatttgttctactagagaactggctattcagaatttggaagtgcttaggaagatggtgtagcatactgttttatcatcagtatgtgcttttctacttcttaagtttcaattttttttcatcctaattttactttcttcttatttttttttatgtttttactttttttctttttct

SEQ ID NO: 8486 - DNA, 650 bp, Gossypium hirsutum
  Clone ID: GOSHI-09MAY01-C6133_1
gctgacgtaccggccgaattccgggtcgagcgctcgttcgcccacgcgtccggttcactttaaccttgtacactactattacacttccggaaaaaaatcatggccaccgtcacgacgcaagcctctgccgctgttttccggccatgtgcatcgaaaacacggttccttactggttcttccggtaagttaaaccgagacgtttcatttaaaccagtggcttctacatcgactagctcattcaaagttgaagcaaagaaaggggagtggttacctggtcttccttcaccagcttacctcaatggcagtcttccaggtgataatggctttgatcctcttggattggctgaggaccctgagaacttaagatggtatgtacaagctgagcttgtgaatggacgttgggctatgttgggtgttgcagggatgcttctgcccgaagttttcactaagattgggataatcaatgctcctcaatggtacgatgccggtaaagccgaatacttcgcatcgtcctcgaccctgttcgttatcgagttcattttgttccactatgtggagatcagaaggtggcaagacatcaagaaccctggttgtgtgaaccaggaccctatcttcaagcaatacagcttgccccctcatgagtgtggtta

SEQ ID NO: 8487 - DNA, 390 bp, Gossypium hirsutum
  Clone ID: LIB3120-009-Q1-K1-E10
acgcccacgcgtgcggccacgcgttcgcccacgcgtccggtcttccttcaccagcttacctcaatggcagtcttccaggtgataatggctttgatcctcttggattggctgaggaccctgcgaacttaagatggtatgtacaagctgagcttgtgaatggacgttgggctatgttgggtgttgcagggatgcttatgcccgaagttttcactaagattgggataatcaatgctcctcaatggtacgatgccggtaaagccgaatacttcgcatcgtactcgaccctgttcgctatcgagttcattctagtccactatgtggagatcagaacgtggcaagacatcaagaaccctggttgcgtgaaccaggaccctatctttaagcaataca

SEQ ID NO: 8488 - DNA, 454 bp, Gossypium hirsutum
  Clone ID: GOSHI-09MAY01-C6353_2
cccacgcgtccgcccacgcgtccgtcttcctccccacccttaaaccatgtcggcttttgttggcaagtatgcaggtgaactcccgtttaggaatttggctttcactgtcttctcctgcatgttttattccattgtatttggggacatgcatgtaaatccttaatgaccacaacacttgatcgatccgtaccataaatgttcaaattttcattacagatatgctattttatgcataattttgttagtcctagctttgactaaaccctgtatgtatattttcccccagaggagttgatcaagaacgccaactacatcgccacgccaggcaaaggtattttggcggcggacgagagcacaggcaccatcgggaagcgtctctcgagcatcaacgtcgagaacatcgagtccaatcgccaagccctccgcgagctccttttcacctcttccaacgcat

SEQ ID NO: 8489 - DNA, 843 bp, Gossypium hirsutum
  Clone ID: GOSHI-09MAY01-C6353_1
cgccgcacccggcgcgcgcacccgtccggttttttccctttaatatcttcctctccacccttgaaccatgtcggcttttgttggcaagtatgcagaggagttgatcaagaacgccaagtacatcgccacgccaggcaaaggtattttggcggcggacgagagcacaggcaccatcgggaagcgtctctcgagcatcaacgtcgagaacatcgagtccaatcgccaagccctccgcgagctccttttcacctctcccaacgcattatcctgcctctccggtgtcattcttttcgaggaaacactttaccagaaaacatctgacgggaaacccttcgttgaaatcctcgaagagaacaatgtcattccaggtatcaaggtcgataagggcaccgttgagatagccggcaccaatggcgagaccactactcaagggttcgactccttgggtgcgcgttgtcagcaatactataaagctggtgcgcgtttcgccaaatggcgtgcagtgctcaagatcggtcccaacgagccatccgagttggctatccagcagaacgcgcaggggttggctcgttatgccatcatttgtcaggaaaatgggctcgtccccattgttgagcctgaggtgctaactgatggccctcatgatattaaaaaatgtgccgctgtcactgaaaccgtgcttgccgctgtttacaaggcgctgaatgatcaccatgttttactcgagggcacccttttgaagcccaacatggtcactccaggttctgacagcctaaaggaggcaccagaggtgattgcgcaatacacagtaaccgcacttcgccgaaccgttccaccagcagt

SEQ ID NO: 8490 - DNA, 459 bp, Gossypium hirsutum
  Clone ID: GOSHI-09MAY01-C6363_1
cccacgcgtccgcccacgcgtcaagttagcatagaagtttaaaggcattcttacaccctacttctcttctgtctttctctttttcagctaaatcccacttgttgaatagtagaacatggaagggaagatgagctggacggtggcggatgcggtggactacaagggtttccctgctgacaggtcgaaaaccggaggttgggttccggctgcactcgttctagggattgagatctgtgagaggctttcaacaatgggaattgcagttaaccttgtgacatacttggttggtgtactgcatttgccaagttcaacttcagccaatgttgtgacagatttcatggggacatctttcctcttgtgtttgcttggaggcttccttgctgattcattccttggcagatacaagacgattgccatctttgccgctatacagacactggggactgggcattagcaata

SEQ ID NO: 8491 - DNA, 772 bp, Gossypium hirsutum
  Clone ID: GOSHI-09MAY01-C6303_1
cccacgcgtccgctcttgggctcttgttacttaacctagggctgctctttattttccttttctctctgttcttttgtccctttgctttacttctttttgcttccatgtcgtttagaggattcagtcggccaaatgctacatcaggcatgggcgttgctgatcagaccaaggatactttcttggagctgaaaaggaagaaagtttatcggtatgtgatatataggatcgatgagaagaaaagggaggttgtggttgagaaaactggtgcccctgctgagacctatgatgacttcgctgcatctctgcctgaaactgattgccgatatgccgtctacgactttgattttgttacttctgagaattgtcaaaagagcaagattttcttcattgcatggtgcccttcatcctctcgaatccgtgcaaagatgctttatgccacatcgaaagacaggcttagaagggaactggacggtatccattacgagattcaggctactgaccctacagagatggatcttgaagtggtgagggatcgtgctcattgaacagtttgcagttttagctgttccatttgaagagattacccaactctgcgttactccttccttcataaagctaggtgcaggatcattttcgcatacaagttagtgtatatttagtccttgaataaccagaatctggtaaaaagctgatctgaagctctaggctaaaagtaacttgttgccatgaattcagattctttaccattcacatatatggccaattgcatgtc

SEQ ID NO: 8492 - DNA, 666 bp, Gossypium hirsutum
  Clone ID: GOSHI-09MAY01-C6293_1
cccacgcgtccgcgaaaagtctcgaatcgcctggaattttcgctgaaattctctattaaaaggaattccgaccagttctgcagaatcccttgttcaatttatttgcaagaaacgaaggttgtgatttagttagaataagaaactatggccaaagacggacccaactgggatggattgctgaagtggagcattgctaactctgatggaactcgacctactcgtaatttaagtgaggaagataaaagatggtttatggaagcaatgcaatcgcagaccgttgatgtgattaagcgaatgaaagagataactatggttatgcaaactccagagcaggttttggaagctcaaggagttacagctgctgatatcgaagatatgttggatgagttgcaagagcacgttgagtctattgacatggcaaatgatctacactcaattggtggtttagtccctctccttggttatctgaagaattcacatgctaatattcgagccaaagctgcagaagtcgtatccaccattgtacaaaataatccccggagtcaacagttggaaaggagaggcttaagcctttgttcataaccaactgttgacttcccttttatttaaccttattctttatagcttttactgttcaactgattattaaggagtttaaaaaatcta

SEQ ID NO: 8493 - DNA, 651 bp, Gossypium hirsutum
  Clone ID: GOSHI-09MAY01-C6283_1
cccacgcgtccgcccacagttgcagaagaactaaattccccagaatttgcttcagtaatggctgcctcagttatggcttcttcagttaccctcaagccttcattcaatgttgagaaatctggtgtaagaggggttccttcccttgctaggtccccttcttctttcaaggttgaagccagtggtggcaagaagatcaagaccgacaagccttacggaatcaatggtggtatgaacttgagggatggtcttgatgcctctggaaggaagggtaagggaaagggtgtttaccaatatgttgacaaatatggtgctaacgtcgatgggtacagtcctatctacaacaccaacgactggtctcccagtggtgatgtttatgttggcggtactaccggattggcaatctgggcggttaccctagccggaattcttgccggtggtgcacttcttgtttacaatacaagtgctttggcgcagtagatgtctctaaagtgatccctgcactcggttgcattataggctgtccgatgtaattgttgtgatcaacagaaccatcccacaactactgtgcatatctttatctagaatattttgccttggactgaattgagacctttgtattataacttaataatgtgctttgttttggtcttt

SEQ ID NO: 8494 - DNA, 372 bp, Gossypium hirsutum
  Clone ID: LIB3165-008-P1-K1-A7
acgcccacgcgtccggaactaattccttaaaatttggttcaataattggttgcttaagtattggttttttaggtacccttaaaccttattttaaatgttgaaaaccctggtgagagggggttctcttcttgctaggagcccttcttctttcaaggatgaagccagtggtggcaagaagatcaagaccgacaagccttactgaatcaatggtggtatgagcttgagggatggtgttgatgcctctcgaaggaagggtaagggaaagggtgtttaccaatatgttgacaaatatggtgctaacgtcgatgggtacagtcctatctacaacaccaacgactggtctcccagtggtgatgtttatgttggcggtac

SEQ ID NO: 8495 - DNA, 618 bp, Gossypium hirsutum
  Clone ID: GOSHI-09MAY01-C6243_1
ataagccctccctccttttccaacctctccttcttctttgaaatttagctgaaatggctactgcaacaatgagcttcaatttggtgggagcatttaggggtctttctctagcatcaagctcgacgtcgtcctttatgaaaggagaagtgggttccattcacaaaacggcagtcgtttcgttcccgaggaagtctccgttccctttgacgatcgaatcggcgcacaaaaaaggagccggtagtactaaaaacggtcgcgattcaaagggtcaacgactcggcgtcaaaatctacggcgaccaggtcgccaagcccggcgctattatcgttaggcaacatggaaccaagtttcatccagggaaaaatgtggggcttggcaaggatcacacaatcttttcattgattgatggacttgtgaaattcgagaagttcggaccccacaggaagaagattagtgtttacccacgagtacttcagcctgagaatcccaacagctatagagcaggcagagagagtacttcaggatgcgacgtgatcaaacgaaggcaaaaaaggaaggaatctagctcaacctgactggctcgcttcgctgccgtgctacgatgataatctgttgtga

SEQ ID NO: 8496 - DNA, 685 bp, Gossypium hirsutum
  Clone ID: GOSHI-09MAY01-C6273_1
gtgacccttcttgttgatcaggttaagacattcaaacctcaattggttgctgttagaaacgagtctttggtaaatgaactaaaagaggctttggctgatatggagcaaaagcctgaggttattcctggggaatcaggtgttatagaggttgctcgccatccagatgctgtcagtgtagttacagggatagtaggctgtgcgggattgaagcctacagttgctgcaatagaagcaggcaaagatattgctttggccaataaagagaccctgatcgctggtggcccctttgtccttcctcttgctcacaaacataaagtaaaaattcttcctgctgattccgaacattctgccatatttcagtgtattcagggattaccagagggtgcacttcggcgtattattttgactgcatctggtggggctttcagggattggcctgttgataaattaaaagaagtcaaagtagctgatgctttgaagcatcctaactggaatatggggaaaaagattactgtggactctgctacccttttcaataagggtctagaagtcattgaagctcattacctatttggagctgagtatgatgatatcgagatagtaattcatccgcaatctattatacattcaatggttgaaacacaggattcatcagtgctggctcagttgggatggccagatatgc

SEQ ID NO: 8497 - DNA, 856 bp, Gossypium hirsutum
  Clone ID: GOSHI-09MAY01-C6263_1
gagaaggaagcctcctggtcgaagaaacctaaaaagacaccgcttcttattaaaaaaataataagaaacaccttttcacctaacagtcaccgtcaaccaactgccagtctggtttgtctaagtaacaagtcgctccccgtcaatcgtgctgaccaaaacagaccaacggcctagatcacccccaatttctccaaactgctgtactcaatctttcttctcccctccatatattcccccttcatttccagcacttttctctctgccctaagaccaaatcaatcctcaaaatctctgcaaactgagatttatatacatatctgaactttaattttctgtaaaatcgaaaccagatggagatgatccagtacaaccggttcaccgcacacctcttgctcctctcgttgattctagttgttcccttggcagtcgccaccgacgttcaatattgtgataagcaaggtgagtatgatgtaaaggttcaaggtgttgaaatttcgcctaacccgatcgccaggggtcagcctgctaccttcagtatcgcagcaacaacaggtgcagctatcgatggggggaaactggtgatcgaggttgcgtattttggatggcacattcacagtgagactcatgacctttgtgatgagacatcttgccctgtgtcaactggtgattttgtggtttctcactcacaagttttgcccggatatactcctcctggcccgtactctctgaaaatgaagatgttcgatgcaaacaaacgtgagttgacatgcatcggatttgattttagcatcgggtttgcatcatctgtggctgatagttaaacattaggatttagaacacacgttaatggccatta

SEQ ID NO: 8498 - DNA, 312 bp, Gossypium hirsutum
  Clone ID: LIB3189-023-P1-K1-E8
caatcctcaaaatctctgcaaactgagatttatatacatatctgaactttaattttctgtaaaatcgaaaccagatggagatgatccagtacaaccggttcaccgcacacctcttgctcctctcgttgattctagttgttcccttggcagtcgccaccgacgttcaatattgtgattagctcggtgagtatgttgtattggttctcggataataatttttctccataaatctattccttattggttacttcttatttctttcattattttttcttcattttttttatcctctttctctctttatcgttattt

SEQ ID NO: 8499 - DNA, 509 bp, Gossypium hirsutum
  Clone ID: GOSHI-09MAY01-C6223_1
gtgctttctcgagaggaaaaaaacaactaaaaaaaaaacagcagttaaaagcaaaaaaccatggtggctttaggcctccaagccacacatttgattgcccctcaaaagttaccaatacgtaaacaaagaacctttagcaacattatcatccggtgtagtattgcagagccgtcgggagaaccagcatcattgggacaaaaaactaaatacaacgatgggttgtttgccaaggcatttatgggtcttttcgcccgcaagatggagaagttcgcggctgcaccaaaagctggaacagaaccaaagaaaggggttttcgactatgactatgagagctttgttgaggtgtcaaagagagtaatgcaagggaggtctcggttgcagcagcaacaagtggtccgacaggtgctcttgtccatgctcccacccggcgcaccagtttatgtttatgaattgtttgcaccaacaaagtgggctgcagagtttaattgcttcacttactggaccttttt

SEQ ID NO: 8500 - DNA, 450 bp, Gossypium hirsutum
  Clone ID: GOSHI-09MAY01-C7973_1
cccacgcgtccgcccacgcgtccgcttcttcattttccaatttcgaaaacctcagatttccactatgatttaacacccaattccaaaaacccaacctttcccaaaaaatttccccctttttctgtacatttatacagagtcaacaatacccgtactgatagattcaaaacccaatggcggccgtcagttccctgtctttcccggcaatcggccaaacttccggcgacagaaaacttaatgtcccatcggctcgttacttggcttccaatttcgaaggattccgtttccgtacaagccttttatatcagtccgtaggacttcgagcttccactactgcttctccttccgttttttactgcatgtctactgctactgataccccgactgtttctgaaacgaagtcgagctttttaaaagcgtataagcgttccattcccagtgtgtacaaca

SEQ ID NO: 8501 - DNA, 455 bp, Gossypium hirsutum
  Clone ID: uC-gsflmaxxa046e09b1
cgcaaacagaacttaaagacggtggagatgaatttcccactttccgataaaaacatttgtcactcacgttgtcgttcactgtaactatcataacctgggaaatcgacagttctttcatacttttcaatcttgtcctacgcctagaaatttccccagcccacctttgatctctcatgtctttattaccttcgggattcctttttctttgcttaatactcaagcttctgtaaaatcacagggtggtgttgtttgagcttttgaaattgtaatggtttcttgtacaattccttcatggaccttaattggtcttgtaagatcttttcttgaacttacactagcttatttccttttatgtggatcaaccttgggtttttttgcttggaaattttttcatgtttttggtattcatctgccatgtccttgatctggggtttttggttacccaaataccaacc

SEQ ID NO: 8502 - DNA, 312 bp, Gossypium hirsutum
  Clone ID: LIB3165-021-P1-K1-E4
cgcgtccgcccacgcgtccgcccacgcgtccgttttgatttctttggtcttaataaccttcgggatgcctgtttctttgcttaatactcacgcttctgtaaaatcacagggtggtggttgtttgaccttttgaaattgaaatggtttcttgtacaattccttcatggaccttaattggtcttgtaagatcttttcttgatcttacactagcttatttccttttatgtggatcaaccttgggtttttttgcttggaaattttttcatgtttttggttttcatctgccatgtcccttgctctgggtttttgggg

SEQ ID NO: 8503 - DNA, 414 bp, Gossypium hirsutum
  Clone ID: GOSHI-09MAY01-C7443_1
gcctcccacctccctccctcgtgactcccctttctttcttcttctcccaattccttccccctggctcccatgactctcgcgtcttccctttccttgtccttttccttcctcccattactaaatcactacactcgtcatcatcatgcggtcgccgcagggtttccgcaacggcgagaccccttcccctcataaccgaatccctacgcctcacttccacaacaccgtcacgctccgtaaactcaaacgcttcaactcactgattctcgtcttccgagtcaccgctttcactttctccctcgcttcctccgttttcatggtcactaactctcgcggctccggttcccctcattggttcgattatgacgctttcagattcgttttcgccgcgaacgcaatcgttgctctatattcatt

SEQ ID NO: 8504 - DNA, 713 bp, Gossypium hirsutum
  Clone ID: GOSHI-09MAY01-C107748_1
tgctgaagcagaggaaaccttgaaggtgttggacgcctctctctctcacatcaaatggcgtcttaaatcttcttcaaagcgtcgtctccaaatagatgttctggctgtctgcacgagaatgaggccagttgtgatgattgactatggtgggaagatgcctgaactgcaagaaaatctttgtgcatttcttgagcactgtcgaaaggattcaaccatttttgaaccgctaagagtaatggttatagaagatatgatatatttgatacacgtaaaagaaatggctgagtatgtgagttcaagcttgagtttggaagtggaatggctatttgtggatctagaacaggatccagctaagatgagaacactagacgacaaaagtttactagggatgcagcttatatcaattcagaagttattctctttatattttcctcttgaaggaatgagaaatgatctcttgccacctggcagggcagaacccatggcagattccaaatccttaagcaagcagattggttctcagtcctctgtacttatggatctcagcagctgcatgcatgacactgaggtcactgtgccaactgtaaatggatggcttcttggttatccaatagtgtacttgtttagcaaggatcatattgaagatgctatatataacctttccacaaaatttcttcgcatctacaaaattttggtatcaaggacaagtgcca

SEQ ID NO: 8505 - DNA, 511 bp, Gossypium hirsutum
  Clone ID: GOSHI-09MAY01-C7713_1
cagaaagcgaaagtctcccaaggttagaacccaaaatccaacaaaatcaaaaatcagtgagtgaagagagagtggcgcttgtgttttggcatcatctttccgttgtttttaatcgtttgatgcgtcggtgattgatcggaaagatggcgattcaccgtacagcaagaaacagcggcggcggcgtcggaggagcaggggcgacgatcggaggttttggatttacagttagattattggcttctgcaattacggttgcaatctgtttcttctttgctctttctttcttcttcacttaccactctctctctcctcatcttcaaacaaaccttggtttctcaactgattcctatggaatcggatccacgaggaggtccgttttggcacttaaatcggatccgctcaagcctcgactggatcagatccggaaacaagccggcgatcaccgttctcttgtcctcgcttacgcgtcttacgctcggaaattgaagcttgaaaactcgaagctcgttag

SEQ ID NO: 8506 - DNA, 680 bp, Gossypium hirsutum
  Clone ID: GOSHI-09MAY01-C7723_1
cccacgcgtccgcccacgcgtccgcaaatttctgaggaaatcccagtttccatgaaaattcttgggacatctcgacctttgcctctccctttatataacaattctcctcctttctctcatccacacctttctccttcaattttcccatcaacccattattctcacaagttttcgcaatccatggctgcttgcattgacatctcaagaacaacagactcttcccaactttcccaacgtccaaacatttctcaacctgatgaagttctttacgagtatggaagtttctgcagatccactttcccaaataatgtttcgagcgtacccttgaataaaaaccacacaaaaaccatccctacaagaaaatctgttgatttttctttagaagaaaaagaagaggttggtgctttatggctgaaaatgaaagaagaagcaacgttagatgctgagcaagaacccatcttatccaattattattacagctcaatcttttctcataattcatttgaaagtgctttagccatcatttgctatcaaaatagggcatccaagtctttaacagtacttatttgatatatcaggccgtgcttgtgagatcaaggatctgatgcttgtaggagattgaagctgctagaagagacctgctgttagtatgacatgctttgaatttaaggttctactgg

SEQ ID NO: 8507 - DNA, 530 bp, Gossypium hirsutum
  Clone ID: LIB3828-031-Q6-K6-A5
catctcaataacaacagactcttcccaagtttcccaacgtccaaacatttctcaacctgatgaagttctttacaagtatggaagtttctgcagatccactttcccaaataatgtttcgagcgtacccttgaataaaaaccacacaaaaaccatccctacaagaaaatctgttgatttttctttgagaagaaaaagaagaggttggtgctttatggctgaaaatgaaagaagaagcaaggttagatgctgagcaagaacccatcttatccaattattattatagctcaatcttttctcataattcatttgaaagtgctttagccaatcatttgtctatcaaattaggcaatccaagtcttcctagcagtactttatttgatattatcatggccgtgcttgtggaagatcaaggaatcatgatagctattaaggaagatttgaaagctgctaaagaaagagaccctgcatgtataagttatgtacattgctttttgaattttaaagggttcctagcatgtcaatcacatagg

SEQ ID NO: 8508 - DNA, 850 bp, Gossypium hirsutum
  Clone ID: GOSHI-09MAY01-C107698_1
ctggtatgcgaccgcagaacttcatcagggagctagagcttaccaatgttgtggaggactatccaaagctaagggagcttatacagaaaaaggatgagattgtagctaaatctgcttctcctcccatgtatatgaagtgtgacctccgtgaatttgaattgtctccggatttctttgggacaaagttcgatgttattcttatagatcccccttgggaagaatatgttcaccgggctcctggagttgctgaccatattgaatactggacatttgaagagatcatgaatctaaagattgaggcaatagctgatacaccatcctttatcttcctttgggtgggtgatggtgtgggcctcgagcagggtcggcaatgcttaaagaagtggggtttccggagatgtgaggatatatgctgggtgaagaccaacaaaacaaatgctactccaggtctacgacatgattctcattctatatttcagcactcaaaggaacactgcctgatgggtataaaaggaacagttcgtcgtagtactgacggtcacataattcatgccaacatcgacactgatgtaattattgcggaggaaccttcttatggatcaactcaaaagcccgaagatatgtatcgaatcattgagcattttgctcttggtcgcagaaggcttgagctatttggtgaagaccacaatattcgatcaggttggcttactgttggtaaaggactgtcttcatccaattttaatgcaaaagcatatgttaaaactttgcggacaaggatggtaaattgtggcaaggtgggggaagaccaatccacccccacatgcacctcatttggtgaagacaacctcaa

SEQ ID NO: 8509 - DNA, 645 bp, Gossypium hirsutum
  Clone ID: GOSHI-09MAY01-C7673_1
gacaaacaagagatcaatgtttgtctgcaggtttttttagttttgcgggcataacatgcaataatctaccctgaaaaaacctgcagacaaacaagagatcaatgtttcaactaaccaaggatcaaaaagcttcaagcaaaagagggaggaagaaaggaaggcatctgaagctggcggggacacaaaagcatggaatagtcttttcatgcgccctgatacagttgttgaaaacattgctaggaaatatggagtgagtaagagtgagttgcttgatcgagaagcagatgatctagctgtccgtattgctttgggggaagctcaagtgatgtcagagaccaaaaaggcccttacaaatgctggagtaaacatctcttctttggaggaaatagctgctggtaaaatggatgggaaaaaaaggagtaaccatgttctggtagtcaagaacttgccataccggtcatcagagggtgaactaccttagatgtttgggaaatttgggagtctagacaagattattctccctccaacaaaaacatgggccctggttgttttcctataaccacctgaagctcgtgcaccatttaagggtgtagcatacaaacgtttcaaggatgctcttatacttggagtgggcttctgacaatg

SEQ ID NO: 8510 - DNA, 409 bp, Gossypium hirsutum
  Clone ID: LIB3583-044-Q6-K1-A7
ccacgcgtccgattattgcatgttatgcccgaagaactaacagaacctgcagacaaacaagagatcaatgtttcaactaaccaaggttcaaaaagctttaagcaaaatagggaggatgaaaggaaggcatatgcagctggtgtggacacaaaagcatggaatagtattttcatgcaccctgatacagttgttgaaaacatagctaggaaatatggtgtgagtcagagtgagttacttgatcgagaagcagatgatctagctgtgcgtattgctttgggggaaactcaagtgatttcagagaccaaaaaggcccttacaaattctggagtaaacatttcttctttggaggaaataactgctggtaaaatggatgggaaaaaaaggagttaccatgttctggtaattaaaa

SEQ ID NO: 8511 - DNA, 397 bp, Gossypium hirsutum
  Clone ID: GOSHI-09MAY01-C7663_1
cccacgcgtccgaaacaagtcatggctctatctttcacagctgcaacaacactatacatttctggcaacaacattcatgcctcaaccccctaaaacgcctccttattctcaaattctaccatcagcttttcagcatagcagagaagaagactaagcatcaggagctctggtgatgtatcatccgtgacaccaacgaccgaaacagaatctgaaaagtccatcgatgaagctcctaagggacctccttctttgatctctgctcttaatgttgaacgagctcttcgtggcatcgcaatcacagacgcacatcactatggtagactcggccttcaaagagggtgtgcttatgaacaggtcactgtggcctacagaaacctggttgatgaactcctgaatc

SEQ ID NO: 8512 - DNA, 560 bp, Gossypium hirsutum
  Clone ID: GOSHI-09MAY01-C7613_1
taactcttcaaccaaaaccctatacacttattttaaaagctcaatttctctagaaccagctcgccaattcgctctttcttcgctcgaccgcctgctgttcttcgctctccttacccttttgcatccctcagaaaagaagaaaaaaaaccgttgacttttcgtttttggggggggggccaaactcgaagaccccaatttgtttcaaaaagagagagggttgaaaaatggatcaagggttactggatgatattataaaccggcttttggaagttaggggtcgaccagggaaacaagttcagttatctgaatcagagatccggcagctttgtttggtttctaaagagattttcttacaacaacctaatttgttggaacttgaagcccccatcaagatttgtggtgatattcatggtcaatattctgatcttttagcgcttgtggcgtacggtggattgccgccagatgccaactacttatttttgggggactatgttgatcgaggcaagcaaagtctggagaccatatgtcttcttcttgcttacaagataaacaccctgaaa

SEQ ID NO: 8513 - DNA, 562 bp, Gossypium hirsutum
  Clone ID: GOSHI-09MAY01-C7153_1
cccacgcgtccgatgggtccgatccataatccgacggaatcgggccagggtctcgaaccccatgaaccaccgtttaggggatttgccccgcttgccttaccccaacttttactacgcgctagaagatcttttggagtcatacgcgccatcattgacctactctgtgcaccgctcgtcgatcataataggcgcgtcgtcgagaagcgtgtacaacgcgctacttacatcagcagtgtacgcattgatatgtcgatacgagggtttaccgtttcgatacccaggtagccggtacacatgggagcatttttgcgacatgtccgatgcacgcgtgctcgccaagcagcatatatgggccgcagtgactcccagtgccaagaaccaagcctttaattgcactaacggcgatatgttcacttggaaaagcttatggaaaaaattgtgcgacatatttgatctcgaatttatcccttccgaggagttggaaaactttgattttgttgagctgatgaaggagaaaagcaaggtatgggatgaaataatggaaatgcatggattgttcaag

SEQ ID NO: 8514 - DNA, 749 bp, Gossypium hirsutum
  Clone ID: GOSHI-09MAY01-C107178_1
ttcttacacaaattaagtttttttttttcttcgatttgttgatccaccactttggtttcgatttttgtctttaatggtcatttcgaaatcatatatagagagagaagctaaagcaaaaggattgaagtggggaagaagaaagagttggtcaagattggtttttaaccgacacaatacacagaagggatggtttttttttccttctgttttgggaagtaattcttgaacaattatctttaattttgggtttttaattctgggttttatttgaattttcttgggtatttctttttcttttctttttttttggattatgggtgggtgtttcccttgttttggatcatctaacaaggaagctaataacaataacaataatggtggaaccacagttaaagaactgagcaagaaggattcaactaaagatagctcagttccacagtctcaacatgttaatagagataaatcgaaatctcgaaatggttctgattctaagagggagctacctgtagtgcctaaagatggaccaatggcgaatattgcagcacaaacattcactttccgagagcttgccgccgctacaaagaactttagaccggaatgtctattaggagaaggtggttttggacgtgtttataaaggccggttggagagtacaggacaggttgttgctgtcaaacagctcgatagaaacggcctacagggaaatagagaatttctagtcgaagttcttatgcttagcctcttgcacc

SEQ ID NO: 8515 - DNA, 720 bp, Gossypium hirsutum
  Clone ID: GOSHI-09MAY01-C7123_1
cccacgcgtccggcaagagtacataaaagggattagtgcttggaatttcaacctagaggacttaaaaagtcaggctgcactcattcaagatgacgatgatgcaccaaatgcagaagatcaagatgggagcaggaaacaaagggaccggcatgatgtagttgggttatcagctgagaggatatctcctgaaatgcctagtaattccattgctgcaagtagccaggaggacggacttagtgatcttcatgagttggagagttcacttgcttcatttcctattaagccacttcaagcactcaaaggctgttttgacattggtgaagctgagggtacaaatggtccaaattggaaaggtgttacccagttggaaagtgaacagttaattacaaagtcatcaagagccatggaccaagatgctggaagaaatgagggtgagaactccgggcaaagtagctcttccacacgccaggtcgttccagagcataaaaagttcttgagcggttcgctaatacctgatagtgccttttcacctaacaagtttactggagatggggacagggacttcccacagcctaaatttccatctgaacgcaactacagtggaccattgttgtaccgccagaggagagaaacaaataacccttcatctgaggattcatcggaaggagcagttgttcagcggggacgctttaaggtgacttcagcagatctcagtcccaa

SEQ ID NO: 8516 - DNA, 835 bp, Gossypium hirsutum
  Clone ID: GOSHI-09MAY01-C7003_1
cccagcgtccgccccgcgtccgatgtttctctcatcatcctctcaaaaccgaaactcgggaatttcaactcatcttccactttgactagcggttcacttcactgagtcaactaaaagttatggcgttacctactcatcagttacagagattccttgcaatcgagttcaatttcatctccaatcccaaaatcgcttacaggaaccaactaaccgcaacaacggcagtaagatctagtccaagaagcccctgccgttgctccgcgattgcaataaacgctccttcttcgctaacggatgtttccgggatccgttgggggtcgacgagtgtgcagggcaggcgcgaagagatggaggatgatttagttatacgatcggacggtcttgatggattctcgttcgctgccgtctttgatggccacggcggcgtagcttccgtcaagtatctcagggatgaactgtacaaagagtgtgttacagctttacaaggtggaattttgttgaacgaaggagatttcaacgctattaagaaggggttagcggaagcttttcaaaatgctgataaaaagttgctcaactggcttgaaaagattggagacggcgacgatgaatccggttcaaccgccacagtcatgttaattggaaatgaagtgctcttcatttctcatgttggtgattcttgtgtggttttgtcttgtgctggaaaagtacaagtcttgactgattctcatcgaccctatggcagcaacaaggcctctttgcaagaaattagaagaatcagagaagcaagtggatggattagcaatggtaggatttgtggtgaaacccatagctgtat

SEQ ID NO: 8517 - DNA, 1739 bp, Gossypium hirsutum
  Clone ID: GOSHI-09MAY01-C7393_1
gttgagagggttgcccaaaagcagtttataaggcgtgggcagtaaaacttacaggtaaaccagatatagagatggcgactaaggttgctgtttccattattatataatttcaagatcacaatgggtctatgataagattgtttatgtccggcggaatgatataccaaagtcaacagtatctcactggattccaaattagatttatggcttcacaaaccggtgagggtagttctagatctggtccaagacgaactgttgtaggggattttttgaaaccattgaattcggaatatggtaaggtagcccctggatggggaacgactcctttgatgggtgtcgcaatggctttatttgcgatattcttatctattattttggagatttataattcttccgttttactggatggaatttcaatgaattagattcacaagaatcacgaagcctcgcgtttcaatacaaaaatggaaacttttagttctcggattttttagccccattctatttcggtagttcgaccgcgaaatttatttgtttctgtatttccggaatatgagtaaagtttatgattggttcgaagagcgcctcgaaattcaggcgattgcagatgatataactagtaaatatgttcctcctcatgttaacatattttattgtctaggaggaattacgcttacttgttttttggtacaagtagctacaggatttgctatgactttttactatcgtccaaccgttactgaggcttttgcttctgttcaatacataatgactgaagctaactttggttggttaatccgatcagttcatcgatggtcggcaagtatgatggtcttaatgatgatcctgcacgtatttcgtgtctatctcactggtggttttaaaaaacctcgcgaattaacttgggttacaggcgtggttctgggtgtgttgaccgcatcttttggcgtaacaggttattccttaccttgggaccaaattggttattgggcagtcaaaatcgtaacaggcgttccggaagctattccggtaatacgatcgcctttggtagacatattacgtggaattgctacgtgtgggacaattcactttgacccgattctatagtttacacacttttgtattacccctccttactgctgtatttatgttaatgcatttcctaatgatacgtaagcaaggcatttctggtcctttatagagaatatagaccatagctatatcgttaccaataatttatcttattacttgggggacgaccacgcgtttctcccggctccaaatatggattatgaaaaaaaaaaataagacatgtatttggatatttcctttcaactacaacaatattctagtatttatttgatatgacatgaatagttgaagggaattccccgaagagaaaatggattatgggagtaacaaaaaaacctgacttgaacgatcctgtattaagagctaaattagctaaaggtatgggtcataattattatggggaacccgcatggcccaatgatcttttatatatttttccagtagtaattctcggtactattgcttgcaacgtgggcttagcggttctagaaccttcaatgattggtgaacccgcggatccatttgcaactcctttggaaatattacctgaatggtatttctttcctgtatttcaaatacttcgtacagtacctaacaagttattgggtgttcttttaatggtttcagtacccgcgggattattaaca

SEQ ID NO: 8518 - DNA, 760 bp, Gossypium hirsutum
  Clone ID: GOSHI-09MAY01-C7383_1
ggaaataactgccggaccgacccatgcggtttcttgagaaccatggctggctatggttatgcatacagaggtggctacacgacctacaatggcggcgttgctccacgaggtggcaccgaggggtggaacaaaacaagctatagctcagatcatacgtgtcagcctgtgttcattgatgcagaagggaggaggaagccgatcacgtcttacactggtccgcacggtagcaccgagtattacgttacaaaaaccgagatcgtcgaggttccatatatggccgaattcaagcaaagggctcctgtaagagttgaggtggtgagggaccatggtgagggtaagctgatgactaggcccttaagtcccggggaatggcgggagagttcaagtcctgttcggtatcatactgaagagaaatggaataagccttctagccccgttcagtatgacgtcgaagagaaatggaataagccatcgagtctctgttcggttccggctcgaggggaaatggaataggccctctagtcctgttcggtaccatgccgaagagaaatggacgaaccggccttcaagtccggttaaggaacatcctcaacaagttatggattttattagcaaagttcaaactcaagccagccgaccaaacaagttcggtcctctcagcgcaacatattggcgccagacaccagccacgaccaccacaaccgttggtggtccatggaacaaccagagtcatggtgggggatggtccaaaggacacgag

SEQ ID NO: 8519 - DNA, 586 bp, Gossypium hirsutum
  Clone ID: GOSHI-09MAY01-C7353_1
ctctcttctccttcatctcctccgccggagcttaattgcttcgccggtttttaccttctcgcagttcatttcccatggcggctggcttatccgccgccgtaccccttaaacctttcctttcatttcatccctcacccaagcaaaggctagttttcaaccctctacttcgcctcccacagctaacacacggtgctcgaaaggagacaaggctttccatttgtttcgtgttggaggaacaaaatgatgttgaaccccagaccttagtgaatctagtagaagaaggatccggttccgaggattttgggaacaaacagatcttaatacctccacatgtggcggagaaattagctagaaaaaaatccgaaaggttcacttacttggtcgctgctgtcatgtctagtttcggtatcacttccatggctatcatggctggttattatagatcttcatggcggccggagggaggcgacgtgcccccggctgaaaccctcggcacatttgccctatctgttggcgccgccgtaagcatggagttttgggctagatgggcacatcgagctctctggcatgcttccttatggcatat

SEQ ID NO: 8520 - DNA, 758 bp, Gossypium hirsutum
  Clone ID: GOSHI-09MAY01-C7333_1
aaaactccacacaatagttctaaggaaaaaaaaacccaaaattcaaatctacagaaaccatgtcgtgttttttacaggcgccagtggctcacacaatcctatcttcagcttcttcatgtcgaactgttcgaagaacaaaggctttgaagcttaggtgcggagctttgggtgccaaaaacgccgccaaaatccccatgcctccgataaaccctaaggacccttttctttcaaagcttgcctccgttgcctcttcttcccccgaagcgctacataatggctcggctaatcccgatacgccgccgtttttggacttgtttgagtcccccaagcttatggctactcctgctcaagtggaaagatcagtgtcatacaatgagcacaggccgagaagccctccaccggacttaccttcattgcttcttaatggtagaatagtttacattggcatgccgctcgtgcctgcagttacagagcttgtagttgcagaattaatgtatcttcagtggatggaccccaagcaaccgatttatctttacataaattctactggaacaactcgtgatgatggtgaaacggttggaatggaaacagaaggttttgccatctatgatgcacttatgcaattacaaaatgagatacatacggtcgctgttggggctgcaataggtcaagcttgtcttctactttcagcgggaaacaagggtaaacggttcatgatgcctcatgccaaagctatgatccaacagcctcctgttccc

SEQ ID NO: 8521 - DNA, 850 bp, Gossypium hirsutum
  Clone ID: GOSHI-09MAY01-C7293_1
ttccacgcgtccgcccacgcgtccgcgggaggtccgcaactttcttcttaagctcactgtagttactctctaccttccacagccgcatcatggccgattccgccaccgcgtcttcccccctaaaagtcatcgccggagctgattcttttggcgccgagctaaaagacgccatggtatcccacctccgctccctcaacatagaagtcgaagatctcggaatcacctcctactacaacatcggtgctgaagtcggccgtcgagtatcttccgccaccacctcgccctccttggagacccgtggcctccttgcttgcggaacgggcgtcggagtcgggatcttcgccaacaaattccccggcgtgttcgccaccacatgtctcactccggacgaagctcgcaacaatcgctccatcaataactgcaacgtcttggcactctccggcatgtcaacgtccgccgataccgctaaggaaatcgtcgacacttggctcaacactccttttaaagcgctgtgcccggcctctaagccccagccttggcccgaggaaatctcaaattttttcgatgaatcgatgaatgaaatgcctaaaatcggtgcttctgagaacacccaagctgaaacttgtgctgtttgttgcttggttaagaacagagaactgaatccaatcgatataatccctggtgggtcaatgaagatattgagagaaagtcccacatcggctattattaaatttaaggctgggagtgtaatacagcccatcaccatactttcgggcattgcttgctggtgatgaaagggaaaaaaagtgtctggaatttgagtaaaaacgaaagatatgatttgggtgat

SEQ ID NO: 8522 - DNA, 629 bp, Gossypium hirsutum
  Clone ID: GOSHI-09MAY01-C7253_1
cccacgcgtccgagacgaggttacagtcctacagagcctccgttcctcttcttccccttgtttctattttttaaactattattattgtagcattcgtctttcttcgattaaatccctacattttttttcctgaaaaatcccaaaattttcataaccagagcattgaattgaactcaccttccatctttctcgccccattatttttttttaaatttgatttactaatcaacattttcttctctgttttcaagtgtttttctccgtcgatgaacttttccccttagaaaattaaaagtaatcggggttttatatgggcgcaaatattaatatggctaatttcagtacctccgctgtgctgacagcagttaatcactctcccggttgccctgaccaatcacatcctgccacgaggcctatttctgcctcctggtcccaaatcgtccttggagaatcggaaccgctcgctggtgttcctttatcgccttcctcatcttcttcgtcatcgacggctgtgattgaaccacctgttcccacggcggtcgaaggcgaaggcgtagacaacgtgagtgctgggcccaatagcaatgccggtaagaggttagcttggaacaagccctccgacggcgcta

SEQ ID NO: 8523 - DNA, 552 bp, Gossypium hirsutum
  Clone ID: GOSHI-09MAY01-C7213_1
ggaggaccggttttacaaggcaaacagggctcatacatacttgggagacccatccaacgagtcggaaatattcccaaatatgttgaaatttgctgaagcatgcgggataccagctgcccgggtgacgaagaaagaagatctcaaagcagcaattcagaaaatgttggacactcctggaccttacttgttggatgtgattgtcccacatcaagaacatgtcctgcctatgatccccagtggaggcgctttcaaagatgtgatcacagagggtgatggaagaacacaatattgacctcaatgagcatcaaatggttttttttttggggtaatgtatgtaatgaatgagggtgggttatgggggcttagtttctgagttctggaacatagtttttctatgcttttaaaagcaaccaattaggttttcagtttggtcttatgcaagtcttgtatgtctttagtaatgttatgtaatgggcgaatctaaacttgtttttgttagaatgatgaatgctttcgttttggtacaaatataaataagttcaaattttttcc

SEQ ID NO: 8524 - DNA, 400 bp, Gossypium hirsutum
  Clone ID: GOSHI-09MAY01-C7233_1
gcctcaaccacgtctgctgctgcttctccttctctattccctctttcaatccatatataaatgattggctgtgaggtggaaaattaacaggattaggaggacactctttcgtcttaaagatggcttccgtgggcatggtgccggcttctggtttaagagaatctagtactgccggtgttgagaagttacctgaggagatgaacgacatggaaaatccgagatggcaaagaaatgggaggcaccagtaggggccggtaaccggacctgagccagggcatttaattggggccacctatggggggtggaaatgggcagccaaaccagccgataagttccatggctgaccgtggggtgggccatggatcattggaggtggtcttccaggcaaagggcttggaga

SEQ ID NO: 8525 - DNA, 673 bp, Gossypium hirsutum
  Clone ID: GOSHI-09MAY01-C100368_1
cccacccctccccaatttgaatgaaaaagaaaaaaaggaaaaacaaaacggaatagaataatgatgaataaccacctttgaagtgaatttttttgtctgatctctattgacttttgtgtgtattttgctattctcttcgtaaacaaaaaaaaaaaggtccccctttacaatcaaaacttgaaggctttatagccaaatacaagcaggttcttgctattcttttgctcaaatcgcaggtcgtgaagacgtggaagggcgcatggacatggggctcgcgatgtgcgggcctggggtcgtgcttggcgtgccgacgtgggacgaatggagactgcggcgcaaaagggtagcctagggtttgctgttttctgattgtttaggttagaccatgggtattgggcttatgtaaacgggccaaaattatttgggttgttttatgtaattgggctggctttatgcttttgtatgtgtaggggttgaaattgggtatttggtttatttgggtttgttgggcccgggtgaaaattgggccctacactccgtaaccctattctagtgtcggatacaggttaagggtgttacattgctaaattaaaataacttttatagccttgagactaggggagaagccaaaataatttttgggggtcgaataaaattttattttttatagcct

SEQ ID NO: 8526 - DNA, 1160 bp, Gossypium hirsutum
  Clone ID: GOSHI-09MAY01-C100278_1
cttgccaaacagaatgagtgtcaggaaaagctgaagtttgaagggaagagaaagcatatcgacagtgtgactgactgtaactggtcttctggtggaggtgacatcgactctttgaagagtaaagataaacattgtagcaaaagaaaagcaaaatatgattgtgagcctccccctggaaggactattttgtctgcatctgcatcggttgatagaagacgaccgcagaaagtgaagtccaggggtccagagaaacttcttatctctagtggaagccaagaaaaagagggtagtgaagtaaaagccaaaatgggggaaaaccagagaagcaacaatgacaatggtggacaagaagtgggtcgtagtggcaaaaataagatgtcaaaagagagtaagaaatcttctgtgcaggagcaaagttcaattgtttctaccccccgacctgatggcaacaatgaagagagagaatcaaataaaggtggtagagatcctaaggaggttgccacttctcagaatttatttctgaaacggaaacagcaacgggaagctgttgatgctattcttttctctggtctaattccttcaaaaaagtccgaacaatcatccaaaaagttgcaccaagaaaggtcaattgtcccaccttcagttgcaagcggcagcttcaaaccaccaaagaaaaggaaaggtccaccaaattcctaaaacaagggcaccacgccatcagattcatcaagggctcagttcaggagatattctttgagcttatagccttatagggcctacacatatggaggaaagcatactacttttatgaagcaacaacttcaattgactgctgccgtctttcttatataaacaggtagaaaaggaagaaagtggctacattctatgcttttcctataataattatttgatctaaaactgggttctagcttccgtgaatttaaatggagcttgtgtttatcagcatctttctaagttgtaaagaagcaagaaagttgccgagtttgcagccattgtgggaatacggcattgtgggaatacggggtgaaattaacaggcattcctctcgtcttttgggaagaatacttgataagtgtcttggtttctgtagttgatggatagctcacaaatcatagttgaaactctccaaaacagatttt

SEQ ID NO: 8527 - DNA, 640 bp, Gossypium hirsutum
  Clone ID: GOSHI-09MAY01-C101928_1
tccgggagttttcaggagctttctgccagtgatttgttggcactcttttatacatcaatctttggaagtgccataagctatggtgtattcttctacagtgcaacaaaggtagcttgacgaagctcagctccctcaccttcttgacgcctatgttcgcttcaatttttgggtttttgtactttggcgagaccttctcacccttgcaactggttggtgccattgtccccatagttgccatatacatggttaactttcgaggcaaaccttcatagcaaagaacatgcttgataaagatacatccctccctacgtaagacatgtcagaaaatgagaatgaaattaagctttgacagaatgaagcatgttttggagtcagacatccttttaaaagatgggttatggttgaagaagcatgatgtttgagatccctggctaagatattgaagtaatcccgatctgtatatatatatatgtgagctagaaatgtatataccaatggataaatatagtcgtgttttagaatcttgtaatttgccgaaatctaaaggtcgtttggataaaaatatttagtcccggcaatgcatttggacaaaaaactctcccattaaagggtttgattttttaaatagacttttttttat

SEQ ID NO: 8528 - DNA, 613 bp, Gossypium hirsutum
  Clone ID: LIB3582-062-P1-K1-C9
cccacgcgtccgcccacgcgtccgcccacgcgtccgagagaactcataatgttccttcattgcggtgtcaacacatggggagactccgaacggggcaccggcaaagaaaacccatcaatattcaaccccgccggcctcgataccaaacaatgggtcaccgtagctgccgaggcagggatttctctaatgatcctcaccgcaaaacaccacgatggcttctgcttatggccttctaaatacaccgaccactccgttatatcgtctccttggagaaacggccacggcgacgttgtacaagagttcatcgacgctgtcaagacccatggcggcggcggcatcgatgctgggctctacctttcgccatgggatcgtcatgataaaagatacggacatgatttgcagtacaacgagtattatttagctcagttacaagaactgcttactaaatatgggagtgtgaaggagatatggtttgatggattcaagggtaacaaagctaggaacatgtcttactacttctctgattggtttgcaatggtgagagagttgcagagttcgatcaacatattttccgatgccggtcctgatgtacggtgggtcgggaacgaaaaag

SEQ ID NO: 8529 - DNA, 391 bp, Gossypium hirsutum
  Clone ID: uC-gsflnu33B060a08b1
tgtatgatcacattcctcgagctgacaaaattgtctatttaccggcctgaacaagctccaacaccaccactaccagtgctaccacttccaacattttcacagctcaaatggcaacgaagagaactcatagtggtccttcatttcggtgacaacacattcacagactccgaacggggcaccggggaagaaaacccatcaatattcaaccccggcggtctcgataccaaacaatgggtcaccgtatctgccgaggcagggatttctctaatgatcctcaccgcaaaacaccacgatggcttctgcttatggccttctaaatacacccaccactccgttatatcgtcttcttggagaaacgggcacggcgacggtgtacaagagtttatcgact

SEQ ID NO: 8530 - DNA, 1019 bp, Gossypium hirsutum
  Clone ID: GOSHI-09MAY01-C1593_1
atttttgttagcaatgtgtcagctgacttggacccggagaagttgcttgagttttttaaacagtatggggaagttgaggaaggtccattggggctcgataagcaaactgggaaaccaaaggggtttgccctttttgtatacaggtcggttgagagtgcgaggaaagcgttagaagagcctcataaaaattttgaaggtcatgttttgcattgccaaagagccattgatgggccgaaatcgactaaagggggttacggaggaggtacttccggtgggcaccatcagcagtaccaacagcatcagcatcagcaaggacatcagattcagtctcatttccatcatgctaagaagggaaagtactcatctggtggatcagagactggtcatttgatggctccatctggacctactgcagttgggttcaaccctggagttgctgctggtgggtttaaccctgctgctgctgcacctgctttaaacccagcgcttggacaggctttgactgcattgcttgctggccagggtggtttggggcttggtaatctgcttggagggcttagtggcgcccctgtgaaccaagggacacctgctgcagggtatgggaatcaggttgctggaggctatggagtgcagggtggatatcagaacccacagatgggtcagggcggtgctggtaggaatcaacctggtagtggtgctccttacatgggacattaggtatggcctaagatgctctcatagatgccatcaatcattttattttcgactctggtgattctgaagttccaggcactcatgcaaacgtggtctttaaatttgtaacaaaaagttgttactgtttgcccgctataaagatctgaaatcctaaacctgtattttcatatttaattttgtactcttccccttcacatgtttcaaaaaggtgtagaagaaaaatgttgggggaacaggtagaattttcatgcggacgctactatgccttatcatgtttttcgagtgtgactcaaacagtgcctttt

SEQ ID NO: 8531 - DNA, 623 bp, Gossypium hirsutum
  Clone ID: LIB3828-024-Q6-K6-A7
gcgtttgcccagcgtccgccccgcgtccggggatctgataggttacagccatcggtgcccttccccgtggtaaataaagtggctgtgccgtagtttcggggggaaatccaggggcactttcttccaaacctgttgatcacgacagccactcccctcactctacagatcgccacccttcaatctgtgcctcattcaaaggtcaggtgaaagaacgacgagaagaaaatatcatgtgccagactgagcaagaagaccggggatccgccaaggaattcgccgataaatactctataacctgttcaacggctgacgctacatcgattcccgattggatggctgattcaatcaatggtggagccttgcaacaagtcgaccttaataacggaaccaacggttggtcttctcccccgggtgatctcttctatctccgttctcaaagctacctgaccaaacgtcaaaaatgccccgccggcgattatttactctctcccattggtatggactggctcaagtccgattccaagctcgataacgtactcgcccgtcctgataatcgtgtttctaacgccctccgaaaagctcaatccgatggccaatctatgaaaagctttatttttcgccgt

SEQ ID NO: 8532 - DNA, 615 bp, Gossypium hirsutum
  unsure (1)..(615): unsure at all n locations
  Clone ID: LIB3828-030-Q6-K6-D7
ggatctgataggttatagccatcggtgcccttccccgtggtaaataaagtggctgtgccgtagtttcgggggggaaatccaggggcactttcttccaaacctgttgatcacaacagccactcccactcccatcgcctcccctcactctacagatcgccacctttcaatctctgcctcattcaaaggccaggtgaaagaacgacgagaagaaaatatcatgtgccagactgagcaaaaagaccggggatccgccaaggaattcgccgataaatactctataacctgttcaacggctgacgctacatcgattcccgattggatggttgattcaatcaacggtggagccctgcaacaagttgaccttaataacggaaccaacggttggtcttctcccccgggtgatctcttctatctccgttctcaaagctacctgaccaaacgtcaaaaatgccccgccggcgattatttactctctcccattggtatggactggctcaagtccgattccaagctcgataacgtactcgcccgtcctgataatcgtgtttctaacgccctccgaaaagctcaatccgatggccaatctatgaaaagctntattttcgccgtcaatat

SEQ ID NO: 8533 - DNA, 1137 bp, Gossypium hirsutum
  Clone ID: GOSHI-09MAY01-C1543_2
gccatttcgaaaaccttatcttttgagaacgaaggttaaaggaaccacaccagccatgtctgcaacatctgcctcatctcttattctcccatcgctcaaacccaaagttctatctttatccgactcaactcccaattcactttccctcttctccctttctcctaccccccatgcaaagcctctcttctgttctgctcttccaagtttccagcttttaaccaaaaagtcctctttttcttccgggttcctgacaaacgttgccgtttcttctgagtatgaccaggaagaggacttatttggcagcgatgatgaagaaaggtctcctactttctcccctgacttgaaactttttgtgggtaatcttccttttactgtggatagtgcccagcttgcgggtttgtttgaaaacgccggccctcgcgtccgggttgaggtgatttacgacaaggtaactaggagaagtaggggatttggatttgtaaccatgtccacaatcgaggaagtcgaagctgctactcaacagttcaatggctatgaattggaagggagagcattgagggtaaactcaggacctcctcctcctcgtagggaagaattttctcctaggggagcaagaggtggtccttcgatgggagcaaggggtggtcctccgatgggagcaaggggtggtcctcctatgggagcaagaggtggtcctcctatgggagcttcaaatcgtgtctatgttggtaaccgggcatggggtgttgatgatatggcactcgagaccttgttcagtgagcaaggcagggttgtggaagcaaaagtcgtttatgacagggaaagcggtagatcaaggggttttggctttgtaacttacagatctgccgatgaggtcaacagtgccattaaatccttgaatggttgtgatttggatggaagaccaattcgggtcactgtagcagagtctaggccaaggcgccaattttgagtgcggatatttcctactgatgctgctaaaattttttggggacgcctaaaatatgcagccggaagctggcaaatgcagtatttttctgtttgcgggattctgctcggctgcatttggacgttatgggtgaacctggtggtttttaactaggaaaagctgataatatc

SEQ ID NO: 8534 - DNA, 1121 bp, Gossypium hirsutum
  Clone ID: GOSHI-09MAY01-C1543_1
cccacgcgtccgcccacgcgtccgctaaagcagaaacaaaggctaaaatgtctgcaacatctgcttgatctcttatcctcccatctctcaaacccaaaaccatatctttaccaaacccaactcccatttcactgtcccccttctctctttcccaccgcctccatgcaaagcctctcttttcttccgctcttcaaagtttcacgcttttaacaaaaaagtcttcttcttttccttctaattttgttagaaacgtttccgtttcatctgagtacggtcaggaagagggtttatttggtagtgatgatgaagaggctactagtttctcccctgacttgaaactttttgtgggcaatcttccttttagtgtggacagtgctcagcttgccggcttgtttggaagtgctggaaatgttcagatggttgaggtgatttatgacaaggtaactgggagaagtaggggatttggttttgtaaccatgtctactactgaggaagtggaagctgctgctcaacagttcaatggctatgaaacttgaagggagagcgttgagggtaaactctggaccacctcctcctcgtagggaagaattttctcctagggcgagaggtggttcaaccatgggtgcttcaaatcgtgtctatgttggtaacctttcgtggggcgttgatgatttagcactggagaccttgttcagtgagcaaggcaaggttgtggaagcaaaagttgtttatgacagggaaagtggtagatcaaggggtttcggctttgtaacttacaattctagtgaagaggtggatggtgctgtcaaaacatttaatggtgttgagttggatggcagaccaattcgagtctcagtggccgagtctaggccaaggcgtcaattttgagtgcaactggtatctaccggtactgctaaagttctttgggaatctacaaacatgcaaattgtagcagctgcatttggatggtattcgcaatctgtgcttagattagattagaaagagccgatgacgagatgataatatcaattgaaatattttggttatatgttccaaaagtatcatgattcagtgactgacatgtgccttaattttgtttattcaagtggggatttccagtt

SEQ ID NO: 8535 - DNA, 399 bp, Gossypium hirsutum
  unsure (1)..(399): unsure at all n locations
  Clone ID: LIB3149-019-Q1-K1-D8
ggggtttcggctttgtaacttacaattctagtgaagaggtggatagtgctgtcaaaacatttaatggtgttgagttggatggcagaccaattcgagtctcagtggctgagtctaggccgaggcgtcaattttgagcgcgactggtatctactggtactgctgaagttctttggacacactgagaacagctctttatgttcctaggaatctacaaacatgcaaattgtagcagctgcatttggatggtattcgcaatctgtgcttagattagattagaaagagccgataacgagatgataatatcaattgaaatattttggttatatgttccgaaagtatcatgattcagtgactgacatgtgccttaattntgtttattcaagtgtgggatttccagtt

SEQ ID NO: 8536 - DNA, 375 bp, Gossypium hirsutum
  Clone ID: LIB3493-015-P1-M1-E10
cggacgcgtgggttggatttgtaaccatgtgcacaatcgaggaagtcgaagctgctactcaacagttcaatggctatgaattggaagggagagcattgagggtaaactcaggacctcctcctcctcgtagggaagaattttctcctaggggagcaagaggtggtccttcaatgggagcaaggggtggtcctcctatgggagcttcaaatcgtgtctatgttggtaacctttcatggggtgttgatgatacagcactcgagaccttgttcagtgagcaaggcagggttgtggaagcgaaagtcgattatgacagggaaagcggtggatcaaggggtttaggctttgcaacttacagttgtgccgatgaggtcaaca

SEQ ID NO: 8537 - DNA, 248 bp, Gossypium hirsutum
  Clone ID: LIB3135-036-Q1-K1-D9
cgcgtccgaaatctttgggcacttaattggtctttcctatttttatatttcatccatggcttatagaataatagatgttcagttttcaaagcttaatttttattctggtatgtgttgcttatatgttttttattggattgcatttttatcagacacactgagaacagctctttatgttcctaggaatctacaaacatgcaaattgtagctgctgcatttggatggtattcgcattctgtgcttatatt

SEQ ID NO: 8538 - DNA, 594 bp, Gossypium hirsutum
  Clone ID: GOSHI-09MAY01-C101528_1
gaaaaaatcaagaaaaatgctcttaaaagcctgcctgccctctgagctccgatcgaactctgatcatcgggcttcgccgtcctctgtcgtctccgccaccgttcacgatggtcagagttcccaaaagcgagttttacgctccttaaagcttcccaaagcctaatccgacggtgatattccctttcctttctattttaaaagcgccttttgcctcaaaaacgattcaaatcttcgaaataaaaaaaatagaaaagagaacgaaaagtaatctctgaaaatcaccttagatctaattttattcctggtatatgtgtaatacccgtgtctgttttacactgttttttgggtaaaaaaaaaacccccctttacaatgctttccttcggcttttatagccttatacagtattttttacagatttctatttcatttcttgctatgtttgtttcgtttctgctgcttttctttctccttttgcaggtgttcgtgagaatgatggcgagtactctgactttgatacgtgcgccaatctcggcgcgattcagaactagagtcatggcgctgatgggggctactggaatggcgcgatttgaaaa

SEQ ID NO: 8539 - DNA, 1306 bp, Gossypium hirsutum
  Clone ID: GOSHI-09MAY01-C1503_1
cacaaaacaagcaaacaaaggtaaaatggcaaggacaatggcaatggcgatcccttcacttcctcttctcttcctctttacatttctgcttctactcccacttctcatttcctcttcccctgttcaagaccctgagcttgttgtccaagatgttcacagggctatcaatgcgtccaggaggaacctagggtatctctcctgtggaaccggaaaccccattgatgactgctggagatgcgaccccaactgggagactaatcgccagaagctagctgattgtgccattgggttcggcaagaacgccattggcggaagagatggtaagatttatgtggtcactgactccggcgatgatgaccccgttaaccccaaaccagggacattacggcatgcggtgattcaagacgaaccgttgtggatcattttcgctcgtgacatgaccattcagctgaaagaagagctgataatgaactcattcaagaccatcgacggtaggggcgccagcgttcatattgcagggggtccatgcattaccgttcagtatgtgaccaacattatcattcatggactcaacatacacgattgtaaacaaggagggaatgctatggtgagggactccccacgtcactatggttggaggaccatatcagacggtgatggtgtgtccatcttcggtggtagccatgtttgggttgaccataactccttatcaaactgcaaagacggcttgattgacgctatccatggctccaccgctatcaccatttccaacaattacatgactcaccatgataaagtcatgttattgggacacagtgattcctatactcaagacaagaacatgcaagtcactattgcctttaatcactttggtgaaggccttgtccaaagaatgccacgatgtagacatgggtatttccacgtggtgaacaatgactatactcattgggaaatgtatgccattggaggaagtgctaacccaacaataaacagccaagggaatagatttactgcacctaacaacagattcagcaaagaggtgaccaagcatgaggatgcaccggagagtgaatggaagagctggaattggagatcggaaggtgacctaatggtgaacggtgcattctttatcgcgtcgggtgctggcgcctcgtcgagctatgccaaggcttcaagcttgggtgctaggccatcttcactggtggcaacgataacgaccaatgctggtgcgcttaattgcaagaaaggttcacgttgttgatgataatgatggcgacacatgtgagtgaaacaagacagtttatta

SEQ ID NO: 8540 - DNA, 399 bp, Gossypium hirsutum
  Clone ID: LIB3189-017-P1-K1-E8
tcgtggacgcgtgtgctcgtgacatgaccattttctttaaagaagagctgataatgtactcattcaagaccatcgacggtaggggcgccagtgttcatattgcagggggtccatgcattaccgttcagtatgagaccaactttatcattcatggactcaacatacatgattgttaacaaggagggtatgctatggtgagggcttcccctcgtcactttggttggtggttcatatcatatggggttggcgcggccttttctgtagattttttatgttatgatggcctttatcttattttttttttcaatatatttttttttacaccatttttctttctctccactttttttcttcacacttttctgttacctagatcctgttttttaaataatttttttt

SEQ ID NO: 8541 - DNA, 626 bp, Gossypium hirsutum
  unsure (1)..(626): unsure at all n locations
  Clone ID: AI730910.1
gccaatnanacctcttgactttcccacacgggtgttgaagaaccagagtgctngcatcagtagcttggcagttccccattttttgtgtgtgtgtgtgcttcgtgccgcaagcatgaggatgcaccggagagtgaatggaagagctggaattggagatcggaagttgacctnatgtgaacggtgcattttttattctcgtcgggtgctgcgccttcgtcgagctatgccaaggcttcaagcttgggtgntaggccattttcactggtggcaacgataacgaccaatgctggtgcacttaattgcaagaaaggttcacgttgttgatgataatgatggcgacacatgtgagtgaaacaagacagtttattacaagtgattgaagtgatttaatgttgggttcttgtgcaattacatttagttagagaaatcagaaatgatttttaaaaagaaggaaggataaagaaaaagtctagagttaaaaggacttctgtgttcccttccattattttttttttcttggtttatttattcatgtatgacgattacaacctcggcctgttgctcttaaaacaagtgcagatgtgttgatataatactaaaattttaagttatttttcaaaaaaaaa

SEQ ID NO: 8542 - DNA, 722 bp, Gossypium hirsutum
  Clone ID: AI054616.1
tatggactctgagaccattgaatccctcgggctgcaggctgataatgcactcattcaagaccatcgacggtaggggcgccagcgttcatattgcagggggtccatgcattaccgttcagtatgtgaccaacattatcattcatggactcaacatacacgattgtaaacaaggagggaatgctatggtgagggactccccacgtcactatggttggaggacgatatcagacggtgatggtgtttccatcttcggaggtagccatgtttgggttgaccataacttcttatcattctgcatatactgatcgattgacgctatccatggctgcaccgatatcaccattttcttcaattacttgactaaccatgaataaattatgtaattgggacacattgattcctatacttattacaacaacctgcatttctctattgcatttaattcactatggtgaaagtcctgtacataaatgctatgatgacacatgaatatctctatttatgtatatagatcttactaattggtatttgttacattagttgtattttaaccttttattactctcctgtaaagatttatcgatcttccaattattaagcaatatttttcatcttaatatctccgaaattattgattaattttcttatcttatagattttatctataataactccatatataaatattcatatttatatgtatatttaaactctttgctctc

SEQ ID NO: 8543 - DNA, 453 bp, Gossypium hirsutum
  Clone ID: LIB3197-049-Q1-M1-E1
cccacgcgtccgaaaacaagcaaacaaaggtaaaatggcatggacaatggcaatggcgatcccttcacttcctcttctcttcctctttacatttctgcttctactcccacttctcatttcctcttcccctgttcaagaccctgagcttgttgtccaagatgttcacagtgctatcaatgcgtccaggaggaacctattgtttctctcctgttgtaccggaaaccccattgatgactgctggagatgtgacccctactgtgagacttatctgccgaagctttctttttgttcaattttttttccaagtcttcttttagttaattttttgttcaaatttattttttaataatttttttttttataactttttttacatttaattttttcttttccgtcttttttttatatattaaattttttttggaacattttttgtttttctttcttcttttt

SEQ ID NO: 8544 - DNA, 428 bp, Gossypium hirsutum
  unsure (1)..(428): unsure at all n locations
  Clone ID: LIB3585-024-P1-K1-G4
cggacgcgtgggcggacgcgtgggattcagtatgtgaccaacattatcattcatggactcaacatccatgactgcaagcaaggagggaatgctatggtgagggactccccacggcattacggttggcgaaccatatcggatggggatggtgtgtctatcttcggtggtagccatgtttgggtggatcataactcctcgtccaactgcaatgatggtctggctgatgccattcatgggtccaccgcaatcaccatctcaaacaactacatgactcaccatgataaagtcatgcttttgctgcacagtgattcctatactcaagacangaacatgcaagtcactatagcctataatcacttgggtgaagggctggttcaaagactgccaagatgtagacatgggtatttccatgtggttaacaatgacta

SEQ ID NO: 8545 - DNA, 414 bp, Gossypium hirsutum
  Clone ID: LIB3272-022-P1-K1-D6
tttcatgcaggtgaccaagcatgaagatgcaccagagagtgactggaagagctggaattggagatcggaaggcgacctgatggtgaacggtgcatttttcacggcgtcgggtgccggtgcctcgtcgagctattccaaggcttcgagcttgggtgctaggccatcttcactggtggcaaccataaccactaatgctggttcacttaattgcaagaaaggttctcgttgctgattgagacatatatgatccaaaacgtacgacacttcgttaattaccaagtggtcgaaaatggtgtttgactgcaaattaaattcagtttttagaaggaaaaagaaactgaagaaggtgcatgtgaagaaaagtctaccaataggattaatttaaacggcttttccccctccccttcacttttt

SEQ ID NO: 8546 - DNA, 359 bp, Gossypium hirsutum
  Clone ID: LIB3120-026-Q1-K1-A6
cagaggctagcacactgtgcaattgggttcggcaagaatgccattggtggcagaaatgggaggggttatgttggcactgactcgagtgacaatgatgccgtgaaccccacaccgggaactttacgacatgccgtgattcaagatgaaccgctgtggatcatttttgcccgggacatgaccattcgggtgaaagaggaactaatcatgaactcgctcaagaccatcaatgggcgtggagccagtgttcacattgcaaggggtgcttgtataaccatgcactatgtgaccaacattatcattcatggactcaacattcatgactgccagcgaggagggaatgctatggtgagggacttccc

SEQ ID NO: 8547 - DNA, 839 bp, Gossypium hirsutum
  Clone ID: GOSHI-09MAY01-C1533_2
cggacgcgtgggcggacgcgtgggcggacgggtggcaggatatacaggaggctcttctctgtcactaagagattgacgtgggttttggttgttgcctaattctcccacaataggggcattgcagtgacctccactggccttggtgagcggaaaaactactatccagctcctgaccctcatgctggaactcccccttcaggttcacatggcacaccaccatcttcaggaggtggatcacctccctctcatggaaccccgtcacatggagggggttaccacccttcaccaacaccatctacgccttcgggtggaaattgtggaactcccccacatgacccttcaactccatcaacaccatcacacactcctcctcatggtactccaccatcatctggaggtggtagtcccccatcgtatggaggaggcagtcccccatcgtatggaggaggcagtcccccatcgtatggaggaggcagtcccccatcatacggaggtggcagtcccccatcatatggaggtggcagtccaccaactactcccattgatccaggaactccaagcattccctcacctccattctttcctgctccaactccaccaattggtggtacatgccaattctggaagaatccccccccctgaaactgggttctcctggtttgttgggccccgttaggaaacccttttggcttaaaccagccccttgaatttggaccaaccataaacctgccccaagccctttccaaccacactttctgatgaacttggggccctttaccgggaagaatatcccccttttcccactccatgggtgaatagtaggttccctttccccgatt

SEQ ID NO: 8548 - DNA, 1292 bp, Gossypium hirsutum
  Clone ID: GOSHI-09MAY01-C1533_1
cccagcgtccgcgggcgcgcgccttccaatctttcattctttgctgttgaagtagtaatatctatagcatacagagatggagaggcaaagaagcaagcaggtttgtttgttgatgtgggttttggttgctgcctttttctcccacaatagggtcattgcagtgacctccactggccttggtgagcagaaaaactactatccagctcctgaccctcatgctggaactcccccttcaggttcacatggcacaccaccatcttcaggaggtggatcacctccctctcatggaaccccgtcacatggaggtggttaccacccttcaccaacaccatcaacgccttcgggtggaaattgtggaactcccccacatgacccttcaactccatcaacaccatcacacactcctcctcatggtactccaccatcatctggaggtggtagtcccccatcgtatggaggaggcagtcccccatcgtatggaggaggcagtcccccatcgtatggaggaggcagtcccccatcatacggaggtggcagtcccccatcatatggaggtggcagtccaccaactactcccattgatccaggaactccaagcattccctcacctccattctttcctgctccaactccaccaattggtggtacatgcgatttctggaggagtcaccccacactgatatggggtctgcttggttggtggggcactgtaggcaacgcatttggcgtgaccaacgctcctggacttggaacaagcatgagcttgccccaagcactttcaaacacacgtactgatggacttggggcgctttaccgggaaggaacagcctcatttctcaactccatggtgaataataggttcccattctcgactaagcaagtcagggagacttttgttgcagcacttggttcaaacagcgctgcagcagctcaggctcgtctcttcaagcttgccaatgaaggccacctcaagccaaggacctaagcaaacaccttttggtttgtcagtttcttgaagcattttatccactagtgtgtgctacttagattttatgttcctaatattcgacatctataatgctacagctttcatttggatagatactgtgtctagaactgaatgttaagtttatgttttcttattttaaataaaatttaagatatttgtttaaaaaaaaaaaaaaaaaaaaaaaaaaaaaaaaaaaaaaaaaaaaaaaaaaaaaaaaaaaaaaaaaaaaaaaaaaaaaaaaaaaaaaaaaaaaaaaaaaaaaaaaaaaaaaaaaaaaaaaaaa

SEQ ID NO: 8549 - DNA, 664 bp, Gossypium hirsutum
  unsure (1)..(664): unsure at all n locations
  Clone ID: AI726085.1
cggccgcgtcgacgtcgacctttcattctttgctgttgaagtantaatatctatagcatacatagatggagaggcaaagcaagcaagcacgtttgtttgttgatgtgggttttggttgctgcctttttctcccacaatacggtcattgcactgacctccactggccttggtgagcacaaaaactactatccagctcctgaccctcatgctggaactcccccttcaggttcacatggcacaccaccatctccacgaggtggatctcctccctctcatggaaccccgtcacatggaggtggttaccacccttcaccaacaccatcaacgccttccggtggaaattgtggaattcccccatatgacccttcaactccattaacaccatccatacactcctcctcatggtaccccaccaccatctggacgtggtattcccccaccgtatggatgatgcactccccccccctctggaggacgcactcccccctctcatgtgatgaggctctcccccatcttatcgacgtggtcttctcccctcctacggacgtggatctcctccctcactccccctgatccactaattccctcttttcctcctctccattctttcttgccctatcttccccattcggctgtctctcccattttcgcgaggactctccct

SEQ ID NO: 8550 - DNA, 454 bp, Gossypium hirsutum
  Clone ID: LIB3493-006-P1-M1-C2
cagctcctgaccctcatgctggaactcccccttcaggttcacatggcacaccaccatcttcaggaggtggatcacctccctctcatggaaccccgtcacatggaggtggttaccacccttcaccaacaccatcaacgccttcgggtggaaattgtggaactcccccacatgacccttcaactccatcaacaccatcacacactccttctcatggtactccaccatcatctggaggtggtagtcccccatcgtatggaggaggcagtcccccatcgtatggaggaggcagtcccccatcatacggaggtggcagtcccccatcatatggaggtggcagtccaccaactactcccattgatccaggaactccaagcattccctcacctccattctttcctgctccaactccaccaattggtggtacatgcgatttctggaggagtcaccccacact

SEQ ID NO: 8551 - DNA, 1190 bp, Gossypium hirsutum
  Clone ID: GOSHI-09MAY01-C1493_1
taccgatttctcaactcgtctccccggcttcatttcctttttgctcagatctcctcatctccactttttttccttcttcaaatacccaatggccgtcactttctcaaatctccacaccgagtctggtcttaaagctcttaatgacttcctctctggaaaatcttacatctctgggaataagctgaccaaggatgacataaaagtttatgccgctgttctgaagaaccctggtgattctttccccaatgttagccagtggtataattctgtttcttctcaacttgccgccagcttccctggtaaagctgttggcgttgggtttggtggcaaagctgctccagctgagtctgctaaagctgaggctgctgatgatgaggacgacttggatctattcggtgatgagacagaggaggataagaaggctgcagaggagagggaagctgcaaagaagtcagctaagaagaaagaaagtggaaagtcctctgttctcatggatgttaaaccatgggatgatgagactgatatgaagaagttggaagaagctgttcgatccgttgagatgcctggacttttgtggggagcatcaaagctggttgctgttggttatggcatcaagaagctacagatcatgcttaccatagtggatgatcttgtttcagttgatacccttatagaggagtgcctcacgacagagccacgcaatgaatacattcaaagctgtgacattgttgcattcaacaagatttagaggacacagtttttttccacggctgttgagagtgccattggccatgttatcaccttttgccccttgctttcccctcgaatatatatatttttgcttgaactgtgctttgctagcgcttctgctctatagtgagcatagatgaaagggattttcaagtatttaatgatgttctatgttttgatttacttaaagcttgcccaaagtagttttagtgacattgcagattgcataagcggaaatggaagtcatgactgttttgaatgttatattaaatgatttgatgcaagttttagcaacttaattatcaggttgggtgttcacgcttgtggtgattgatagttcattaataagaaaaatatttcaggaataccactactcttaacgttattttacttattccgagaatcgaaagcggggcacggaccctctttttggacccaag

SEQ ID NO: 8552 - DNA, 458 bp, Gossypium hirsutum
  Clone ID: uC-gsronu33B114g12b1
tcggtgatgcaagttcgtccacagcagcgggatcaggtcatgtttaaaatcgctcttggttcacaagaccattcttcaaaggctaacatcagggaggagcataaaaaggaatctaaaatggatcaagcccaatcaccaagttctgactcaggaattgatgctggtctcaaccgtggtataaccgcggaggaaatttcttcagaatctagttatcaagatgtgccttatagagaaggttcttcaccagaatcagataaacagctgttgtggtatgatacagatatggatgaacatgataagatcaagatgcttttcttggactcgtaagatcaagttctccctgcctttttctttcttctttgcgagctcagagtttggtaggagcaaaatgataatctatccttcccctcccccttatttttctgtttctttctttatctacaaaagaagtgatggct

SEQ ID NO: 8553 - DNA, 570 bp, Gossypium hirsutum
  unsure (1)..(570): unsure at all n locations
  Clone ID: LIB3582-054-P1-K1-C8
caggnattgatgctggtctcaaccgtggtataaccgcggnaggaaatttcttcagaatctagttatcaagatgtgccttatagagaaggttcttcaccagaatcagataaacagctgttgtggtatgatacagatatggatgaacatgataagatcaaggaagatatgaaggcgaagactaatgcagtgctgccagttcttgaagcaagatcagcagaagaaatttatttggcttttaagcaacttcatgaaggagtcgacattgaggaagtaactgttctgagtatgatcgagaaaccgccagatcatggaggtaacaaatcaaaattacctgttttcgaggcaaggtctctggaggatatacataaagctgttcgatccgttgagatgcctggacttttgtggggagcatcaaagctggttgctgttggttatggcatcaagaagctacagatcatgcttaccatagtggatgatcttgtttcagttgatacccttatagaggagtgcctcacgacagagccacgcaatgaatacattcaaagctgtgacattgttgcattcaacaag

SEQ ID NO: 8554 - DNA, 416 bp, Gossypium hirsutum
  Clone ID: uC-gsflnu33B083h02b1
ccggaccggacctgaattcccgacccaacccacccgtgtcgcttcgcctacaatcagaggactcaatttttttgtacagcagtcgagagtgccattggccatgttatcaccttttgccccttgctttccctcgatatatatattttgcttgaccgggctttctagcgcttctgctctatagtgagcatagatgaaaaggattttcaagtatttaaggatgttctatgttttttatttacttaaagcttgcccaaagtagttttagtgacattgcagattgcataagcggaaatggaagtcatgactgttttgaatattatattaaatgatttgatgcaagttttagtaacttaattatcaatatggatcacgctaggggttattgatagctcattaataagaaaagtatttccggg

SEQ ID NO: 8555 - DNA, 462 bp, Gossypium hirsutum
  Clone ID: GOSHI-09MAY01-C101478_1
gtccactttgagggaagctattcatgtatttagctaatatgaacattaaagttaatgcttgtttaaaaacactagagaaaataaatggatggtcataaggtcccagtatttcattaacaggtgatgtgagctacagagggcacggtatatacggcctaccaaaattaactcaagaatgctcctctttttgttttcttttacaatgaattgaagatggcaagtgagaacaataagggtctatattcggattattgagatgtatattaatacagaattaattgcaatgaatcaactgatatctgtttctttggaaagtcactagtgtaattataaacaacgatgatatgtttgggtaacaattataattggtgggttttatcacattttttaatttttagggtaatagcagttaaatctaattgtaaaaaattatatttatacgaattataaaaattatattgt

SEQ ID NO: 8556 - DNA, 731 bp, Gossypium hirsutum
  Clone ID: GOSHI-09MAY01-C1443_4
ctcatcctctaccaacgattaccaattgtttctgttacagatttctactttttcttctgataatgatatcaaggcaccaaagaaacaatatggattagaaggaggtggtaattcaaagatgaagggcaatggaagcattagtggcaaagacttgatctttagaggtgatcaaattgatttaaaaagcttagacatgcagctggagaagcacctgagccgagtttggtctaggaacattgagaaacaaaggccagctgaggaatggcagattgatttggctaagtcgcatttaaggaatgttatagctcatggcacctatgggactgtttatcgtgccacttatgataatcaaaatgttgcaggaacctgagccagatgaggaagtagaaaatgaagcagatgaaaggctgttgttgagttcatggctgatctcgttgccaagagggataccaaggcaacaccaccaaagaaggagaaaggttgttggttcaggttttgctcgatttgttagccgctccggtccccaaatacggtccacaagatgtgtctcggtgtgtttttttatgccagtcccattactttgtaaattatttgtgagattggtgagcttttctgcaaagttcaaaatcttgattgcttgcaagtgttttcaaattcaagagaagtgaaaaacctacaattgtaaatcttttggcatctattctatagcttccaaattctacttttagtat

SEQ ID NO: 8557 - DNA, 806 bp, Gossypium hirsutum
  Clone ID: GOSHI-09MAY01-C1443_3
gcgttgctggttctgtggctcctgatatagattcatttccagataagcaggccatttttatgcatgaaaggaatgcagactcgaatactgctccagcaggtggtgacataactgagagcgtaagccttgagaagcaggtacattgtgaagtaagagggagtcttgaaccttgagatgtggggaaaccttgagatcaattgaatgtggggaagaactttgcagatttaagagccttaccaagatcaattggaaaccttgagatgcttgaagagttggacataagtgacaaccagatcagagttttacccgattctttcagattattgtcgaaattgagagttttccgagctgatgagactcccttggaagttccaccaagagaagtaatcaaattgggtgctcaggctgttgttgagttcatggctgatctcgttgccaagagggataccaaggcagcaccaccaaagaaggagaagggtttttggttcaggatttgctcgatttgttggccgttccggaccgcaaatacggacgacaacatgtaaccaatgaattactactacagttttttctttttagccccttgtaaatatctcaaaaatgttttggtttcttgtcaagatgtgtgtgtgtgtgtttttttatgccagttccattactttgtaaattatttgtgagattggtgagcttttctgcgaagttcaaaatcctgattgcttgcaagtgttttcagattcaagtgaagtgaaaaacctacaattgtaaatcttttggcatctattctatagcatccaaattccactttt

SEQ ID NO: 8558 - DNA, 610 bp, Gossypium hirsutum
  Clone ID: GOSHI-09MAY01-C1443_2
aggcacgagccacgcgggcctagaaggaggggggaattcaaagatgaagggaaatggaagcattagtggcaaaaacatgatctttagagctgatcaatttgatttaaaaagcttagacatgcagctggagaagcacctgagctgagtttggtctaggaacattgagaaacaaaggccagctgaggaatgggagattgatttggctaagttggatttaaggaatgttatagctcatggcacctatgggactgtttatcgtgccacttatgataatcaagatgttgcaggctgttgttgagttcatggctgatctcgttgccgtaaattttcagattccatataaatatatatacttgtattatctatgttagttcttaagctttgtaacttgtttgcttgatgcagctttaaaaattatgttttgttaattcttaatctatctatatatatatatattgggtgtgtgtgtgtgttaattgtgattgaactttgtattgatagtttttcgagtaaaatattgattagtaagaccctttgtagtttattctgcatgttgaagcacatgcattatgtagaactgaattagggcctaagcatggtgatagagggt

SEQ ID NO: 8559 - DNA, 531 bp, Gossypium hirsutum
  unsure (1)..(531): unsure at all n locations
  Clone ID: LIB3543-020-Q1-K1-B2
gtagaaaatgaagcagatgaaaggtttaccttcttttaccttttttgtattgtatttacatctccatttcatngccccatttttatatttaatcgcccttatcttgaatattgtctttttatatatatatttgatggtttgaaattatttatatcaaatgatgttaagaagtttttaattacttggaaatttgatgggcatgatctgcttgaataatttttcttgaagtacccatgtccagcacttgtgtccgacatgtggatatggagttattacctctaaagatcctccgactacatgggaaaccttagaaaggcttaaccaaatcggatacatacctgtatccaacactcacacccaagtccgagtaacataagctgttgttgagttcatggctgatctcgttgccaagagggataccaaggcaacaccaccaaagaaggagaaaggtttttggttcaagatttgctcgatttgttagcccgtcccgaccgcaaatacggacgacaagatgtgtgtgtgtgtgttttt

SEQ ID NO: 8560 - DNA, 622 bp, Gossypium hirsutum
  unsure (1)..(622): unsure at all n locations
  Clone ID: LIB3585-024-P1-K1-B12
cccacgcgtccgagctaatcgtagaaatcacctccacccgctccccttattttttatccccaaatcagtttcccaaaaccccttattttttcccctaaaaatttccccaaatcccatagtttttttcctcaaatcaaaatccgcaaatcccttagatttctctgaacgtctactgcattgccatcgacagtcctctgttgcatcaccatcgacagtcctctgccgcatagtcatcgaaagtcctctgtcgcattgccatcgaaagtcctcttctacatcgccatcgacagtcctctgctgcatcgccgtgttctggtcaaagcttctcaggtacattgtgaagtaagagggagtcttgaaccttgagatgtggggaaaccttgagatcaattgaatgtggggaagaactttgcagatttaagagccttaccaagatcaattcgaaaccttgagatgcttgaagagttgaacataagtgacaactagattagagttttacccaattgtttcagattattgttgaaattgagagttttctgagctgatgagactcccttgggaagttcaccaagagaagtaatcaaaatgggtgctcangctgntnngtgagtcatggctgatc

SEQ ID NO: 8561 - DNA, 783 bp, Gossypium hirsutum
  Clone ID: GOSHI-09MAY01-C101458_1
ggttaattagctgccttaatcaaaaaggtcccatccaaataatcctgtctgccattccactatagcagcaaaacagctggttcaaaacatccaacaattttcatcaacatactctttacatgcagatttcatctttgggttctaattttgtgaattttaatctttctacttttttagattcattctttaactagctagaatactgcaaaaagggtgtttaaaggaaaagcactggacaaaagatgactgaaaaacgaaaatggaggtccatgtgaaaagaaaataaaataaaaggtgaaagaaaaagggccatttcttcccattgtaatcacaagcatgccatagtttaccaaaaggagacttaagcaggttacaggagggtttatagaaggtctttaagtgaggaagactatgaaggagttgatttggggtcaaggatttcattcgacattcctgaccatgtacctaatatgtgtaatgaatgtaagaagcctaatggcaattgtggtgttgggttgaagtgcatttgtcatgctaacgattgcaaagacaaggtcctttcagctgccacatcactcgacactggtataagtttcctatttcccttattttccatcattgttcagatgaatttccggatgatttgagcagttccagaacatgaaatgcagagaacagacacggatctttttgctctccttcctcattatgttttatatgtattcttatgtttctacagaacgggtcgtatgtttcttgtcatctctcaatgcacatatacat

SEQ ID NO: 8562 - DNA, 1225 bp, Gossypium hirsutum
  Clone ID: GOSHI-09MAY01-C1413_2
ggaagtctctgcgtgttcttggaagtgttggcgagcccattaatccaagtgcttggaggtggttctttaatgtagttggagggtctaggtgccctcgcgcgggcgctccctggcgaactgaaacaggtggctttatgattactccgctaccgggtgcctggccgcagaaacctggttctgccacctttcctttctttggagttcagcctgtcatagtggatgagaaaggaactgagattgatggtgagtgtagcggttatttgtgtgtgaaaggctcatggcctggtgcatttcgaactctttacggtgaccatgagagatatgagacaacatactttagaccattccctggatattattttacgggtgatggctgcagtagggacaaggatgggtaccactggcttactggaagagttgatgatgttatcaatgttagtggacatcgtattggcacagctcacgtggaatctgctctagtttctcatcctcagtgtgcagaagctgctgtggttggtgttgagcaccaggttaaagggcagggcatatatgcctttgttactccagtggaaggcttttcttacagtgaagaactcagaaagagccttatactcaccgtgcgaactcagattggagcattcgcggcacctgacaaaatacattgggcacctgcccttccaaaaacaaggagtgggaagataatgcggaggattctgaggaaaatcgcggccagacagttggatgaactcggagacacaagcacactggccgatccaggcgtagtagaccagcttattaaacttgctgatacctgaaactgaaacagaaaaacacactaaagtacctagtcaaagaaccaactcaattgcacacttgttgctggatatcattcccatttcgacagtgagttcagtatctttctggctctttatttttatcttgatggcttatatagcttcatctagtttgatttttaagtacttaatttgtctcttttttttacccatctttggaggttgcttcatccatattgatatttttattttctaaaccccccccttcccggccccggccaacctaatctttgtatgtatgtaaactaatgtacatttgtactctttcaaaaataatatagggatatgataataataaattaaaaaaaaaaaaaaatttcttcatttttttattttttttatattatatttaattttatttatattataaa

SEQ ID NO: 8563 - DNA, 620 bp, Gossypium hirsutum
  unsure (1)..(620): unsure at all n locations
  Clone ID: LIB3543-008-Q1-K6-F1
cccagcgtccgcccagcgtccgcttaggttaaagggcagggcatatacgcctttgtaactccagtggaaggcatttcttacagtgaagaactcagaaagagccttatactcaccgtgcgaactcaggtttgaattattcctatgggttgctgcataaggacaaatttaacctaacgcaccttactcgatgaaattgttggtactagcataatcttggtctgctgacaaactagcaaaaaagtaaaagaagaaaaacgttgttgcttgcttatgcttaggaactctcatatttaacctacatgatatgtagaatataaatatgaaacatgtaatagattagtgcttgtttcttttaagagatgatctataccgtcaccatagacatattagttggtgaatgtatctgagaagtccctctattatatggacctgatcaaattagtccctctactattaaataaatcaatttagtcactgtactattgaaaagaatcgcataagatcgaattgaaatagagtaaacatttattgtttaaaaaatatcatttcctgtttaacagagttaatatttntgaaagtttnttatagttctgtaaatgaaatctagaattgaactacaa

SEQ ID NO: 8564 - DNA, 428 bp, Gossypium hirsutum
  Clone ID: LIB3585-023-P1-K1-G11
gttaatttttctctgctttagatgatatttcaacttttgatatgtttttctcatcttaactggcagattactcctctaccaggggcctggccacagaagcctggttctgcaacctttcctttctttggagttcagcctgtcatagtggatgagaaaggagttgagcttgatggtgagtgcagtggttacctgtgtgtgaaaagctcatggcctggggcatttcgaactctgtatggtgaccatgagagatatgagacaacatactttaagccattccctggatattattttactggtgatggatgcagcagggacaaggatgggtaccactggcttactggaagagttgatgatgttatcaatgtcagcgggcatcgtattggcacagctgaggtggaatctgctctagtttctcatcctcagtgtgc

SEQ ID NO: 8565 - DNA, 1341 bp, Gossypium hirsutum
  Clone ID: GOSHI-09MAY01-C1433_2
cccacgcgttcgtgggtgaattctccttattacactccccgatcacatttcttgcattggccagatctgactcccccccccctctcccttttccaaaaagagagagttcccctctccatctaaaaaaatggaatatcgatcgagatctatccacaaatccacctccatcatgatctccgccatcctcttcctctctctgatccacacctctcattgcttctaccttcctggtgtcgcccccgaggacttccaaaagggagatcctttgaaagtgaaagtgaacaaattgacctctataaagacacaacttccttattcatattattccctccctttctgtccaccaaaaaagatagttgacagtgcagaaaatctcggggaagtgcttcgtggtgaccgtattgaaaactctccttatgtgtttaaaatgcgtgagccacaaatgtgttctgttctttgccggattacacttgatgccaaggctgcaaagcagtttcaggagaagattgatgatgaatatcgagtcaatatgatcctggataacctgccccttgttgttcccattagaagattagatcagggttctcctactgtttatcagcttggttaccatgttgggctcaaaggccaatacactgggagcaaggaagagagatttttcattcacaaccatttggcatttactgtcaagtaccatagggatccacaaactgactcggctaggattgtgggatttgaagttaaaccgtacagcattaaacatgaatatgaggggaaatggagtgagaacactcgtttaacaacatgcgacccccacactaaacacacagttgttaattctaacactccgcaagaagttgaagcaaacaaggagattatattcacctatgatgttgaataccaggagagtgatgtgaagtgggcatccagatgggatgcatatcttttaatgagtgatgaccaaatacactggttttcaattgtcaattctctgatgattgttctcttcctttccggcatggtagcaatgattatgttaaggacactttaccgtgatatttctaagtacaatgaacttgagacccaggaagaagcccaagaagagacaggatggaagcttgtacatggggacgttttcaggcctccatctaattctgacctgctctgtgtctatgttggcaccggtgttcaatttttgggcatggtacttgttaccatgatctttgctgtttttggatttctttccccctccaaccgaggtggtctgatgacagctatgctcctgctttgggtcttcatgggcatttttgctggctatgcctcttcacgtctatacaaaat

SEQ ID NO: 8566 - DNA, 1312 bp, Gossypium hirsutum
  Clone ID: GOSHI-09MAY01-C1433_1
cccacgcgtccgaccaaatacactggttctcaattgtcaattctttgatgattgttctcttcctttcgggaatggtagcaatgatcatgctaaggacactataccgtgacatttctaggtataacgaacttgagactcaggaagaagcccaagaagagacaggatggaagcttgtccatggggatgttttcaggcctccatctaattctgatctactctgtgtctatgttggcaccggtgttcaatttttgggcatggtacttgttaccatgatctttgctgtttttggatttctttccccttcaaaccgaggtggtctgatgacagctatgcttttactttgggtcttcatgggcatttttgctggctatgcttctgcccgtctgtacaaaatgtttaaaggagcagaatggaagaaattagcttttaggactgcgtgcatgttcccaggcattgtctttgccatcttctttgtcttaaatgcaattatatggggccagaagtcttctggggccgtgccatttgggacaatgtttgctctggtcctcatgtggtttggaatttcagttccacttgtttttgtgggtggttacattgggttcaagaagccagcaattgaggatccggtgaagacgaacaaaatcccaaggcaaatcccagagcaagcttggtatatgaacccgactttctctattctgatcggaggaatacttccattcggagctgttttcatcgagctgttcttcattctcacctcaatctggctgaaccagttctactacatctttggtttcctgttcttggtattcattatcctccttatcacttgtgctgaaataaccattgtgctttgctacttccaattatgcagtgaagattatctgtggtggtggagatcatatctcacatccggctcctcggctttgtacctcttcctctacgctacattctatttcttcacaaagcttgagatcactaagctggtttcggggctcctatactttgggtacatgctaatcgcttcgtatgcattttttgtgctaacgggcaccatcggattttatgcgtgcttttggttcacaagacttatctactcatctgtcaagattgattagtgtgtaaaaccgggatctgctttgtgttcttttgtcatattcatggaccaatgtcttaggttaagatatactcattgctttaagatgtatacttaaattctcatttttgaaccgagttgttatttttatagctgatttgagaaaaatacttaattcttgatttttgttgagagaggggcttcttgtgctcgaataga

SEQ ID NO: 8567 - DNA, 480 bp, Gossypium hirsutum
  Clone ID: LIB3585-051-P1-K1-F1
gtggagatcatatctcacatccggctcctcggctttgtacctcttcctctacgctacatgggatggtcttcacaaagcttgagatcactaagctggtttcggggctcctatactttgggtacatgctaatcgcttcgtatgcattttttgtgctaacgggcaccatcggattttatgcgtgcttttggttcacgagacttatctactcatctgtcaagatcgattagtgtgtaaaaggggatatgctttttaggttaagatatagtcatgctttaagatgtatacattaattctcatttttgaactgagttgtcattgttgtagttgattgagaaaatacttgttattcagatatttgttaagaggagtttcttgtgattcttttatcaatcattctcctgttatattggaaatgtcagaaaaacactgggtgaatttgatgattttgtaataatatcgtagcctttttattcgtttaac

SEQ ID NO: 8568 - DNA, 328 bp, Gossypium hirsutum
  Clone ID: LIB3165-051-Q1-K1-A5
ctaagctggtttcagggctcctatactttgggtacatgctaattgcttcgtatgcattttttgttctaacgggcaccatcggattttatgcgtgcttttggttcacgagacttatctactcatctgtcaagatcgattagtgtgtaaaaggggatatgctttttaggttaagatatagtcatgctttaagatgtatacgttaattctcatttttgaactgagttgtcattgttgtagttgattgagaaaatactcgttaagagaagcctgaaatacactgggtgaatttgatgattttgtaataatatcgtaccctttttattccttt

SEQ ID NO: 8569 - DNA, 234 bp, Gossypium hirsutum
  Clone ID: LIB3083-013-Q1-L1-H1
gtcaattctttgattattgttctcttcctttctggaatggtagcatttatcattctgaggacactataccgtgacatttctaggtataactaacttgagactcatgaagaatcccaagaagagacattgattgaagcttcttcatgtttatttttacatatctttattaaatttttatctattttttttttttttttacacttttattttaatttttattcatattttatttta

SEQ ID NO: 8570 - DNA, 2019 bp, Gossypium hirsutum
  Clone ID: GOSHI-09MAY01-C1423_1
cggacgcgtgggtccaactctaatggctctcaaattttagggctcattcccaatcccaatcccactcccatcccccaccccaaccccatccccatcatcccttctttctttcccatgcctcgattcttcaatcctttcctcttatccttatttttctgtgttttagggttagggtttggcgttgatttcggtcaagctttcaaagtcccctttagggtcagtgatgttctcccggtgcttccgcgccaggtatcttggccggtcttgaacactcttcattccgccgttgacttgttgccggcttttgtcggctccgtgaccccgaacaatggctcaattgattggaaaggagcttgctttcatggaaacgaggctcgtctcgagttcaccaatagcgatcgcgacgattcgggattgggcggtggtgtgcttcacctcacgacatctgaagcgcacagctggacttgtatggatctttatgtctttgcaacaccttataggattacttgggattactacttttctgctcgagagcacacattgaaatttgattcttgggaagaagctgctgaattggaatatgtaaaggagcatggaatctcagtatttctaatgccatctggaatgcttggcacattgctttctttagttgatgtattgcctctgttttcaaatactgtctggggtcagaaagccaatctcgcttttttgaaaacacacatgggtgcttcatttgaaaagcgtcctaagccatggcgcacagtggtaaatccagaagatgtgcattctggtgactttttggctgtgtcaaagatccgtggtaggtggggaggatttgagacattagaaaaatgggtgactggagcatttgctggtcatactgcggtttgcttgaaggatgacatgggtaatctatgggttgctgaatcagggcatgaaaatgaaaagggtgaagaaattatagtggttattccatgggatgaatggtgggagctgtcactgaaggacaattctaatccacagatagccttgctttctttacatccagatatacgtgcaaagttgaactccaccgcagcatgggagtatgctcggagcatgtcaggcaagccatatggttatcacaacatgatatttagttggatagacactgtagctgacaactatcctccccctcttgatgctcacttggtcatttctgtcatgtctatgtggactagagtgcagccagcatatgctgcaaatatgtggaatgaagcgttgaataagcggttagggactgaggatttggatctgtatggaatattagaggagactgaaaggcgcgggataacctttgatcaattactcactatcccggaacaagatgaatgggtctacagtgatgggaaatcaacaacatgtgttgcctttatccttgagatgtataaagaggctggggtcttcggtcccctttcaaactcgattcaagtaaccgaattcactatccgtgatgcgtacatgcttaagatatttgagaacaaccaaacgaacctgcctagttggtgtaacaatggggatggccggcttccattctgtcagattctgggcgagtattggatggagttgccattttataacagcttagaaccatatgccaatatgaatgaaaattgcccatccttacctcccatttatgataggcctacgagatgttaaaagtctgatagcaatctatttgtcgtttatcgctctcccactcatgcttgtattaaatgcaaagacgcctttctggaaaaatcctcactgtacctgcactatatattatatatgcggccactcaatttctgtaaatagtactttcagtgttagtaaacataatttgtgtgatagaggtagtcgcaatttggcccctaaaatctttgaagcccaggcccatattgtgttctgcccaatatttggagttaccacaagtgagcttgaagtcataacacgagcgaactcttgaaattgagttgctcatttctcgtgccagtcgtt

SEQ ID NO: 8571 - DNA, 509 bp, Gossypium hirsutum
  unsure (1)..(509): unsure at all n locations
  Clone ID: LIB3582-048-P1-K1-D6
ggtaatacccacgcgtacgctgaactgttgcagtcattatttctgttttacctgcattatggagtggtcaaaagtggaatctcgttgcccattgtgcaagcaaaggttcgaaactatcagttcgcaactcctgatcacgatgatcagtcgaagaaacagaagcgaatcactgtgatatggaacaagctcgaactcgccggcattccgcagagatgtgtgattttaaatgcaaaagaagccaaggatgaatatatttgcgctgttcactccaaaaaccatgttaatctgattcgaaatataagctccaaagagtattcaaagcgaaatcggattgcttccaagttaaattctatatatntgaatgaaggatcatcagagtctgcataccttgcagccggctctgtcattgaggttgctgagaaagtggcaaaaggggaattgaattctgcttttgctattgttaggccacctggacatcatgctgaatatgatgaagcaatggggttttg

SEQ ID NO: 8572 - DNA, 515 bp, Gossypium hirsutum
  Clone ID: LIB3582-048-P1-K1-D11
ggatcaggtgggggcaggagtaactacaaccgcatgaacgatgccaaaaatgaacggcgggtaggcttaatttacgatcagaggatgtgtaagcatcgaactccttatggcgatgatcatcccgagaaacctgatcgaatcactgttatatggaacaagcttgaactcgccggcattccgcaaagatgtgtgattttaaatgcaaaagaagccaaggatgaatatatttgcgctgttcactccaaaaaccatgttaatctgattcgaaatataagctccaaagagtattcaaagcgaaatcggattgcttccaagttaaattctatatatttgaatgaaggatcatcagagtctgcataccttgcagccggctctgtcattgaggttgctgagaaagtggcaaaaggggaattgaattctgcttttgctattgttaggccacctggacatcatgctgaatatgatgaagcaatggggttttgtttattcaacaatatagccatagcagcaagttt

SEQ ID NO: 8573 - DNA, 1739 bp, Gossypium hirsutum
  Clone ID: GOSHI-09MAY01-C1743_1
cccacgcgtccgaaaaaaattccccaccgatcaggtttggattgtagttcatattgaagcataaagaccgttattaatatcagtggaaatgtcgagaaaaggtttgatggagcaagacttaagtaaactggacgtaactaagttgcatccgttatctccagaagttatatcgcgccaagctactataaatataggcaccatagggcatgtggcgcatgggaagtcgacagttgttaaagcaatatctggcgttcagactgttcgtttaagaatgagttggagcgtaatattactatcaagcttggatatgcaaacgcaaagatatacaaatgtgaagatgagcggtgccctcgtcctatgcgcttcaaggcatacggaagtggaaaggaggatagtcctctttgtgatgtgcccggctttgaaaactgcaggatgaagttgctgaggcatgtatcttttgtagattgcccgggtcacgacattctcatggctactatgcttaatggagcagcgatcatggatggtgcattacttctcatagctgccaatgaaagctgtccgcaacctcaaacttctgagcatctggctgctgttgaaatcatgcgactccagcatattattattcttcaaaacaagggtgatcgtattcaagagaatgtagccatcaatcagcatgaagcaattcagaaatttattcagggtactgttgctgatggtgcacccgtggtaccgatctctgcacagctaaaatataacattgatgttgtgtgcgagtacattgtgaagaagatccctattcccgagaggaactttgtctcaccccctaacatgattgtaatccgatcatttgatgtcaataagccagggtttgaggttgatgagattaaaggtggtgttgctggtggaagtatactccggggtgttttgaaggtgaaccaatttattgaagttcgtcctgggattgttgtcaaggatgaaagcggaaacatcaaatgcacacccatatattcgagaatagtctcattgtatgccgaacaaaatgagctacaatatgccgttcccggaggtctaattggtgttggaacaactatggacccgactttaactcgtgcagataggttggtgggtcaagttcttggagaggttgggtcactcccagaagtttatgttgagctcgaggtaaatttcttccttctgccgaaggcttcttggtgttaggacaaagggttcggagaggcaaggaaaagtgtcaaagttggccaagggagagatcctaatgttgaatattgggtctatgtcgaccggtgctcgagtcatagctgtaaagaatgatttggcaaagctgcaactcacgtcccctgtatgcaccagcaagggagagaaaattgcacttagtcggcgtgttgagaagcattggcgtctaatcggatggggccaaatccaagctggaacaaccattgaagtcccaccctgccctgtttaagaactgataagcaggtaaacagaaagcaaaaacatctataagaaaaaaaggggggcagaagaatcaaattttttgttgttgaaaatgtgggaaggtagacaatttcttggtactatttttgtgaggtgtagaagaaaacattgtttgatagagaatttgattgttccttgctgaaaacatggagctttttctaggatatatgatactgtaattttttattgggataaaatctattactcggactttttatttttct

SEQ ID NO: 8574 - DNA, 426 bp, Gossypium hirsutum
  Clone ID: LIB3083-065-Q1-L1-B3
aactagtctcaagtttttttttttttaatcagttcatatggaagcagggagacaaagggagcagtgaaaatgtcgaaaaaaggtttgatggagcaagacttaagtaaactggatgtaactaagttgcatccactgtctcctgaagtcatatctcgccaggctactataaatattggcaccatagggcatgtcgcacatgggaagtcaacagttgtgaaagcaatatctggggttcagactgttcgtttcaagaatgagttggagagaaatattactatcaagcttggatatgcaaatgcaaagatatacaaatgtgaagatgaacgatgccctcgtcctatgtgctacaaggcatatggaagtggaaaggaggatagtcctctttgtgatgtgcccggctttgaaaactgtatgatgaagttgctg

SEQ ID NO: 8575 - DNA, 903 bp, Gossypium hirsutum
  Clone ID: GOSHI-09MAY01-C1703_1
gtttgctattaccaatggcctcttcccggcattgatcagtttggagtgtttggtatctgtgatgggcaccggggtgttgaggctgccaaatctgcgagcaagattctgccagagatgctggctaccattttatcggatcctgttataagagagagggttttgtcacagcatgatgcctcagatgttcttaaagatgcattccttcgagcagaagcgaacatgaataactattatgagggctgtactgcaacagttcttcttgtttgggctgatgctgacgaaaatttctatgcacaatgtgcaaatgttggggattcagcatgtcttatgaatgtcggaggtaagcagattaagatgacagaagaccataaaataagtagttattctgaaagactccgaatggaaggaatgggggagccattaagagatggggagacacgtctatgtggtttgaacctcgcaaggatgcttggagacaagtttgtgaagcagcaagattcacgctttagttccgagccttttataagtgaatctgtgcatatcaatcaaacaagtggggcatttgcactgctggctagcgatgggttctgggatgttgttactgctaagaaggcaatccagttagttgctcaggagagggagaaagagttgatggcagagtcggagaaggagaatttggcagagaagattgcgaatgttttgttgaatgaggctagaacacagcgaacgaaagataacacctcaattattttcttagattttgacagtacatctagaagaatatcttgtaaagttgatgatccctagttcttttttctttttcttttaaaggattttataatttagtgtgaaaaactatatattaattatttcaaatgtaatgctcatttctagcttgaactt

SEQ ID NO: 8576 - DNA, 567 bp, Gossypium hirsutum
  Clone ID: LIB3582-044-P1-K1-C5
accccaaaatgagtgcatggtaccttttggagttggtatgatttcggaccctatgtcgttgcgtcgagggggagagaaacttcccatggaagatgtttgctattaccaatggcctcttcccggcattgatcagtttggagtgtttggtatctgtgatgggcatggtggtgttgaggctgccaaatctgcgagcaagattctgccagagatgcttgctaccattttatcggatcctgttataagagagagggttttgtcacagcatgatgcctcagatgttcttaaagatgcattccttcgagcagaagcgaacatgaataactattatgagggctgtactgcaacagttcttcttgtttgggctgatgctgacgaaaatttctatgcacaatgtgcaaatgttggggattcagcatgtcttatgaagtaagtgtttcaattcttattgttgcaagttgtaggatttctagggttataatggtattttatgatcaaagtccatcacttggagtcttgaatagattaatatcactttgatcatgtcctattcataatcatttaagaaga

SEQ ID NO: 8577 - DNA, 529 bp, Gossypium hirsutum
  Clone ID: GOSHI-09MAY01-C1693_3
cccacgcgtccccaattattagggtttcaacacagccgatttcgatgcttccctaaccctctgttcgaccattggactaccacattccaccattgaaaccgatggaagatagctcgccctgaagtcgtttcattttcctactttaaaccccgccccaaaaggttagatttttagcccgaaaacctctcttatgcttcgatctcaacgaagaagagatggtctccaatggctcatatgcgcaggtagatcctttcctctttactttatttgctttcaaagtaaaataaaaaaaacaagagaataatcgcaaagaaagaaagcccggagatttagatcgaaaaatcaccttctgatattggttgctttttgtattgctcgtatatcttgcgtaaaaatatgtaggcattcataacctttacataaactaagaactatggctttatagccgaaggaaaaaaagaaaaaaggaaaataaattaaaaatgccattttcatttgttggtctgctgttttgctcgtgtttgctgct

SEQ ID NO: 8578 - DNA, 730 bp, Gossypium hirsutum
  Clone ID: GOSHI-09MAY01-C1693_2
ctcaagcttcgatctcaacgaagaagagatggtctccaatggctcatatgcgcaggtatggtgtccactggcatgcgttgggctttggcgcgaggtgtacggggctgtgcacgagggtacggaggccagggttgctgcggcgcaaggaaagggtgacctaggttcccgaaagtgttgaagtttttgggctttttgggctattcgagattgggcttattgggctaggatattaaatttggtttttttgggtcatgtattgggctttatatttttttttgtatttttttgttttgtgtttacacgggcccgggcagatttggcccattacaattagttttgttttattattactcgcgtcggttgaaacaataaaaaagggagaacgatgagccgagtcttccactccctcagcgaagcagaccctcagaaatagcaacagcatcctaaaataactcaacccctccctataaatctaccattttcgcaagctttcatacccagggaagagcaataaacattaaagtgacaaccaaagatatggcaaatatttccataatcgcccttctctgcttcattatttgtgtgtcctccttacttaactacgcctatggggctgctgaagaaaatatgcagtatatggttgtaggtcatgtttattgtgacacttgccggggtgaattttacaccatactcagctaaccccttgttggagtagtagagaaattggaat

SEQ ID NO: 8579 - DNA, 794 bp, Gossypium hirsutum
  Clone ID: GOSHI-09MAY01-C1693_1
tcttatccctctcgtctgaccttagaactccccctttagcgccgatctacgtctatcagcagagacgaacagccccgggcttcaaaggatgaccatttcagtcgtgggatcccttctaaaccccgatttcgacgaaatgaaggggatacgacggccaactcgcaaggtaaacctctcttttgctttctttttttgtttttgagatagatttcaaaataaaaagaaaatagaggcgtaaaaatgaaaacagggaacaacctttgcagaatattcaacttctttgtatttgattcctcttttttttgtgtaatctgttcgtagtcgtattacaatcgaaaatcaaaggcttcatagccgaataactaaagaaaacaacaatttttgtcctctgcttttgtattggcttgttgctgctttcgtttgttttcttttgcaggtacggagcacggggctgtgcgttggcgctcgggtacgggtctaggctagggtacggaggtggtacggtcgttgcgaggctgttgcggcgcaagagggtgacctagggttcccgaaagtgttgaagtttttgggctttttgggctattcgggattgggcttattgggctaggatattaagtttggtttttgggtcatgtattgggttttatatattttttgtattttttttgttttgtttttgtttgttttgtgtttacacgggcccgggcagatttggcccattacaatgtaaacatcaaaagttaaatttattattatactaataaaaattatgtacaattgatagagacattaac

SEQ ID NO: 8580 - DNA, 512 bp, Gossypium hirsutum
  unsure (1)..(512): unsure at all n locations
  Clone ID: LIB3582-048-P1-K1-G8
cccacgcgtccgaaagaaggcccggagatttagatcggaaaatcaccttctgatattgtttgctttttgtattgctggtatatcttgcctaaaaacgtgtaggcattcgtcctctttcttttttttttacaaggatcaaaagcttggctttttatagccgaaaagaaagaaaaataaatcaaaaatatacaaacgttctttgtttctattcgctgctgtttttgtttcctttcgcaggtatggtgtccactggcatgcgttgggctttggcgcgaggtgtacggggctgtgcacgagggtacggaggccaggggttgctgcggcgcaaggaaagggtgacctanggttcccgaaagtgttgaagtttttgggctttttgggctattcgagattgggcttattgggctaggatattaaatttggtttttttgggtcatgtattgggctntatattttttttgtatttttntgttttgtgtttacacgggcccgggcagatttggcccattaca

SEQ ID NO: 8581 - DNA, 706 bp, Gossypium hirsutum
  Clone ID: GOSHI-09MAY01-C1643_2
ggctgaccgagaaaataactgagctcaagggtcttctaaaagagctaaaaactgatttggacagggctaagaaagggaagccgccattgaaggatgctgatgggaagcagaagaggaacttgacccctgaagcgatagagaaaaagatagctcaaacaaatgtaaagatcgagaagatggaacgggacatgcagactaaagaggatctaaaaactgtagcattgggcacatccaaaatcaattaccttgaccctcgaatcacggttgcatggtgcaagcggcacgaagttcccatcgagaagatattcaacaagtcacttctggcaaagtttgcttgggcaatggatgtggatccggatttcagattctaatcatccgtaaggaaaaccaggttggcgccattaaattcttactccgacctaccagtccccgggaaaaaaaagagggggagaaaggaacaaccagaactcccttctttgttgaaatgatgatccatttttccatatattttttttggtcggttttagagggaaaaattcatgttatatgtcgatctaatctaaaaaaaaaaaaagttggcccatttcttttatccatccctgttgctaaagaaattgtttgctttttgaacattccctactaactgttaaatgtcgaactggatatacattgaacaatgtttcataaacagagtttaattttatac

SEQ ID NO: 8582 - DNA, 1170 bp, Gossypium hirsutum
  Clone ID: GOSHI-09MAY01-C1643_1
cggacgcgtgggcgatccaatacgtgaaacagtagaggttgagcttcctgtatacaaggcaattggacagtttcaaactgggaaaagcaaaagtgatgatctttttgatgagcttgatacgagtaaactaaatgctcatttgaaggaactcatgcctggtcttacagcgaaagtcttccgtacctataatgcttccattacattggacgatatgttaaataaagaaaccaaagatggggatgtggcggaaaaagttgtaatttatcagcgtgcaaacaaggagggtgcaatcatttgtaatcatcagcgcagtatctcgaaatctcatagtgcgcagatgtcaaggctgaccgagaaaataactgagctcaagggtcttctaaaggagctaaaaactgatttggacagggctaagaaagggaagcccccattgaaggatgctgacgggaagcagaagaggaacttgacccctgaagcgttagagaaaaagatagctcaaacaaatgccaagatcgagaagatggaacgggacatgcagactaaagaggatctaaaaactgtggcattgggcacatccaaaatcaattaccttgaccccaggattacagttgcatggtgcaagcggcatgaagttcccatcgagaagatattcaacaaatcacttctggcaaagtttgcttgggcaatggatgtagatcctgatttcagattctaatcatctaagtgaatgaaaccaggttggtgccatgaaaatcttactcccaaggaaaagacgagaggaggacaaaggaacaaccaaaccagtcccttttcttcaattatcatccatttttttccattaaagttatttacaaaatattttttttttccccgggtcagcaaaaaaattcatgttatatgtcaagctaatctaatcaagggcaggtgggctcatttcccttttttccatttttaaaaactgttcaaatgttggcaacccacgcgtccgcaaaaatagtccgcgttttagctttggaacattacttacaaactttcaaatgttgagatacattgatgaattgttcaaaaacagagttaatttatactttcccttctgggatttcatctgttattaccattttcatgtaaaagatactgcttatggttttttgagcattcacatgttgtttt

SEQ ID NO: 8583 - DNA, 849 bp, Gossypium hirsutum
  Clone ID: GOSHI-09MAY01-C1673_4
tttatctttttatcttttctttcttttttttctcctcgttttatttttttggggggttaccattgaactgcagagtggtctgaaaaactatgatccccaaaaagacaagcgtttcagtgggtctgtgaagcttccacatattcctcgccccaaaatgaagatttgcatgcttggagatgctcaacatgttgaagaggcagagaagataggtttggattatatggatgtggaagcattgaagaaactaaacaagaataagaagttggtgaagaagcttgccaagaagtatcattgcctttttggcttctgaatctgtcatcaagcaaatccctcgtcttttgggtcctggtctcaacaaagcatgtaaattcccaacccttgtcactcaccaggaatcacatagaagtcgaagggtgaatgagaccaaaggcaatggttaagttccagcttgaagaaagttttattgcatttgggagttgctgttgggaatgttgcaatggaggagaagcagtatcttccaaaatgtgcaaatgagcgtcagttgccttggttccttgttgttgaaaaattggcaaaatgtgaggtgcctctacttgaagagcaccatgggtccttcaaacaggatcttttgagttcatatttttaccttctgttatgtacggactgaaagtagtagtggggatttaatactaaaatcagtttttttcttctcttttacttagaatgtttaagtttatgttatgttctgttgttccctagaaatgttatgaatacgagacattggaattttgatttgcttatcaacttgggtttcacattatttgcttaatccacacaaaaatttccttt

SEQ ID NO: 8584 - DNA, 595 bp, Gossypium hirsutum
  Clone ID: GOSHI-09MAY01-C1673_3
cactccttctcccacgcgtactttcacgctttcggtttggattatatggatggggaagggtgtgaataaactaaacaagaacaacaagttggtcaacaagcttgccaagaagtatcatgcctttttggcttctgaatctgtcatcaagcagatccctcctctcctgggtcctggtctcaacaaagccgggaaattcccaacccttgtcactcaccaggaatcgctagagtccaaagtgaatgagaccaaggcgatggtttagttccagctgaagaaggttctttgcatgggagttgccgttgggaatgttgcgatggaggagaagcacgtcttccaaaatgtgcaaatgagcgtcaatttcctggtttcattgttgaagaaaaactggcaaaacgtgaggtgcctctacttgaagagtaccatgggcccatcaaacaggatcttttgaattggtagttacccatgtgttaagagttttgtatgtggacaaattttctgctatgttttgtcgttggaatcttagagttgtgattttgagacattggaagttttgttttgcatatcaacataaaatgtcaatttccttttttttttt

SEQ ID NO: 8585 - DNA, 904 bp, Gossypium hirsutum
  Clone ID: GOSHI-09MAY01-C1673_2
tcccggtcgaccacgcgtccggcggcccgcccctcctcttcttggcggcgccggggtaaaagtttattgtttgtggaaagagcagagattcggagatgagtaagcttcagagtgatgcgcttagagaagctatttcaaccattgtagctcagtcaaaggagaaacagcgcaaatttactgagaccattgaactccagattggtctgaaaaactatgatccccaaaaagacaagcgtttcagtgggtctgtgaagctgccacatattcctcgccccaagatgaagatttgcatgcttggagatgctcaacacgttgaagaggcagagaagataggtttggattatatggatgtggaagcattgaagaaactaaacaagaataagaagttggtgaagaagcttgccaagaagtatcatgcctttttggcttctgaatctgtcatcaagcaaatcccccgtcttttgggtcctggtctcaacaaagcagggaaattcccaacccttgttactcaccaggaatctttggagtccaaagtgaatgagacaaaggcaatggtgaagttccaattgaagaaagttctttgcatgggagtcgccgttgggaatgtagcaatggaggaaaagcagatcttccaaaacgtgcaaatgagcgtcaatttccttgtttcattgttgaagaaaaactggcaaaatgtgaggtgcctttacttgaagagtaccatgggaccttcaaacaggatcttttgaattatgcatggagtgaaatcatttttttaattgagaatgtttcaaaaattatgttatttgatgttggaaatcatgaatttttgagacattgaaaagtttttgttttgcatttcaactgaactttcgatgaatgtcaaatttccattttttttcctttt

SEQ ID NO: 8586 - DNA, 975 bp, Gossypium hirsutum
  Clone ID: GOSHI-09MAY01-C1673_1
cccacgcgtccgcccacgcgtccgcccacgcggccggcattagggtttctctcttcaggtaaattcttggttgtttcgttcgttttaagaacagagattcgaagatgagtaagcttcagagtgatgcccttagagaagctatttcaaccattgtggctaattccaaggagaaaaatcgcaagttcaccgagaccattgaactccagattgggctgaaaaactatgatccccaaaaagacaagcgtttcagtggttccgtgaagctgccacacattcctcgtcccaaaatgaagatttgcatgcttggagatgctcaacatgttgaagaggcagagaagataggtttggattatatggatgttgaagcattgaagaagctaaacaagaacaagaagttggtcaagaagcttgccaagaagtatcatgcatttttggcttctgaatctgtcatcaagcagatccctcgtctcttgggtcctggtctcaacaaagcagggaaattcccaacccttgtcactcaccaggaatccctagagtcgaaggtgaatgagacaaaggcaatggttaagttccagctgaagaaggttctatgcatgggagttgctgttgggaatgttgcaatggaggagaagcagatcttccaaaatgtgcaaatgagcgtcaatttccttgtttctttgttgaagaaaaattggcaaaatgtgaggtgcctctacttgaagagcaccatgggtccttcaaacaggatcttttgagtttatgttttaccttctgttatgtacggactgaaagtagtagtggggatttaatactaaaagcggtttttttcttctcttttacttagaatattcaagtttatgttatgttctgttgttccctagaaatgttataaatattagacattgaagttttgatttgcttatcaacttgagtttcatgttagtgttaaattgccatctgatatttgcttagtcc

SEQ ID NO: 8587 - DNA, 409 bp, Gossypium hirsutum
  Clone ID: LIB3272-054-P1-K1-G10
tctagttttgatacgtccttttttttgttcatttctggatgacttggtagctttgttttacaggtaaattttatagttttgttcgtggaaagaacagagattcagagatgagtaagcttcagagtgatgcccttagagaagctatttcaaccattgtagctcagtccaaggagaagcagcgtaagtttactgagactattgaactccagattgggttgaaaaactatgatccccaaaaagacaagcgtttcagtggttctgtgaagttgccacacattcctcgccctaaaatgaagatctgcatgcttggagatgcccagcatgttgaagaggcagagaagataggtttggattatatggatgtttgagcactgaagaagcttaaccagacaaaaagttggtaaaaagc

SEQ ID NO: 8588 - DNA, 386 bp, Gossypium hirsutum
  Clone ID: LIB3149-024-Q1-K1-G3
tcgggtttggtccggggaaagaacaaaaatccaattttgattaaccttaaaagggatgccctaaaagaacctttttcaacaatggtagctaagtccaagggaaagcaccgtaggttaattgaaactattgaactccaaatggggtggaaaaactatgatccccaaaaagacaagcgtttcaggggttccgggaagttgccacacattcctcgacctaaaatgaaaatctgcatgcttggagatgcccagcatgttgaaaaggcagagaagataggtttagattatatggatgttgaagcactgaagaagctaaacaagaacaagaagttggtcaaaaagcttgccaagaagtatcatgcttttttggcttctgaatctgttatcaa

SEQ ID NO: 8589 - DNA, 377 bp, Gossypium hirsutum
  Clone ID: LIB3585-017-P1-K1-G5
cgcaaatttcatagtgcggctagggaaaactctactgtggtaaatgtgatagttgtgctcgtggaaggaacagagattcagagatgagtaagctatatagtgatgcccttagagaagctatttcaaccattgtagctcagtccaaggagaagcagcgtaggtgtattgagactatcgaactccagattgcgttgaaaaactatgatcctcaaaaagacaagcgtcacagtggttgcttgaagttggcacacattcatagacctagaatgaagatctgcatgcttggagatgctcagcatgtagaagaggcagagaagataggtttagattatatggatgttgaagcactgaataagctaaacaagaacaagaagttg

SEQ ID NO: 8590 - DNA, 744 bp, Gossypium hirsutum
  Clone ID: GOSHI-09MAY01-C1613_1
attttgttctaagaaatagggttttaattacatgttgggcacggttttaacgttaatactccttcttcacccagtacgtcatcttcctttctctcttccgcgccggccatagtctccttcttcttcccttgccgctgtggactccctttagtcagcttcttgtcagggactatgagtcatcaggagagtcagacgttggataatgtgaaccctttggcgacgagagttcgaggatgtcattgagagaggcgataatgatttcttggacgataatcatgatcaagatgagcatagtgaaagctcccaatcccatcaagccgttcatgagagtgactcatctgaagatgaggtggctcctcgaaatacaattggtgatgttccattggactggtgcacggatgaaaaacatattgggtatgacattgccggtagaaagataacaaagaaagaaagacaagataaacttgattcctttctcgcaagtgctgatgattcaaagaattggcgcaagatttatgatgaatataatgatgaggaagttgagctgactaaagaagagatcaaacatattcgtagattgctcaaagggaaggcaccacatgctgaatttgatccatatgcgccttatgttgattggtttaagtgggatgatgcgaaacatcctttatctaatgctccagaaccaaagaggcggtttattccttcaaaatgggagagcaaaaagttgttgagtatgttagggca

SEQ ID NO: 8591 - DNA, 539 bp, Gossypium hirsutum
  Clone ID: LIB3582-025-P1-K1-B4
cccacgcgtccgggcgatagttccttcttcttcccttgccgctgtggactacctttagtcagcttcttgtcaggaaatcttcaaggtttttgactccaagtttgaggactatgagtcatcaggagagtcagaagttggataatgtgaaccctttggagacgagagttgaggatgtcattgaaagaggcgataatgatttcttggacgataaccatgatcaagacgagcatagtgaaagctcccaatcccatcaagcagttgatgagagtgactcatctgaagatgaggtggctcctcgaaatacaattggtgatgttccattggagtggtacaaggatgaaaaacatattgggtatgacattgctggtagaaagataacaaagaaagaaagacgagataaacttgattcctttctcgcaagtgctgatgattcaaagaattggcgcaagatttatgatgaatataatgatgaggaagttgagctgactaaagaagagatcaaacatattcgtagattgctcaaagggaaggcaccacat

SEQ ID NO: 8592 - DNA, 571 bp, Gossypium hirsutum
  Clone ID: GOSHI-09MAY01-C1603_1
cccacgcgtccgttatcacattgctgatgtctgctctctgtgtggaagcatccttaccaccgcaattatccagccacaaaagcgggttgttagagaggttggcgggttgcctcctgctagggctccgaagaaggttatgtgtcatgcttgccaaacaagcaaagggatggagacggtcgcaatgccttacgtttttagatatctggctgctgagttggcggctatgaacataaaaatgacaatacaactaagtagtgaagctggagcttgaagactactgcagttctcaaatgttttggcgaaatcttattaatgctgtttgatccttcaaaggagagaagggacggagataagtttgatttcagccaaacactgctccgggatggttcccggagaagtcgattttgtttgtatatcatgtattttatttatatttattctgcagttactctgagttttatgagatttttttttgttgtaattggttaaattgtagaatttggcttgataagcgaacagaactcaaattgttattttgaatcaatccaatcatctacaactattatatttt

SEQ ID NO: 8593 - DNA, 1426 bp, Gossypium hirsutum
  Clone ID: GOSHI-09MAY01-C1183_2
gaccgacgcgtccgcccacgcgtccgcttgttttgatcatctcataccataccttgcatatttttactgctcacggggtcgaagtgaagtcatctttcatacccagatctctatttttaaggttttggaagggaattggagttggctatggagaacaaccagcaatcattttggcatttcagtgatcaacttaggatccaaaattccaatttggctaatctttcgcttaacgattccatttggagcaacagttatgtctctaaaaggcctgatgaaaggaggaattttgatatcagagtcggtggtgaagttaattctgttaacaacttgaagcccaaagtctctgatttcaattctttcaacaatgatggatggaaaattggagccaccaccaacaacatagggttcggtcccatcgctccgaagaatactggaatcaacgggggtttcaacaaaggggtttattcgaagccggcgaataacaataatttcaatgttagtttgaaggggaataagaatagaggagaggatgatcatgggagcaaaagcgggaagaagaatagtaacaagaagaagaacaataacagcgacaataacaacaacgaaactaaagatggggggagtgctgctgacaagaggttcaagacactgccaccgtccgaggctttgcctaggaacgaaactgttggaggctacatctttgtttgcaacaacgataccatgcaagagaatctcaagagacagctctttggtttgcctccacgttaccgagattcagtccgggccataactccgggtctgcctcttttcctctacaattactccacccaccagctccatggaatatttgaggctgcaagctttggtggaacaaacatcgacccaactgcctgggaggacaagaaatgccctggcgaatctcgattccctgctcaggttcgcgttattacaaggaaaatctgcgagccacttgaagaagattcatttaggccaattctccatcactacgatggtccaaaattccgccttgaactcaacatcccagaggcgctttccctgttggatatatttgctgatcaacaagattcttgtatttcttaagcaacaagatgcttgagcaaaacttaaacactaggcatatcgatacaaatacagatacacacagagataatgaagagaagagtttgaagaataagtagagaaaaatagaaattatatttgtgaaagtgcctttgttagatgtaaaactttttttttcacaggctttgctgtgattttttttactgtttggcttatacataaataatacttgaaactcagtgataaacatcgacttattttgtgatgttccttaatatatgtttgagattttgttgtattagaacttgttttcaagctatgaatctaaaactacaatttaatggtc

SEQ ID NO: 8594 - DNA, 1569 bp, Gossypium hirsutum
  Clone ID: GOSHI-09MAY01-C1183_1
aatacccgactcactatatgggaaagctggtacgcctgcaggtacccgtgtccggtaattctccgtggtcgggccccccggccattcttctcttgcactcacttttcttcccttgtttaaacctaatattagattcaaatatcattagcaagattgaaatccatatattttgtttacccagtttgtaaaatcaatctatctttgaaacccatatcccatttttttattgaaagggagttgaattggagtcggagatggagaacaaccagcaatccttttggcaattcagtgatcaacttagggtccaaaattccaacttggcgaacctttcgctcaacgattcgatatggagcagtggttacgtttcgaagaggcctgacgagaggaggaattttgatatcagagtaggcggcgaactgaactccgtcaacagcttgaagccgaaggtcaccgatttcaactctttcagcaacgatgggtggaaaatcggagccaccagcaacgccaacatcgggttcggtcccatcggtccgattggatctcagaataacgttggggtcaacggtgggttcaacaaagggatctattccaagccagggaacaacaacaataacttcaatgttaatttgaaagggagcaagaacaaaggagaagataatcatggaaccaagagtgggaagaagaacagcaacaagaaaaacaataacaacaacgacaataacaacgaaaacaaggatgggaaaagtgctgctgataaaaggtttaagacactgccaccatctgaatcattgccgagaaatgaaactgtcggcggctatatttttgtctgcaacaacgataccatggaggagaatctcagaagacagctctttggtttgcctccacgttaccgtgattcagtccgggcaataactccgggcctgcctctgttcctctacaactactccacccaccaactccatggtgtttttgaggctgcaagctttggtggaacaaacattgacccaactgcctgggaggacaagaaatgccctggcgaatctcgattccctgctcaggttcgcgttattacaaggaaaatctgcgagccacttgaagaagattcatttaggccaattctccatcactacgatggtccaaaattccgccttgaactcaacatccctgaggcactttccctgttggatatatttgctgatcaacaagatacttgtatttcttaagcaacaagatgcttgagcaaaactaaaacactaggcatatcgatacaaatacagatacacacagagataatgaagagaagagtttgaagaataagtagagaaaaatagaaattatatttgtgaaagtacctttgttagatgtaaaactgtttttttcacaggctttgctgtgattgtttttcttttcttttctttcttttttactgtttggcttatacataaataatacctgaaactaagtgataaacatcgacttattttgtgatgttacttaatataagtttgagattttgttgtattagaacttgttttcaagctatgaatctaaaactacaattattggtct

SEQ ID NO: 8595 - DNA, 368 bp, Gossypium hirsutum
  unsure (1)..(368): unsure at all n locations
  Clone ID: uC-gsflnu33B081a12b1
cctacgcgttcgtaaaacactaggcatatcgatacaaatacagatacacacagagataatgaagagaagagtttgaagaataagtagagaaaaatanaaattatatttgcgaaagtacctttgttagagtgaaaactgactgtctcacaggcattggtggcgagggtattaaatgcgattctgacatatgcactgccagggtatgccgtagatgattatggcattttggagagacaagattgacttatagcgttaaggtacctaatctagggtggctgatctggttgggaatatttataatgtattatatattttaaacagtaagtatgggatgccaatgaatggatggtgaattgtatgtagaaaaa

SEQ ID NO: 8596 - DNA, 641 bp, Gossypium hirsutum
  Clone ID: AI054594.1
ttttctttttcactcacatttcttcccttgtttaaacctaatcttagattcaaataccattagcaagattgaaatccatatattttctttacccagtttgtaaaatcaatctatctttgaaacccatatcccattttttttattgaaagggagttgaattggagtcggagatggagaacaaccagcaatccttttggcaattcagtgatcaacttagggtccaaaattccaacttggcgaacctttcgctcaacgattcgatatggagcagtggttacgtttcgaagaggcctgacgagaggaggaatcttgatatcatagtatgcggtgaactgaactccgtcaacagcttgaagccgtaagttaccgatttatactttcttacatttatggatgttaatatggatcactcagtaacggtaaatttggttctgttcatttgttcgattgaatctatatatatttttggttatcttggttacattaaatgaattttctctgatcttgatctcattattactacattgctatttatatggatttatatatgtgaatttttttgacttgtaggataattaataaatttatatttaaatcttgttatcttttattaattttaattttttttatatgcttttcaa

SEQ ID NO: 8597 - DNA, 522 bp, Gossypium hirsutum
  unsure (1)..(522): unsure at all n locations
  Clone ID: uC-gsflmaxxa002g09b1
cccacgcgtccgcccacgcgtccgctaatctttcgctcaacgattccatatggagcaacagttatgtctctaaaaggcctgatgaaaggaggaattttgatatcagagtcggtgaagttaattctgttaacaacttgaagcccaaagtctctgatttcaattctttcaacaatgatggatggaaaattggagccaccaccaacaacatagggttcggccccatcgctccgaagaataccggaatcaacggaggattcaacaaaggggtttattcgaagccggcgaataacaataatttcaatgttaatttgaaggggaataagaatagaggagagggatgatcatggtagcaaaagcgggaagaagaatagtaacaagaagaagaacaataacagcgacaataacaacaacgaaactaaagatggggggagtgctgctgacaagaggttcaagacactgccaccgtncgaggctttgtctaggaacgaaactgttggaggctacatcttttgttgcaacaac

SEQ ID NO: 8598 - DNA, 334 bp, Gossypium hirsutum
  Clone ID: uC-gsflnu33B081a06b1
ctgcgcgtagccggtacgggattggagtttcgggctaggcgtacgcgtacgcgttcgtaaaacactaggcatatcgatacaaatacagatacacacagagataatgaagagaagagtttgaagaataagtagagaaaaatagaaattatatttgtgaaagtacctttgttagatgtaaaactgtttttttcacaggctttgctgtgattgtttttcttttcttttctttcttttttactgtttggcttatacataaataatacctgaaactaagtgataaacatcgacttattttgtgatgttacttaatataagtttgagattttgttgtatt

SEQ ID NO: 8599 - DNA, 1391 bp, Gossypium hirsutum
  Clone ID: GOSHI-09MAY01-C1153_1
cgccccgcccgtacggtcctttgaaacttgaaagcgaaactctcccttcaatcatttttcatttaccatttcctttataagcggtttttcattttctcaattgaactcccccctcttctctgatggaacaggtaatggcatcaattcctgattttgaaattgctgaacctggaatttcgaaagataatagtgcggaagcggagcagttcaaattccgggttgatgaaatctttcaaaaggttgacgagcttgagcaaaaggtgaatgaagtggaacaattctacttgagttcaagtaaaaagcaacagagcagttctaaaggaagctccatgggaaaggaacgagataagggaagacaagttccaagcattaaaaagcagcaacaagatgcgtcgcgacgggaagctgctgctgcaaagagaatgcaagagcttatgcgccaatttggcacaatagtgcgtcagattacacagcacaagtgggcatggccgtttatgcaacctgtagacgtcaaaggtcttggtttacatgattactatgagattattgaaaagccaatggacttcagtacgataaaaaaccaaatggaggccaaggatggtaccggatataagaatgttcgagatatatgtgctgatgtaagattggttttcaataatgcaatgaaatataatgatgaaggaagtgacgttcatctaatggccaaaactttgctggaaaagtttgaggagaaatggcagcttcttcttcctaaagtcactgaagaggagagaagacgagatgaggaggaggcggaagcacagctagatatgcagcttgtgcgggagctgctcatgcgaaagtggtccgggatttatgcaatgagctttacgaggtcgatacacatttggaacatctcagagaaacagtcgtccaaaagtgcaggaaaatgtcaaccgaagagaagagaaatcttgggacagccatagcccgattgtctatggaggatcttaataaagcattggagattattgctcaaagtaatcccgcgtttcaagcaatggctgaagaagtggagattgacattgatgctcagagtgaatctaccctatggaggttaaaattttttgtgaaggatgctttggagcttcagagtaagagtgcaatgagcacaggtggcaacaacaacaacaactataacaacaaacggaagaaagagatatgcgatgcgattgcgaaaacggccaagaaaaagagtaaaaggacttcctcttgatccatatgatgtagcataagagaagattttgcaattgcttgcattccatttcatatttgtacagtgagactatctcggtttcagatgctttagcacatctctttattataatgagctattgatgtttgatttcaaa

SEQ ID NO: 8600 - DNA, 511 bp, Gossypium hirsutum
  Clone ID: LIB3828-024-Q6-N6-D10
cttgttgttgccagccgtactcttatcacaaccttcaaaaacatccttcacaaaaagtttaacctccatagggtggattcactctgagcatcaatgtcgatctccacctcttcagccattgcttgaagccctggattactttgagcaataatctccaatgccttattaagatcctctgtagacaatctggctatggcagtccccagatttcttttatctttggttgacattttcctcattagatattgcctgaacccttttggcatgagaagcctctcgtacaagctgtatatttaactgtgcttctgcctcctcctcttcacgtcttttctcctcttcggtaactttaggaagaagaagctgccacttctcctcaaatttttccagcaaagttttggccattagatgaacatcacttccttcctcgttgtatttcattgcattatcgaaaaccaatcttacatcagcacatatagctcgaacattcttatatccgttaccatccttagcc

SEQ ID NO: 8601 - DNA, 244 bp, Gossypium hirsutum
  unsure (1)..(244): unsure at all n locations
  Clone ID: LIB3585-042-P1-K1-F6
cgggngcgaccaacgcgtccgcccacgcgtccgcccacgcttccggaggtaatggcatcaattcctgattttgaaattgctgaacctggaattggggaaggtttagtgcggaagcggagcatttcaaattccgggttgatgaaatctttcaaaaggttgacgagcttgatcaaaaggtgaatgaagtggaacaattctacttgattttaagttaaaagcaacagatcagttctaatggaagctt

SEQ ID NO: 8602 - DNA, 673 bp, Gossypium hirsutum
  Clone ID: GOSHI-09MAY01-C1143_1
cacccccgtcctcgtatctctgaaacctagttaaggtattttctccccttctcctcgttgttcctttgatctgattccagtgctaaggcttttccagggaaagtaagaaatggtgaaattttgattttaggccatttcttttcttacttctttttgattaattgatttcaaatttcctataatttatgttactgtgtacaggttcttcatggtactgtgtacaggttcttcatggtaagcaaaagtcttgatccaggactcaactaaaacatcatgaattatctagttggagctttcaagccaccgtgtaatattttcatttcattcactgatggaagaagccgcaagcaggttccgctaaagaaggaaaatgggaaaacagttatggttgctctcttccagagccaagaaagtattgtaggagaggttgttatagagccagtacatgggaagaagggcgaacataatggtgttaaaattgagctccttggtcagatagaattgtattttgacagaggccacttctatgatttcacctcccttgtgcgcgaacttgatgttcctgggtgagttgtacgaaagaaaaacttatccatttgaattctctacggtggagatgccatatgattcatattacggagtgaattgtagactaggtatatactgaaagtga

SEQ ID NO: 8603 - DNA, 610 bp, Gossypium hirsutum
  unsure (1)..(610): unsure at all n locations
  Clone ID: AI730429.1
cctcgtgccggcacgaggtaatgctttcccagcaaaagttcttcatgctccaaaaagtcttggtttggaatttcaccaaagcatcatgaattacctagttggagctttcaagctgccgtgtaatattttcatttcatttgcagatggaagaatccgtaagcaggttccactaaagaaggaaaatgggaaaacagttatggttgctctcttccagagccaagaaagtattgtaggagaggttgttatanaaccagtacataggaagaaagtcgaacataatggagtaaaaattgtgctccttggtcagatagaattatattttgatagaggcaacttctatgattttacctcccttgtgcgcgaactagatattcctggtgaattgtacgaaagaaaaacatatccatttgaattttctacggtggagatgctatatgagtcttataatggagtcaatgttaggcttaggtatatactgaaagtgacaatcagtagagactatgtcatcaacattgtggagtaccaagaatttgtggttcgcaactatactccacctccatcaatcaataacagtatcaaaatggaagtcnggattgaagattgtctacta

SEQ ID NO: 8604 - DNA, 994 bp, Gossypium hirsutum
  Clone ID: GOSHI-09MAY01-C1163_1
gcctatataaatagatatgttgattccttctttcatgcattctcaaacccagttgaaagcctagagcttagtagcaacccttaggcttcttcttcttcttcttgttcttattattatttttactctctatctcataaaacctaaaaaaaaaaaattaagctttttttgcagcttggaggatagaatagtggcgggtttttcaagcaaaataacaactggagttaagctctctcactgagaaaaaactgataagagtgaagaattggcaatcaacatggagaacggatatatcaacccggcaccaagtccacttaggaaaatcatcacggttgcatccattgctgccggcatccagtttgggtgggctctgcagctgtctctcctgacaccctacgtccagacccttggtgtaccccacgcttgggctgctttcatttggctttgcggtcccatttctggccttctggttcaacccatcgtgggatacaacagtgaccgttgcacctctcggttcggccgacgccgaccctttattgtcattggagctctctctgtctccatagctgtcttcctcatcggtttcgccaaagacattggccaccatgcgggagattccttggagagatcgactaaaccgagagctgtagccatctttgtcgtcgggttttggatcctcgacgtggctaacaacatgttgcaaggtccgtgtcgagctctcctcgcggacctctcggctaatgaccactaaaagatgagaaccgctaacgggtggttctcgtttttcatggcggtcggcaacgtgttgggttacgccgccggttcttactcccacctttacaagatcttccctttcaccaaaaccacagcctgcgacatttactgtgcaaatctcaaatcatgcttcaccatagatatcatgatcctcttgttagtaacagtaaccgcggtcacaaccgtgaaggaagatcccttcaccaagcaaatccaagatgat

SEQ ID NO: 8605 - DNA, 1708 bp, Gossypium hirsutum
  Clone ID: GOSHI-09MAY01-C1113_1
ttcacgcgtccgctttcgagagaaagtcgtttccgtacgaccaaaatcacctttcagattctctccttctctccctgtcttcttgttttctcttagatgcttttgggggcaaacgaaaaaaaaagggtattatctcttcttcttgattgattgatttttcattgataatctcatcaacaagaagaagaatctgctaaaaagaagaataagaagaaacagaggagagaagagaagagaggataattttttttttacttttattttttgagaggcaaaaaaaccccaacaatattcccatggatttgacttcaacaacgacgacgacgacgataaccgccgtgtccggagctgttaacgacaaagagttagctgtcgaccctttcttggttgaggctcttcaaaatcctcgtcatcgtctcaccatcttgcggatggaacttgatatccagaggtttgtgcaaaattcagagcagcagcaatttgagttccaacattttcccacttcttatcttcggcttgctgcacatcgtgttgctcaacattatgggctggtaactatggtttatgataatggtttagatggcctaggaaacagaatcgtggcgaagaaagcaggggaaatcaaatggcctggtgtttgtttgtctgaaattcctgccaaaaactcggaaaatgataaaccagagcaggttaaaattgctattaagcctaggccaaataatggatctctaaatgaagctaatcaaatcggcatcaaaagaagtcctgtgagaagtgttgaagagaggaaggaagagtatgacagagcacgggcacgtattttcagtagccctagtactcctgattctgacgattcttctcctcagaactctgttgatggaaaaaatgaatctcttatcagagaggagtttgaaaattaccggagctccatggttgatccagagaaaaatatgactgtccgagatggtacatctcgagtagccattttcagagacagagagaaggatcgtactgacccggattatgataggaattatcaaaggtacgtcagaagcattccatgtaaccagagcgtcggtgtggctccttacaatatgcagaagattcaacttccattcatgcagtatgattctgcttttcctcagttgggtcagattgcaaatacacaagctcccctcggttatggtgttccttcgaggccagctgtgagtccgttttgtgagctgggattgaatccaacttctagggatggtgcttacatgcagtggccaagtgctaatatgatgttttcccattcatatgatcagtttatgcatgctgtatttcaggctccgtttgtccaccaaccacctctgagctacgattattcgatgaacggttaaaaaacggtaagatttgtatttctgcaaaaaattatcaaaatctgttagggcttagtgtgggtgaattgctagggtcatgtcattgtttaaaaaatacatttggttagaccattcattccttggtttctaatttttgatggatcatattggtaggtaaggagactgtaacaatgatgtttgaaaactttgatgttgtttgaaaacttagttatatactctttcttttattaaaaaaaatcaaaaataaaaaaaaatgataaaacaatagataaatataataaaaatatacaaaaataaaagagcaaacagctcaaataaaaaggaac

SEQ ID NO: 8606 - DNA, 383 bp, Gossypium hirsutum
  Clone ID: LIB3146-025-Q1-K1-B10
cgggccggcccacgcgtacgtacgattattcgatgaacttttaaaaaacgtgttagatttgtatttctgcgaaaaattatcggagtctgttagggcttaatgtgggtgaattgctagggtcatgtcattgtataaaaaatacatttggttagaccattcattccttggtttctaatttttgatggatcatatagctaggtaaggagactgtaacaatgatgtttgaaaactttgatgttttttgaaaacttagatatatactctttcttctcttcaaaaactccacaacgacaccaagcgcacaaacactcaacttaatactctgcagcggatacatcacgcactgcctcttcaacccgttatacgatgctcttaggctcctt

SEQ ID NO: 8607 - DNA, 691 bp, Gossypium hirsutum
  Clone ID: GOSHI-09MAY01-C1133_1
cgcttcctttaatataaatatgcttcaatggctacttcttcatcatgttcctcgttgaaacaacacttccttgtatttctcattgtaataataagaagcattattaattcaccagtaaatggatgtttcacatcgattttcagctttggtgattcattaactgatacaggcaatttacttgagatttcaatttcagaacccaccaaaactcctcattctgcttttcttccctatggccgcaccttctttcaccatcccaccggccgattctgcgatggccgcttggttatagatttcctcgctgaaactttgggattttcctttttaccaccattttatggatctaaaagtggaaaatgggagaaattccaaaagggagcgaattttgcagtggcgagtgctactgcactgaattcgtcgtttcttgctgaacaaggaatccacagtgtctccaccaacatttctttgggagttgaagtgaattccttcaaacatttattgccatctctttgctcatcttcttcatattgcaaagagctcctaaggaactccttgattgtgatgggagagattggaggaaatgacttacattcatgccttcatgctggggaaacacgttgagattatccgacgacttgtccctctggttggtgacatcatttcttcatcaatcaatgagttgatcgagtta

SEQ ID NO: 8608 - DNA, 667 bp, Gossypium hirsutum
  Clone ID: GOSHI-09MAY01-C1093_1
attttaagaagtagagaaaaggcgcaaagtggccgactccgactcgccgctcccacatttacgcaacgcaacgcctcattgaacaacgaaagcggcggtggtttagggttttagtagagcaaaaacatagaaaagaaggaagtaggtaggcatggtgaagctcacggccgacttgatttggaagtgtcctcacttcttcaatgccctcaaagagcgagaattggatcttcgaggtaacaaaattgctgtaatcgaaaacttgggtgctaccgaggaccaattcgataccatagatttatctgacaatgagattgtgaagctggacaacttcccttatcttaaacgcttgggtactttacttataaacaacaaccgagttactcgtatcaatcccaatattggggagttcttgccaaatttacataccttggttctcacaaataaccggctggtgaacttagtggagattgaccctctttcatcactccctaagctgcaattccttagcctgttggataacaatattacaaaaaaacctaattataggttatatgtgattcacaaactcaaatcactccgtgttctggatttcaagaaagtcaaagctaaggagagactagaagctgaaaatctctttgcatctaaagaagcagaagaggaaaataag

SEQ ID NO: 8609 - DNA, 375 bp, Gossypium hirsutum
  Clone ID: LIB3196-052-P1-M1-A12
aatttcttcttattggtactctttgttagttcgtcacatgataggctcttttgtctcggtttacttacgatggtagattaagagatgattccaagtttagggttcattgaacaaagaaagcggcggtggcttagggttttagcatatcaaaaacatagaaaggaggaagtaggtaggcatggtgaagctcaccgccgacttgatttggaagtgtcctcacttcttcaatgccctcaagaagcgagaattggatctttgaggtgctggttcgcccttctttcgctgcaaccctaaccctcatcataataatgttctcaaaattccctttctttcctttttcccctttcaggtaacaaaattgttgtaatcgaaaac

SEQ ID NO: 8610 - DNA, 1303 bp, Gossypium hirsutum
  Clone ID: GOSHI-09MAY01-C1053_1
tcgaccccgcgtccgccacgcgtccgccacgcgtccgcccgcccgtccccccgcgcgtccggtttgtaaaccatggcttccaggcctgacattctcttggtgttcatcttcttgccttttgccaattccattcacttcaaattcccttctattttcaactttggagattctaattctgacactggtgagcttatttctgccggtattgagagccttgagccacctcatggtcaaagttactttcaaacaccctctgggagatattgtgatggccgtctaatcattgattttctcatggatgcaatggatctgccatttttaaatgcttacctggattcaattggcctaccaagtttccacaaagggtgcaattttgcagctgcaggctcaaccatccaaccagctactgcacaaagtgtcagtccattttcatttggtgttcaagtggctcagtttgtaaggttcaaagctcgggttcttgaattgctagccaaaggtaaaagacttgataagtaccttccagcacaagattattttcagaaggcgctttacatgttcgatataggccagaatgatcttgctggtgccttttattctaaaactttggatcaagtacttgcctcaattcccacaatcttgatagaatttgaaactggaataaaggcattatatgatcaaggggcaaggaacttttggatacataacacaggacctcttggatgcttagctcaaaatgtcgccaaattcggaacggatgcatctagccttgaagagcaagggtgtgttagaaagcataaccaagctgccaaaatcttcaatctgcagcttcatgcccttactaaaaaattgcagggcctgtatacagattcgaattttacatacgttgacatctacacgataaagtcgaaccttatagcaaattattctaaacttggatttgagcagcctataatggcttgctgtggatttggtggtccacctttgaattacgacagccgaatctcatgcgggaaaactaaagtcattaacggagccacagttacggccaaagcatgcaatgatagttctgaatatgttaactgggatggaattcattattcagaggctgcgaatcagtatgtttcatctcaaatactcaccggaaaatactccgatccacccttttcagacaaaatgccattccttcttagtctcaagttctgaaggcctaatatttactcattgctgcgactctctttgtaatttgtattgacttatagcagtcattgcaaatgttattgatcaaagttactgtaaagaatta

SEQ ID NO: 8611 - DNA, 601 bp, Gossypium hirsutum
  unsure (1)..(601): unsure at all n locations
  Clone ID: LIB3584-007-P1-K1-H12
cccggttcgacccagcgcctgcttcctaaggttcaacttatttcaaggggggggggggcggattttgtgatggtcgcctcaccattgatttcctaatggatgcaatggatctgccatttttaaatgcttacctggattcaattggcctaccaagtttccacaaagggtgcatttttgcagctgcaggctcaaccaggcacgctggggctgctcttagtgtcagtccattttcatttggtgttcaagtggctcagtttgtaaggttcaaagctcgggttcttgaattgctagccaaaggtaaaagacttggtaagtaccttccagcacaagattattttcagaaggcgctttacatgttcgatataggccagaatgatcttgctggtgccttttattctaaaactttggatcangtncttgcctcattttccacattcttgtttgaatccgtaactggtctaaaggccttatttgttcaaggggcacggaacttttggtttccttccactggtccctcttggatgcttcgctccgaatgtccccctcttcggatctgttgcctctagtcttgctgcgctttgttttgttcggcagcataacc

SEQ ID NO: 8612 - DNA, 899 bp, Gossypium hirsutum
  Clone ID: GOSHI-09MAY01-C1043_2
ctgagttacaaaggtttcagctctgaattggttccagagaagagaacaagaaaagaaactaagaaatggcacgcaagaagatcagagagtacgattccaagagattgttgaagcagcacttcaaaaggttttccgcctacgatttgcccatcaaatctgcacaagtgacggagtcaactgatttcaatgagctagtagagaaggagccatggcttttgtcgcagaaactggttgtcaagcctgatatgttgtttggaaagcgtgggaagagtggtttggttggtttgaatcttgatttcgctcaagttactgcatttgtgaaagagcgcctcggcaaagagtggaaatgagtggatgtaaaggacctgttacaacattcattgttgaacctttcatccctcacaatgaagagtactaccttaacatcgtctccgagcgtcttggttgtagcattagcttttcagagtgtggaggaattgaaattgaagagaactgggacaaggtaaaaaccatatttatcccaactgattcatctttcgcctcagaaactattgctccacttgttgcaacccttcccttggaggtcaaaggagaaattgagcagttcatcaaagtgatctttactctatttcaaggtatgccatatatcggttttgaatctagtactattcatatcaacatttggagcttaacattaactctttcatgtttcaaaatgccaaaatgttagatcttgactttactttccttgagatgaaccctttcacattggttgagggaaagccttatcctttggatatgagaggcgagcttgatgacactgcttctttcaagaacttcaagaagtggggtaatattgaatttccattgccttttggaagagtaatgagtgcaactga

SEQ ID NO: 8613 - DNA, 1585 bp, Gossypium hirsutum
  Clone ID: GOSHI-09MAY01-C1043_1
gaacgcagtagctctaactacctccgcctgtctttcaacgagaagagaacaagaaaagaaactaagaaatggcacgcaagaagatcagagagtacgattccaagagattgttgaagcagcacttcaaaaggttttccgcctacgatttgcccatcaaatctgcacaagtgacggagtcaactgatttcaatgagctagtagagaaggagccatggcttttgtcgcagaaactggttgtcaagcctgatatgttgtttggaaagcgtgggaagagtggtttggttggcttgaatcttgatttcgctcaagttactgcatttgtgaaagagcgcctcggcaaagaggtggaaatgagtggatgtaaaggacctgttacaacattcattgttgaacctttcatccctcacaatgaagagttctaccttaacattgtctctgagcgacttggttgcagcattagcttttcagagtgtggagggattgaaattgaagagaactgggataaggtcaagaccatatttgtcccaaccgggtcgcttttgacatcagaaacttgtgctccacttgttgcaacccttcccttggagatcaaaggagaaatcgaggagttcatcaaagtgatctttaatctgtttcaagatctcgatttcactttcctcgaaatgaaccctttcacgctggttgacggaaagccttatcctttagacatgagaggcgagctggatgacactgctgctttcaagaacttcaagaagtggggtaatatcgaattcccaatgccttttggaagagttatgagtgcaaccgaaagctatattcacgggctagacgagaagaccagtgcatcgttgaaatttacggtgttgaaccctaagggacgcatttggacaatggtagctggaggaggtgcaagtgtcatctacgctgatacggttggagatcttggttttgcttctgagctcggaaattatgcagaatacagtggagcacccaacgaagaggaagtattgcagtatgccagagtagttattgattgtgcaaccgcagaccctgatggtcgcaaaagagccctcgtaattggcggaggaatagccaactttactgatgtcggtgccacgtttaacggcataattcgagccttgaaggagaaggaatcaaagctcaaagcagccaacatgcacatatatgtgaggagaggaggtcccaattaccagaaggggcttgcaaaaatgcgggcacttggagaggaaattggcatcccaattgaggtttatggtcctgaagctacaatgacgggtatatgccaggaggccatccagtacatcactgcagctgcataagttgtgggttcttcaatacaatctctcagtttgttttaccttttttttttttgttcccggtgggacatgttcattagatttccattgaaattgtgctacaaacttcataaaataatgtttagttcatggtacggccccatctgtaatttgtttgctgagaaattaacatgagatctcaggcaaacacagaaggcatttttgagcaataaaaggcttataaatgtgctctctttgttatccccccc

SEQ ID NO: 8614 - DNA, 513 bp, Gossypium hirsutum
  Clone ID: LIB3585-012-P1-K1-E6
ctgggacaaggtaaaaaccatatttatccaacctgattcatctttcgcctcagaaactatggctccacttgtggcaacccttccctgggaggtcaaaggagaaattgagcagttcatcaaagtgatctttactctattgcaagatcttgactttactttccttgagatgaaccctttcacattggttgagggaaagccttatcctttggatatgagaggcgagcttgatgacactgcttctttcaagaacttcaagaagtggggtcatattgaatttccattgccttttgcaagagtaatgagtgcaactgaaagctatattcatgggctagatgagaggacaagtgcatctttgaaatatacagtgttgaaccctaagggacgcattaggacaatggttgctggaggaggtgcaagcgtcatctatgccgatacggttggagatctcggattcgcttctgagcttggaaactacgctgaatacagtggagcacccaacgaggaggaaagtgt

SEQ ID NO: 8615 - DNA, 438 bp, Gossypium hirsutum
  Clone ID: uC-gsflmaxxa074h08b1
tcgcctacgcgtccgctccatttatattttctctacaggtttcatttagatttcgtttacatctgatttgaaaaagttttgatttgattttcgaagtttttgatttggttgtcaaattttcagagagaaaaacaaaacaacactcccgaaatggcacgcaagaagatcagagagtacgattccaagagattgttgaaagaacattttaagaggctttccggtagagatttgccaatcaaatctgcacacattacggcatcaactgatttcaatcagctcgtacagaaggagccatggctttggtcacagaaactggttgttaaacctgatctgttgctcggtaagcgtgggaagagtggtttggttggcttaaatctggattttgctcaagctattggtttcgggaaagaaccccttggcaaacaggtggaaatgagt

SEQ ID NO: 8616 - DNA, 370 bp, Gossypium hirsutum
  Clone ID: uC-gsronu33B160e01b1
tcaaagctcaaagccgctcggatggtgctattcttgaggagaggaggtccaaattaccagaggggcctcgcgaaaatgcgggcacttggagaggaaatcggaatccctatcgaggtttatggtcccgaagctacgatgaccggtatttgccagcaagctatccaatatatcagtgcagctgcctaagtagtcggttcgggttcatgttcggtctctgttttttttttctccgtttcaagtgggtcattttcattagatttcccttttgccatgttactgaaacatttggaatttatttgctgaaaagtgaacatgaaatcttaggcataaatggcatttgtcagcaataaagatcttaaaaattttctac

SEQ ID NO: 8617 - DNA, 371 bp, Gossypium hirsutum
  Clone ID: LIB3149-020-Q1-K1-D10
gtaattggcggaggaatagccaactttactgatgtcggtgctacatttaacggcattatgcgagccttgaaggagaaggaatcaaagctcaaagccgctcggatgatgctatacgtgaggagaggaggtccaaattaccagaggggcctcgcgaaaatgcgggcacttggagaggaaatcggaatccctatcgaggtttatggtcccgaagctacggttcgggttcatgttcggtctctgttttttttttctccgtttcaagtgggtcattttcattagatttcccttttgccatgttactgaaacatttggaatttatttgctgaaaagtgaacatgaaatcttaggcataaatggcatttgtcagcaat

SEQ ID NO: 8618 - DNA, 1247 bp, Gossypium hirsutum
  Clone ID: GOSHI-09MAY01-C1063_1
gtctgttagaatccccaattttctcctctgaagaaatccccttttaatttttttacaattcttttttagaaatttctccgattctttaatttttcgatttttttaaaaataatttcgaatccaaataaaaattacaaattttaaggaaaaaaagggaggtaaattgtttttcgtgtttgtctaattttctgggggttagggtttttgatcgatctgagagaggcaggattatgggtgcgggtggcgattcaagtgagtcacgactcggtggacaatggaggaggtagaagaagagggagtgacggttaatatccgctgctcgaacggttcgaaatttacggtgaggaccaatctcgaatccaccgttggatctttcaaagctcttttggctcagagttgcgatatcccagctgatcagcaacgattgatttataaaggccgaatcttgaaagacgaccaaacccttcaaagttacggtttgcaagctgatcataccgttcacatggtccgtagttttgccccatcttcatcagcccctcctcctgttgctactacaaatgttggaactcctaatactacaccaggggtcactcgtggtgttggttctaatgagggtgctggtctgggagcatcatctttccctggacttaatccgcttggtggcaacggacgttggggtcggttgggggctgcacgacttcctgaatttgaacatgtacagcaacaactaactcaaaatcccaacatgatgagggaaataatgaatacacctgctattcaaagtttggtgaataacccagagttaatgcgcactttgattatgagcaatccccaaatgcgtgagattattgaccggaatccagagcttgggcatatacttaatgatcctagcattctgcgacagactttggaagctgctaggaatcctgaactcatgcgtgaaatgatgcgaaacactgacagggctatgagtaatattgaatcctctcctgagggatttaacatgcttaggcgtatgtatgaaaatgttcaggagccatttttgaatgctacaactatggctggaaataatggaaattctccaggttcaaacccattcgcagctcttttgggcaatcaaggcggttctcaagctagggattcacctagtaacatttctgtaactggttctgaaagcattcaaggacaaacttcctcaaacacaaatcctcttcctaacccttgaacaacactgttagaggtgtaac

SEQ ID NO: 8619 - DNA, 460 bp, Gossypium hirsutum
  Clone ID: LIB3585-004-P1-K1-C8
agaatccccaattttctcctctgaagaaatccccttctaatttttttataattcttttttacaaatttctccgattttttaatttttcgatttttttaaaaaatagtttcgaatccaaataaaaattacaaaatttaaggaaaataaaaagggaagaaaagtgtttttttttttgttatttgtttaattttctagggtttttttgatcgatctgagagaggaaggaatatgggtgcgggaggcgattcaagtgagtcacgactcggtggaaatggaggaggtgaagaaggagtgacggttaatatacgctgctcgaacggtacgaaatttacggtgaggaccaatctcgaatccaccgttggatctttcaaagctcttttggctcaaaattgcgatatcccagctgatcagcaacggttgatttataaagggcgaatcctgaaagacgaccaaaccctta

SEQ ID NO: 8620 - DNA, 404 bp, Gossypium hirsutum
  Clone ID: LIB3165-026-P1-K1-B12
cccacgcgtccgtaatgagggtgctggtctgggagcatcaattttccctggacttaatctgcttggtggtaacggaggtagttttggtttgtttggatcaggacttcctgaatttgaacaagtacagcaacaactaactcaaaatcccaacatgatgagggaaataatgaatacacctgctattcaaagtttggtgaataacccagagttaatgcgcactttgattatgagcaatccccaaatgcgtgagattattgaccggaatccagagcttgggcatatacttaatgatcctagcattctgcgacagactttggaagctgctaggaatcctgaactcatgcgtgaaatgatgcgaaacactgacagggctatgagtaatattgaatcctctcctgagggat

SEQ ID NO: 8621 - DNA, 1313 bp, Gossypium hirsutum
  Clone ID: GOSHI-09MAY01-C1033_1
gtaagttgggagaggggcatgcttcggtgggaggtacaccagagcctgcactgtggtctcattgcatagagttatgaactgtgcctacacctaacattttccccatctctatcttttcttctctccctctaaaccaaacccaaccaaagcccctctctgcaagcaaaacttaaactaggaattaagcccattctttataaattgctgcgaagggttgggttttgttcttaagatcatggatttggagttcctgcaatccatggatgttcagattcttgtgggtgtaggagtagctgttttagccattcttgttgctgctgcttatctcttttcctccaggaaacccaaaggctgcctcgatccggaaaatttcagagagtttaagcttgtcaagcgccagcagctgagtcataatgtggcgaagttcacatttgaacttcctactcctacttcagttttgggtcttcccatcggacagcatataagttgcaggggcaaggatagccaaggtgaggaggttattaaaccatatacacctactacattggattctgatgttggtcattttgaattagttattaagatgtatcctcaaggaaggatgtcacaccatttcagagagttgcgtgttggtgattatcttgctgtgaagggtcccaaggggcggttcaggtatcaacctggtcaagttagagcatttgggatgattgctggaggctctggcattactccaatgttccaagtagccagagccatattggagaacccaaaagacatgacaaacgtacaccttatttatgccaatgttacatatgaggacattcttttgaaggaagagttggatagccttgttgccaagtaccctggtcgcttcaaagtctactatgttttgaaccagcctcctgaagtctggaatggaggtgccggctttgtgtcaaaggaaatgattcagacccactgcccagcaccagctcctgatatcaagattctaaggtgtggccctccaccgatgaacaaagccatggctggccatcttgatgctctcggctattcacctgagattcagttccagttctaatcccgctagatgaggtcaagctttactcagaccaattttaatcttcttcattggtgagaacaaaaccatttgctatcaactcttgttgtaattggaactttttaagcattggaaccaagattcagatgtttttaactgttattacaagggttttccatggccatgtagttgaataatataaagttattgaagcaagtagaccctttataaaagcgagaagcgcccgcccgacccc

SEQ ID NO: 8622 - DNA, 519 bp, Gossypium hirsutum
  unsure (1)..(519): unsure at all n locations
  Clone ID: AI729559.1
tcttataagaaatgagctctgctaaatgggttgccgattacaccaaatgtttacaaattttgactccctttctcttctctgccaggaactgagccaaaacaaaataaagcaccttttgcatgagttaaaacaaggaataaataccccatttttcctcccctttcctatccattaattagaaatttgggggtctttttattagaacttagaaagataagatcttggggtatagttggaatcaggatcatggatttggaattcttgcaatctatggatattcagattcttgttggtgtagctgtagctgctttagccattgttgttggtgctgtttatctgtttgcctctacgaaatccaaaggctgtctaaatccagagaatttcaaagagtttaaacttgtgaagcgccaacagctgagccataatgtggcaaagttcacatttgaacttcctacacctacttcagctttgggtcttcncattggacagcatataagttgcaggggcaaggatanccac

SEQ ID NO: 8623 - DNA, 597 bp, Gossypium hirsutum
  Clone ID: GOSHI-09MAY01-C1383_1
cttttcctctttaaagtttttcctcatctctcaaaattcaaatattgctgcaaatatccattacaatatctgcttttcttttactttccctgtttggattataccgtaataaattgagtcgggcgggcgaggaaaaaaacatggaggcagccatgggactgatgcgaagaatgccgcctcgtcactcagagacagcactttctgctcttttaagccttttgcctcacaactcctccgatctcctctctcaagttgatctccctctccaggttttaagcgatgatgacagtgggaagaggttcattttatgcgaatacaacagagatgctgattcatatagatcaccttggtcaaataaataccacccacgattggaagatgcaccttatccatcttcaaaattgaggcaactggaaattgaagctaacgatatctttacagtctattgtgaccagtattatgaaggtggcatctcatctgtctatatgtgggaagatgacaatgaaggctttgtagcctgctttttggtaaagaaaagatggttcaaagactggacaagggcggagaggttatttggaggagggaacatgggatgct

SEQ ID NO: 8624 - DNA, 483 bp, Gossypium hirsutum
  Clone ID: GOSHI-09MAY01-C1373_2
taggccacaaaaaaagagagagagagagagagagatttcagattttgttgcagtgtccaatcattcggttttttttccttaattccccccttttttttctttaattcccagcttctctgaatctctttctgtctttcaagctgaaaaaaaaaggcaaaaaaatctgttctttttgaaagccaggtgattcagaatagagatccaggtttgggtttttcttttaaattataaagttttaatctctactttgatcagctaagagggtttattttgggtccctcaaagttgggttttgcctgttctttggttttgattaagaaacaggtccgttttttttggatatggcagctgttatagatattgttataatagtagcagaaactcagctttttatgatcctttaagagaagaggtaatggaagcacttgaaccttttatgaaaagtgcttcttcttcctctttctcccttacagcccaatttgt

SEQ ID NO: 8625 - DNA, 1608 bp, Gossypium hirsutum
  Clone ID: GOSHI-09MAY01-C1373_1
ttcggttttttttccttaattccccccttttttttctttaattcccagcttctctgaatctctttctgtctttcaagctgaaaaaaaaggcaaaaaatctgttctttttgaaagccaggtgattcagaatagagatccaggtttgggtttttcttttaaattataaagttttaatctctactttgatcagctaagagggtttattttgggtccctcaaagttgggttttgcctgttctttggttttgattaagaaacaggtccgttttttttggatatggcagctgttatagatatgtataatagtagcagaaactcagctttttatgcccccgcgtccgcccactctttcgaagcacttgatccttttatgaaaagtgcttcttcttcttcggctcccttacagcccaatttgtaccctgaatattgctccccattgaacagtagtacccacttgttttcaaaccatgggttctctaactataacaagaacatgttgggttttgagcaaacaggtagttcacttgggcttaaccaactcacccgttctcaaatccttcaaattcaatcccaaatattacatcaacaacagcagcaacaggtagcttccatggcggctgttgcaacaccaccaacaacaacctttgagaacccaagggtgggctttctttcaccaaagcctgttcctatgaaacatgtctcttccaccccaccaaaagctgcgaagctttataggggtgtgagacagaggcattggggcaaatgggtggctgaaattagactccctaagaaccgaacacgactttggcttggcactttcgacacagctgaagaagcagccttggcttacgacaaggctgcttataagcttagaggagagttcgctaggctgaattttccccaccttaagcaccaaggagctcatgtttttggcgagtttggtgactacaaacccctgcatgcctcggttgatgctaagctccaggctatctgtcaaagcttacaagcacaaggcaatccagtgaagacgaagaccctccccaaggccgcggagtttcattaccccatcaaaaccgaggagttcgatcataaacaagacaactcatcatcatcatcatcatcatcagttgatgaatcatcattagcaggatcattatcttcaccagaatctgatatcactttctttgatttctctgattccaaatgggaagacaatgaaattgaaaacttcagtttagataagttcccatcactggaaatcgattgggaagccatttgagtccctaaaaacacaactatcatgtaattttcttgtattttcttaggtctaagcatcttttacctttgtcatgtaggctttttttttctttccttagtgtctctagtggtctgtctacaatgggatttttgacatttgtagaagatcaatggaggtttttaaattaggggtatcagtttagaatttgtatcatgttaaaaaatatatatgttgtaagcgcaagagaagaggtatttcttttctcactggtcttgctggtactgttttttaattatcctagcaatggccgttggagtgcttcaactgtttatgtttggttccattattgtt

SEQ ID NO: 8626 - DNA, 846 bp, Gossypium hirsutum
  Clone ID: GOSHI-09MAY01-C1313_1
aagccatcaaaacaaaatctattctgaaaccacaagcagctgctgtcgggtgggtgggtcataaccctcacccgtagctggttatcgagaacccaccgccatgcgtctcgttgtacctctccaaggtgttgcccaaggaagaggaggcctactcctcggatctcttatcccatgcgccctcttttacttcctccaactctacctcaaacgacgtcggtctccctccgatccttctcctccttccagttcctcatccaaccagccggggatgaccagacattcttcactctccaatttgctttcacgcggaccgcttcggatatcttccctcgccacttccattgctaaacccgacgactccccttattatatggggttggatagggcctcgggggatccctatcacagaattgctaaccctgatggggttatccagctcggcttgtccgagaatagggtaaccccttgcttaaaagatgcttcctctgcctgccctatgttacttcttcaaatatttatgttgctgtttccatgcttttttccttttacagttgtgttttgatttaattgagaaatggacgtcggagaatttgagggattgggtaatgggaagagaagggggcgatttgagcattagcgggattgccacttaccagccttctgatggtacaatgaaactcaaaatggctatggcaggttttatgtcacgtgttatgggaagagatgtgtcatatgaaccatcgcagatggttttaactggctggtgtgactcctgcaatggagacgttatgcttctgcttggcagatcatgggaatgcgtttcttgttcccacaccttactatcct

SEQ ID NO: 8627 - DNA, 1100 bp, Gossypium hirsutum
  Clone ID: GOSHI-09MAY01-C1303_1
cttgattggtggaatcccaattgctatgcccactgtgttgtctgtcaccatggctattggtgcccacaggctttctcaacagggggctatcacaaagagaatgacagccattgaggaaatggctggcatggacgttctctgcagtgataagactgggactctgactttaaacaagcttactgttgatagaaacctcattgaagtatttacaaagggagtcgaaaaagagcatgttattctttatgcagcaagggcttcaaggactgaaaatcaggatgctattgatgctgcaattgtaggaatgcttgcacatccaaaggaggcacgggctggtgtccgagagattcacttcctaccattcaaccctgtagacaagagaactgctctaacctacattgattctgatggaaactggcatcgtgctagcaaaggtgcacctgagcagattatagatctttgcaaatgcaaagatgatgtcaggaaaaaagttcattcagttattgataaatttgctgaacgtggacttcgatctttagctgttgcaagacaggaaatacctgagaaaacaaaagagagtcctggatccccgtggcagtttattggcttgttgccactatttgatccaccgaggcatgatagtgctgaaacaatcagaagagctctaaaccttggagtgaatgttaagatgattactggggatcagcttgccattgccaaagaaactggcaggaggcttggaatgggaacaaacatgtacccttcatcttctttactgggccaagacaaggacgcttccattgctgcccttcctatagatgaattgattgagaaggctgatggatttgcaggagtgtttccagaacacaagtatgaaattgttaagaggctacaggagagaaaacatatttgtggtatgacaggagatggtgtcaatgatgcccctgctttaaagaaggcagacattggaattgctgttgctgatgctacagatgctgcccgaagtgcttcagacattgtccttactgaacctgggctaagtgtcattatcagtgcagtgctgaccagcagggctattttccaaagaatgaaaaactacacta

SEQ ID NO: 8628 - DNA, 591 bp, Gossypium hirsutum
  Clone ID: GOSHI-09MAY01-C1333_2
cccacgcgtccgcccacgcgtccgcccacgcgtccgggaagcttttgaataaagtagatttttttttttttttgacggggaaaaaaaacaaacaaactatgaccatgggtgctgcagacaagagggaggaagttattcaggcatggtacatggatgatagtgatgaagatcagaggcttcctcatcaccgtgaacctaaggaatatgtatccttggataaacttgctgagcttggagtactcagctggcgattggatgctgataactatgaaaatgatgaagagttgaagaaaattcgtgaagaacgaggttactcctacatggacttctgcgaggtttgccctgagaagcttccaaattatgaggagaagataaaaaatttctttgaagaacatattcatactgatgaggagatccgttactgtgtggcaggaagtggttattttgatgtacgggatcataatgataaatggattcgtgtgtgggtgaagaaaggaggcatgatagttttacctgctggaatttatcatcgctttactctggatacagacaactatattaaggcaatgcggctctttgttggtgatccag

SEQ ID NO: 8629 - DNA, 778 bp, Gossypium hirsutum
  Clone ID: GOSHI-09MAY01-C1333_1
ctttctgagcttggagtactcagccccccgcggccgcccgcgcgcccggaaaatgatgaagagttgaagaaaattcgtgaagaacgaggttactcctacatggacttctgcgaggtttgccctgagaagcttccaaattatgaggagaagataaaaaatttcttcgaagaacatattcatactgatgaggagatccgttactgtgtggcaggaagtggttattttgatgtacgggatcataatgataaatggattcgtgtgtgggtgaagaaaggaggcatgatagttttacctgctggaatttatcatcgctttactctggatacagacaactatattaaggcaatgcggctctttgttggtgatccaatttggactccgtacaatcgtccgcacgatcatcttcctgcaaggaaggagtatatcaagaactttttgcgggaggaaggtggtggccaagccgttgatgctgccgcataaaatcaacattcatctggtggtggccaagtcgttgatgctgccgcataaaatcagcattcatctctggtatcgtgtcttataaaatatgaaaccccggatttgtggtaataaataagtctaggcttgtctgcttttgatgcgtggatatggatcgttatgggtgttgcttgctatatattgcctattccatatcgaaaattcgcaaacttgctatgtatttctacattttatgtgcttactaccagattggctcttaataatcaaagtttacataatatacatttcgtcgacgcggccg

SEQ ID NO: 8630 - DNA, 387 bp, Gossypium hirsutum
  Clone ID: LIB3166-018-P1-K1-E10
gacggggaacaaaaacatacaaactatgaccatgggtgctgcaggcgaggccatggaattgaaaatttcagctattcgcataacttggtagactgaagctttattgggtttctctatggcgattttagttctttttggttgagggaggaagtgattcaagcatggtacatggatgatagtgatgaagatcagaggcttccccatcaccgtgaacctaaggaatatgtatccttggataaactttctgagcttggagtactcagctggcgattggatgctgataactatgaaaatgatgaagagttgaagaaaattcgtgaagaacgaggttactcctacatggacttctgtgaggtttgccctgagaagcttccaaattatgaggag

SEQ ID NO: 8631 - DNA, 345 bp, Gossypium hirsutum
  Clone ID: LIB3145-044-Q1-K1-H4
aattcttaaaactcgtccccaatttctccgcttattagcgttgcctggaagcggtttttttttctttgtagaataaagtagatttttttttaatttgacggggaaaaaaaacaaacaaactatgaccatgggtgctgcagacaagagggaggaagtgattcaagcatggtacatggatgatagtgatgaagatcagaggcttccccatcaccgtgaacctaaggaatatgtatccttggataaactttctgagcttggagtactcagctggcgattggatgctgataactatgaaaatgatgaagagttgaagaaaattcgtgaagaacgaggttactcctacat

SEQ ID NO: 8632 - DNA, 1006 bp, Gossypium hirsutum
  Clone ID: GOSHI-09MAY01-C1323_3
aattttacgctttcccttttttttctttttttttgccgatgttttcttcaccaaaactcatctcttacttcttccttttagccctcttctccgttgaaatacatggtagggatttctttagcaaaatcccaagcgttaacacaaatgagaaagaggtgaccaacaaagaagaacaaaccactttggggaagaaggagcaagagccaaggtttatccccgagacccaaagctatgggctttacggtcatgagtctggtcagctccctcctagcaccaccagtaccaaagaaacctatgaaccctatgtcacacctgttaaataccaccctgatgaaccctacaatagcatcccagcgtccaaaaccaacaacaaagactcttactcccacgcctccgcaaatgcctacgggaacgctgagcagcaaagtgaagccaagttcaatgggaaaggatgggccaccaaagaaaccaacaactacaatgtcaactattacaatggtaacaatgaggccttgttcactgagaaagggtggagtgccaaggaaaaccagaggggcaacaactattacaatggtaacaatgaggccttgttcactgagaaagggtggagtactaaggaaaaccagaatcgcaacaactattacaatggtaacaatgaggccatgttcactgagaaaggatggagttctaaggaaaaccagaacaacaacaactattacaatggtaacaatgagtacaacaatgttgagaagcaaggtatgagtgatactaggttcttggagaatgggaagtactaccatgatgtgagttctgagaacaactactacccgaaccggttcgagaactcgaggggagtcggttcgaggaacgagttcaacgagaaccgttacaataacatgggaaaatataatcagaatcaagaggagttcgaagaagagttcgagccatgaaaccacacgtatatgctaattaattagcaaaagagagtaaggaagaagggtttatt

SEQ ID NO: 8633 - DNA, 1209 bp, Gossypium hirsutum
  Clone ID: GOSHI-09MAY01-C1323_2
tgtcacttacattacctacaaaatcagagccactcctttcaccatgtcttctgccaatggcggctataccacagttcatttcttactttttcttttgagccctctcgttctcggaaatacatggatgggatctgcataaggaacaggcctaaatgcgaacacaaagtgagaaaaaggggaccaacaaggaactaacaaaccagattagaagaataaggagcaagagccaaggttgggccccgagacccaaaatggctatgggctttacggtcactagtcttggcatctacctactagcaccggccgtaccaaagaaacctatgaaccctatgtcacgcctgtgaaataccaccctgacgaaccctacaatagcatcccagcgtccaaaaccaacaacaaagactcttacttctataccaaggcaaatgcgtacgggagcactgagcagcaaagtgaagccaggttcaatgagaaaggatggaccaccaaggaaaccaacaactacaatggcaactattacaatggtaacaatgaggccttgttcactgagaaagggtggagtactaaggaaaaccagaatagcaacaactattacaatggtaacaatgaggccatgttcactgagaaaggatggagtactaaggaaaaccagaacaacaacaactattacaatggtaacaatgagtacaacaatgttgagaagcaaggtatgagtgatactaggtacttggagaatgggaagtactactatcgtgtgggttctgagaacaactactacccgaaccggttcgagaactcgaggggagtcggttcgaggaacgagttcaacgagaaccgttacaataacatgggaaagtacaatcagaatcaagaggagttcgaagaagagttcgagccatgaaaccatacgtatatgctaattaattagcaaaatgagagtaaagaattaaaggctttatttattgggttttgtgttttactttgtgatctttttttattttatttgcagggtttgatagcatcctttgcttttgatattgaaatgctaaaagatatgatatgggagccttatgctttttacttttcttaaacatgtatgcaataaaatgaattatatgtccatatataaaatatatcttcttccttttttaaaaaaaaaaaaaacaaaaacaataaaaaaaaaaaaaaaaaactcgagactagttctct

SEQ ID NO: 8634 - DNA, 711 bp, Gossypium hirsutum
  Clone ID: GOSHI-09MAY01-C1323_1
tcccacgcgtcctcttacattacctacaaaatctttgctttccctttttttttttttttgccaatggcttcttcaccaaaattcatctcttacttcttccttttagccctcttctccgttgaaatacatggtagggatttttttagcaaaatcccaagtgttaacacaaatgagaaagaggtgaccaacaaagaagaacaaaccactttggggaagaaggagcaagagccaaggtttgtccccgagacccaaaatggctatgggctttacggtcacgagtctggtcagctccctcctagcaccgccagtaccaaagaaacctatgaaccctatgtcacacctgttaaataccaccctgatgaaccctacaatagcatcccagcgtccaaaaccaacaacaaagactcttacttttatagcaagacaaatgcgtacgggaacactgagcagcaaagtgaagccaggttcaatgagaaaggatggaccaccaaggaaaccaacaactacaatggcaactattacaatggtaacaatgaggccttgttcactgagaaagggtggagtactaaggaaaaccagaatagcaacaactattacaatggtaacaatgaggccatgtcactgagaaaggatgagtctaaggaaacccagaacaacaccctctattacattggtaccatggtgccacatgtgaaaacaggatgatgttcc

SEQ ID NO: 8635 - DNA, 1109 bp, Gossypium hirsutum
  Clone ID: GOSHI-09MAY01-C1243_1
ctgggttttcactgaacaggctctccctgttgatctaattaagaggggaatggcagtgccggattcgagctgtccctatggactcaaattgatgataaacgattacccatacgccattgatggtttagaaatctgggccgccattgaaacctgggtaaccgagtactgttctttctactacccatcagatgaaacagttaaaaatgacactgaaatccaatcatggtggtcggaggtcaaaaacgaaggccacggcgatttaagaaaagaaccatggtggccggagatgaacacattagctgatctcacccaagcatgtaccatcatcatatggatagcttccgctttccacgcagctgtcaatttcggacaatacccatacgccggatacctcccaaacagaccaacagtcagcccgcggttcatgccggaaccaggcaccaaagaatacgacgagctcgaaaacgacccagatttggctttcttgaaaacaatcaccgcacagttccaaactttactgggtgtatcacttatagaagtattatcaaggcattcaaccgatgaaatatacttggggcaaagagatacggcggaatggaccaccgacgatgaacccttagcggcatttgaaagattcgggaagaaactggtggaaattgagagtcggattatggaaagaaacaatgatagtaaattgaagaacagagttggaccggtgaaggtgccgtatacattattgtgtcctagtacatcggattattgcagagaaggtgggcttacagggaagggaatccccaatagtatctcgatataaagctctttgccattggcaggctttccatggcaggaaagtatcgatttatgggaatataataggttttcctttttttttctttgtgggtgtgtaaacttcaaccaaaaggtaagttagagatgtcaaagaataaattagattcattgcttgtgcagaattagataaataaataaaggcagtttctgaatatgatcggagaatatagggaagagtggtccaagtggagaggatgacttagggatgccaactttatttggattaatccgataattctagcattttttttttcgatttt

SEQ ID NO: 8636 - DNA, 898 bp, Gossypium hirsutum
  Clone ID: GOSHI-09MAY01-C101228_1
gtccgaggcaggcaacgaaaactgggatgacactgtgctaacaaaagagaaagagaagcagaatgcagagaaaagtggaggcagtcatcaagagagaaagagccatggcctatgcatattccaaccagctatggagagctgctccgggatccggcattcgctctggcggatttccatggtggtggaactggttcgatcatccactaccgcccgtcaatgctcctggaagccaaggcacaaagagtttccaactcaccccaccaaggccaaattcccaactgaagcctagttcaaggccgcagtcaagcggcagcaggcaaaggcaattcacctatgacaacatcatggaaactcctacaccaaaatccacaaggtccaccattctccatgccaaaagacggatgcgaacaccgccttcaagttcaagaccaagggctagaggagctgcttcaccattcgacttgcacgtaaaggacgatgatagccttatgagttgcccaccattttctgttccaaactacatgaatccaacagtttcaaccaaagccaaaaccagagctaacagtaatccaaaggagaggcatgttggtactccccaaagcgagtcaaatcggaggctttcgtacccattaacacaagggattggttcatacaggtcgaacaaagggtctgtaggcaatatgagtgttgattcaacaccatctacgcctgctaccatcactggtggaagaaagccatttaacagatttgtgtgatttatttatttatttttctttttctctgatttaacacttcattacttatttattatttattgtgggtgtgtttttcttgattgagcgtatgtgtatggttatatatgctgtaaactacgatattaggaaattgtggtttgaat

SEQ ID NO: 8637 - DNA, 485 bp, Gossypium hirsutum
  Clone ID: GOSHI-09MAY01-C1213_4
ctttctttgagtttgagataataaagaagaatttgagagagggaagggaagaggaggtgtcccaaatgacaaattaattttcaaattccaattcaccacataaaaggaaaagaaaattattgggggaaagcacaaaactgaaaacagataagagaagggaagggaattatggaaggcagagaagagattaagggatcaaaacccagttttcctttaagcttttgggaggtgacgatggcttttacggtggtgatgggttttgttttggggcttgggggagtttatttaaccatgcccgcttctgattatagcttccttaaattacccagaagccttgaagatcttcatatcctcagagatcaccttgaaatctacacaagtgactacaccctacaagtcttggtggggtattgtgcagtctacattttcatgcaaactttcatgattccgggaactgttttcatgtcattgctcgctggagcatt

SEQ ID NO: 8638 - DNA, 639 bp, Gossypium hirsutum
  Clone ID: GOSHI-09MAY01-C1213_3
cccacgcgtccgctttgaattaaagaagatacgggaggggatagagaggggaaggaaggaaggagaagtagtgtcccaaaaggcattttaaatctctccctatttacaattttgttggtttttgtttcttccctcgcgcccggttttctttttcttcttcaaggggggaaggctgaagaaaacagagaaaggaagggaatctgaaaccaaaagggagcaatggaagggagagaagagataaagggatccaaacccagttttcctttgaccttttgggagctcgcactggcttcaacgatggtgtttgggatcgttttggggcttgtaggcgtttatttaaccatgcccgcttctgattacagcttcctcaaattacccaggaaccttgaagatcttcagatcctgagagataaccttgaatcctacacaagtgactacaccgtacaagtgttggtggggtattgtgcagtctatattttcatgcaaactttcatgattccaggaactgttttcatgtcattgcttgctggagcattgtttggagtcttcaaaggtgtagctcttgttgtgttcactgccactgctggtgcctcttcttgctacttcctgtcaaaaatgattgggcagcccctcgtcttt

SEQ ID NO: 8639 - DNA, 665 bp, Gossypium hirsutum
  unsure (1)..(665): unsure at all n locations
  Clone ID: AI055392.1
tgagatttcatgcaattcttttatgttttattttctctgtaatttaacaagttatgggatccatctggttttcaagcaattggagcctttttagtttcgtttttttcttataatgaatttgggcaacaaatgaatgaattttggactggactgcaatgtacttcagctcataaggatcaatggtgcagagaatagaactaagaataccatagaataatgtggggcaatatttattggttaatgctaagtttgattcgattatgtgagatggtttagatatttgctttaaagagatagttggtgagaaaatgcatttggttaaagagggtatacaatgaaatgaactatcatgttctgatcatttgagctctccaggttcacaattaaagcatttttcttctcgttggcttatcctaatccctgtgttatcagtctcttgtgatgttcgttgtgttgctttgatatgcatngattggtttcctcaatgtatcattgtagagatcaccttgaaatctacacaagtgacttcaccctacaagtcttgatggggtattgtgcagtctacatttcatgcaactttcttgattccgggaactgtttcatgtcattgcttgcctgagcatggttgtagtcttagaaggtgtacccttcgttgtaccctggct

SEQ ID NO: 8640 - DNA, 663 bp, Gossypium hirsutum
  unsure (1)..(663): unsure at all n locations
  Clone ID: LIB3543-062-Q6-K6-H10
ngataattttcaaattccaattcgggggggggggggggagaagaaaatattgggggaaagcacaaaactgaaaacagataagagaagggaagggaattatggaaggcagagaagagattaagggatcaaaacccagttttcctttaagcttttgggaggtgacgatggcttttacggtggggaggggttttgttttggggcttgggggagtttatttaaccatgcccgcttctgattatagcttccttaaattacccagaagccttgaagatcttcatatcctcagagatcaccttgaaatctacacaagtgactacaccctacaagtcttggtggggtattgtgcagtctacattttcatgcaaactttcatgattccgggaactgttttcatgtcattgctcgccggagcattgtttggagtcttgaaaggtgtagctctcgttgtgatcactgccactgccggagcttcttcatgctatttcctgtcgaaattagttggacgcccccttgtcatttccctttggcctgacaagctgagcttcttccaagctcaggtggctcaaagaagagaagcctgttgaactatatgcttttcttgaggcttactccaactttgccggacacattcattaatgttgcttcacctattgttgatgtgcc

SEQ ID NO: 8641 - DNA, 666 bp, Gossypium hirsutum
  Clone ID: GOSHI-09MAY01-C1203_1
atttttcatttctggagaacatagattctgaggaagagatggccgccgcgaactcgctgcaaaaagtaacgagccaacttcgagtggctcggagcacgttgggttcgttctcgagagccttctcttcagatgcattggttgaggttaaaccaggcgaggttggaatggtttccggaatccctgaagaacatcttcgtaggagggttgtgatttattcgcctgcaagaactgcaactcaacaaggatctgggaaagttggaaagtggaagatcaatttcgtgtcgacacaaaagtgggagaacccattgatgggttggacatcaactggtgacccttatgctaatgttggtgattccgcactcggttttgatagtgaagaagctgcaaagtcttttgccgagagacatgggtgggattatgtggttaaaaagcgccagacaccagtgctgaagccaaagtcctatgccgataacttcaagtggaaaggacctgctgtatctgaaaagtgatactatactattgcagatcctgttgcttttgattttcaaccataaatcaagttgcgagacgggggctcaggttttctttgttgcacattttctgctgtatcttgtgacaatttggattaaaataaatgtgatcaacagtgaccagatgggtgcgacc

SEQ ID NO: 8642 - DNA, 793 bp, Gossypium hirsutum
  Clone ID: GOSHI-09MAY01-C2943_1
tttagaaaagaatggccatcatcacttacgagagactagaggactctgcttgtgagaggaacagacagttaccaccgtcttaaggaggccaaggattggggctggctatcggttcatagacatgattactgaacctcataggctaattcgtcggtgtgaagttacagctattctcattttgtatggtcttcctaggttactgacaggatctatcctggctcatgagatgatgcacgcttggcttaggcttaaaggttatccaaatctgagtccggtagttgaggaaggaatatgtcaggttttggcgcatatgtggttggactctgagatctatgctgcggcgggaagtgatgcagcttcatcgtcatcctcgtcatctgcatcttcttcttcatcatcatcaccatcatcatcctcttccacatcatcaaagaaaggaaagcgctcggattttgagaagaaacttggcggcttttttaagcaccagattgagtcagattcatccacagcgtatggagagggattcaggcaaggtaatcaagcagtgaacaagtacggtcttaaaaggacccttgatcatattcggatgacaggaagcttccctttttgattcacgaatctttcttttcacataattcgagaaccagattcctgtctattaaaatcttatacaatagaaaaaaaatacagaaataatacattatagaactgaatcagcaaatgaagatgttcatttgcgactactgtaattatctgctcacatagtatgttattagttattacactgtacttg

SEQ ID NO: 8643 - DNA, 504 bp, Gossypium hirsutum
  Clone ID: GOSHI-09MAY01-C2973_3
caagagcacgggcaagcccaaagccaggtttaagtccccccggagtatctgctgaaagaacagaaaggccatctgttggccaagagattcgacccacgcgtccgcccgcgcgtccgccctcgcctccgcggaatgtctctggccatggtttgcatggtgatcagtctagacacagatcttcagatgacgtgccatcatccaaggatgcgcaacctgattctgaaaggacacgctcctcttcgagaaatgatagtgcttcaaagcggcctgttgttgtatcaggcaacagccaacctggctcctctggtgagccaagtgagaatcgttctagcagattattctcaagcagtggtcgcatgtcaacgactcagagagttcaacccggctttgaatctaaatcatcatctttcactcgtactgcagtcacaagagccggccgtgatgacaccctccgaagctttgatcttttgacgatcgggagtgggaaaaggaaataaaccacac

SEQ ID NO: 8644 - DNA, 682 bp, Gossypium hirsutum
  Clone ID: GOSHI-09MAY01-C2973_1
gcaaatcatatccttctgagttcacatcggacgcgtgggttccattattgccgatcgctacggtttgaagacaaaccagattacgcatacctgaagaggctattccgggaccttttcattcgagaaggttatcagtttgactatgtatttgattggaccatgctgagatatccacaggctgcctctagctcaagagtacggccaagcccaaagccgggtttaaatccccaaggagtatctgctgaaagaaccggaaggccttcagttggtcaagagattcgagaaaggttctctggtgctgttgaggcatttgcaagacggaatggatcagggcatggtgatcagtctagacacagatctcccgacaatgtgctatcatccaaagacacgcaacctggttctgatagggctcagtcttcctcgagaaatggtagtacttcaaagaggcctgttgtatcaggcagccgacctaactcctctggtgagcctagtgacaaccggtctagcagattggtctcaagcagtggtcgcctgttaacaactcagagagttcaacctgggtttgaatccaaatcatcaacttttactcgtactacagccacgagaagtagccgcaaccatgcccttagagcttgagttcttgacaatcgggagcgggaaaaggaaataacagcactacaca

SEQ ID NO: 8645 - DNA, 622 bp, Gossypium hirsutum
  unsure (1)..(622): unsure at all n locations
  Clone ID: AI729639.1
gccggcaccaaaaagcagaagtatgacaaaattagtgaaaagaagatgctaactcccatagaggtcctgtgcaaatcgtatccatctgagtttacatcttactttcattattgtcgatcgctacggtttgaagacaaaccagattactcatacctgaaaaggctgttccgggacctttttattcgtgaaggttaactcactatttaaagtcccattgttcatatatctgtcacttttctaatatttgaaaatttaaccaatcttttcattagttcttcatcacaagtttgggtgagatcttttattgtaaaatctgcttgattgaactcccgaattaataaccggtgcaggatatcagtttgactatgtatttgattggactatactgagatatccacaggttggctctanctcaagagcacgggcaagcccaaagccaggtttaagtccccccggagtatctgctgaaagaacaaaaggccatctgttggccaagacattcnagaaaggttttctggtgcagttgaagcatttgcaaaacggaatgtctctggccatggtttgcatggtgatcagtctagacacagatcttcagatgacgtgccatcatccaaggatgccc

SEQ ID NO: 8646 - DNA, 425 bp, Gossypium hirsutum
  unsure (1)..(425): unsure at all n locations
  Clone ID: LIB3083-106-Q1-L1-A7
gatccnncccgggctggcaggnannattcggcacccgaggacttatacttgtagatnnatccacaggnnttggctcttagcacaaggaagcacgggcnnaagcccaaagccgaggttnntaagtccccccggagtatcntgctgaaagaaccagaaaggccatcntgttggccaagagattcgagaaaggttttctggtgcggttgaggcatttgcaagacggaatgtctctggccatggtttgcatggtgatcagtctagacacagatcttcagatgacgtgccatcatccaaggatgcgcaacctgattctgaaaggacacgctcctcttcgagaaatgatagtgcttcaaagcggcctgttgttgtataaggcaacagccaacctggttcttttggtgagccaagtgagaatcgttctacca

SEQ ID NO: 8647 - DNA, 958 bp, Gossypium hirsutum
  Clone ID: GOSHI-09MAY01-C2963_1
gaaagagatggaggaattgcttgaaagagaaaagcaagaagtacaaaagatgaaggatcaacatgatgaatttattaaagagctgcagatggttaaggaccaaaaggcgatacttgaaagccaaattgtggagtcccaacgtgcagtggaggggctggaggaaaaaatgttctcggctgtgggacttctgattagttttaagaaaaaacgggatgacttgagaatagagcatgaaaatgccataagggtgttgaaaaatctgaggaaacttgtaaatggtggagattcaagctttcctgggtcccaaatccttgaattttctttcatagagattaacaatgccactcgtgattttgatccttcttggaagattggagaaggaaaatatggaagtgtatacaagggtctccttcgccatatgaatgttgctataaaaatgttgccatcttatggctctcaaagccttttcgaatttgagaatgaggtagagatattaagtcggattagacatccaaatctggtaacaataattggaacttgcccggagtccaggtcactggtctttgagtacctcaggaaccgcagtctagaagagccccttgcctgcaaaaataaatctccaccacttccatggccaaactcgaattcgcattgcttctgagatatgctctgctcttatcttcctccattctaataagccttgtatcccccatgggaacttaaaaccttctaaggtccttcttgattccaatttcgtatcaaagctcattgacagtggcatttaccgcttgattccacaaggcaaaagtactgatacttctgctttgtcatctggttatatggatcccgtgtatcttgagaatggagaaggtactcgagaatctgatgtgtactcatttggaatgatactgttacgacttttgactgggagatcggctttggggatcttgaatgatgt

SEQ ID NO: 8648 - DNA, 526 bp, Gossypium hirsutum
  Clone ID: GOSHI-09MAY01-C2913_1
acgcgtccgcccacgcgtccgctttgtcctccattttttttctctttgatttttcattgctttacactatttgatcaatcagaagctcaaccctaaaagtttcattagaatgaacagtgttaacctttctcatcaatatcctcgaacatcaagctttacttgtcttaactcttgcttgacagaacactggggtgatttgcccttaaaagtcgatgactctgaggatatgatcatctacaattcccttcatgaagctcttaacttcggttggtcaccgacgacgacgggttcaacggcggcaactacaattaaacctgagccgaaagatgaatcagcagagatcatggaaaacgcgaagccaatggagttgactcaaaaagtggtgaaagggagacattaccgtggagttaggcaaaggccgtgggggaaatttgcggcggagattagggactcagctaggaatggagcaagagtgtggttgggtacgtacgagacagctgaggaagctgcttggcttatgatcgag

SEQ ID NO: 8649 - DNA, 399 bp, Gossypium hirsutum
  Clone ID: LIB3146-061-Q1-K1-D8
gttctttgcttacaaatttggtattggatctttatccaaatctcaaatcgtaaattgcatagaatgaacgatattagtctgtgtgagtatagcttttctcatcaatatcctcgaagtccaagctttacttgtcttaactcttgcctgacggaacgatggggcgatttgcccttgaaagtcgatgactctgaggacatgcttatatacaactcccttcacgaagctcttaattttggatggtctcctttcgattcaacgctgccaactgccattaaagactagcctgaggtgttgacaccagttattaaaagtgaactccatcgggtcgactcaacccgtatcttctgcaacaactcaaatgtttttcggaacctgtttcatgggaataagcagtgaaaa

SEQ ID NO: 8650 - DNA, 757 bp, Gossypium hirsutum
  Clone ID: GOSHI-09MAY01-C2903_2
attgcagagtgtcactcaagaaaacgaggaactccaagctaaggaagctgcttctcttaagaaaatcgagcagttggtgaagttgttagaagaagctacaatcgaaaagcaaaatgaggagaacggagagttatcggacagtgagaaggactatgatttgctgcctaaggtagttgaattctctgaagagaatggacatggaagtgaagaaaagcctaagctagagctgtcatcggaacaacctgatgagctgaaaaaagaatccccggacctaaacgatgactcgaaagatgagcctcttcaagcagagggtgccaaagaggagaacttgaatggaaaagcgaacaacaacgaaacgaaaggcaaagaggatgaatcagttgaatttgaattcaaaatgtgggaaagctgcaaaatcgaaaagaaagaattttcacccgaaagggaagccgagcaggaatccctcgacgaggaagtggaatcaaaagtggagggtagtgagagtgttgatataaatggttcgacagaaaacattgatgatggcggaaactcaccatcaaagcaacagcaacagaaaaagaagaagccattactacgtaaattcggaagcctactgaagaagaagggaagcagcaaccagaagtagataaccaaaatcagccatggcatgatttagtccctaccaacagacaggtatattggatactatcttgcagctgaatgtgtttgcttaatttgctgatttgcttctaatgtt

SEQ ID NO: 8651 - DNA, 511 bp, Gossypium hirsutum
  unsure (1)..(511): unsure at all n locations
  Clone ID: LIB3584-013-P1-K1-F2
gcgagatacttggatagaatcttgtatgtgatggagataattctttgaggaggaagtggaatcaaaggtggagggtagtgaaagtgttgatataaatggttcnacagaaaacattgatgttgggggaaactcaccatcaaagcaacagcaacagaaaaagaagaagccattactacgtaaattcggaagcctactgaagaagaagggaagcagcaaccagaagtagataaccaaaatcggccatggcatgatttagtccctaccaacagacaggtatattggatactatcttgcagctgaatgtgtttgcttaatttgctgatttgcttctaatgttcccaataggttttaatttgaagaggcttgtataatgtttagtgtcttaaattttatccctcttttttagatttctacatttgattcttcatgttagatacttggatagaatcttgtatgtgatggagataattcttttttcttttttgcttgttcttcatatctaannatcatt

SEQ ID NO: 8652 - DNA, 574 bp, Gossypium hirsutum
  Clone ID: GOSHI-09MAY01-C102908_1
gaaaatgaagtgttctttgtgtccctgattctgtggaattactcccaacgcagccagatttgtctagacctcgcattcgtattgtggttcatgaaggaaggaatcatgaagtccgtgaacttgtgaaaaatgctgggcttgagattcattcattgaagcgtgttcgcataggtggtttcagacttccagcagatctcgggatagggaagcatatcgagctaaaacagagcgaccttcgcacaatgggttggaagagttaaagaagtcgctgcttcatggggagactgttggaagagtcatagaagtcactgcatcattggaagcatctgcattttgcttgggtctcccatgttgggagaggcttcaatcagatattacacatcccttgtgtcgtggatttgtctagagcatcggaaatgatcccttaatggcaacagtataagggacttcatgtcatttctcatcgaaatggatcaatgttgccagaaaatccccgccccttagtttggaaaagccataattctcgaattacaattgtgtgaaaatcatttattcatagatggaagttcccagt

SEQ ID NO: 8653 - DNA, 507 bp, Gossypium hirsutum
  Clone ID: GOSHI-09MAY01-C102858_1
gcaattcgcaatatctctgctgactcccaagctgccctgaccataccgatggctacatcatcgaatctgaacagatagttatgtacaactcctaatctgtaaagatgatgttgaaagtataaataattgcacaaatcagagctacttggaaccgccagttaatctcgttgcttctatttattttggcatgtccatcacacactgcaggaaaaaacaacgtcttaacttgtttttccattgattctgcacagattattcggggcgtcggttgttatatttggagaaagtgaccttctgagataaggtgaagtagaaaatctgcaaagaaatacttggactgttttaaactgtagtgttatgagtttttggttttgttttgtcttaactgtacattggtgggtgggattagaggtgtccattcccaggttggctttgtttgcccaaacttgattagattttaaagctcgttttattgttttaaatatatgaaaaggtaattttgatatc

SEQ ID NO: 8654 - DNA, 522 bp, Gossypium hirsutum
  unsure (1)..(522): unsure at all n locations
  Clone ID: AW187708.2
aatagccattgctggtgtggcggcatacaataatcacaagttgaagagggaagcaattcgcaatatctttgatgactcccaagctgccctgaccataccgacggntacatcatcgaatctgaacagatagttatgtacaactcctaatctgtaaagatgatgttgaaagtataaataattgcacaaatcacagntacttggaaccgccaattattcgggggggggggtacattgttgtgccactatcgagctgctgcgccggttgttatatttggagaaagtgaccttctgagataaggtgaagtagaaaatctgcaaagaaatacttggactgttttaaactgtagcgttatgagtttttggttttgttatgtcttaactgtacattgctgggtgggattagaggtgtccattctcaggttggctttgtttgcccaaacttgattagattttaaagctcgttttattgttttaaatatatgaaaaggtcatttttaaaaaaaaaaaaaaaaaaaaaaaaaa

SEQ ID NO: 8655 - DNA, 1145 bp, Gossypium hirsutum
  Clone ID: GOSHI-09MAY01-C2863_1
cccacgcgtccgtgattacaaggatgctaagttcttcataatcaagtcatacagtgaagataatgttcacaagagtatcaaatacggtgtttgggctagtacacctaatgggaacaaaaggttagatgctgcttaccgtgaggccatggagaaccaagacaattgcccagtgtttctcttcttttcggttaatgccagtgctcagttctgtggggttgcagaaatggttggacctgttgattttgacaagagtgtggattactggcagcaagataaatggagtgggcaattccctgtcaaatggcatattatcaaagatgttccaaacagtcagctgcgtcacatcatactggaaaataatgataataagcctgtgactaacagtagagacactcaggaggtgagactggagcaaggaattgagatgttgaacatctttaaaagttttgaaactgatacatcaatcctggatgattttgacttctacgaggacaggcagaaagcaatgcaggagcgtaaggctagacaacaagctagtctcatgtctgtcggggttgtaggagaaactgagcatagaaataccgtctctctatccaacgacttcatgaagcagatgtcaaagagctttgctcaagttgtgtgcttggatgatggcaataaagatggcaccgccattgagagaacaagttctgcttctgatggttcgaaagttgcaagggttaaacttgaagatgctatgacggcagctgtctcttctggtcaggcaagttaagaaataagcattctgggtatttcgggcagccttgctttactgtatgtgacacaaacttcttttttgcctttttattttattttgtgagatgttggtgaaattcctttggagtgcattggaagtcgaacaaggtctagtatggggctgatgtgcttcatatgtaatatttgcctgtagtcatcagtttttgtttttgcttttgtttgtttctttaacggtagtcattagtttcttcattccttgcattctaccattgctttgctctttcaggtgagtataatagtgaaggtaatgggctgatttcatgctttgtaaagttcccccatctttgcaggtagtttaataaaaaagaatacaacaattggtgttgtgg

SEQ ID NO: 8656 - DNA, 404 bp, Gossypium hirsutum
  Clone ID: GOSHI-09MAY01-C102818_1
gcgttcgcggcgcgtgggatactcaactgtacaaacataggaagagttgaactcactataacaggatgcagtttttgtgtagttttagagcatttggactttggtcaaatgctgtaggagcatggttgtttatgcatttgagaagatgctattgggttctgcgtgattatttgggttcttttttgtttttaggtgatctggagttggatatatatatatataatattatgtaaaaaatggatatatttgctatcaagagttgaggtttttgagggttaagatgtaacatagtgccatttataggaaattgtatagtgcaaaaagacattttgttagtcacgtatcttagttttctatgaaatggatgtaaatgacaaaattagactgtgcagtgcacctcgttg

SEQ ID NO: 8657 - DNA, 577 bp, Gossypium hirsutum
  Clone ID: GOSHI-09MAY01-C2823_1
cacaaacaagagagtttttagtgatctttccattttttctttattcctttgttcatcggagtgaagaaaacaatggggtggtgggataattcatatcacgaagctaagaaactcctcatttcacccgccatgaaacaaccctttcacttgctagcaaccctcctcctcagcctatggcttccccttgctttcctcctcgtcgccaggctatcttatgttaactacaccttaaacgccaccgtgttagacccttcttctacaccttccccaccatcgttccttttctctttctacttgtacaccaatccagctcttctttatttcctcgttgcagctattagcatcgtggctctggttcatggtttgactgggaaagtcagcttcgtaactgagtcaccgagttcttttcatcgaccccatttgcatattgcatggattattttatgtatagtgcaagtttgcgttgggttggggattgaaggaagcgtagcggtaggtatcaacggtgctgggtttggggttcgaaggagtgttttaagtagattaatattcttcttgggtttgcatgaggtgatgc

SEQ ID NO: 8658 - DNA, 632 bp, Gossypium hirsutum
  Clone ID: GOSHI-09MAY01-C2583_3
cagtttttcctttaagaaaaaaagcagcagaactccttcattccaactcagtgctcatggatgcgcaagaaggaactcagcagtcacagcagctaatccttgctcacaaagtcttcctcctcaagcaccgggatgtccctgacatcgagaaggtccgcctcaaggatgaggtcctaaacaccgtcaaatccaatgatatgactccatattatgaaaacctagtcgccgacaaggtgctggacctggaccacagcgctttggactcgatgcgtgcaaagaatgaggaagagattaaaaagctcgacgaaaagattgctgatgctgaagaaaacttaggtgaaagtgaagttcgagaagcacatttagctaaattcttgtatttcattcagattggtgaaaaggagaaagcattggagcaactgaaggtgtcagaaaacaagacagttgctgttgggcaaaagatggacttggtcttctgctcgttgcagataggctttttctatatggattttgatcttatttctaacagtattgataaagcaaaaatcttgttcgagaaaggaggtgactggaagagaaaaaaccgtttgaaggtgtatgaaggcttgtattgcatgtccactcgaaaattt

SEQ ID NO: 8659 - DNA, 751 bp, Gossypium hirsutum
  Clone ID: GOSHI-09MAY01-C2583_2
cccacgcgtccgcccacgcgtccgcacattcatattttacactgtgcttacaagcatcatatcattggatagagtttctctgaaacaaaaggtggttgatgctcctgaaatcttgactgtgattggaaaaattccacatctttcggaatttttaaattctctttacaattgtcagtacaaatcattcttcttagcattcgctggcctgacagagcagataaaattggaccgctatttgcatctacatttccggttttacatgagagaggtcaggactgttgtttactctcaatttttggaatcctacaagagtgttactattgaagccatggcaaaggcttttggggtgacagtagagttcattgatcagtaactaattacgtctgattaacacctctctctatatagggagctatctcgttttatcgcagcagggaagcttcattgcaagattgacaaggttgctggtgtcctcgaaactaaccgccctgatgcgaagaatgctctttaccaggccactattaaacaaggtgacttcttattaaaccggatccagaagttgtctcgtgtcattgatctatgaattagttaggtatttcatcggatttagaaatggataactaatattttcaagtttgaaagaaatatggaaaatataaaataatgcttttggattcaattttgttcttttgtttcatgattctgatactattcccttttggtcaatgaatttgattctattttatccccc

SEQ ID NO: 8660 - DNA, 1357 bp, Gossypium hirsutum
  Clone ID: GOSHI-09MAY01-C2583_1
cccacgcccccgcgtccgcccagcgagaagcagtactccttccattccaactcagtgctcactcaatccaactcaccaatggacgcgcaagacggaaatcagcaatcacagcaactcatccttggtcacaacgtcttcctcctcaagcatccagatgtccctgacatcgagaaggtccgtctcaaggatgaagtcctcaactcggtcaaatccaatgaaatggctccgtattatgaaaccctagttgccgataaagtggtggagctggatcagaacgttttggactcgatgcgtgccaagaatgaggaggagattaagaagctcgacgagaagattgctgatgctgaagaaaacttgggtgaaagtgaagttcgagaagcacatttagctaaatccttatattacattcggataggtgataaggagaaagcattggagcaacttaagttgacggaaaccaagacagtcgctgttgggcaaaagatggacttggtgttctatactttgcagattggttttttctacgtggatttcgatcttatttccaagagcattgataaagcaaaaaacttgtttgaagaagggggtgactgggagaggaagaaccgtttgaaggtgtatgaaggcttgtattgcatgtccactcgcaattttaagaaagctgccaatctatttttggattctatttcaaccttcacaacttatgaacttttcccttatgacacattcatattttacaccgtgcttactagcatcatatcattggatagagtttccctgaaacaaaaggtggttgatgctcctgaaatcttgactgtgattggaaaaattccacatctttcggaatttttaaactctctttatgattgtcagtacaaatcattcttcttagccttcgctggcctgaccgagcagataaaactggaccgctatttgcatccacatttccggttttacatgagggaggtcagaactgttgtttactctcaatttctggaatcctacaagagtgttacgattgaagccatggcaaaggcttttggggtgacggtggagttcattgatctggagctatcccgttttattgcagcagggaagcttcattgcaagattgacaaggttgctggtgttctcgaaactaaccgccctgatgcgaagaatgctctttaccaggccaccattaaacaaggtgacttcttattaaaccggatccagaagttgtctcgcgtcattgatctatgaatcagttaagcatttcttctgatttagaaatggagaaacccaatattttcaagtttgaaagaaatatggaaaatataaaataatgcttttggattcaattttgttctttcgtttc

SEQ ID NO: 8661 - DNA, 599 bp, Gossypium hirsutum
  Clone ID: LIB3543-064-Q6-K6-E3
cggacgcgtggggttcccaagctatctcaaaagagaagcaggctcctttcgctccaactgcgagttcactgcatcgtctcagccatggacacacatgatggaactcagcagtcacagcaactcatccttgctcacaacgtcttcctcctcaagcatccacacgtctctgacattgagaaggtccggctcagggatgaggacctcaactcggtccaatccaatgatatgacttcatattatgaaaccctcgttactgatgaagtgttggagctggatcagagccttttggaatcgatgcgtgccaagaatgaggaggagattaagaagcttgacgagaagattgctgatgctgaagaaaacttatgtgaaagtgaagttcgagaagcacatttagcaaaatccttatattacattcggataggtgaaaaggagaaagcattggagcaactgaagttggcagaaagcaagacagtcgctgttggccaaaagatggacttggttttctatactttgcaaattgggttgaactatatggattttgatcttatttccaagagcattggtaaagcataaaacttgtttgaaggagggggtgactg

SEQ ID NO: 8662 - DNA, 519 bp, Gossypium hirsutum
  Clone ID: GOSHI-09MAY01-C102568_1
tcgccctcgacaaaccacgaaaggcaacggctagatgaccacctgcaggtattggttcctttatctatgaaatcctcatcctcttactcaagtttcttgagtgctgagaagcaagaagaacgaagaaatggggaccgcaaggacatcggtggcgttgtcaataagaagagctttgacttcatggggccggagggtagggtccatggtggtggtctcatgtccttgcttggtggaaatctaaagaacccctttgaaggaatttaaagtcaaatcatgtagaaatctagtttggtttttttaggttgttcttgtaccttgaaattattcttaaaatttggttgccgtcaaaagacttgatacacatatacacggtttgtgttgattgatgaaacccagcatagaaccagttacgcatggattttgtaatctgttgtgttctaataacgtcgtaatagtcatagaccgttggctatatatctggttacattattatttgcccgcattgcaaaggcttcagcc

SEQ ID NO: 8663 - DNA, 897 bp, Gossypium hirsutum
  Clone ID: GOSHI-09MAY01-C2553_4
gtaagataagcctaaaatatccaatagctaagatagaattctaatcctgaaggtgggcccgtgaggcaggttaaagctcactttcgaaccacacagttgttttcatatgtttgtatcaatacttggctttctttatcctctaatttttttattttttattttacatagtttgattatccttttctacaaattggatgaccaaagaaacattaggtgaaatacaatgagcttgttatgagatgataagctagaaagtggaagcaaaaaaacctttagggcgaaaaaattgattacattagaacacattaacttactggtaatgtttgtcattatcatatcagaagccttaaaactttgactcggtttcttgcttgttcgtgttcctcttcaagctgctgtttatttcaataaaatccagttcttttgctttgaggagtagtgtctccttcctggagagcagattgacatgcctgtaagtctttttattgttgaaaaggcaaaacgtggtggtgatcgtcaactaacctgtactttcttgcaggttttcttctacatagatcctgagtttgaaacagatgcccgaatggatggtataaacaacctgattttatcatatacttttttcaaggtttccgaagaatagaagggggatatttaaattcatagtgaaaatagaatatcattcacatgagaataaaaactattggttaggatcccattttcatataccgggagaagagggagaagaaacattcttttatcggaattattttattattacagtctcctttcacctctttatggtggaaacagtctatttttgtaccaggctcctccctcttcataccaaggaagtgcagaacttgtgtaaaatctgtggctgttctagtatggagt

SEQ ID NO: 8664 - DNA, 1073 bp, Gossypium hirsutum
  Clone ID: GOSHI-09MAY01-C2553_2
cggccgcgtgggcggacgcgtgggcgagttacaagttctttaaagcttcttcttggtgtggcaacaatggtctgatgccaagatgtgaatttagcacaaagcctctaacaaggtcttttgatttccatccttatggttctcgatgtttagtgagattatcttcctttagcagtcagcgccactatgcttctcatgcgtcccatgcttccactgagcggaaatccaaaaagactcttttgtatcttactgcattagtgtttgcaatggtgggaagtagttacgctgccgtcccattataccgaagattctgccagggtactgggtatggtggtactgtccaacgccgtgagagtgttgaagaaaagattgctcggcatgaaaaagatgggacagtagcaacaaggtgcgctttctaggctttggatggagatagtagtgcaattcaatgctgatgtggcggatggaatgccctggaaatttgttccaactcaaagagaggtgagagtcaagcctggagaaagtgctcttgctttttatactgctgaaaaccgaagttcaaaacccataactggtgtctctacgtataacgtcactcctatgaaggctgctgtttatttcaacaaaatccagtgcttttgctttgaggagcagcgccttcttcctggagagcagattgacatgcctgttttcttctacatagatcctgagtttgaaacagatgcccgaatggatggtataaacaacctgattttatcatatacttttttcaaggtttccgaagaatagaagggggatatttaaattcatagtgaaaatagaatatcattcacatgagaataaaactattggttaggatcccgttttcatataccgggagaagaggaagaagaaacattcttttgtcgaaattattttgttattacagtctcctttcaacctctttatggtggaaacagtctatttttgtaccaggctcctccctcttcataccaatttttcagtcattccctaaacaaaaccaactgcttgtagcaaaggtttattattgttatactagttatcattttcaattt

SEQ ID NO: 8665 - DNA, 661 bp, Gossypium hirsutum
  unsure (1)..(661): unsure at all n locations
  Clone ID: LIB3584-004-P1-K1-F2
ggcaacccttctttttnnttcattcttgccccatttgcccttccaaccccttctcctcttntgttcattgtcacccgtctgaatcatnncttctttttttcatttcttnncttcccatttcccttccaaccccatctctctctttttcatgcccttctatcctgaccccaaccctttgacaaacccctatnntgtttagttttatggttgtccctgtgtgctctnncgtctagcttcccnnngtgaaggctaaannncggctcctttctttcagctaccccacgcctttcatattcttttcaactttcccagaagccccanaggctgaaaccgagaagaagacgctacaaatactaatttggggttccatcgtcagttttggctaataccctttccaagggagatagtagtgcaattcaatgttgatgtggcggatggtatgccctggtaatttgttccaactcaaagagaggtgagagtcttgcctggagaaagtgctcttgctttttatactgctgaaaatcgaagttcaaaacataactggtgtctctacttataacgtcaccccaatgaaggttttcttctacatggatcctgngnnngaaacagatgcccgaatggttggtttaaacaacctgcgtntatcatttccttttttcaa

SEQ ID NO: 8666 - DNA, 542 bp, Gossypium hirsutum
  Clone ID: uC-gsflnu33B144d06b1
aattatttcaagtagaatttctctcttgaatcactcgaagaatctacggattttgtcacacgaatcaagattttttcctgattctttatattcgagttacaagttctttaaagcttcttttgggtgtggcaacaatggtctgatgccaagatgtgaatttagcacaaagcctctaacgaggtcttttgatttccttccttatggttctcgatgtttagtgagattatcttcctttagcagtcagcgccaatgtgcttctcatgtgtcccatgcttccactgagaggaaatccaaaaagactcttttgtatcttactgcattagtgtttgcaatggtgggaagtagttacgctgctgtcccattataccaaagattctgccaggctactgggtatggtggtactgtccaacgccgtgagagtgttgaagaaaagattgctcggcatgaaaaagatgggacagtagcaacatgggagatagtagtgcaattcaatgctgatgtggcggatggaatgcccctgaaattttgttccaactcaaaga

SEQ ID NO: 8667 - DNA, 528 bp, Gossypium hirsutum
  Clone ID: GOSHI-09MAY01-C2543_1
ccccgcgtccgctcttcttgccggagacgcatttctaactctcaccagggggcattggtttagtgggtgagatttcgttctcggataattcaagctggactagatgccgtcgtttcagacttggtgccagagttgtggatggctccggtggcactagagtaagagaagcaaagacggaatccttcattgtcagggatcaccgtggtgaattatacaagaagcaccatcctccatccctttctgatgaagtgtggagattagagaaaattggcaaagatggggctttccataagcgcttgagtcgggaaaatatcaactctgttaaggatttcttgaccatgctctgcatagatcctccaaggctgcgccatatcctcggcaccggtttgtctgctaagatgtgggaaatcaccgtggagcatgctcgaacatgtgtgcttgataagaggaggcacgtgtattgccctcctggttctcaacagacatctggtgtggtcttaacgtcctgggacaattgacaggactact

SEQ ID NO: 8668 - DNA, 660 bp, Gossypium hirsutum
  unsure (1)..(660): unsure at all n locations
  Clone ID: AI054450.1
cagggttccaagaacaactagaaaaaaaatggggaggttgatatttggagtgctggaaagtttgccctttctttttttttttttttctgttttcttagaatttgttttcttcagaagttgttaaagaaacacgttttgaactttggtttctggttgcagtatacaagaagcatcatcctccatctctttctgatgaagtatggagattagagaaaattggcaaagatggggctttccataagcgcttgagtcgggaaaatatcaacactgttaaggatttcttgaccatgctctgtataaatcctccaaggcttcaacatgtgagattcttctgctttatctctctttttgtgaaacttggagtttaatcagttttaagtactcattgaacttaagcatgtttggttagcttttaagaaggaactgtgctgtgaatgttataggattagaccacacaaattcatttatgaaaaatataacgtaaaaggttcctttgacatttatttcatattacttccaacttatgcagtttacttacgggaccctatgcctgcattgattaaaagttanttttgctactgcaccatggatattcttntatcagcaattattgaacattgtataaattgtgaattaatgtactttacttccttaaaatcn

SEQ ID NO: 8669 - DNA, 612 bp, Gossypium hirsutum
  Clone ID: GOSHI-09MAY01-C2563_1
gatattcggctttaaatatttaaattttgaatggaattagccctaataaatttaaattacattgaaaaccgagccttaaagctgtaacaattacaaaacgagaagccctcgacattttcaccttctccttcagtgcctcacagttccttgttaccttaaagaacaaaaaaaatgaaagcgtctttgaaaggaaggtacgccaatgaaaagaacaccgccggcgctacattggtcgtcaacgccggcgatgttaagctacgcgcttccatgagtgacgccactttcgtcgacggtcctagcctcaacggcttgactttagccgttgaaaaacccggttttttcatcgtcgactatgacgtccccaaaaaggattttcggtttcagtttatgaacacagttagggttgcggagatgccgttgaagctcacttacagtcacagcagaggggataaccggacggcagtggagggggcgtttatgttcgattcggctaacacggtgtcggctaattacgtgcttggtactaggaaccgtaagttgaagtacagttacgtgcacggtggggataccaccttcgagcaatgctatgattgggggaaaatggcatgggat

SEQ ID NO: 8670 - DNA, 524 bp, Gossypium hirsutum
  Clone ID: GOSHI-09MAY01-C102528_1
gttttattaaattattaaactttataaacgaaattaaagtatactcaatttttacgaacgatatgttatttttgatatttcactaatcaataatattaagaaaatatcatttcatctcttttggctcatcttcaactgctatcaccggatagctctttgacaggcccatcgaattagcaaaacagattttgctaggaactttagtatcatccacagaaatatcagagacagtaatccaaatcatcatctctttgcttttaacaccagtcaacttcttcaactgacgatctccgataaacgctgtaatttcagcaccataagacgagagcccaagctccttgaacaaatacttgacggtcttctcctgattcaaccaaatgaaccctgtgatcttattgtagccgaactcattgatgtggctcaaaggcatcaaccctttagggagatggaagtggtcgaggaggtcttgcgttttttgcttgcaaagagtagttccatggtagatctcaggttctagatcgcga

SEQ ID NO: 8671 - DNA, 562 bp, Gossypium hirsutum
  Clone ID: GOSHI-09MAY01-C2513_2
cgaatatttgctttggtttaactctgaaaaggttgaaattacttttcttcctgctgaaaaatcgaaatttgcttttgttagtgcgattgaagtgatatctgcacctaaaggggtgagacttgaaactgctcagtctgtgaatggtgataaagttgagaatttaaataaacaagcatttgaagttatgtatagggtaactataggaggtcctaaagtcactccatttaatgattctctgtggaggacttggttgcctgatgacgactactttaaatcgaaggaaggatcaaatagggtgtattttagtggtaggattaagtaccaagaaggtggtgcaagtcgtgaagttggtcctgataatgtatataattcggctcggttaatcgagagcaagaatgcttcgattcctaatgtgaacctttcatgggagtttccggtgattgagggttatcagtatcttgttagactccatttctgcgatattgctagcatatcccctgggattgtggtttttcaatggttatggtaatggacatttggcatataaagatttggatccttc

SEQ ID NO: 8672 - DNA, 795 bp, Gossypium hirsutum
  Clone ID: GOSHI-09MAY01-C2513_1
gcgttcggtggagacttggttgcctgatgacgactactttagatcgaaggaaggatcaaatagggtgtattttagtggtaggattaagtaccaagatggtggtgctagtcgtgaagttggtcccgataatgtatataattcggctcggttaatcgagagcaagaatgcttcgattcctaatgtgatcgagggttatcagtatcttgttagactccatttctgcgatattgctagcatatcccttggattgttgtttttcaatgtttatgatggacatttggcatataaagatttggatccttcggctgttaccaattacttgttggcttctccgttttatgtggccttggtagttgatgctgagcattccgggatagtgaatgtaactgttggaccttcgaacaagagcatggcatacgcggtggatgctatcctaaatggagtggagatcatgaagatgagtaactggatgggtagtttcgacggtacgctgcctgcagagtcagttttgaagtgtttgccaaggaaaagaagagttggttttctgcttcctttgattgctcttgtgtgtttattgctgagcttatcagcaatcatacgtaggaggaatgaaaaggtggagtcagtgctatggtcaaaattgccaatggaggtccatgaaatttctccaaagcaaggtaaacaacaattatcaagtaaagtataaatacatggttatgggtccactgggttttgtgatataacaccgcatactaatggtggctatcagttcccatcatattaaatagtttgttt

SEQ ID NO: 8673 - DNA, 275 bp, Gossypium hirsutum
  Clone ID: LIB3166-010-P1-K1-H1
cccacgcgtccgcccacgcgtccggagatcatgaatattgagtaactggatgggtagtttcgacgggtactctgcctgcagagtcagttttgaagtgtttgacaaggaaaagaaagagtttctgcttccttttgattgctcttgtgtgtttattgctgagctaatcagcaatcataggtaggaggaaagaaaaggttgatttcattctacctttaaaattgccaatggtggtccattatatttttttttatgtcatggttaatcaactattttat

SEQ ID NO: 8674 - DNA, 682 bp, Gossypium hirsutum
  Clone ID: GOSHI-09MAY01-C2503_1
ccctttcttccggtcactccctgttcatattttcttcttcttttcctctttaatccaaaaaccaaaatctgggtttctcttctttgagttcaaaatccattaccccatcataaaaaatcctttcttttctcagttcaaaaaagctgcctgcttggtgtgcttgatattgcctcaaccaaccattctcaaagttttctttttatataaatttccaagtttttgtttttcctaacatcttcatgctcaatcttctgttcttgatgtttgagattcatgtctccaattctcagtgaaatcttcttttctgggtttatgatcaattctacattcattcgaaggacccaactcgttcaatctttctcagttgttttcctttactggttgtactacgtttcatgattttctagcccttttttttctttcaagttttctatctctctatatataatatttaataaataaataaattcaactaccataatattctactaatctgcatattattcatcttttatctacaactttccatggcttcctcaagtggtacatcatcaggttcatcaaccatggtcacaaactcgggctccgatgaacatttacctcctttgatgatcgatgggaggaggagtagatgattgtcctggcggagtcggcaagggggttatggaagaggaaacaaagg

SEQ ID NO: 8675 - DNA, 512 bp, Gossypium hirsutum
  Clone ID: uC-gsflnu33B110c11b1
cctaacatcttcatgctcaatcttctgttcttgatgtttgagattcatgtctccaattctcagtgaaatcttcttttctgggtttatgatcaattctacattcattcgaaggacccaactcgttcaatctttctcagttgttttcctttactggttgtactacgtttcatgattttctagccctttttttttctttcaagttttctatctctctatatataataaataaataaataaattcaactactataatattctactaatctgcatattattcatcttttatctacaactttccatggcttcctcaagtggtacatcatcaggttcatcaaccatggtcacaaactcaggctccgatgaagatttacaagcattaatgaacgaaaggaagaggaaaagaatgatatccaacagggaatcagcaaggcggtcaaggatgaggaaacaaaagcatttagatgatctcgtggcacaagtttcccagctacaaaatgaaaatcaccagattt

SEQ ID NO: 8676 - DNA, 601 bp, Gossypium hirsutum
  Clone ID: GOSHI-09MAY01-C2533_2
gttttatttctgtaccagctctctatttttttagtttatctgcaatcttcctcaagctgtattcttttccctttacgtttctagttaagagttttggctttgcctatttctattctactgtcacttgccctagaaaaaattatcttgctagcaaaagagaaaaaacaagaactttaccaggaaaaacagaaccaaaagaggagcattgtgatgcaacgagtggtgtcatttaattttttgatttgatttgatttgaaattttgttgttgttgggaggatttgtttggtgaccatggtcattggtatgtgccgttcctttcgcgatcgagctctcgaccgatgctatcactgcttcccttgcctctccgatcctgcacggagatcatcgttggttttgaaagtgacattagtgatgctgcatctggtatacgttggcattctcttccttttcgatagtgatttgatagataaaacgaaaaaagaaccctggtacactgctttatatttgttgttgtttttcgccacattggtgcaatacttcattacttctggttcttcccctggttatgtccttgctgcattgagggtctgttaatgagtt

SEQ ID NO: 8677 - DNA, 593 bp, Gossypium hirsutum
  unsure (1)..(593): unsure at all n locations
  Clone ID: LIB3543-036-Q1-K1-G11
cggacgcgtggggtttatctgcaatcttcctcaagctgtattcttttccctttacgtttctagttaagagttttggctttgcctatttctattctactgtcacttgccctagaaaaaatatcttgctagcaaaagagaaaaaacaagaactttaccagngaaaaacagaaccaaaagaggagcattgtgatgcaacgagtggtgtcatttaattttttgatttgatttgatttgaaattttgttgttgttgggaggatttgtttggtgaccatggtcattggtatgtgccgttcctttcgcgatcgagctctcgaccgatgctatcactgcttcccttgcctctccgatcctgcacggagatcatcgttggttttgaaagtgacattagtgatgctgcatctggtatacgttggcattctcttccttttcgatagtgatttgatagataaaacgaaaaaagaaccctggtatgtatggtattccattcgatgctattattttatcttagatgaaaagttggagttggatacctttattccacctttacattaaatgattgtttccacctcaagcttctacttttattgcataa

SEQ ID NO: 8678 - DNA, 739 bp, Gossypium hirsutum
  Clone ID: GOSHI-09MAY01-C2493_1
gtcgcgacggtctcattgaacatttaatagatcatgtctttctcattcttcaagccgtcgaggccgaaaaccccaccagaggttgccaaagcgatcaaagacagccttaatgcactcgacaccaaaaccgttgctgaagttaaagcccttgaaaaggctatggaagaagttgaaaaaaattttgtgacaatgagatgcatgctttctggggatggtgaggttgaaccgaatgtcgagcaggtctcacagttggcacttgaaatctctaaagaggatgttatttcccttgttgttcacaagttaccgatactgggatgggaagcaagaaaagatttagtccactgttggtccatattgttgaagcaacaagttgattccaaatattgctgtgtggaatacattgagaaacatttggagttactcgactttctcgtagtttgctatgacaacaaggaaatagctttaatttggggaaatatgttgagggagtgcatcaaatttccatcacttgcacaatacatattaaattctgctagctttgtgctgttcttcaaatttgtggagttgcccaactttgatgttgcttctgatgcattttcaacctttaaggatattcttacaaaacatgcatcattggtagctgaatatttgactggtcattatgatgagttctttgatctctatgaaaaactcctgacctcttctaattatgtcacaagaaggcaatctttaaagcttc

SEQ ID NO: 8679 - DNA, 761 bp, Gossypium hirsutum
  Clone ID: GOSHI-09MAY01-C2453_2
gccccatcagcgattttttggactgactatgtagcaacccgttggtatcgtgctcctgaactctgtggatcctttttctccaaatacactcctgcaattgatatatggagcataggatgcatatttgctgagatacttacaggaaaaccactatttcctggaaaaaatgtggtgcaccaattggatctcatgaccgatacacttggcacaccccctcctgaatccatatcaaggattagaaatgaaaaggcaaggaggtaccttagtagcatgcgtaaaaagcaaccaattcctttctcacagaagttccctaatgtggatcacctggctcttcgcctacttgagcgcttacttgcatttgatccaaaagatcgtcccacagctgaagaagcattagctgacccatatttttatggtttggcaaatgtggatcgtgaaccatctacacaacctatttcaaaactagaatttgagtttgagagaaggaaattgacaaaagatgatgttagagagctgatttatcgagagatattggagtatcatcccccgatgctgcaagagtatcttcggggtggggagcaaaccagcttcttgtatccaagtggtgttgatcggttcaagcgacaatttgcacatctggaggaacattatggtaaaggcgaaagaagtactccacttcaaagacagcatgcttctttgcctcgtgaacgagttcctgctcccaaggaagagaaagttgctgaaaataatgatacgggttc

SEQ ID NO: 8680 - DNA, 622 bp, Gossypium hirsutum
  Clone ID: GOSHI-09MAY01-C2453_1
agcaaatgtattccatcgagatttaaaacccaagaacatccttgctaatgctgattgtaagttgaagatatgtgattttgggcttgcacgagtatcgtttaatgatgccccatcagcaattttttggactgactatgtagcaacccgttggtatcgtgctcctgaactctgtggatcctttttctccaaatacactcctgcaattgatatatggagcataggatgcatatttgctgagatgcttacaggaaaaccactatttcctggaaaaaatgtggtgcaccaattggatctcatgaccgatacgcttggcacaccccctcctgaatccatatcaaggattcggaatgaaaaggcaaggaggtaccttagtagcatgcgtagaaagcaaccagttcctttctcacagaagttccctaatgtggatcccctggcgcttcgcctacttgagcgccttcttgcatttgatccaaaagatcgccccacagctgaagaacattgctgatcctatttatgtttgcaaagtgatcgtgaaccacaccaactattcaaactagattgagttgagagaggaactgcaagaatgtagaagcgatatcggagatatgagttcatcgacagt

SEQ ID NO: 8681 - DNA, 1265 bp, Gossypium hirsutum
  Clone ID: GOSHI-09MAY01-C2443_1
gccggggggtgtgtccgtcgcggtgaaagaaggttttgtgtatatagtgtattgtttggaaggaaggaaggaaagtgagggaaaataattaaagatggtgggatacatgaaaaaggaagtggtagaagatgtggtgatagttgcaggattgataggggtgcaattctttttcgcagggaattcagttttacttggatacctaatgtcccttggccttaaacctttcaccattgttattttcttctccttttcaaccttcctcgttgtctctccttttgctgttcactttgaaaggagcaaatggcccaaacaattgacattgaagttgataattcagctggtttccatctccttttcaggggtaagtctcttccagttcctatttctaaaagggataaatctatcctcacctgcaatggcaacagccatgccaaaccttgctccagccctcatctttataattgcttggacttgcaggttagaaaaagtagctctaagttgcttgtacagtaaagtgaagattgccggcacaatcttatgtgtcttaggtgcccttacaatgagccttatgcaaagcactgtctcctccaaagatgcaacagccatgcctcccctaactgatgttgatactgatatgattttcgacaaagataagatctccggctgcttgtatctcgttgcagctgtctttgttctatcaagcaatatagtcttgcaagggataactttgggtgacttgcctgcgccaatgtcactatgtgccctaacatcgttcattggaatgattattactgcaattgttcagttagttgaagatcatgctttgcaatgggcttcaccctttgttagctttaaggacctcattatcttttctctaatggcaggtgcaatgggcggggcaagtgtaagcttcaatggatgggcaatgaagaaaaggggaccagtttttgtctcaatgttcagccccattggaacagtcattgcagtggttttctcttttattaccttaggggagacaatttcattaggaagttttgcaggaatgttgcttatgttcactggtctctacgtcgtcttatgggctaaaagaaaagaactttattgtgatattgaagagggggtggacgcagagaagccattattaaattaatatgttgttcatatttacttgctatgcagaatgtaaatttttcctatacttcaactgttgtagaaacttgatatactagcagcctgtaaacttgaaatgtctaattaatcttgtc

SEQ ID NO: 8682 - DNA, 737 bp, Gossypium hirsutum
  Clone ID: GOSHI-09MAY01-C2463_1
ccatgagataggtatttcctgttaaatctacctgatgcgttgaagatttgaagtgaatatttacctttccaagggtccatttcaaagtttactggaatgagatatgtaatgtcttactcgacgcggttcatcaaattgtgtcaaaaaactttttatatggtggatggagtcccccctcgcggccgggctactccaacaattattggtgctaaagagatgctggcatatcttggtgccaaggccaatgcaggagttgctggtcagaaagtggtggtaactgatctgagggaggaggcggttgtgtacattcatggcacaccatttgtactgagggagttaaataagcctgttgagaccctaaagcatgttggaattactggccctgtggtggaaaacatggaggcacgactaaaggaagatatattgtctgaggttagacagtctggtggccgaatgcttttacatcgtgaagaatattgcccatcttcaaatcagtccagtgttgtagggtactgggaaaacatctttcctgatgatgtgaagacacctgctgaagtttatgctgctctaaaagatgagggttataatatagcatatagaaggatacctttaactagagagagagaggctttagcttctgacgtggatgaaatccagaactgtcgagatgagtcctcagcatgttacctttacgtatcgcacaccggatttggaggggttgcatacacaatggcaat

SEQ ID NO: 8683 - DNA, 614 bp, Gossypium hirsutum
  Clone ID: GOSHI-09MAY01-C2793_1
atccgatatttcctactggtgatatgtcctggcaggctgttgtttcttctgcacaacagccatcaaggcttttcccagctaatcattctctggaattaaggtcagcaccagtggtacataatgcaaattctgaaaacccgaatgtcataagtcatgttccatctttgctgcaaaatggaggttctggtccaagaacgggcagttcatcaaattctaatccttttgctgatagagatgtaccacgtgcaagacacaaatcaagaagcatggctagaaacatattacatcatcctatgtttgttcctgcaccagaattaagaactttggttagaaatccaattttaagcagtggaaatataagttctcctggaaatgttgcctctacatctcatgcacgctcaaataatggtgccaatgtgatgtctgcatccacctgggttcctcatcccaacccctcttcacaatacccacgaaggttgtctgaacttgttcgtcaatcattaatgtcttcccttggcactgaatctggaggccagagcaatcattcttcacttgcttcaggacctactacttcttcggaagcgatgctgctttactctcatgtagctagtcag

SEQ ID NO: 8684 - DNA, 1088 bp, Gossypium hirsutum
  Clone ID: GOSHI-09MAY01-C2783_1
gtggtatataaaggcgagttgcatgatggtacaaaggattgcgtgtgggaggggaatggaatctggggttatttaggtgggaagggttctaccctgaatttatgtcccgagattgccgtatttgaccaaaggtccgaccaccggcatttctggttgctttcttcttggatattgccttgatgggaatgaaaagcttcttgtgctatggggggcgtgcgcccaaggtacctctaagcagacatatctttaactgggaagaagaaggattgaaacctcttgaatggacaaaaaggttaaccattgccttagatgtggcaaggggtgttgagtatcttcacggtttagcccatcaaagttttatacatcgggacttgaagccttcaaacattctactaggagatgatatgagggctaaggtagcagatttcggtcttgtgcgtcttgcccctgagggtaaagcctccattgaaactagaattgctggaacctttggatacttggcaccggaatatgcagtttctggacgagttacaacgaaagttgatgtatttagttttggggtgattctgatggagcttatcactggtcgaaaagcccttggtgagagccaaccagaggaaagcatacacctagtgacatggttcaagagaatgcacatcaacaaggactcgttccgcaaagccatcgaccccacaatcgacctcaatgaggaaaacgctagccagcatcagcacagttgcttgaattgcctggtaattgcttgccaagggaaactatatgagaggcctgatttgggtcaggctgaaaatgtgttatcttcttaggggagctctgggaaacaacgatcaatggtctgaaacatattggcattgacttgaaatgtcattgcccaagcctaaagaagtgcagcttatgaagccgaagcatttgaatctcatcattttacttttccagctagacacactaaacagcattcgagcgccgtacgattgtgatcattacatccgagatggagataacacagtgatatatgataggctctgtgtcatctatgctctcctctataaactggacccatattctgacag

SEQ ID NO: 8685 - DNA, 426 bp, Gossypium hirsutum
  Clone ID: LIB3146-017-Q1-K1-C10
cccacgcgttctgaggaaagcatacacctagtgacatggttcaagagaatgcacatcaacgaggagtcgttccgcaaagccatcgaccccacaatcgacctcaatgaggaaacgctagccagcatcagcacagttgccgagttggctggtcattgctgtgcaagggaaccttatcagaggcctgatatgggtcatgctgtaaatgtgttatcttctctagtggagctctggaaaccaaccgatcaatgttccgaaaacatatatggcattgaccttgaaatgtcattgccacaagcactaaagaagtggcaagcttatgaaggccaaagcaatttggaatcttcatcatcttcacttcttcccagcttagacaacactcaaaccagcattcctacgcgaccgtacggattttgtgagtcatttaca

SEQ ID NO: 8686 - DNA, 1482 bp, Gossypium hirsutum
  Clone ID: GOSHI-09MAY01-C2743_1
ctaaattccaatgatggcgggaccgaatccgccaaaacaaccgtcatcctcctccaacaaccaccgcaaatcccgctgggaatcttcctcttccagcgccaataaaaacccctcctccacaaccgccgaccacaagtcctccaccaagcccagcccatccaccaggactggcccacctccaagctccgctgctcataacaagtcacaatccgaccccaatcaagctcatccccccttccccttccccgatcctgccgcccttggccctccgcctccaccggcgtatggattccacatgctggagcgtcggacaatcgtcctttacgacggcagcgtccgctcctactttgctctcccgcccgattaccaggactttccgactcgacccatactcggacctcgtgacttcggtagcccatcaatgggcttccgcgataatcgcgattattggaattcgccgagtgacgggcctggcccgttaaagagaaagtacggcgatgaaggcaaagacctaagagaggagaagatagaaaagatctaccctttggggccaggcgggtcagaccgcctaacggatgagtagcccgcttggaaatgaggaaactagggcagccaagtatatgaagttgggggggggaatttcaaaataatatgccgggggtttaatcataagcttgggagggtgatccaaagtgctctaagaaaggcgtttttgcactttgtgaggcagtttgcgtgcgccccgcgcccgaaaagaatacttcggagggtgggagaacaagggcggcttcaatgcttggcttgtggcaagtcctatgcccattttaggtcctctaaagacttctctgatatgcatggtctgataatgcacacatactactcagataatgctgacttgcgtgtggctcacttaggcttacgcggggcgctatgtgtgctaatgggatggaactactcagaggctcctgataattcaaaggcctatcggttcttacctgcagatgaagcagtctcaaaccaagaggatttgattatgtggcctcctgtggtgatagtacataatacaattacaggaaagggtaaagatgggcgcatggaaggtttggggaacaaagcaatggatagcaaactaagagaccttgggtttggaagtggcaagtgcaagtccatgtatggtagagaaggtcatctcggtattacagtggtcaagtttgccagtgatcagtcaggcctgatcgatgctgtcaggctcgctgaatactttgagaaggaaaaccgtggtcgcaaggcttggtcccatctacagcccttgactttagggaaggatgacgatgataaaaatcccaatcttgtgaaggtggatgagaggaatggacaaaaaaagaggatcttttatggttacctcggaacagttgctgatctggacaaggttgattttgacactcggacaaggttgtgattgagagtaggggagagcataaa

SEQ ID NO: 8687 - DNA, 888 bp, Gossypium hirsutum
  Clone ID: GOSHI-09MAY01-C2773_3
cccacgcgtccgcgactttctcgattcgagtagcagtggaagttccttcctctgcgaaacgtaaagaaacggtgtcctatatgccctcgtgtttgttttgagataagatggcaatagaaaccgaccaaaagtcatcgtacgacggcaaagtttgggggttctttaagctgccgtttagacaaaccgggaacaccagcagtacgacgtcttcttcctccgctcaaactcagcctcacctcgaaggatccgaccatcatgcctcggctaactccgtttcctctgtcgccaagtcgcttttgccgactcggcgccggctcaaacttgatccggctaataagctcggtggtccatatgaacctggcaaacaggtgaggagcgcggtcaggataaaaaacacgagcaagtcatatacagctttcaagtttcaaactactgcgcccaagagctggttcatgcgccctccgggtgccattctagcccccggcgagagcatcatagcaacggtggtttttgcagtttgatgagcagatggatcaagttgcaatagaacaaatactacgggttgttttcctagatcctgagcgtccttgtcctgctctggaaaaattgaagtgtcaattagatgaggctgatgctgcgctggaggcacgcaaaaagcctccagaggattcaggtccaaggatcattggggaaggactcgtcatagatgaatggaaagaacgaagggagagatacctagctcgacagcaggttgaaggagtagactcagcttaaagtggcaattctcataatttgctttatatcatgtgattgaaatctgatataatgatcatctcgtgcatatatacccgtcaaatcttttaatgttaaccttaaaagggtgtcatc

SEQ ID NO: 8688 - DNA, 643 bp, Gossypium hirsutum
  Clone ID: GOSHI-09MAY01-C2773_2
aaaattcttgccctgaaatccgtctctctctctctctctctctcgattttctgttcacgagtttctcggttcaaattccagcaaaggtttttcggttctagaatcttcgcgacgcggcacacggtgccgtgcatgtgcttgtgagagagatggcgatagataccgagcaaaagtcaccgtccgatggcaaagtttggggaatttttaagctgccttttcgccaaaccgggaataataccagaacgacgccgtcttcttcttcagcgtctaatctatacgttcaaactcaacctcatgtcgaaggatcgaatcatcacggctctgccatttcggtttcctccgttgcaaagtcgcttttgccgactcggcgtcggctcaaacttgatccagctaataagctatattttccatatgaacctggcaaacaggtgaggagcgcagtcaggataaaaaacacaagcaagtcatatacagctttcaagtttcaaacaactgcaccaaagagctgtttcatgcgccctccgggtgccattctagcccccggcgagagcatcatagcaacggtcttcaagttcgtggagcctcctgagaacaatgaaaaacagatggatcaaaagagcagggttaagtttaaaaatatgag

SEQ ID NO: 8689 - DNA, 1209 bp, Gossypium hirsutum
  Clone ID: GOSHI-09MAY01-C2773_1
tccccttctgtttcttttttcacgagtctctccattcaaacgtaaaaaacggcgccgtatttacgcttgttggtgaaagtgcgagatggcgataggagctgagcacaagccacagtccgatgttagagtttgggggttttccaagctgccttgccggcaaaccgggaacgctaccggtacgacgtcgtcttcttccttgtcgtcgaatctatacgctgacgccctcccccccctcgaaggatccgaccgtcatgcctcggccaactccgtttcccccgtcgccaagtcgcttttgccgactcggcgtcggctcaaacttgatcccgctaataagctctattttccatatgaacctggcaaacaggtgaggagcgcggtcaggataaaaaacacgagcaagtcatatacagctttcaagtttcaaacaacagcaccaaagagttgtttcatgcgccctccgggtgccattcttgcccccggcgagagcatcatagcaacggtcttcaagtttgtggagcctcctgagaacaatgaaaaaccaatggatcaaaagagcaaggttaagtttaaaatcatgagtctcaaggtgaaaggtccaatggactatgttcccgagctgtttgatgagcaaaaggatcaagtggcaatagagcaaattttgcgggttgtttttctagatcccaagcgcccttgtcctgctctggaaaaattgaagcgccaattagctgatgccgatgctgcagttgaggcacgcaaaaagcctccggaggatgcaggtccaaggataattggggaaggacttgtgatagatgaatggaaagagcgaagggaaagataccttgctcggcagcagattgaaggagtagactcagcttaaagtggattagtttcctcgttgtatggttgaagttttatatagtcatctcgtgcttatgtccatcaaatcatttcatgtaacgcaaagggtattgtctcagaagaatgatctggaaatttcgaaatattttgtggttgttaagaagagtgaagctgaaatttctgtaattggagacttgaaatcagctagttactatctgcattgtagataatgtgattttgccgcctccctaaggggaataaaactgttcttcatggggtgtaatacactaaatggatatcaaaccgagtaggagtatttaaatgcatacataatcaataatgttctgtatc

SEQ ID NO: 8690 - DNA, 550 bp, Gossypium hirsutum
  Clone ID: GOSHI-09MAY01-C2763_2
gtcctccggtaggagcttcagggttggagacaaaatctggttcgcctacgccgcagcacaggagagcattgctgaggtgaatagcccggaagaatatgagtcgtgcgatgtgagcacccccgcgtccgtgtacacggacggcatagatggcatcccgctggatggggaagggatccgttatttcgtaagcggcaaggaagagagctgcaagaacggtctaaagctacatgtggaggtgatgccttttgggaaccccgagcccgaaaagcccagagttgcagtggctgctgcagcgcccaccactccttctggatcagcccggctttacggaagctccgtgttattattggttgggttatggctttgccatatggctatttaattgtaccagttatgacctctctgcactctttttcctctttagactttaccttctgctttatattgttgtacgagaatctactttaaatttcaaattatgtgtatcacttgatatcttcaagaattggccttgaaggaccataatattagattatgaaaatgttgcttc

SEQ ID NO: 8691 - DNA, 894 bp, Gossypium hirsutum
  Clone ID: GOSHI-09MAY01-C2763_1
ggaatttgccaggatggcttttcctctattgtactaaagagaccgcttcttttgcgcttaacaaactccattcattcatccaatcacccactctttctttttatttttttttctctcaaagaagcaagcaaaaattttagggagcacaactccccccccccaagtttcgctgttcagtgacaatggcgattgtgaagatggtgatggctgtggttatcatggcagcgtccctcggagggaaattgggtgcagcacaagtgcaccatgtggtcggaggtgaccgtgggtgggacgtttcctctgacgtggcatcttggtcctccggtaggagcttcagggttggagacaaaatttggtttgcctacgccgcagcacaggagagcattgctgaggtgaatagcccggaagaatatgagtcgtgcgatgtgagcaaccccataagaatgtacacggacggcatagatggcatcccactggatggggaagggatccgttatttcgtaagcggcaaggaagagagctgcaagaacggtctaaagctacacgtggaggtgatgccttttgggaaccccgagcccgaaaggcccagagttgcagtggctgctgcggcgcccaccactccttctggatcagcccggctttacggaagctccgtgctattattggctgggttatggctttgctatatggctatttaattgtactagttatgtagttatgacctctctgcactctttttcctctttagacttttaaagcctagtgttcttaccttctgctttatattgttgtatgagaatctactttaaatttcaaattatgtgtatcacttgatatcttcaagaattgaacttgaaggaccataatattagattatgaaaaagttgcttcccc

SEQ ID NO: 8692 - DNA, 474 bp, Gossypium hirsutum
  unsure (1)..(474): unsure at all n locations
  Clone ID: LIB3584-007-P1-K1-F6
taaaaattttagggagcacaacttgccccccccccccagtttcgctgttcagtgacaatggcgattgtgaatatggtgatggctgtggttatcatggcagcgaccctcggagggaaattgggtgcagcacaagtacaccatgtggtcggaggtgaccgtgggtgggacctttcctgtggcggggcatcttggtcctccggtaggagcttcagggttggagacaaaatctgtaagcttttactttactctttctttataaactagcttgtcatagagaaacacgtacaagcccctttcaacttcgatgataaattgattgttttgttgaatgagttaacagaaaaacactaatccagtaatctatcattgttcaattttgttgcctttagtgtgtncaatggaaaatcttggcatctttcacccttgcntttgtttttcgtgtcggcctttgtacttcttattgtttaatcgggt

SEQ ID NO: 8693 - DNA, 577 bp, Gossypium hirsutum
  Clone ID: GOSHI-09MAY01-C2723_7
ttttgctcctcttcaccttttatggaagatcgttctagaattctcttctttttttaaaaacaaaaattctgtctgatcagtttgtgtgaatcctattttttgcttgatgattgaaaaacttaagacaaaaatcataaactcattcgtgtggttgctctgctggggccctcggagatcacatagaaaaatggtgaaagcagtggctgtccttagcagcagtgaaggtgttagtggaactgttttcttcactcaagagggagatggcccaactacagcgacgggcaacatttctggtcttaagcctggcctccatgggttccatgttcatgccctaggggacacaacaaatggttgcatgtcaacaggacctcacttcaatcctgctggaaaagaccatggtgctcctgaagatgtgaatcgccatgctgttgatctaggaaaatgtcactgttgatgcttgtggctttgctagtttttttatttgaagactaatagattctctgtttccggcccacacttcataattggaggagccgatttttgtatcgttctgactttgttgcccttgtttgggggg

SEQ ID NO: 8694 - DNA, 822 bp, Gossypium hirsutum
  Clone ID: GOSHI-09MAY01-C2723_1
cccactcatttgtttgtttgctctggaggggtgctctgagatcacatagaaaaatggtgaaagcagtggctgtccttagcagcagtgaaggtgttagtggaactgttttcttcactcaagagggagatggcccaactacagtgacgggcaacatttctggtcttaagcctggcctccatgggttccatgttcatgccctaggggacacaacaaatggttgcatgtcaacaggacctcacttcaatcctgctggaaaagagcatggtgctcctgaagatgtgaatcgccatgctggtgatctaggaaatgtcactgttggtgctgatggctctgcgagtttctctattgtcgacaaacagattcctctctccgggccacactccattattggaagagcggtcgttgtccatgctgatccggatgaccttggcaagggggggcacgagcttagcaaaagcaccggaaatgctggtggtagagtagcttgcggtattatcggtctgcaagggtgaaatttcagtcctggtgagcgggaataatacattgagtggagatgcaatggcctaggagcaaactctgtatgtgaactaggaagtttgtgaataaaagtaaaagaacccttgttttgtgttggttttcagactcaaaggagtgtggtctcttaacggatgctttagccatttatagtaagctgtcttttgctgaatgcttaattttggtgctttacttcctggtaagggtctcatgattcatgaatgcttcaagccattttcatggttaattgtgcatgaaacccatcttttatctttgtaatttgactat

SEQ ID NO: 8695 - DNA, 461 bp, Gossypium hirsutum
  Clone ID: uC-gsronu33B168h09b1
taatttaaaaaaaaaacagtgagatctgctacgagcggattcttaaatggagtatcgcaaaatcaaagatgaggataatgatggaggaacagtaagtaatgacattgagaatctacgaggcatagggttttcgggggttgcttctgtaagtaatgttcctccaagggaacaggccaagtggaaacgcaagacagttgttacagttgcattgacttttcttacaagttcacaagcaatacttattgtctggtcaaagagagctaggaagtttgtgaataaaagtaaaagaacccttgttttgtgttggttttcagactcaaaggagtgtggtctcttaacggatgctttagccatttatagtaagctgtcttttgctgaatgcttaattttggtgctttacttcctggtaaggggtctcatgattcatgaatgcttcaagccattttcatggttaattgtgc

SEQ ID NO: 8696 - DNA, 445 bp, Gossypium hirsutum
  unsure (1)..(445): unsure at all n locations
  Clone ID: uC-gsflnu33B011a02b1
tttaaaatataatagaaacagcgagatctgctgcgagctgattcgaaaatggagtatcgcaaaatcaaagatgagcttctgtaagtaatgttcctccaagggaacaggccaagtggaaacgcaagacagttgttacagttgcattgacttttcttacaagttcacaagcaatacttattgtctggtcgaagagagctgggaagtacgagtatagtgttaccacagccaactttttggtggagactttgaaatgtgctttgtcacttgcagccttggcaagaatatggaaaagtgaaggtgttacagaagataacaggttgagtacaacccttgatgaagttattgtttatcccattcctgctttactttatcttgtcaagaatttgctgcagaattttatctttgcctatgttgatgcaccgngttatcagatactaatgaacct

SEQ ID NO: 8697 - DNA, 592 bp, Gossypium hirsutum
  Clone ID: LIB3828-028-Q6-K6-A12
ggctcatttgggtacattgcaaactacctaggttaactaataaagttaaagagtttttcttttaaatattttaaccttttatgtaagctatcacaattggaaaataatggtctgcctatcacaattgttccatgtttttgcattctttgacatgggaataaaatatttgtttgattgcatttcgaatttatccaataattatatatcatctcagggagcaaaaaatttggggcaagtagtatggttcatcatagttatactttttgaaccttttatttcatcattataaatgtatctatcaaagatatcttttatttaggtaaaattatttacttccatgtctaacattgtgtagtatagatcacagaaaaatggggaaagcagaggctgaccttatcagcagtgaaggtgttagtggaactgttttcttcactcaagagggagatggcccaactacagcgacggggaacatttctggtcttaagcctggcctccatgggttccatgttcatgccctaggggacacaacaaatggttgcatgtcaacaggacctcacttcaatcctgctgggaaaagagcatggtgctcctg

SEQ ID NO: 8698 - DNA, 566 bp, Gossypium hirsutum
  unsure (1)..(566): unsure at all n locations
  Clone ID: LIB3584-007-P1-K1-A12
ttgctcctcttcaccttttatggggggggggggtgggattctcttctttttttaaaaacaaaattctgtctgatcagtttgtgtgaatcctattttttgcttngatgattgaaaaacttaagacaaaaatcataaacaaatacatgttgaaggagatctagttccgaaggagggggggggggggggcttttttgtccttagcagcagtgaaggtgttagtggaactgttttcttcactcaagagggagatggcccaactacagcgacggggaacatttctggtcttaagcctggcctccatgggttccatgttcatgccctaggggtcacaacaaatggttgcgtgtcaacaggacctcactttaatcctgctggaaaagagcctggtgctcctgtagatgtgaatcgccatgctggtgatctaggtaatgtcactgttggtgctgttggctcctgcggtttctcttttgccggcgntctgtttcctctctctgggccgctctccttttttgcctgtgtctgtttcgtttctgctgctccgtttgtccttggcgggggggggcatg

SEQ ID NO: 8699 - DNA, 544 bp, Gossypium hirsutum
  Clone ID: uC-gsronu33B160f01b1
gctggcacgccggcacggaccgggacggaatggccggatcgacccgtccgacttaattattgtatgtaactaatatggaccatgctgatgctgatgaccttggtttgggggggaacaagattagcgacagcaccgtacatgctggaggtagagtagcttgcggtattatcggtctgcaagggtgaaactacagtcctggtgagcgggaataatacattgagtggagatgcaatggcctacgagcaaactctgtatgtgaactaggaagtttgtgaataaaagtaaaagaacccttgttttgtgttggttttcagactcaaaggagtgtggtctcttaacggatgctttagccatttatagtatgctgactattgctgaatgcttaattttggtgctttacttcctggtaaggctatgatgattcatgaatgcttcaagccattttcatggttaattgtgcatgaaacccatcttttatctttgtaatttgactaataagtcgacaatatttggaagttgggtttcgattttagcatagcaacca

SEQ ID NO: 8700 - DNA, 444 bp, Gossypium hirsutum
  unsure (1)..(444): unsure at all n locations
  Clone ID: LIB3166-006-P1-K1-E4
ccggggcagacccacgcgtggcggccacgcgtcncggaaaaatggtgataagcagtgttcttgtccttatcagcagtgaaggtagttgagtggaactaggtgtcttcactcaagatggagatggcccaactacagcgacggggaacatttctggtcttaagcctggcctccatgggttccatgttcatgccctaggggacacaacaaatggttgcatgtcaacaggacctcacttcaatcctgctggaaaagagcatggtgctcctgaagatgtgaatcgccatgctggtgatctaggaaatgtcactagtggtgctgatggctctgcgagtttctctattgtcgacaaacagattcctctctctgggccacactccattattggaagagctgtcgttgtccatgctgatccggattaccttggcaagggggggcattagctta

SEQ ID NO: 8701 - DNA, 335 bp, Gossypium hirsutum
  Clone ID: LIB3189-047-P1-K1-D3
aaaaaaaaaaaaacagtgagatctgctacgagctgattcgaaaatggagtatcgcaaaatcaaagatgaggataatgatggaggaacagggagtaatgacattgagaatctacgaggcatagggttttcgggggttgcttctgtaagtaatgttcctccaagggaacaggccaagtggaaacgcaagacagttgttacagttgcattgacttttcttacaagttcacaagcaatacttattgtctggtcaaagagagctgggaagtacgagtacagtgttaccacagccaactttttggtggagactttgaaatgtgctttgtctcttgcaaccc

SEQ ID NO: 8702 - DNA, 421 bp, Gossypium hirsutum
  Clone ID: GOSHI-09MAY01-C2693_2
cggattatctttaaagattggaagatgagatgaagaaaattgatgcctttaaacgtgaacttcctctttgcatgcttcttctcaaagatggtatttttctaaatatatatattgttttaattctgagtttcacttttttgtgggatttaatttgatttgcttttttgatttgattatagggattgagagattaaaggaggaagaaatacagtgtaaggaaatgaatgatggatcagtgtaaggaggaagaaatacagtgtaaggaaaggaataaaagttaacataccattgacattcaaaggtagaagatgtagaagcaccgctctaacctctgattctggaattgggtggagccgcggaggaccagaggtggatcggccgaggtggattggtggaggtgaaggttgattttcgaattggg

SEQ ID NO: 8703 - DNA, 736 bp, Gossypium hirsutum
  Clone ID: GOSHI-09MAY01-C2693_1
cgacgacccgttcgggacgcaggcagcgaatcttgaatctccgccccacgtctatatatacatgagaaacatgactgacctgttgttctcctatcatttttttatctgggtaatgttagagaaacataatggaattgagcttggatttgagttcggtttttgttccaaaaaccataaccgagtttctcaaagaagctttgaaaaccggaccggccttcccgggtcccccagcgttcggtgattatgttaaaagattggaagaggagatgaagaaaattgatggttttaaacgtgaacttcctctttgcatgcttctcttgaaagatgggattgagagattgaaggtggaagaagtgcagtgtaaagaaacgaacgacggattgccattgaaggaaaatgatgacagtgacaagacgggctgggtgagttcagtacaactgtggaactctgatttcaacatcgttgatcataacaagaaaccgaacacagtttcagagctgaaaccgagaagtggcagagaagaagaagaagatatgtctgaaaacccaattaaagtttgtaacagtaaaagcaggggaggggcttttgttccatttaaggatatttcaggaattcctcttatgaacccaagttttgaattggtatcttgtaatggaatcttgagaaacaatggcggctgctcaattggttccggttcttccttaaccgcggtaaaaacgcatattaagtttcagac

SEQ ID NO: 8704 - DNA, 563 bp, Gossypium hirsutum
  unsure (1)..(563): unsure at all n locations
  Clone ID: LIB3829-004-Q6-K6-H1
ggaaataatggagttgaacttggctttgagtttggtttatgtaccgaaaactatatctgagtttctgaaagaagtttcgaagacaaaatgggtttcaaaggttatccaagattacggattatcttcaaagattggaagatgagatgaagaaaatcgatgcctttaaacgcgaacttcctctttgcatgcttcttctcaaagatgggattgagagattaaaggaggaagaaatacagtgtaaggaaatgaatgatggatcagtgaccgaggaaaatggaagggaaactatggataacgatggcggtgataagaaaaactggatgagttcagttcagctatggaactctaattttaacaacgttgatccccacaacaaacccaacacagttccagaactgaaactgacaagtgaagaaggagaagatgggtctgagagtgagaacccaattgaaatttgtaataagcaaagaaagggaggggcttnttgttccatttaaggaacaagctgataagaaagtttcagggctttcccttatgaccccaagttctgaattggcttcatg

SEQ ID NO: 8705 - DNA, 310 bp, Gossypium hirsutum
  Clone ID: LIB3272-012-P1-K1-A9
aaaaaaaaaagaataatggagttgaacatggatgtggatttggtttatgtaccagaaactgtatctgagtttttgaaacaagcttcaaagatcaaaaatgggtttcaaagattatgtaagattagtgattatgttagaagattggaagatgagatgaagaaaattgatgccttcaaacgcgagcttcctctttgcatgcttctcttgaaagatggtattttatttgtttattttttttcaatactttccgggattaaatttgatatttttaatgggattttagcgattaagagaaaaaagagagagcgtg

SEQ ID NO: 8706 - DNA, 1340 bp, Gossypium hirsutum
  Clone ID: GOSHI-09MAY01-C2683_2
gtctccactcgggggtgatgaaagtgtacaagctgggcccagcctccaagtaccggagtctgagtttgaggatgggaaattggatattcagaatactggtgtacctcttgtggatcattgccatggagaatttgatataagcacattgcagatcattaaaaatgtagatctggaagagctaagggagttgggttcgggtacgtttgggactgtctaccacggaaaatggagaggaacagatgttgccatcaagcgaataaaaaaaatctgtttcactggtcgttcatctgagcaagagagattgactgtggagttctggcgtgaagctgacatcctttcaaagcttcaccaccccaatgtagtggccttttatggtgtggtgcaagatggacctggaggaacactagccactgtcacagagttcatggtgaatggctctcttagacatgtcttgcttagcaaagacaggcaacttgatcgtcgtaagcgactcattattgccatggatgcagcatttgggatggaatatttacattcaaaaaacattgtgcattttgatttaaaatgtgacaacctgcttgtcaacttgaaagatcctgtacggccaatttgcaaggttggggacttcgggttgtcaaagataaaaaggaataccttggttactggtggtgtgaggggaactcttccatggatggccccagagctgttgaatggcagtagtagcaaggtttctgaaaaggtcgatgtgttctcatttggtattgttctatgggagattcttactggcgaggaaccgtatgccaatatgcattatggagcaataataggaggcatcgttagcaacacgctcaggccacccgtaccaagctactgtgacccagaatgtgaagctactaatggagcagtgttgggctccggatcccgtggttcgaccttcattcacagagattgctagacgcttacgaatcatgtcatcagcatgccagacaaaaccacagggtcatcagatgcagaaccaagcatccaagtaaaatgtttctcaaataatccccttattttgatgctagatgcactcattaatgacattatgatagtatatgttcttttacatactccataaacgtgtgtattattttatatgaagggtaagggaggaggatctcccattgagtttgagagggggcctgtgagatatgatatgatatgattgtgttgtgttttgcaagtcaaagaaaaatatgtttatatgtaaagctcttattatttgtgtcactctcaatatccattttggtgcttgcttgtaactaaagttcaatacaattgtgtttttttgctttgtc

SEQ ID NO: 8707 - DNA, 798 bp, Gossypium hirsutum
  Clone ID: GOSHI-09MAY01-C2683_1
tctaatttcctcaaatataacagatgcacctcttgagttccatctccaccaataatgtaaacctgattaattccacgatcctgaatgctgtcaacaatctttgaggtatcatggccacctcgtgatgtgccaaggatagttccaccacgtttatggatatcattgacaaccttaggatctaaatgcacagtatttttagcataaaaaccccgatatcctccatctatccccgaaactttcttcacaccatacatgtggaacaagccgcatactatctctctaatcacggtgttgagtccagggcaaagaccaccacacgttacaatacaggcatgaacgtcatcggagtcgaaatatatcttttgacgtggtccagctcgtcggaaatgtactcctcttggactattcttgtgaacaacaatcttttgaggaacggtgtcatctacatggacaaaatattgcttaacaactgagtatgcaggattgtcttgcaacggattcgaataaacaggaagatcagggatgtaatccgataagtgagggacatcttcaagaacataaccaccgggtccgttgacgatctgaggctgtaagaacccagcgtccaagtaaaatgttcctcaaataatccccatattttgatgctagatgcactcattaatgacattatgatagtatatgttcttttacatactccataaacgtgtgtattattttatccatgtagatgacaccgttcctcaaaatatctttaaacgtggcccagcccgtcggaaatgtactcctcttggaaaaatc

SEQ ID NO: 8708 - DNA, 769 bp, Gossypium hirsutum
  Clone ID: GOSHI-09MAY01-C2643_1
tattgaaccacctactgcacgagctgttagtccattttcttttcgagttcaagtggctcagtttatacggttcaaacaccaggttctcagattgatggctaaaggtacacacgcataagaaaatccatctattttacactgacatcataaattatacatatacattattatcatttaattgcaggtaaaaagcttcacaaataccttccagacgaagattatttccagaacggcctttacatgttcgatattggccagaatgatcttgcgggctcattttattctaaaacatttgatcaaatacttgccttaattcctttgatcttgacagaattcgaaactggaataaagacactatatgatcaaggggctaagaatttctgggtacataacacgggacctctcggatgcttagctcaaaatgttgccaaattcggaactgatccatcgagcctcgatgagctgggatgtgttagcaagcataaccaagctgctaaagtcttcaatctgcaacttcataccctctgtaaaaaattgcagggccggtatgcggactcgaacttcacatatgttgacatctacacgataaaatggaaccttatagcaaattattccaaattcggatttgaccagccaataatggtttgctgcggatatggaggtccaccattgaattacgacagccggatcggttgcgggaaaacagaagtcttgaatggaaccacaatgacagccaaagcatgcagtgacagttcagaatatgttaact

SEQ ID NO: 8709 - DNA, 1191 bp, Gossypium hirsutum
  Clone ID: GOSHI-09MAY01-C2673_2
attcttttcttctttttggttcttctagaaacaaaactattctctgtttcgatcttgaagaacccccaaatcccagaaaatcaaattaacaaatttatcgaatttgcctttaaattatcttggttcaactttgttatcgttgaaattaaagagaactttttttggtaaaaagaggaaaatggctcaagctgttgaagaatggtataagcagatgcctatcatcacccgctcttatctcacagctgccgtagttaccactatcggttgctctctcgaaataatatcaccttatcatctgtacttgaaccctaagctcgtggttaagcagtatcaattctggcgcctcattactaacttcctgtacttccgcaagatggatttggatttcatgtttcacatgttctttcttgctcggtactgcaagcttcttgaagagaactctttcaggggaaggactgcagatttcttttacatgctcttgttcggagcttcagtcttgactggcattgttcttgttggaggaatgataccttatctggcagcatcatttgccaagatcatatttctaagcaattcattgacattcatgatggtttatgtgtggagcaaacagaatccttttatacatatgagttttctgggtctttttacctttacagcagcttatttaccctgggtgcttttgggattctctgtccttgttggtgctagtgcttgggtggatctcctgggaatgattgctggtcatgcctactattttcttgaagatgtatatccacgaatgaccggacgtcgacccctaaaaactccatcctttattaaagcgatgtttgcagatgaagctgtagtagtagcacggccagcaaatgtgagatttgctccacccgcagatgaacttcacggagactagtcggcccttggaaaactagagcaattttggttgaattgatctctgataggaaaggcctaaaaaaatgcatggttggcccctatttcttagacatgttcaagctttaacatgcttaaattgctgattatggacaacatatatcttttggtagaattaccggcgtgtataactgtatatctgttgttattgcttgcactatatgtgcagaaattggggatgaaatcttgtaattattaccagactctgcttttggttgttatagaatgccctttctcatcatc

SEQ ID NO: 8710 - DNA, 1154 bp, Gossypium hirsutum
  Clone ID: GOSHI-09MAY01-C2673_1
cccacgcgtcctttttgtttctttcaaaaaccaaatctctgtttcgatcttcaaagcccccccaatccatagtgaaaatcaaataaacaatttgatccaattagtctttcttgggttgaattttattgctattatagaaatttcaaaaaaaaaaaaaaaaaccctcaatggctcaagctattgaagaatggtataagcagatgcccgtcatcacccgttcttatctcacagctgctgtagctatcactattggctgttctctcgaaataatatcaccttatcatctgtacttgaaccctaaacttgtggttaagcattatcaattctggcgcctaattactaacttcctgtacttccgcaagatggatttggatttcatgtttcacatgttctttctcgcccgatactgcaaacttcttgaagagaacacattcaggggaaggactgcagattttttttacatgcttttgtttggagcttctgtcttaactggcattgtgcttataggaggaatgataccttatctgtcggcatcatttgcccgaatcatatttctaagcaattcattgacattcatgatggtttatgtatggagcaaacagaatccttttatacatatgagttttctgggtctttttaccttcacagcagcttacttgccctgggtgcttttgggattctctgtccttgttggtgctagtgcttggggggatctgctgggaatgatagctggtcatgcctactattttcttgaagatgtatatccccgaatgactggtcgcagacccctaaagactccatctctcatcaaagcgcggtttgcagatgaggatgtagtggtagcacagccgcaaaatgtgagatttgctccaccacctgcagaggaacttcacagggattaatctgccgtatggaaactagaccaacgaagtgtaccttggtggggttgatctctgcttggacacgacaattgcctacagaagtgtagtttgccccttcgtaaaagcgttcaagcttacattgctaatcatgaaaacaatatatcttgattcgcattagaggttagctattgtggttatgacctactacagttatgctgatttggagatttgagttttgtaattttatacctacactgagtgctttttgttggt

SEQ ID NO: 8711 - DNA, 642 bp, Gossypium hirsutum
  Clone ID: GOSHI-09MAY01-C2603_5
cccccacctcctatgcgtggagcacctgcaccgcccccccctcctatgcgtggggcacctgcaccgcccccacctcctatgcggggggctcctccacctcctccaggtggagcaccacctccaccaccacctccggcaccttggaaaccatgaaaacgttttgatctttcttctgtccatgtgtgacttacagtctgatgattttggaattagtttttggtacgtaaatgaccttggaagtgtaagtaacgcaaaaaggcaagacaggagatgagtgatatgagacaacctggtcaaaactcgtggtggttcggctgtcagattggggagtcagacaagcattcaaacattgataatttgtatatgaagtctatttggattttgtggtatacagacagacggagtgcatgtatgatattaatgttgtattatttgaaacacaccaatatccattgacaataaatttgtgtttaattgttgcagaaatctggcctttgctattacctctttcatggctttccttatttctttgttctttcatgggttttgctttttatagcaaagaaagtagagttagagttgtaaatgtttgttctccgcttgaattttaaatgtaaatgatgagttatttgatttaatgtg

SEQ ID NO: 8712 - DNA, 666 bp, Gossypium hirsutum
  Clone ID: GOSHI-09MAY01-C2603_4
ctttatgttgaccatgtaatactcaaatgtgttggttattttcttttccatgagcatgtgaactttggatataatacaggaggtttgattcaattaaaccatggaaggcctcagccactgcaatacgtagtcaatgcagccttcttagccgccctatatagtgattatcttgatgctgctgatacacctggatggtattgtggtcccaatttctattccgctgctgtcctgcgtgaatttgccaaaacccacattgattatatccttggcaaaaatcctcgaaaaatgagctatgttgtgggctttggtaaccattatccaaagcatgttcaccatagaggtgcatctatccctaagaataagatcaaatataactgtaaagggggatggaaatggagggatacgtgtcaggaactgaatcaatcaggtccatcttattgcacccacttcaatcatcaacaatccccatactcagttcatacccccagaaaaaacaaaattataagtttccctttgcacaatttggtttttggtgttttttttggggtgttccaaacacacgttattcccaccaggtggccggcacaatgggctacatgcctgccgagtacccgtgaatggaacacaacggcgacggctgtgttctccattttaatccctgttgta

SEQ ID NO: 8713 - DNA, 837 bp, Gossypium hirsutum
  Clone ID: GOSHI-09MAY01-C2603_3
actggtgctagatcgccagcggcctgcctttgtggtcccaattaatatacaactgatgtattgcgagaatttgccatggcggagatagattacatactgggcaaaaatcctcagaaaaagatctttgtagtctataaagataaccattccccaacacatgttcaccatatatgtgcatctatccctaagaataatatcagatataactgttaggggggatggaaatggatggattcaaaaaagccaaacccgaatacgcttgtgggagccatggttgctggacctgacaagcatgatggatttcacgatgttcgcaccaactacaactacactgaaccaactcttgcaggcaatgctggtttggttgctgcacttgtggcattgtctggtgacaagtcaactggaattgacaagaataccatattttctgcagttccaccaatgtttcccacaccgccaccacctccagcaccttggaagccataaatatgcttttagatcctttaaatgtttcctttttgtgtgacttagtcttatgattttgtaagtgttttttggcaccttgatgaccttgaaagtgaaagtagtgcaaagggcaaggaaggagatgtgcaatggaacaaagctgcagtaaactgatggtggtttggctattagattggagaataggactagcattcaggatctgataatttgaatatgaagtccatttggatttcacggtatacatagtgtatatgtatgggattaatactgtattctttgaaacacgaggttaaacacttaaattgatttaacaataaattttgcgctaatatctaatgggttgccgttttc

SEQ ID NO: 8714 - DNA, 1017 bp, Gossypium hirsutum
  Clone ID: GOSHI-09MAY01-C2603_2
tccacgcgtccgcccccgcgtccgggtagatcagatctgtcggtgctcctgcattttccgcccactactcttccaaatcctcatcatgtacggcagagatccgtggggaggtcccctggagataaacgccactgattctgccactgacgacgacaggagcaggaatctgcaggacctggatagggctgcactctctcgccccttggacgagactcagcaaagctggctgcttggccccggggagcaaaagaagaagaagaagtacgtcgatctcggatgtatcattgtgagccgcaagatctttgtatggaccgtggggaccctgctcgtctccgccctcctggccggactcatcaccctcatcgtcaagactgtcccacgtcatcaccaccgccactctccgcccgataactacactctggctcttcacaaggcgctcatgttctttaatgctcagcgttctggaaagctgcccaagcataataatgtgtcgtggagagggaactcgggcctccaagatggcaaatccgatccctccgttttgatgaaagatctggtcggcggatattacgatgctggagatgctatcaagtttaactttcctgcatccttttcaatgactatgttgagctggagtgtcatcgaatacagtgctaaatacgaggctgccggcgagctcaatcatgttaaagagatcatcaaatggggtactgattatcttctgaagaccttcaacaatactgctgataccattgacaggattgcagcgcaggtagggataggagatacatctggaggagtttcagccccaaatgatcattattgctggatgcgccctgaggacattgattacccccgtcctgtatatgaatgtcatagttgctccgatcttgctgctgaaatggctgctgctttggcttcggcttccatcggtttcaaagacaacaaagcatactctcaaaggcttgtccatggtgccccgacactcttaagtttgctagggatcaaaagagcaga

SEQ ID NO: 8715 - DNA, 1631 bp, Gossypium hirsutum
  Clone ID: GOSHI-09MAY01-C2603_1
cccagcgtccgcccagcgtccggggggtactgggtgtctgctcaagaccttcaacaattctgcggataccattgacaggattgcagcgcaggttggggtaggagatacatccggaggcagttctgcccccaatgatcattattgctggatgcgccctgaggacattgattacccccgtcctgtatatgaatgtcatagttgctccgatcttgctgctgaaatggctgctgctttggcttctgcttccatcgttttcaaagacaacaaagcatactctcaaaagcttgtccatggtgcccgaacactctttaagtttgctagggatcaaagaggcagatatagtgctggtggttctgaccctgccctcttttataattcctcaagttactgggatgagtttgtttggggtggagcctggttatactatgccactgggaattcatcctatcttcagttagctactcatcctaaacttgccaagcatgctggtgctttctggggcggcccagattatggtgttcttagctgggataataagcttgctggtgctcaggtgcttctgagccgattgagattgtttttgagtcctgggtatccatatgaggaaatattgagtacgtttcataatcaaaccagcataattatgtgctcattccttccagttttcactagctttaatagaacaaaaggaggtttgattcagttaaaccatggaaggcctcagccactgcaatacgtagtcaatgcagccttcttagccgccctatatagtgattatcttgatgctgctgatacacctggatggtattgtggtcccaatttctattcaactgatgtcctgcgtgaatttgccaaaacccagattgattatatccttggcaaaaatcctcgaaaaatgagctatgttgtgggctttggtaaccattatccaaagcatgttcaccatagaggtgcatctatccctaagaataagatcaaatataactgtaaagggggatggaaatggagggatacgtcaaaaccaaaccccaacacacttgtgggagccatggtagctggacctgacaagcatgatgggtttcgtgatgttcgcaccaactacaactacacggagccaactctagcaggcaacgcagggttggttgctgcactcgtggcattgtctggtgacaaggcaaccgggattgacaagaataccattttttctgcagttccaccaatgtttcccacaccaccaccacctccggcaccttggaaaccatgaaaacgttttgatctttcttctgtccatgtgtgacttacagtctgatgattttggaattagtttttggtacgtaaatgaccttggaagtgtaagtaacgcaaaaaggcaagacaggagatgagtgatatgagacaacctgcacaaaactcgtggtgtttggctgtcagattggagagtcagagaagcattcaaacattgataatttgtatatgaagtctatttggattttgtggtatacagacagacggagtgcatgtatgatattaatgttgtattatttgaaacacaccaatatccattgacaataaatttgtggttattggttgcagaaaagaaacaaaaaagcaagataagttaacaacgaaat

SEQ ID NO: 8716 - DNA, 404 bp, Gossypium hirsutum
  Clone ID: LIB3146-030-Q1-K1-E3
gcaatctatttagatgggccaattatccatctatttttgcagcaactgtattgtacttgccacaatttgcctctagcctagggttattaattttgtgattgtctatctacaggcttcttggaaatagcttccttgttcgttgctaatgtaaccaaatttgtgttttaggtgcttctgagccgattgagattgtttttgagtcctgggtatccatatgaggaaatattgagtacgtttcataatcaaaccagcataattatgtgctcattccttccagttttcactagctttaatagaacaaaaggaggtttgattcagttaaaccatggaaggcctcagccactgcaatacgtagtcaatgcagccttcttagccgccctatatagtgattatcttgatgctgc

SEQ ID NO: 8717 - DNA, 771 bp, Gossypium hirsutum
  Clone ID: GOSHI-09MAY01-C2633_1
cggtaccggccacttcccgggttcgacccacgcgtttcgcccacgcgttccgtattggtttcagttcagctgctccgtattatatagtcaactactatggcaaccagaatgtctgttagatacgtttctcgtaggttctcgagtgggagtgggaagatactcagtgaggaagaaaaggctgctgaaaatatttacatccagaaaactgagcgagagaaattggagaaacttgcacgcaagggacccaagccagaggagaaaccggatgctggttcagggggtgctgcgaccgatggtagcactacctctacatcgggaacatctgctgagaaagtatcaaccgataagtaccgaaactacggggttctcgctggtgttgcaacccttggtgctgctgtgggatggtatctcaactctaaagacaagaagcaagaggcctgaaatgggggttaatgcgattggattctctaggtggaacatggcatgaatggtttaccccaatgccctgttcgtgtgcaaagtaactgaaaaataaaacaaactttgtaaagcagcttatcatgttttctgataacgtctgtgtttgaatcagtagtgttcttatgtacctcgatgccaatcatggttttctgcattgtcttttaaagaatctttgatgccaactgatgtttttttcttttctaaataaaggtgtttgtgacttcctaccctctaaaaaaataatatattggttatctctttctggtgttttttcctcctttttttttttta

SEQ ID NO: 8718 - DNA, 347 bp, Gossypium hirsutum
  Clone ID: LIB3189-012-P1-K1-H5
cggacgcgtgggcaaattctcgactcatcggtttcagttcagctgctcctcaactactatggcaaccagaatgtctgttagatacgtttctcgtaggttctcgagtgggagtgggaagatactcagtgaggaagaaaaggctgctgaaaatatttacatccagaaaactgagcgagagaaattggagaaacttgcacgcaagggacccaagccagaggagaaaccgtgtgctggttcagggggtgctgcgaccgatggtagcacttcctttacatttggaacatctgctgagaaagtatcaaccgataattaccgaaactacggtgtttcttgctggtgatgcaacc

SEQ ID NO: 8719 - DNA, 248 bp, Gossypium hirsutum
  Clone ID: LIB3147-036-Q1-K1-H2
cccacgcgtccggtttgaatcagtagtgtttttgtgtacctcaatgccaatcatggttttctgcattgacttttaaagaatctttgatgccaactgatgtttttttctttcccaaataaaggtgttcgagacttcataccgtcaaaaaaaaaactaaaaaatgtaatgaacgtaaaagtaacgctttagacgaattgctgcaatactgattagacaaataactcgaggccagtctttttaaaggatcc

SEQ ID NO: 8720 - DNA, 810 bp, Gossypium hirsutum
  Clone ID: GOSHI-09MAY01-C2623_1
cccagcgtccgcagaattgagtcatgccgggcagcatcaacagactactccaagaagggaaaagcgtttctggagatgttgaattactgcatagaccagatacgggctcctacctgtgagaaccgggtgtttatccgttgtgatgtcaactttgacacgtctacctatggcaaaaacttgaatacttaattggacgagctgctcatatagagtttttggagtcagatatttttgctcggttcataatgtggtcgtttccagaactatttaaataactacattttaggagcttgaaatcgatccaccttctcatgcatggtatccagattgatcgctaattgcagagcccgtgatcagtgttttaagttctcaagcatcacaaaagagcaagattccctgcaattttggttctagtgggtgtgtctagcaaccgcattcttgcacaatgggcggatgggtagatgcattgggagatggtagcagctgtaaattatgacgtcgaagatgcttatgttggaaggttgtctgtatgtttgaagtagctcgatgttttaatttttgcctttacgacggagtttttgtcggctcagcatattttacgctgagtaaaatgaccaagttttttacaatagatattgtttagaaaaaaaaaagctagcaatgtaaaaaaatccagtaggttagtttgttgttttgggttttagcaaatgactcgattttttcccatcacacagaatgatcatgtttatgtatgtaaacatgccgaagaagcatttgaatgaactcagcagtgaatcagtttagagctat

SEQ ID NO: 8721 - DNA, 1112 bp, Gossypium hirsutum
  Clone ID: GOSHI-09MAY01-C2193_2
aacgaaccacctttctctcttatacaaaataaccagaaaaaaaatatttaaaaaagaaagaaaaaagggaaaaattctctcttttttcatcaatcgtgaaaagcttctaaaagctttttcgatcagaacccaatcgaggaatatggggaagaaaaggaagtcaatagcgacgagccttgatgaggtggatcggactatgtatgcttcgttttgcagcgctgctaactctttgtctcaactttatactcaggctatgaaccagcagaaactctcctttcaagccggaaaaggccatagccttgaaaaactttatcagtggatttggagacaacaagagggaggatcaagggtaacaacaatggatatcctcaattaccttcagaatgagatagactactgtggtgaggagccatcaatgtcacctagagcaccaagccaacagcaccaatcccagccaacaatgcagttcatgaataccagtttcatggtctcttcaggctcatctggccaaactgctgtgcagggaactcgccctgattactctgatcagcagccgaagaattctattttctcaaacgctttatcaagccccattcttcagagtcttcagcattatcacattgctcaagaaggctacagtacgaatggtttgccgttcagaaaatggagacaggagccatgaatccaactttctccaccccccgactcgggactctaaccctttcagctccaatgattcctcaatggacatgcatgcggatagcccatcacatgaatctacttactgagaatgcaatggtagctccattgtgaactccgaacaattaaaaaggtcgtaaaggaggctattgtgattgcattaccattttgtttgttgctgctgctaccaaagtgaagaaaagctcaacataaagatggctagtgcataaaaaaaaaaaaaaaaactcaatggcactggtgattgaagaagaatagtctagtgtgtttatgtgctgcatagcacccattggtatgaatttatcagttctatgtgctttggcacgtatttgcttggaggtcttaagtttcatatgtaaagcattttgttcaatcaatgcagctacttttagaac

SEQ ID NO: 8722 - DNA, 1162 bp, Gossypium hirsutum
  Clone ID: GOSHI-09MAY01-C2193_1
gtaaaaaaaaaaaaaaaaaaagaaaaaaagtttaaacaaaatggaaaggtgaaaaattctcttttcatcgatcgccaaaaagcaaccgcgaacccccgtcgatcgcaggagagagggaatcgggataaatggggaagaaaaggaagtcgatagcgacgagcctcgatgaggttgatcggactatgtacgcctccttttgcagcgccgctaactccttgtctcacctttatactcagaccatgaatcagcaaaaactctccttccaagctggcaaacgccatggccttgaaaaaatctatcagtggatttggagacaacaagagggaggatcaagagttacaacaatggatatcctcagttaccttcagaatgaactggactatggtgaagagccatcaacgtcacctagagcaccaagcgaacagcagcattcccagcctgcaatgcagttcatgaataccggtttcatggtctctacaggctcatctggccaaactgctgtgcagggaactcgccctgaccattgtgatcagcagtccaaaaatttagtgttctcaaatgctttatcaagtcctgttcgtcggagtctccagcattaccacattgctcaagaaggctactgtcctaatggcggccttccttcaggaaacggagccaggaacaatgaacctagctttctcccaaaccagactagggattcaaatcctcttagctctaatgactcctcaatggacatgcatgccgatagtccatctcatgaatctacctactgagaatgcaaggtaactcccttttgaacccccaacgattaacaagatcaagaagggcttttggtgcatcaccattttgtttgtcgctgctgttacccaagtaaagaaagcatgacataaagatggttaaacatcacacagaaataaaaagcacattggcacaggtgactgtttgaaggcgtttgaaaaagatagtgtagtgtgttgtctatgtgcttggtttgtgtttcagttctatttgcttggagggtttaaatttcatagtaaagcattttttgttcaatcaaaattcagctacttttttaagggggaaaaaatatttcttagggcttgttaaaattctctcaaattttactttataagaattcccttgtgattgcttatttggtttt

SEQ ID NO: 8723 - DNA, 428 bp, Gossypium hirsutum
  Clone ID: LIB3048-024-Q1-L1-B8
ctcacctttatactcaggctatgaatcagcaaaaactctcggtccaagctggcaaacgccatggccttgaaaaaatttatcagtggatttggagacaacaagagggaggatcaagagtaacaacaatggatacccctttgtctttgttgttaatatttttgacattgaatgacgaagtacttcctctttttctctgtcaattatgtttttttacagtatttatcatgcagaactctctggtctgttaaatctttatctgtttgtaattctatcttagactcttatcagaagataaacaacatttgaatcaactcatgcatgcttcttatttctatctaaatgattttgcagctagttttgagttttgacaagtagtagacaaacttgaaagttggaaaaaaacgttgtactcttttgacattgtttaa

SEQ ID NO: 8724 - DNA, 487 bp, Gossypium hirsutum
  Clone ID: LIB3584-048-P1-K2-F8
cccacgcgtccgcccacgcgtccggtcgatcgcagtagagagggaatcgggataaatggggaagaaaaggaagtcgatagcgacgagcctcgatgaggttgatcggactatgtacgcctccttttgcagcgccgctaactccttgtctcacctttatactcaggctatgaatcagcaaaaactctccttccaagctggcaaacgccatggccttgaaaaaatttatcagtggatttggagacaacaagagggaggatcaagagtaacaacaatggatatcctcagttaccttcagtatatttgtttcgaagatagcaagggttggttctcccttctgaagtgtggggatcttcttgtgattctgttggcacgagttacccttaatgaactagactatggtgaagagccatcaatgtcacctagagcaccaagccaacagcagcattcccagcctgcgatgcagttcatgaataccggtttcatggtc

SEQ ID NO: 8725 - DNA, 443 bp, Gossypium hirsutum
  Clone ID: LIB3147-010-Q1-K1-D7
cccacgcgtccgccaaaaacgaatcaacctttctctcttgtacaaaataaccaggaaaaagtgatttaaaagagaaagaaaaaaggggaaaaaattctctctttttcatcaatcgtgaaaagcttctaaaagctttttcgatcagaacccaatcgaggaatatggggaagaaaaggaagtccatagcgacgagccttgatgaggtggatcggactatgtatgcttcgttttgcagcgccgctaactctttgtctcaactttatactcaggctatgaaccagcagaaactctcctttcaagccggaaaaggccatagccttaatgagatagactactgtggtgaggagccatcaatgtcacctagagcaccaagccaacagcaccaatcccagccaacaatgcagttcatgaataccagtttcatggtctcttcaggctcatct

SEQ ID NO: 8726 - DNA, 312 bp, Gossypium hirsutum
  Clone ID: LIB3083-120-Q1-L1-H5
gacccgcccctgactttttggatcaacagacaccaaatctagggggtgtaaatcctttatcacggcctggttttttggactctccagcattacctctatgctaaggagggctactgccctaatggcggccttccttgaggaaacggagccaggaacaatgaacctagctttctaccaaaccagactagggagtcaaatcctcttagctctaatgactcctcaacggacatgcatgccgataggccatctcatgaatctacctactgagaatgcaaggtaactcccttttgaacccccaacgattaacaagat

SEQ ID NO: 8727 - DNA, 920 bp, Gossypium hirsutum
  Clone ID: GOSHI-09MAY01-C2153_1
tcgtcacgcgtccgcccacgcgcccgggagagtctctctctctctcttctttttccccgattgtttcttccatctttttagggtttaattttatttttttaatcttgaaaataattttgataattttatgaagcttttagacatttcatttcaataaaattatcaaaagattttcaaaaagaagagagacgaaaaagattcataaatatttggatcaaaaaagaagaagttgctttgttttctcgagaaaatggagtcaaattcatggagctttcgattctccaattcttcttcttcttcttcgtcttcgtcaaggcgtcgtcaatcacgatctgatctgtttctaggaggaggatatgaagaaattgacggagatgaggatttcaaggcacagtttttatgtccattttgcgctgaggatttcgacattgttggactttgttgccatatcgatgaagaacatcctgttgaagccaaaaacggggtgtgcccggtttgtgcgaagagggtcggaatggatattgtcagccacattaccatgcaacatgggaattttcttaaggttcagcgcaagcggagattacgcaagggtgggtccaatttgacattttcaatgttgagaaaagagctgcgagagggaaatttgcaggcccttcttgggggatcttcatttcttccttctcccaatgttgaagcccgatcccgtattatcttcatttatgtttagtcctcccacagttgataagcctttaagcttgcaacctctttctattgccgaagcaagtgtggtaaaggaaagtggaaataaagaatttctgggaagaaagcctcaacagtcccaactgtcggacaaggatcatgaggagaaagctagaaggtgcgagttcatccaaggacttgtgatgtccacttttcttgac

SEQ ID NO: 8728 - DNA, 385 bp, Gossypium hirsutum
  Clone ID: LIB3585-001-P2-N1-H6
gccctcgacctacgcgagcgtgtttagctttgttttttcgccccgatgggccgtaccacctcttaagggtcaagttctatttttctactctggaaagaaattgtgatagttctatgatgcttgaaaacattatatttcaatagaaatcttcaaatgattctcaaatacatgagagccgatgatgatccataacttttcggatcaaaaaagaagaagttgctttgtttcctcgagaaaatggagtcaaatccatggagctgtcgatcctccaatgctacttatactgcttcgccttcgaaaaggcgtcgtcaatcacgatctgatcttgttctaggaggaggatatgaagaaattgccggagatgaggatttcaaggcacagtttt

SEQ ID NO: 8729 - DNA, 842 bp, Gossypium hirsutum
  Clone ID: GOSHI-09MAY01-C102128_1
aaaaaacagtaaggattctctgaaagggggccgagggcgaaccctcggagctctgtcgagcctccgtcatcgggttcccatgcgctcacgcgccaccgctgacttcgccgagtacggcggtcagaatacgaagcgtttcgccttttctacaggaaaaaaaggtaatctcttttatttattgggatagtattttgcatgcatgaaacgttgatatctaagaaaagaaaaaggatcacctttgttttctgacaaagtgaagaaatctgtaatattctcttgtgctctttttatttctttttcgtgtgtctttacagattacaaagaagcgcttttatagccctgtgtaaatcattacaatttgggaaagaaatctttgatttctttccatattttgcttctcttttttgctgcggttcttttcattttgcagatatcaatgagggtctggtagtaaacgggaactgacaacggcacaccggcgttgattcaggcgtcaatcctggcgtgatacggaacatggaatcacgacattgatggtgggtcactgcgagacgacggacgcgtctgttggggtgcttgtggcgcctagggtttctgaaaccctcggcctttctgtctcctgttaatgaattgggccacttgggccctgtgtattttgggctaagggtgaaacaggtatagggttagtggttttttgggccagttaggctacactgagttgggtcataaatgtaaacgggtatagggttttgggctaaaaatgtaatcgggtctttgggatttgtacatggactgtataaaactattattttttatttttatttatttatttacaggccggg

SEQ ID NO: 8730 - DNA, 642 bp, Gossypium hirsutum
  Clone ID: GOSHI-09MAY01-C2133_1
gtttcttttcttctttagttaagcgtattggtgacgaaatgccgttaaaaggaatccaagatttgccattgtaccttcttcttcttctcttctcaaccccctccgccctcatcccttcttctctcagcttcctaccctttccccattgctgaaggggaatgaatgaagactgatgagatgaagctgccttcctattttgctacatttgcgcgtcctgtttctgtgtttcctttcagtaaacgttgccgacttagactcagataagcaagccctcctgcgattttctgccagggttcctcatggtcggaaacttaactggagctctgctactccggtatgcacttcgtgggttggcatcaactgcaccaaggatcaatcccgtgtgatggctctccatcttcctggtgttggactacatggtccaattccagccaatacacttggaaagttggatgctctcatgatcctcagcctccggttgaatagtcttagcggtaaccttccaacggatgtactctctcttccttctctccgttacatatacccttcagcacagcaaccttttcagggcacatcccttcatctcttccctccccatttggatttccctggatctctcctttaactccttgacaggcacca

SEQ ID NO: 8731 - DNA, 556 bp, Gossypium hirsutum
  Clone ID: GOSHI-09MAY01-C2093_1
gacccacgcgggcgggctcaccccctaaaaacgattctactcgaaaattctaacgacgaggaaatgcacagggcgaatgaatcggcgtgggcgtctgcgtctgcgtctgcgtctgcggataaatttgacgaagaagtagcgagggtgatggagcaagccagggagttgcacgaatctggagcttcgcttttatggaagatttcaaacgaggagcagtctcttcgccaaaaagccatttctcttgaatcctctattcgccgcgtgcgttcttcgatcaactcgcttgtatctaaaaagcttttggatcctaagttcgcaagcaagctcgaagaggatttacagagtgccagctccatcttaacagatggagaagccgctgcttttctacctgccaaagctcagggaaggtttctgaggatgtttttgggacccatcaatgtgcgggcatctcgtaaagaagtgcatatgaaagttaaggaggaatataacggttatagcgataggactgcccttcctggtcttcttttcccgtaacctcgctttattttaaaacttg

SEQ ID NO: 8732 - DNA, 923 bp, Gossypium hirsutum
  Clone ID: GOSHI-09MAY01-C2043_1
gttagtgaactcaattgttgcctctttcacctttatattatctttaatgtttttcttttccttattcagttattaatttgtatcagctcgcgtccgcccacgcgtccggtttttggcaagaattccatgaattttctttgtattgggtattaaattctctttttttagtgctttgctctgcatgctttagtcgttttcttagagttttggagtgcaccccaagtagaaaagatgctgtcaacgaagtcggaatcggatatcacaagccttgctccatcatcaccgtcgaggtctcccaaacgtcccgtatactatgttcagagtccatcacgagactctcatgatggagacaagtcatccaccatgcaaccgagtcccatggagtcgccttcacacccttcctccgttggccgccattccaggaactcttcggctagtcggttttcggggatattccgctcgtcctccggtaggaaaggggggaggaagaggaatgataaagggtggcctgagtgtggggtaattatggaagaagggccctatgatgagttcgaggataaggctttcactaggcgttgccaggccttgattgctcttttcacttttgtggtattgtttactgtgttttgcttgattatttggggtgccagcaggccttacaaagctgaaatcctggtcaaggtatgctaattttatccatttcttcattttctaatcatacttatgttaaaatatcagaaaaagtaagaatatttactctctaacacgtttaggtctgtttggttgagaggaaaaaaagaaaggagttaacgaaaagtggaaagaaaataaatcaaaatctccaggttcattacttgtgacagtaaacttagataagcagaaaccatgagttccttcactcatatgcaaatgcaatatgcata

SEQ ID NO: 8733 - DNA, 655 bp, Gossypium hirsutum
  Clone ID: GOSHI-09MAY01-C2353_1
cttcttttttccttactttttttttttatctttaacctaaatggaatactaaaaattccccattttttccctactaccaaacaaggtcaaattccgaaaactgtactcagtcgttcaattgaagtcacccagtcgacgatggactccagctctggagaagagtcagatcttagtgagtctgagatcaatgaatacaaagaaaagccatatgaagagattaggtctgggaagtacaaagtaaaggccttaaatggtagcttaagatgccccttttgtgctgggaagaagaaacaagactacaagtacaaggatctgcttcaacatgcttctggggtgggtaaaggatctgccaacagaagtgcaaaacagagagcaaaccacctggccttggcaaaatatttggaaattgacctagccagtgaagcagatgagacctcccgaccaactgtaccacaagctgtggacgagactccagagcaaactgagctttatgtctggccatggatgggaataattatgaacattgttgctgagtcgaagaatatagacacattgcatgataaagggtactggttgaagaggtttgctaaatataaacctatcaatgttcaatgtttctggaatgaggtaatctgactggccaagccatagtatc

SEQ ID NO: 8734 - DNA, 530 bp, Gossypium hirsutum
  unsure (1)..(530): unsure at all n locations
  Clone ID: LIB3583-061-P1-K1-B2
atttttcttcacattttataagggatcgttggggaaattttttcaactgtatatttccccttcttttttccttactttttttttttcatctttaacctaaaatgtaatactaaaaattccccattttttccctactaccaaacaagatggactccagctctggagaagagtcagatcttagtgagtctgagatcaatgaatacaaagaaaagccatatgaagagattaggtctgggaagtacaaagtaaaggccttaaatggtagcttaagatgccccttttgtgctgggaagaagaaacangactacaagtacaaggatctgcttcaacatgcttctggggtgggtaaaggatctgccaacagaagtgcaaaacagagagcaaaccacctggccttggcaaaatatttggaaattgacctagccagtgaagcagatgagacctcccgaccaactgtaccacaagctgtggacgagactccagagcaaactgagctttatgtctggccatggatgggaaataatatgaac

SEQ ID NO: 8735 - DNA, 1051 bp, Gossypium hirsutum
  Clone ID: GOSHI-09MAY01-C2343_1
ttcccttttactgcaaagagggttaccaagtactgcccacgcgtccgctggattggggcattccctcatttctctaccaactcaactgacctcacacttttcgtctgctggttttgccccaatatttgccctttgtttagcccctaaaggcgtcatgttctttggggacagcccttattatatgctggctaatgttgatattacacgaccattaagctacactccacttatcatcagtccccaaggagagtactacatggaagttaaatcaatcaagataaacgactaggatgctcccgttagacaccgtcactgttatcgatcaataaacaaggcgtcggaggcacgaagctcagcacaatcaacccttacaccattctacatcactcaatcttcaaagctgtcacacagtttttctccaaggagctctctgctattccccaagtaaaaccagttgcgccattcggtgtctgtttcaaatcgaaaagcattaaaaacagcagggttggactagaggttcctaacatcgaccttgtgctccatgacaagcatgttatgtggaggatttatggagcaaactccattgttgaagctgcaccaggagtgtcttgcttagctttcccgcgcggaggaatggataacaatggcgcttcgattattattggggcttaccaaatggagaataatctggtacagtttgataaggcaagatcaaggcttggtttcagttcttccctgctgttctacaagacttcttgcaataatttcaacttcactgctattccataaaaacataagtgcaagcttcccagtaagggtcacttttgcttggtttaagtttccactaccccaatgtgatcaacggaataattagagctatacatacacatatatgtgtatgtattgatctatgtatgtaaatgtgtatcgcaataaaggccatctctatgtgtttcggccctttcacttttttttttggaaacgtaatcaaaatgattaattctgtggaagccaaccccctcagtcatatttccgagcccttaatcgggaa

SEQ ID NO: 8736 - DNA, 998 bp, Gossypium hirsutum
  Clone ID: GOSHI-09MAY01-C2373_1
cgtgaacaacttcaatactggattccttcagttagtattgcaactttctcttgcactagctagcctcccaacctaggcttaattatttgtttagcaccttattcatctgtctgctaatgataaatctatctgagaaatccaaaaaggtgaggacaattgggtaaaacctagcagaatgattcttcagctgattgaagtcactttggattggatggatcaaactatggtttggacaaatgagaagcaaatgcaactcttatcttgatttcttagaagcatcatttgttaagcagttgcatagttctacgaatttgcatggctgtcactgagaagagaaaacgtgggagccttgtgcaaccccacaacttccagcaaaaggtcatagattttcccatcagattttggttctacaagttgactgcaaaccgaaagataaactatcagagttatgaccctttgttcagcagcacccgctgattcttgtgatatcatgggatgttcacggttacatcacttacacctgcaggaaaaagcagctcaactacatttcctgttccaagagaaattgtggtgcccaatgatggaatctacatctactcaagaagtaatacaaacttctctcacaaatcagcaaggaattcagggcagcatcccatatatcagttctgcaactacagcttgggtagctgtaccgctggtaaatctaattaggcttcaatctgctggtatatatatatcttctctttgttcatttctaatacaagtttcaatattccatgctaactgaactcatgtatacttttgaacttatgtgtgaactttgccatgaaccttcatcattttcctgattcctgtggaatatatttagataagaatgattagagttttgatttattaatttttacttagctttagtatttggtctttcatagaggtgtcagatcagaacttggtggatgaagaccaaggaaaaaaaaccagcaatgtccggtgcaaaa

SEQ ID NO: 8737 - DNA, 484 bp, Gossypium hirsutum
  Clone ID: GOSHI-09MAY01-C102268_1
cgatggatgactgaacgagagtccccttcaatttcaacctctcttaactgaaggaataaaccgagatgaatcgcccagaaacccgccaacgcttctgcagtaaaaacagaagcgccaaaattgatttttaccctcggtccagtcggagcaacccatctgtcagtaagaatcggcctcgctgatcaagagaaaagagattcgattctagatcggggaaaaagtaaagtttacgaggaataggctcgactattctcattttgtatcgagttctgacaagccggtttgacgatcaggacggtcggaggcacgctcacactatcaacggaccatctcggtatggtggcttgcatattttgggaatatggcatgtataacattataatccttttgtgtatataatcttatgatatagctcatggatggcatggaaatgtttgagaatgattagctattggagtggctaatagagattatatttgataac

SEQ ID NO: 8738 - DNA, 2045 bp, Gossypium hirsutum
  Clone ID: GOSHI-09MAY01-C2243_1
gaaaaaaagtgggggaagagagggttcattgttgtagtagggtttttcactgagaagaaactagaaacttagaaaccctttgcagatttgtttgttttcaacagttttaagctctaatactaacgaaatcgtaaatcatgcacgccccggttctcgttctaaaggattcgttgaaacgggagtctgggacgaaggttcaccatgctaacatccaagcctccaaggctgttgctgacattattcgaacaacattgggtcctcgatccatgttgaaaatgctccttgatgcttctggaggtattgttgtcactaatgatggaaatgctatcctacgcgagttagatcttgcacatccagcagcaaagtcaatgattgaattgagccgtacccaagatgaagaagttggagatggaacaacatctgtcattgttcttgctggtgagatgcttcatgttgcagaagcctttattgagaaaaattatcatcctacggttatttgtcgagcatacaataaggctttggaggatgctattgccgtgcttgacaagattgcaatgtctattgatgtcaaagaccgtgccacaatgttgggacttgtgaagagctgtatagggacaaagttcactagccagtttggtgatctgattgccgatttggcaattgatgcaactcaaacagtcggagttgaccttgggcaagggctgcgagaagttgatattaagaagtacattaaagtagagaaagtaccaggtggtcagttggaagattctaaggtcctcaagggagtgatgatcaataaagatgtagttgcgcctggcaaaatgaaacgaaagatcgtcaacccacgtattattcttcttgactgtccccttgagtataagaaaggggagaaccaaacaaatgccgagttggttaaggaagaagattgggaagttcttttgaaaatggaagaagaatacattgagagcctttgcttgcagattctgaaattcaaaccagacttggtggttacagaaaaaggacttagtgacttggcatgccattatcttagcaaggctggtgtcagtgcaattaggagggtgagaaagactgacaacaacagaattgcaaaggcatctggagctgttattgtgaatcgtcctgacgaattgcaggaatccgatgttggtactggagctgggctatttgaggttaaaaaaatcggggatgagttctttgcattcattgttgattgcaaagatccaaaagcttgtacggttctcttaaggggtgctagcaaggatctcctgaacgaggttgaaagaaatttgcaggatgccatgtctgttgctagaaacataattaagaatccgaaacttgttcccggaggtggtgctacagaattaaccgtttctgccacattgaagcagaagagttcatctgttgaaggcatagaaaagtggccgtatgaagctgctgctcttgcttttgaagccataccacgtactttggcacaaaattgtggagttaatgtgattcggactatgactgctctgcaaggaaagcatgcaaatggtgaaaatgcatggattggcatagatggcaacactggtgccattgctgacatgaaggaaagaaagatttgggacgcatacaatgtgaaggcgcaaacatttaagacagcgatagaagcagcatgcatgcttctacgaattgatgacattgtaagtgggattaagaagaagcaggctcctggagctggccaaggtccatcgaaacccaaggtcgagactgaagcagatgcggatggtgagcaaattcttcctgattgaagatactgaatcacttaaactcacccttcgctttcaaactgtttgatgaaatgatgggtttgttttgttgaagatgttttaagggatttgttgagcatcttttgcttgtatttttgagaattttaatctgtggttggcgttagcttttaagtcattttatctttttactatttcatcctaatttaccttcaattccttaaatgcgtgaagttactaaaatagttattttaaagt

SEQ ID NO: 8739 - DNA, 155 bp, Gossypium hirsutum
  Clone ID: LIB3147-036-Q1-K1-H1
tcatgataacatatacttctctgcttctaatgttaccagatctgccgcgattgaagcggacgagtttatctgttcgaagcctacatacgtggcgcggattaagctgctgctcttgcttttgaagccataccacgtactttggcacaaaattgtgg

SEQ ID NO: 8740 - DNA, 319 bp, Gossypium hirsutum
  Clone ID: GOSHI-09MAY01-C2233_2
cttatctgcacgtacagggtgcgtggcgctcgggtacggcgctgtgctggcgtgtgtacgggagccatgctgacgtacggggactcggcgtggttgctggaggtgttgtacagcgcctagaggttgcaggggctgcatgcggcgcaagtagaaagctactagggtttatcggctgagacattgggcttattaggcctattttgggtcaagtataggtttagcgtaatgtggtctgtaacttgggtcttgggtctaatatcgggcctatgtaattggactctaagcatttaatggactattatagattttatctattttt

SEQ ID NO: 8741 - DNA, 438 bp, Gossypium hirsutum
  Clone ID: LIB3135-043-P1-K1-F7
caggtacagggtgcgtggcgctcgggtacggggctgtgctggcgtgtgtacgggagccgtgctgacgtacggggacttggcgtggttgctggaggtgttgtacagtgcctagaggttgtagggtctgttgtggtgcatgtagaaagctactaggttttattggtatagacaatgttcttattaggctaatattttgtctagtatagtttttgtaattatattagttttttttttttttattttatttattttatttctttttttatttaattttttttatactatttattattatcttatatttattttgattatcttattttttatttttttataaatttcaatttatatatgtatttttatgttatattatttttttttttattatatatttagtgtatttaattttatttttaagtaaatttattaattatttat

SEQ ID NO: 8742 - DNA, 719 bp, Gossypium hirsutum
  Clone ID: GOSHI-09MAY01-C3983_1
ggaaaaggaaagatgtgtataagccggaggattttgctttgggtgatttagtttgggctaaatgtgggaagagatactcaacttggccagctattgtcattgatcctatattgcaagctcctgaatcggtcctaagttgttgtgttcctggtgctatttgcgttatgttttttgggtactcaaagaatggaactcagagggattatgcctgggtgaaacaaggaatgatattcccatttgcagaatttatggatagatatcaggggcagacccagttgttcaagtggaagcaaagtgattttcagatggctctggaggaggcagttttggcagaaaatggtttcctagactcggaacataagacccaacaaatgggatacacagatactcaacccagttgttcaagtcaggatctggattgtttatacacccacaaccaggatgcaagaccttgtgacagctgtggctcggttgttccattaaaaactatgaagaaaatgaagaaatctgctgagcttttgtgcaaacattgttataagctgcggaaatcaaagcagtattgtggcatatgcaagaagatttggcaccattcagatggtggcaattgggtatgttgtgatggatgtaatgtgtgggttcatgctgaatgtgacaacattagcagtaaagttttcaaggatatggagaacattgattattactgccccgaatgtaaagcg

SEQ ID NO: 8743 - DNA, 1009 bp, Gossypium hirsutum
  Clone ID: GOSHI-09MAY01-C3953_1
gtgaatgctcagggtgagttggaactggatcctgataatgacaacatatccccgtccaaaattgagccgacaaaggccgaggctgaagctattgcacgaggcttacagacgataaagaacgatgatctagaggagatccgacaattaggctctggaacatatggggcagtttatcatgggaaatggaaaggttctgttgtagcaatcaagacaattcaggccagctgctttgcagggaggcctgctgaaagagaacgattgattgcagatttctgggaaagaagctttgatattgagttcattacatcatccgaatgttgtttctttctatggcatagttcgtgatggtcctgacggatccttagctactgttgcggaggtcatggttaatggatccttgaagcagtttttacagaagaaggacaggactattgatcgtcgtaagagactcatcatagccatggatgctgcatttggaatggagtatttgcatgggaaaaaacattgtacattttgatttgaaatgtgaaaatctgttggtaaatatgagagatccacagcgtccagtgtgcaagattggtgatttgggcttgtcgaagggcgggcagcatacattagtttcgggaggcgttcgtggaactctaccctggatggcacctgagcttttgagtggtaaaagtgacatggtatctgaaaagattgatgtctactccttcggcatcgttatgtgggagttgctcactggtgaagaaccttatgcagatatgcattgtgcttctataattgggggaattgtaaacaacacattacgtccaaaaataccatcatggtgcgatcccgaatggaaggcattgatggaaaagtgttgggcctctgatgctgcagagaggcctccattttcagaaatatctcagaagctgaggagcatggctgctgctataaacgtaaaataaaggcaatcctgaagtagcccatcatcatatcatacggtggaaaacaaaagtaaggc

SEQ ID NO: 8744 - DNA, 398 bp, Gossypium hirsutum
  unsure (1)..(398): unsure at all n locations
  Clone ID: LIB3166-008-P1-K1-F3
gatgaatcaaaatcaatgaatccccatggcgagttggaatgggattctgataatgacagcggaacccttgcaaaaattgagccaacaaaggctgaggaagaagcttttgcaagagggttacagattgcagatttctggaaagaagctttgatattgagttcattacatcatccaaatgttgtttctttctatggtatagttcgtgatagtcctgacggattcttagctactgttgctgaattcatggttaatggatccttgaagcagtttttacagaagaaggacaggactattgatcgtcgtaagagactcatcatagctatggatgttgcatntgggatggaatacttgcatgggaagaacattgtacatttgatttgaaatgtgaaaatttgttg

SEQ ID NO: 8745 - DNA, 938 bp, Gossypium hirsutum
  Clone ID: GOSHI-09MAY01-C3973_1
aaaaattattttctttaaataaacgtaaagatcaaccaccattacactaaaaaccaaacttatttgtaaaatacaacacgtaaaccccccatcaaactcctccttaatacttgctctcatcgctttctcttcgagcacgcctcctcaattccacaacatcatcatccatcctcttctcttcctcactcttcccaaccacagtttcctttatcttgtgcgttgttccctttgcagcatcccaagctccttgtgcagtttgctttgccttctctccaacattttggatggtctccgacgccttatcggcaactgaaccggctatctcctccgacttctccatcaccccttgtgctctctctttagatttctctttcaactcgtacgcagtttgagatgccttatcagccccttctttggtcttatctttagcactttgggcagtctctttggtcccttgcgcgtactctctagctttctgttttgttttctcgttggcgctttgtgcggtctccgccgctctgttcgttgcatcttttgccctatcagccgccgtatcaaaggctcctttcgttttctccttagcgttatgcgcgtattcttttgctctttccatagcttcttcggcggtggtgtcttcatcggatgagatatctttttccctgtaagcaaagccagctttggtgtctctcccctcagagcgtttggaagcggtggtggtgaagcagactcgtgagacattggcggaggaacgaagagacacggttcgagggaacgcttttgagagctggaacatggcggtcttagctattaacgaggcagccattgttgaggatcttttagttcttgctgagccgtgtctcttttcttgagtaatagcttttattttccggacgcgtgggcggacgcgtgggcggacgcgtgggcggacgcgtgggcgc

SEQ ID NO: 8746 - DNA, 434 bp, Gossypium hirsutum
  Clone ID: GOSHI-09MAY01-C3933_3
tcgtccctcgcgtgcgcccacgcgtccgatcccctacttccactgcttagtctgctgacggtgaatggaaaattgctcactgtgggattgcctaataagccactcgaattgcctgtttttcctttagtcatgggtaaacttccctctttataggccttaaattccaccaaaacatttacaaaataaagttatatatataattcccatatcagaactttgcattggtaatgaaggtaatcacctattggctgctgtgaacttggcttgattattttggcttacaggacggaagcttattggaggaagtgatgttggagggatgaaagaaactcaggagatgctagacttctgtgctaagcacaatatcactgcagatatcgagctgattcggatagaggaaatcaatacggccatggaaaggcttgctaaatctg

SEQ ID NO: 8747 - DNA, 1354 bp, Gossypium hirsutum
  Clone ID: GOSHI-09MAY01-C3933_1
ccgtccggccggcccgcccgcccggcaaaacatagcaaaaaagaaaaatggcaaaatcagcagaggaagagaaccaacaaaaagcttttggttgggctgctactgataattctggaatcctctcccctttcaatttttccagaagggaaaatggtgatgatgatgtcactttaaaaattctttactgtggagtgtgccattcagacctacatactttgagaaatgactggggtttctccttttaccctgttgttcctgggcatgaaatttcaggtgttgtgaccaaagtggggaagaatgtgacaaaattcaatattggtgaccgggttggggttggggttttggttggttcctgcaagacatgtgaatgctgcgagcaggatctggagaactactgccctcgtataatatttacctacaactcttacaatccagacgggacaaaaaattatggtggttattcggatatgattgtggttgaccagcgctatgtgctacggtttcctgataacttgccactggatgcgggtgcaccattgttatgtgcagggatcacagtgtacagccctatgaagtattatggaatgaccgaggcaggcaagcatctaggtgtttctggacttggtgggcttggtcatgttgctgtgaagatcggtaaggcctttggattgaaagtcactgccattagtagctccccacagaaggagtctgaagcaatcaatagacttggtgctgactcattccttgtttctaacgatccggaaaaaatgaagtcagctattggtaccatggactatatcattgacacagtgtctgcggtccatcccctacttccactgcttagtctgctgaaggtgaatggaaaattggtcactgtgggattgcctaataagccactcgaattgcctgtttttcctttagtcatgggacggaagcttattggaggaagtgatgttggagggatgaaagaaactcaggagatgctagacttctgtgccaagcacaatatcactgcagatatcgagctgattcggatagaggaaatcaatacggccatggaaaggcttgctaaatctgatgtcagataccgatttgtgattgatgtggcaaattccttgtcacagtagggttcattgtgaaggaactagtccagtaagtttaaagattatgatcttaatggagaagagaaaacagatgaactttgatggcttgggacttgtaatgctatataataatcatttatatgagatcattttgtgggtgttctgcttcatgttatcactgttggtcggatggaatctttattttaacctcactattatttttgcagtcaataaaggaaatagttgcataa

SEQ ID NO: 8748 - DNA, 534 bp, Gossypium hirsutum
  unsure (1)..(534): unsure at all n locations
  Clone ID: LIB3146-019-Q1-K1-B12
cgcccacgccgtccgtgttgaatgcatgcgagctaggtacctggagaaactaccttgccctcgtatagagggttgtacctnnacaactcattacccaatgcacgatgggtgacaaaataaatattagtgggtggtgtacttcgagatatttgattgtaggtatgatccaagcgtgtatttgtgcctacatggctttcctagatatacattgtccactagtgatgccgggtagcactcatttgttattgtgcatgggtatcaacatgtgtacaatgccctaatgatagtatatataggaacttgaccgatggctagggaaagcatactatggtgtgtgcttggactttaggtgggcttaggtcaatagttgcttgtgaaagatcggtaaaggcctttaggattgaatagtcaactgtcattatgtagcttccccacagatatgagtcttgaagcaatcaatagaacttggtgctgactcattccttgtttctaacgatcccgcaaatatgaagtcagctattggtaccatggact

SEQ ID NO: 8749 - DNA, 344 bp, Gossypium hirsutum
  Clone ID: LIB3135-011-Q1-K1-G5
tctaggcatcactgggctctatgtttgacacgagaccttgttgacatccactcatttcactgctaatgcatctgaaacgtgtatgtgaacattggaactgtggaattgcctaatatgccactcgaattgcctgttttatctttagtcatgggacggaagcttattggaggaagagatgttggagggatgaaagaaactcatgagatgctagacatctgtgacaagcacaatatcactgcagatatcgagctgattcagattgacgaaatcaatacagccatgggagggcttgctgaaattgatgtcaaataccgatgcgggactgacgtgtcaaataacatgac

SEQ ID NO: 8750 - DNA, 2043 bp, Gossypium hirsutum
  Clone ID: GOSHI-09MAY01-C3883_1
aagatgttggtaaattctatagtggagactgctatattgttctttatacctaccactcgggtgagaggaaagaagattactttctatgctgttggattggaaaggatagcattgaggaggaccaaatgatggctgctcggttggctaatacaatgtgtaactcactcaaggggaggcctattcagggtcgagtgtttgaaggtaaagagccaccccagttcattgcactattccaacccatggttgtccttaagggtggtttaagcactggctacaagaagagtatagcagacaaaggcttgacagatgaaacctatactgcagagagtgttgctctaattcagatttcaggaacagctgtacacaataataaaacattgcaagttgatgcggtggcaacatcattgaactcaactgactgcttcctcttgcaatctggatcctcaatttttacttggcatggaaatcaaagcacttatgaacagcagcaattagctgcaaaagttgctgagtttttgaagcctggagttgttcttaaatatgctaaagaaggaacagagagcaatgcgttctggtctgcacttggaggaaaacaaagttataccagcaaaaaagcatctacagagactgtcagggatccccacttgttcactttctcttttaataaaggaaagtttgaggttgaggaagtttacaatttctctcaggatgatctcttgacagaagatattttgatactcgatacacatgctgatgtgtttgtttgggttggtcagtgcgtagagccccaaagaaaagaaaaatgcttttgaaattggtcagaaatttatagacatggctgcatctctagaaggtttgtctccacatgttccactttacaaagttactgaaggaaatgaaccttgcttcttcacaacattcttctcatgggattccacccaagctactgttcaaggaaactcattccagaagaaggtggctttgctctttggggctagccatgctgtagagggccaggatcgatccaacggaaatcaagggggacctacacaaagagcttcagcgttagctgccttatcatctgcatttaatccatcatcagctagcaaagcctctactccaaagccttccagcactagtcagggatcacaaagagcagcagctgtagctgctctttcctcggttcttactgctgaaaagaagaaacaatcacctgatgcatcccctataaaatccactagcagcactcctgcagtaaccagtccgcctcctgaagcaaagagtgaagtggacccttctgaactagcagattctcaagaggttcctgaagccaaggagacaggtgtagtatctgaaaccagtggggaggattcagaaccaaagcaagagagagagcaggatgagaatgggaatggaagcactcaaagtactttcagttacgagcaactgaaggcgaaatccgaaaatcctgtaactggaattgacttcaaacggagagaggcttatttgtcggatgaagagttccaggccgtatttgggatggaaaaagaagcattttataaactgccaaagtggatacaagacatgctgaagaagaaagttgatttattctagagaatgaatgcatgtatgttgttcttttgcattctaatgccttcattgaatttgatcttcacttccgctcgaaaattgtggttttcttggtatagcttggattgccttatctcatttgccttttttcatgtcgtggctaatatctgattgtttgaaagagtgattttttaggttccacacctcctagcgtcactggcttttgtaatgtatcacatgtagtagtcaaagagagttggacttggcagggcaacattcttttatttggttggcatgtatctcatctcagttgcgttgatattttattagtccttgctataggttggtaaacaaggttggttgctgtatatggtttgcatttgttcgaacataatggataattcatggtttgagcaatatatatatctaaaaacttatatctgtgtgtgagtc

SEQ ID NO: 8751 - DNA, 578 bp, Gossypium hirsutum
  unsure (1)..(578): unsure at all n locations
  Clone ID: AI054904.1
caaagcctctactccaaagccttccagcactagtcagggatcacaaagagcagcagctgtagctgctctttcctcggttcttactgctgaaaagaagaaacaatcacctgatgcatcccctataaaatccactagcagcactcctgcagtaaccagtccgcctcctgaagcanagagtgaagtggacccttctgaactagcagattctggaaggttcctgaagccaagaacanngtgtagtatctgaaaccagtgggagggattcagaaccaaaacagagagagagcaggatgaaatgggaatgggaagctccaaagccttttcagntaccagcatttgaggcgaaatccgaaatcctgacctggaaatggcttcaagggaaagggctaattggcgagtaaaaagtctcaggccgtatttggatggaaaagaagcatttttaaacgccaaagtggaacagactgctgaaaaaaaagtgattatctanagatgagcacgtatgtgtctttgcatctatgcctattgattgaactcactctgtcaaaatgggttctggatactggatgcctactattgct

SEQ ID NO: 8752 - DNA, 389 bp, Gossypium hirsutum
  Clone ID: uC-gsronu33B114h12b1
ttttcctcgcgtacgcccacgcgtacgaagaagggggggtttgatataggtcagaaatttgtagacatggctgcatctctagaaggggtggctacacatgttccactttacaaagttactgaaggaaatgaaccttgcttcttgacaacattcttgtaatgggattccacccaagctactgttcaaggaaactcattccaaaagaaggtggctttgctctttggggctagccatgctgtagagggccaggatcgatccaacggaaatcaagggggacctacacaatgagcttcagcgttagctgccttatcatctgcatttaatccatcatcagcgctacacttgtccttactactctggttggaacctacacatatgtccagaacttc

SEQ ID NO: 8753 - DNA, 613 bp, Gossypium hirsutum
  Clone ID: GOSHI-09MAY01-C3863_1
gtaaaaatggagttcactgaagcgtataaacaaacgggtccttgctgtttttcaccgaatgctcgttacattgcgggtgctgtcgattaccgtcttatgattcgggatacactctccttcaagggtgtgcagttgttttcttgcttggacaagataagctatattgaatgggcacttgattctgagtacattctttgtgggctctataagagacccatgatacaggcatggtcactcacccaacccgaatggacatgcaaaatagatgaagggcctgctggtattgcttatgcaagatggagcccagatagccgtcacatactgaccaccccgaagtttcagctgcgattaacaggttggtccttagtgaacacagcttgcgttcatgtacaatggccaaagcatggttccaaaggagtttcatttactaaagatggaaagtttgctgctatctgcacaaggcgtgattgtaaggactatataaatttgttgtcctgtcactcttgggagataatgggtgttttcgccgttgacacattggatatgactgatattcagtggtcaccggatgacagtgcaatagtgatcggggattcacctcttgaatacaaag

SEQ ID NO: 8754 - DNA, 1016 bp, Gossypium hirsutum
  Clone ID: GOSHI-09MAY01-C3803_4
gatctttttcagaggtgaaggaaaagattttggatgatttttcaccccatttcagtctgttgaatcaacttctccttcacccaccctgcatccctttttatttttattgctttccaatggctgttcaagctcagtatccttccaatgtgctcttcttaaacagaggtggacaagaggagcatgaattttcgttgcagcaacaagcgggaggagtttttcttaatcaaccccatatgttattcaacaatggcaccaacaataagattaatccaaggaaaagagcaagggaagttacggcaggggccgcaataactacgcccatgaattcatattctttgcaaatgcaaccgcctcagctgatagagctttcccaactccaccaaccgaatgtggtttccaccggcctccgattatctttcggcggcgaccaacaacaatatcagaatcagaatcttcaaaaccaacaacaccaacaccaacaacggcaacagaatcttgttcccagctccactctttttttgtccgtggtatccgatgaattggctacccaaatcaaacgccagagagaagaattggaccaatttcttcaagcccagggaaaggaattacggcgaacgttagcggagaaaaggaataggcactaccatgcgctgttggcggcagcggaggaatcggtggcgaggaggttaacacagaaagaagcggaagtggagaaagcgacccggcggaacgccgtgttggaggcacgcgcagcgcaactaaccgtagaggttcaggtctggcaagcgaaagcccgggcacaggaggcaacagcgacttcgttacaagcacagctccaacaggctatgattggctgtggggctgctgcggtgacaccagattgtaggataggggaggggccgcccgcgcggggcccgcccccggcgccctctcctctcgcccgctttctttcttctcgctcctcccttctctgccttctttctcctcccttctctcccgtgctccctccccccttt

SEQ ID NO: 8755 - DNA, 1417 bp, Gossypium hirsutum
  Clone ID: GOSHI-09MAY01-C3803_3
cccacgcgtccgcccacgcgtccgcccacgcgttcgcccacgcgtccgcaaaatgttggtggtgagaaaccaaattaaagaaacaagaaaattagaagaagggtgatctattctcttgttgttgatcagctctttatcatgccattcttgtgattgctatcattcagttcatatctttctgttcttatctatcttcaacacttgattgctattccacgtcacaagtcacacttgcgtgtcaatggcgcgttcaagcttcagtatcccttccaatgatcctcctcttaaacagaagtggacaagaagggcatgagttttcgttgcaacaacacgggggaggggtttatgttgatcaatcccatatgttctttaacagcagcaacaacaataataatccaaggaaaagaggaagagaaatggcagcggttgcaacaacagcgcccgtgaattcattttctttgcaaacgcaaccgcctcaattcatagagctttctcaactccaaagaccaaatgtagtctccacggggctctgcttatcttttggggaccaacaacacttgcaccaaaaccaaaaccaaagttatgaacaccaacatcaaaatctcgtttccagctccactgcttttctgtctataatatctgatgaattggctacccaaatcaaacgccagagagaagaactagaccaatttcttcatgcccagggggaggcattgcggcgtacgttagcggagaaaaggcataggcacttccgtgcgctactgggggcagcggaagaatcggtggcgaggagattaagggataaagaggcggaagttgagaaagcaaagcggcggaacgcagagctgcccccgcgcctggcccctctttccgcgccttggatacccatgtggcaaaaccggtttccataatgccaggcacgcgtggcgcaacttaacgtggaggcgcaggtttggcaggcgaaagccagggcacaggaggctacggcggcttcattacaagcgcagcttcaacaggctataatgagcggaggggctgccgcctcgatgcacgacagcaggagaggggaggagggggtgaagtgcggtgaagggcaagcggtggacgccgagtcggcttacgtggacccggaccgggtggtggcttcatggggtccggcatgcaaggcgtgtcggaaacgtctggcgtcggtggtgctgctgccgtgtcggcatctatgcttgtgtacagagtgtgatcgagtgacgcaagcctgcccgctttgcctcaccgccaggaattctagcgtcgaggcttttctttcttgattttttttttaaagtccagattaaagaaaaggggaaaaacaatttggaaaaaagaaagaaaatcaaatagtataaaccttgattataataataagttttatatttggttc

SEQ ID NO: 8756 - DNA, 552 bp, Gossypium hirsutum
  Clone ID: GOSHI-09MAY01-C3803_2
cagaaggtgaaagaagccttggacaaagctaatattatcatgaaagatccatccaccacccccgaatacggcgagatcctctggacttgcgtcaagaacttcgaggacatcatcgactcggatcagaaagccatggaagccatcaccgagcacaacgccaaccacatcatcgaagaactctccgccgattccgcgtctgtgtctccctgcgaggacgagttggaagcggctaacatcgagtcgccggtgagggatatcgttaagtcgattcacaagacgattcgcatcaatttggccatcgctgctatagaggtccatttttgaaggcctgggaaattattattaatagggtattcctgggtcaatgtgaaagcggaatcatttggtgggaaaatatgatgacttttgtgggggtgggttaaatactcgagagaggtatttatgttgacataaatgcatggattcaattcgagtaattgaagctacatgatttgtattagattaaaatataaatttattattaaaacatgattaatatctaaagttagctac

SEQ ID NO: 8757 - DNA, 872 bp, Gossypium hirsutum
  Clone ID: GOSHI-09MAY01-C3803_1
atttccttccagtgaagagaggacagagaagagacattgagaagatgaaccagtacgtctttctcctcctgtccctctcatgtctcttctccttctccgtttcagctgcccccgggcctgaaccctctttcatcaccttggatacccatatggcaaaaccggtttccataatgccaggcaactttcattccggccttcagaaagtctgctccgccaccgatgaacccgtcgattgtatccagctgctttctcccttgatgaccgacaggaccgccgtggatcccatttccatcctcagggtgggtatcgaggcgaccaaccagaaggtgaaagaagccttggacaaagctaatattatcatgaaagatccatccaccacccccgaatacggcgagatcctctggacttgcgtcaagaacttcgaggacatcatcgactcggatcagaaagccatggaagccatcaccgagcacaacgccaaccacatcatcgaagaactctccgccgattccgcgtctgtgtctccctgcgaggacgagttggaagcggctaacatcgagtcgccggtgagggatatcgttaagtcgattcacaagacgattcgcatcaatttggccatcgctgctgtacaggtccatttttgaaggcctgggaaattatcattaatgtgaaagcggaatcatttggtgggaaaaaaggatgacttctgtgggggtgggttaaatactggagagaggtatttaggttgacataaatggattcaattcgagtaattgaagctacatgatttgtattagattaaaagataatatcatgattaatatcttcaatcctaaaacataaattaatcacacaaattgtttatttttggt

SEQ ID NO: 8758 - DNA, 419 bp, Gossypium hirsutum
  Clone ID: LIB3828-019-Q1-N6-G1
aatcataatatgttttttttaatacttttaaaagaaaacatgcatttatgtcaacataaatacctttttacgacttttaaacccacccccacaaaaggaatcatattttaccaccaaaagagtccggttaaacaatgacccaggaaaacccaaaaaaaaaaaatcccccaagcccaaaaaaagggacccaaacagcagcgatggccaaactgaggcaaaccgtcgtgcgaatcgacttaacgatatccctcaccggcgacacgatgttagccgcttccaactcgacctcgcagggaaacacagacgcggaatcggcggagagttattcaataatgtggttggcgttgggcacagagatggctaccaaggcttttctgaccaggacgatgatgaacccgaaattctggacgcaagaccaa

SEQ ID NO: 8759 - DNA, 326 bp, Gossypium hirsutum
  Clone ID: LIB3145-049-Q1-K1-C11
ggcacttccggcgctactgtggcagaggagaatcggcggcgaggagaggggggataaagaagcggaagtgagaaagcaaagcggaggaacgcatagttggaggcacgcgtggcgcatcttaacgtggaggcgcaggtttggcatgcgaaagccagggcactggaggctacagcggctccattacaagcgcagctacaacaggctataatgagcggaggggctgacgtcttcatgcacgacagtaagagaggggaggagggggtgatgtgcggtgaatggcaagcggtggacgcctagtttgtttacgtggaccccgaccgggtggt

SEQ ID NO: 8760 - DNA, 721 bp, Gossypium hirsutum
  Clone ID: GOSHI-09MAY01-C3583_2
tcgttcaaagcagacactgcaattccatggctccaacatgcatgaatttttttcagctatttttgtagccttttcttttttcactcgccttgctaagccattttctttctatactatctgtaattgacagctttagaaccaggttaattaattgaatctttattatatagtcaacaaccagctggcttgaggtcccccttgccccccatttctagcttgactaatggagtagatgggaggctactaaagggaaaaaagcatcttttgtaaatggtggatcatcaccttcatttccatctcagagactcttggccttagcccagcagctgcgtcattacaagcctccaccttgttccttggacgaagaatctgttaccccagttgtccaaaacccagaaaagtttagacccaaaagagctgctgttttgatatgtctctttgaaggagatgctggggatttgcgtgtcatactgaccaaaaggtctttaacaatgtctactcaattccggggaagtttcattgccaggtgggaaagcagaggagggagacaaagatgatggtgatacagctactagagaagccaaagaagagattgggttggatccttcacttgtgaatgttgtaacctttcttgaaccatttttgtccaagcatctccttagagttgttcctgttattggcatacttaacgacaggaaggcatttcagcctaagcccgaat

SEQ ID NO: 8761 - DNA, 648 bp, Gossypium hirsutum
  Clone ID: GOSHI-09MAY01-C3583_1
aaaaaaaagagcagagaatcattatttccttttcttctcgttatacgaatttggttgtaccatgcaaaacctggattcatgagcttctcaattctaaagagattacctttattttctccaccatttgtcaacgtaatggcttcatcatctttctactgtggagttcaatcaaagagattcttagtgttagcccagcagctgcgtcattataagcctccaccttgttcctgggatgacaacgaggaacgaatcatcgaggaagccgccgggaaatttgtttcccaagtgggttttcaagaatccgttacccgagtggctcaaaacccagaaaagtttagatccaaaagagctgctgttttgatctgtctctttgaaggggatgctggggatttgcgtgtcattttgaccaaaaggtcttccagattatctactcattcgggggaagtttcattgcctggtgggaaagcagatgagggggacaaagatgatggtgatacagcaactagagaggctaaagaagagattgggttggacccttcacttgtcaatgttataactgttcttgaaccatttttgtctaagcatctcctaagagtagttcctgttatcggtgtacttaacgacagaaaggcattcaagcctactccg

SEQ ID NO: 8762 - DNA, 1044 bp, Gossypium hirsutum
  Clone ID: GOSHI-09MAY01-C3573_1
gtttctcttgatttcaaactcgaagtctccgccactactaccagctttctattcatcgctcaacccaatggcagtcgcttccaactcgctcgtttctttcatccacggctcattgagtcaacccggaaggacctcccactttcttccttcaccttctctttctttccccggatctcgctcgctctctctgaaactcacccgccgctccaactcgccccttctttgctctttagatgcaaccaacgccacagataaggacaccccaatcgaaacaaggttcccagcttatccaactgtgatggacatcaatcaaataagagagatattaccacacagattcccattcttgttagtggatagagtgatagaatataatccaggggtatcggctgttggtataaagaacgtgaccataaatgataactttttccctggacatttccctgagaggcccataatgcctggtgttctcatggttgaggcgatggcccaagttggaggtctagttatgctgcaacctgaggtgggaggttctcgggaaaacttcttttttgctggagttgacaaagtaaggtttaggaaaccagtcattgcaggagatactttggttatgaggatgacacttattaagctgcaaaagcggtttggaatcgcaaagatggaagggaaagcatacgttggaactgacttggtatgcgaaggtgagttcttgatggctactggtagtacttgattgtctcagtattttatactttgtgtatccactaattttcggggaaatcaccagccgtgttgtacccgacgcttttgttctgtatgcatccctttttagtgagattttcattggggtttttttcgacgacagtatgtttgtaagtttctttgtactttgcagacaaagaaaaaggttttcttgaggtttcttctatatgtttgtaagtttctttgtactttgcagacaatgaaaaaggttttcttgaagtttcttctatcatttcatgtagactgaaatcagtgtccacgcggccgaaaaagaggtttaac

SEQ ID NO: 8763 - DNA, 989 bp, Gossypium hirsutum
  Clone ID: GOSHI-09MAY01-C3563_1
ggggagctagtggtggtgggccccttgtttgtaacacaagcaatcaggaaccatgcaggggcgatatatacgatgttgtcggtgctgcttctgcttctgcttctgtttcttctgctgcagctgcagttgtgttaaagtctctgcaccatcactctttttccgctgaccctccttttccccaccatttctctggagaaatggcagcagcgcctgtgaatgctagagttcctttcacagcagctcagtggcaagagctggaaagacagaccatgatttacaagtacatgatggcttctgtccctgtccctgctgaactccttatccccctcaccaaaaacccttcaaatgtagcgataaagggttctttggaattggggttttcgagcaatagctcggatccggagccatggaggtgcagaagaacagatgggaagaaatggaggtcccccgcggcccccgcgcctccccaaaaatactgtgagcgtcactctcataagtgccgtccccgttcaagaaagcctgtggaattgccaaaccactccaatatcaacatcaacaacaatgatcacaaatcacaaacacttcacaacatggcatctgatggcaccaccaaccaacctcatcaaaacccacattttacaaaccaccacgacccccatttcttcacatcttcatttgatcaatccaggtgcttggaatggttcatgaaaggggaaaccaccgttccttttgcttctaaccccgagtggcagcggacgaattatggggtcagtttacaagctcagcatcatctaaacgagcaattcacccccagtttagcctctttggaaggctccttgaacctaaaccaaacacattcacaagaaacaagagccttcatcgatgcatggtcaatagcagaaagagaagtggttgaaatggaaggaattggagctgcaaacgccctgtttcttcaaacgagaagctaccactgtcatcacttacattat

SEQ ID NO: 8764 - DNA, 1603 bp, Gossypium hirsutum
  Clone ID: GOSHI-09MAY01-C3533_1
attcaattttatctgttcaaagtctagttctttgtggcactgtgtgaggtatcaggctaagactgttgggggtgattgagagtgaatgaagaaagggtctgtttctttgagccatctgggtacttttccaagcccaggagattcagattaccgtgataatggggcggtggtgagtcaaaaaggttggagttcaaagcgagtgccgcgttcggctaacagcaatggcagtagcagaagacatatcagtgcttcatctttgacacctttttacagtggaagaactttgccttccaaatgggaagatgctgagatgtggatttgtagccctgttttgggttatggtgttagcaagaacgtaaactatcatctccagaggcggccaaagtctaaaagtgggccgattgtgccccctgggattgctttctactccaattgctcgccttccatgaacttgcttgatggtggaggaagtgggactgtgagaatttgatggcagggtctccattttcaactggggttttgatggctgatggggtttccgttcattatcttggttgtagagccgccccacctgctggagatgttgaccgcgatcggtcttgtttgggtgcagagtgatagtaatgtaccacgatccgctattatacctggatggtcgtcagatttggtcagtgagtcttcattgccaagctctcaagatgaaaaacttgatgaaatcaaggatgccgaaatgatgctgtgtcgtgtagcttcgcggagggatatggcgacgcaaatgagcccggacaacagtagcagccactcatctactagagagaggtcttcattcggccactcacctccccctatccttcctcttcctgctgtggacaacaatgatcatccttctaaactggacatcagggaagtgcagatagacaagcgagccactgttactaaccggtcaaaaaggcatggatcgagaagaatcaagaaaggcgagccggattttgaaggcttctaccgaaacagcgccccaacttctgctttatctctggatatcgcagaggcagctacaagcatttcaaagttgcaaagagaggaagcaaagatcagtgcttgggagaatctgcagagggcaaaagctgaggcagccatacgtaaactagagatgaaattagaaaagaagagatcagcttcaatggataagatcttgaggaagctgagaacggctcaggtgaaagctcaagaaatgaggagttccatatcaggcaaagaggatgaacagattcccaagacttcaccaaagtttacattcttccatatccgcatgagttttctcagcagttgcttcacctgccatggtttctagtttcttgcaaatcttatgtccatatcctcaaatcttttccatcaggtattaagcttccaagggagtatttgtttctggatttttttccctgccggtttctcggcttccctactcttccatgtaaattatcttaagatttctagattcgatggtccaggagaccgcagctttcaacttcttgttcttagtgtatgggattttttttgggtcttttttaaaaggaaatgtcatcttttatgctttgcaatgtcc

SEQ ID NO: 8765 - DNA, 897 bp, Gossypium hirsutum
  Clone ID: GOSHI-09MAY01-C3443_1
aaaaaaagtaaaaacttttgatcaaactaggtttgaatgaagtgaaaaaaaaaatctagctggaaagtagatctggtaaaaacaaacattgtgtctccgacgacggagataagagacgttaaacgatgtcgtcgccggacattgcttcaatcatggacaactcaagggaactcgatcgattaaggaaagatcaagaagaggtgcttgttgaaatcaataagcttcataaaaagcttcaagccactcctgaggtagttgagaaacccggtgattcttcattgtcaaggctaaaaagtttgtatattcaagctaaagacctttcagagcgagaagtagtgatttccaattccttagtaagtaaacttgacactttcctgccatctggagcaccaggacaacagcgaagaaaaatggatggtagtgaccagaaaaggagaagaatgaaatctgattcagatatctctcgcctttctccttctatgcggagtcatattgaggcttgtcttagtctcaaagacgaacaggtagctgcgagagtcacctcagacgccgagaaggatgagtggtttgtcgtaaaagtgatcaattttgatgagaaaacaaaagaattcgaagtactcgatgaggaaccaggtgatgatgaagagggtggtgtccaaaagaagtacaagctgcctgcatcttgcatcataccattcccgaaacgaaatgatccttccggtactcaagaattccctgcagggagaaattttttggctgtttatccgggaacaactgcactctataaagcaactgtcattagtacacctcgaaagaggaaatccgatgagtatctattggaattcgatgacgatgaagaagacggagctttgccgcaaaggacggtaccgtttcaca

SEQ ID NO: 8766 - DNA, 419 bp, Gossypium hirsutum
  Clone ID: GOSHI-09MAY01-C3403_1
aaaaaactcaattgaatgaatgtataaatcaactttctacctattaaccggggaagcccttttactctctccttctcttgatcaagcaaaatctggattcaacaaggacttcccttcaactaaaacccttttgattcgagaacaaaactccgggtctttttttttctttgcgttcttgaccagtgtttaatcgaaaatttgtagcttttttttttggggggggggtggtgagtggggatgaggaagagggagagggagaatccggtggggtatgtgggcactatacaagtacgaggaaggggaagtttgtgggatatgtgggcaccgcctcccatttcttccgatagaacatcgcttcaactcagtgcttttccatcggggaggttgcctgactttttattttttttgttttgtacgcc

SEQ ID NO: 8767 - DNA, 670 bp, Gossypium hirsutum
  Clone ID: GOSHI-09MAY01-C3793_1
tcacaaccaattttgcccttgggtgtttggaactgttgctgctgctggctgtagtggctccagtgctgatgttgttgcactctgtggatggcagttgacattggatgccttggatgccctgcggtcacaggggcatatgcctgtacagacagtacagtctgagtcagcagcatcgctgtataaggatgatcaccaaactcctggtaaaaagctccatcgacggcgtcctatgagcaaaaatcacgggcaataatgatggccagacacgacgtgtgaagacatcttcaatggctagatggaataagcattctcaacggttgaagcaaattggaaaagctttttcagtcattgccactggaactgctgccactagccctggggaagttctgtcatttcttaatgtcccttcttgttaaactcttatttcatggtaaagtactttgtgtcaattcttactgcatagaggatctattttgctttatttaagcaggttcttctcagtattatgaacgttattattcttgatcagtgatgtgacagtgaacattgctgttaagaacaaagctcttgtttttcaattcttctgggttttggtttgtaatagatagtgagaatattgtaaacttagttagctcaaccttaataagattttgatctttacgtaatgctg

SEQ ID NO: 8768 - DNA, 690 bp, Gossypium hirsutum
  Clone ID: GOSHI-09MAY01-C3783_1
cgtaggcaggtgattggttcttgttgaaatgggagaaggctgtggatcttgggtttcctcagcagcaatgtgtcatatgtgcaatcactccaacttgaatgtcctttggcttgctttcccaatccgttcgggacctgcaaaagtactaatccctagattcatgtaacatccggcacctgatatggtctctgctacctgggaccttctgccggtttatgccaaatccagaattactctcactttgtgggttaagccaacgaaatgatacctcgtggctggttttaactggtttgccccgtttcagacatggtcttttgcgcccgcttcaaacctctttgttgaaaagagcaacacctggctgaccgatatgagaatcttaaggaaagtggtacctccaaggcagggaccggggctgctgagaagagattccttgtttttgatcaatctggtgatcaaactaccctgattttcagttctgcttttgggactcataccaagtgcctgtcttcttggggtccaaaatctcctgctgctggtaactttaacggggatgttcccatggctaaagcaacagggaatcttcactctggactgatatctacagatgtgtcttatgacaaagggactgatgtgcaaagtgaaatgcacgaggacactgaggaactcaatgcgttgctttattcggatgat

SEQ ID NO: 8769 - DNA, 1163 bp, Gossypium hirsutum
  Clone ID: GOSHI-09MAY01-C3753_1
cacaagttgaagttggttgaagtggagggaacccacactctccaaactacctactcctcaatagaccttcaccttggccaatcaatgtccgttttatttacagcagatcaacctgctcaagactattacattgtggtctcctctcgctttaccaacccggttctcacctcaacagcaactctacgctatagcaattcagccggtcccgtctccggccctcctcctggtggtcccaccatccaagttgactggtctttgaaccaagcccgctctatcaggactaaccttacagcaagtggaccaaggcctaacccacaggggtcgtatcactatggtctcattaatacgaccagaaccatcaggcttgccaattctgccggccaagtcaatggcaagcaaagatatgcagttaacagtgtttcctttgttccagcagacactcctttgaaacttgcagactttttcaaaatcgatggagtttatcgtattggaagcatatcagataaccctactggtggagggatataccttgacacttcggttatgaattcggactataggtctttcattgagattgtgtttcagaatgatgaggatattgtccagagctggcatctcgacggctactctttcttcgttgttggtatggacggagggcaatggacggctgctagtcggaacggatacaacctccgtgatgccgtttcacggtgtaccactcaggtgtaccccaagtcatggactgccatttatgtggcgcttgacaatgttggaatgtggaacttaaggtccgagtattgggcgagacagtacctgggacaacagttttatttgcgtgtcttcacaacgtcaacttcactaagggatgaatacccgatccccaagaacgcactactctgcggcagagcaagcggcagaagaacccgtcccctttaaagccacccatacaataaatgatccgtagttggatagtcaaagctggtctacaaggatgaatgattggacagcagagttttagctcaccaacttatgaacagtgaaacaacacgattgttggttacgagtttaaaattactagacctcaactcgaggtcgcattctttcttactatacatttgtattcccaatgcattgctggaggtcatagatatctatttcttgtt

SEQ ID NO: 8770 - DNA, 491 bp, Gossypium hirsutum
  Clone ID: GOSHI-09MAY01-C3773_2
cccgcgcgcccgggttgcgatgcggcggcgcctttctctcacaattgtcagatagcaataataaaaacgggcggttggtaattgggggtgtgggctgggggagagagccattccttggtcgtctccgttgcagcagcaataataataacagcaactgcgatgcgaaaaagggtgtccccgattcaaactacgtagtgcccctggagaagtctttttcgccttccaactcctcctgcatcactcgccctcttattgaaatcctgcgcgacctcaataagcgtatcccgcataacatcatcaagtctccgcctaattcttccactttcctcccctggtaccatgccaatcgcatgttgagcttctacgcccctgggtggtgtggagaagtacgtgatgttatattcgccaacaatggaaccattactgttgtgtatcgactcaccattcgaagttctgacggagaggcacatcgtgaatcaactggcacggta

SEQ ID NO: 8771 - DNA, 967 bp, Gossypium hirsutum
  Clone ID: GOSHI-09MAY01-C3773_1
cccacgcgtccgcggcgcgtgagatttgaccaaacgagcttggaaatccattggaaaaaatggcaatacaattgcgaatcggcggcggcgtcttcctctcacggtggtctccgcagctagtgttggatagtaacaataggaatgggcggcggttggtaattgggggcgagagctgggagagatcgcgattcatcggccttgtccattgcaacagcagaagcagcaataatggtagcagcgatgctaaaaagggtgtccctaattcaaactacgttgtgccactcaacaagtcgttttcggcatcaaactcttcgtacatcactcgtcctctagttgaaatccttcgcgatctcaacaagcgaatccctgataacatcgtcaagcctccttctgattcttcttccacttttctcccttggtaccatgccaatcgcatgttgagcttctacgcccctggatggtgtggagaagtacgtgatgttatattctctgagaatggaactatcactgttgtatatcgactcactattcgaggatctgatggagaagcacatagggagtcaacagggacagtatcacttagcgacattgacatagaagatccagttggcgcagcagaggaaatagcattctgcagggcctgtgctcgatttggtcttggtttatatctctatcatgaaaaacaatagatacacacaaaagcatattggaaatatggactatgcttttagtcttactgttcaagcacattttaattacccaaatgcgcctaataattaaatgaaggttttaaaattagcctacattgaaattgttatttattattttagaaatgtgaggttaaattttactattagttcttgtacgttgcgaaagttgtgtattaaatatctatactttaaattttaaaatttaaaattttagtcctcaccattaaaatttcttaaaataaataattaaaaaatat

SEQ ID NO: 8772 - DNA, 653 bp, Gossypium hirsutum
  Clone ID: GOSHI-09MAY01-C3703_2
gcgttctctcgtccgccgcatttagtcccgcgaagaaacaacccggagattataagcacctccccgtaagcataccacaaaggaaagcttggagagagacccaaaaacaatgtctaaggaagtgagtgaagaaggacagggtcgtgaggactatgtggaccctccaccggcacctctgattgacatggctgaactcaagtcatggtctttttacagagccctcatagctgagttcatagccactctcctcttcctctatgtcactgttgctaccgtaattggtcacaagaaacaacaagatgcatgtgatgtgggttggtctcttgggtattgcatggcctttccgtggcatgatctttatccttgtttactgcactgccggtatctcaggtggacacattccccctgcggcgacttttgggtttggttttggcccgtagagtgtcttacagggctgggctacatgggtcaagtgttgggtgtatatggagttgtttgggtaagcttcatgaacatcatacactccttgcggggtgcaacacgggttctggctcaacacaactgtttggactgaatattgaattcgactgctcctgtttaccacgcccaaaaatgctggatccagtctgatggtccttcatgggtcatgtatg

SEQ ID NO: 8773 - DNA, 1137 bp, Gossypium hirsutum
  Clone ID: GOSHI-09MAY01-C3703_1
cccacgcgtccgcccacgcgtccgcccacgcgcccccgcattcgaagctgcatttagttccacaaagacacaacatagagattataagcacctccccgtaagcaaaccacaaaggaaagcttggagagagacccaaaaacaatgtctaaggaagttagtgaagaaggacagggtcgtaaggactatgtggaccctccaccggcacctctgattgacatggctgaactcaagtcatggtctttttacagagccctcatagctgagttcatagccactctcctcttcctctatgtcactgttgctactgtaattggtcacaagaaacaacaagatgcatgtgatggtgttggtctcttgggtattgcatgggctttcggtggcatgatctttatccttgtttactgcactgccggtatctcaggtggacacattaaccctgcggtgacttttgggttgtttttggcccgtaaagtgtctttcattagggctgtggcttacatggtgtcacagtgcttgggtgctatatgtggagttgggttggttaaagctttcatgaagcatccatacaactcccttggcggtggtgcaaacacggtggcttctggctacaacaacggaactgctttgggagctgagattattggaactttcgtacttgtctacactgttttctcagccaccgaccccaagagaagtgctcgtgactcccacgtccctgtattggctccccttccaatagggttcgcagtgttcatggttcacttggctaccatccccatcaccggtactggtattaaccctgcaaggagtttcggtgctgctgtaatctacaacaacgacaaagcctgggatgaccactggattttctgggttggtccatttgttggagcacttgcagcagctatatatcatcagtacatccttagagcagcagctatcaaagctttgggatccttccgcagcaaccccaccaactaaaaaaaaatcaacccaaatagctttgtctccacttcactctttttctattttctccatttgttcgtttgtgtgtatgagaagattattattatgaatgatgatgatgaccctctccatgtatcactgttttttcctctatttataaatatttaatccttc

SEQ ID NO: 8774 - DNA, 702 bp, Gossypium hirsutum
  unsure (1)..(702): unsure at all n locations
  Clone ID: LIB3543-039-Q1-K1-G3
gtattannaaccctgcaagggagnntttcggtgggcttgctgnntaatctnnacaataacnngacaaagnncctgggnatnngaacactggnatnntttctggnnnttggtccatttttgttgnngagcacttgcnnagcagctatattatcnaatcagtacattcctgtaggagcgagcgaggctatcaaaagnnctttgggnnnatccttcnncgcagcaacccnnccaccannactaaaannaaaatcaacnnccaaatnnagctttnngtctccacttttcactcnntttttctatntnnttctccattntnngttcgtttggtgtgtnnatgagaaagaattattatngnnaatgatnngaatgatgnanntgacccttnnntccttttntnnatcatttntnntctcttattntnnataaatanntttaatnnccttcgttnnngttagctnntttgcttctcttcnaatgtatcactgnnttttttcaacattgnntgtgcagtgnntaaatctctttttaagaaatttagnaataatnntgaaaannnaaaaaaaannaaaaagggcnnggccgctcttagnaaggatccannagcttacgtnnnacgcgtgcanntgcgacnngtcatagnnctcttctattagtnngtcacctnnaaattcaaattcactgnnngccgtcnngttttacaaa

SEQ ID NO: 8775 - DNA, 589 bp, Gossypium hirsutum
  Clone ID: LIB3585-064-P1-K2-F10
caacatatagattataagcacctccccataagcaaaccacaaaggaaagcttggagagagacccgaaaacaatgtctaaggaagtgagtgaagaaggacagggtcgtaaggactatgtggaccctccaccggcacctctgattgatatggctgaactcaagtcatggtctttttacagagccctcatagctgagttcatagccactctcctcttcctctatgtcactgttgctaccgtaattggtcacaagaaacaacaagatgcatgtgatggtgttggtctcttgggtattgcatgggctttcggtggcatgatctttatccttgtttactgcactgccggtatctcaggtggacacattaaccctgcggtgacttttgggttgattttggcccgtaaagtatctcttatcatggcttaggcttacatggtgtcacagtgcttgggtgctatatgtgtagttgggttggtttaaactttcatgaagcatccatacaactttcattagcttttttgtcaacacgagtggttttttagtttttaagtatcagttacctatttttgtaagtttaatatttttttaatttt

SEQ ID NO: 8776 - DNA, 496 bp, Gossypium hirsutum
  unsure (1)..(496): unsure at all n locations
  Clone ID: uC-gsronu33b112f04b1
ccgaccccaagagaagtgctcgtgactcccacgtccctgtattggctccccttccaatagggttcgcagtgttcatggttcacttggctaccatccccatcaccggtactggtattaaccctgcaaggagtttcggtgctgctgtaatctacaacaacgacaaagcctgggatgaccactggattttctgggttggtccatttgttggagcacttgcagcagctatatatcatcagtacatccttagagcagcagctatcaaagctttgggatccttccgcagcaaccccaccaactaaaaaaaaatcaacccaaatagctttgtctccacttcactctttttctattttctccatttgttcgtttgtgtgtatgagaagattattattatgaatgatgatgatgaccctctccatgtatcananaaaaaaaaaaaaaaaaaanttnataccaaaataattcccacttttaatcttttactcttcttcttcctcct

SEQ ID NO: 8777 - DNA, 528 bp, Gossypium hirsutum
  Clone ID: LIB3828-005-Q1-N6-G1
aagaacgacactaaggaatcaattatctaaattcttaaaagagattacactgcacacaatgtgaaaaacagtgatacatggagagggtcatcatcatcattcataataataatcttctcatacacacaaacgaacaaatggagaaaatagaaaaagagtgaagtggagacaaagctatttgggttgatttttttttagttggtggggttgctgcggaaggatcccaaagctttgatagctgctgctctaaggatgtactgatgatatatagctgctgcaagtgctccaacaaatggaccaacccagaaaatccagtggtcatcccaggctttgtcgttgttgtagattacagcagcaccgaaactccttgcagggttaataccagtaccggtgatggggatggtagccaagtgaaccatgaacactgcgaaccctattggaaggggagccaatacagggacgtgggagtcacgagcacttctcttggggtcggtggctgagaaaacgtgtagacaagtacgaaagttc

SEQ ID NO: 8778 - DNA, 493 bp, Gossypium hirsutum
  Clone ID: LIB3584-017-P1-K1-G1
ggcttacatggtgtcacagtgcttgggtgctatatgtggagttgggttggttaaagctttcatgaagcatccatacaactcccttggcggtggtgcaaacacggtggcttctggctacaacaacggaactgctttgggagctgagattattggaactttcgtacttgtctacactgttttctcagccaccgaccccaagagaagtgctcgtgactcccacgtccctgtatgtaacttctatatatggattgactccatgtttttaagctattacagtgtctgatgggatttaaactgttgttttggttgtaggtattggctccccttccaatagggttcgcagtgttcatggttcacttggctaccatccccatcaccggtactggtattaaccctgcaaggagtttcggtgctgctgtaatctacaacaacgacaaagcctgggatgaccacgtaagtgttcatatactataacatttcaatggcctttttt

SEQ ID NO: 8779 - DNA, 219 bp, Gossypium hirsutum
  Clone ID: uC-gsronu33B062b05b1
gttctttatccttgtttactgcactgccggtatcggaggtgtatcacattaaccctgcggtgacttttgggttgcttttggcccgtaaagtatctctcattagggctgtggctaacatggtgtcacagtgcttgggtgccttttgtgagagtgggttggactaagctttcattatgagatcgttcaacttcccttggcgacagttgcaaacatcggttg

SEQ ID NO: 8780 - DNA, 1059 bp, Gossypium hirsutum
  Clone ID: GOSHI-09MAY01-C3733_2
aaaaaaaaagttatgtatagtcatagagatcgggaaggagggccattggatcggaagcgcattagtgatgtgctggataagcatctagagaagtcgccctcgtcgacttcgaggggattgaatagcaaagacaaagaaaggtcctccctcccttcaacttccactggtaaatcccagcttgatcatcgctctgcatcgctctccaaagccaaatattctgatgaggaatctgaaacagacagtgaagaatctgatgttagtggttctgatggagacgacacgtcttggatctcgtggttttgcaatttacgaggcaatgagtttttctgtgaagttgatgatgcatacattcaagatgatttcaatctttgtggcttgaccagtcaagttccttattacgactatgcgctggatttaatattggacgttgaatcttctcatggtgatatgttcactgaagaacagaatgaattggttgaatcggcagctgagatgttgtatggtcttatacatgttcgttacatattaactagcaagggaatgtctgctatgttggagaagtacaaaagctatgactttggaagatgcccgagagtttgctgctgtggacaaccttgtcttccagttggtcaatcagatattcctcgctcgagtactgtgaaaatctactgcccaaaatgtgaagatatatattaccctcgatccaagtatcaaggcagtatccttaccatttcatctttggctttttctttgttcggtttttctcctatattatgcttgagacatatgaaacacatcctgtaaagattaaacaacttctttctaggtaagctacccgaaactaatcatacttgcatgttggataatgcaccttgtctttgtgtattaagttttctatctactatggcgtataaaactacttaattctttgcacatataatataaatatttcatgcataaataaataggatctcttggatcaacattgataaaaaaaactcttttatcctagaggattaatacgatgtttgggattctttttgctaattttattcatta

SEQ ID NO: 8781 - DNA, 1347 bp, Gossypium hirsutum
  Clone ID: GOSHI-09MAY01-C3733_1
ggcttcaacagaaaagacaaagaaagatcctccgttccttcaacttccactggtaaagcccagcttgaccatcgtgattcacgcactgcacctctctccaaagccaaatgtgatgaggagtctgaaacagatagtgaagaatcagatgttagtggttctgatggagatggcacatcttggatctcatggttttgcaatttgcgcggcaatgagtttttctgtgaagttgatgatgactacatccaagatgattttaatctttgtgggttgagccgtcaagttccgtactatgactatgcgctcgatttgattttggacgttgaatcttcccatggcgatatgttcaccgaagaacagaatgaattggttgaatcagctgctgagatgttgtatggtcttatacatgtccgttacatattaactagcaagggaatgtctgctatgttggagaagtacaaaaactatgattttgggagatgcccgagagtttgctgctgtggacaaccttgtcttccagttggtcagtcagatattcctcgcgccagtaccgtgaaaatctactgcccaaaatgtgaagatatatattaccctcgatccaagtatcaaggcaatatcgacggagcatatttcggtacaacatttccacatctatttctgatgacatatgggcacttaaagcctcaaaagccaactcaaaactacatcccacgagttttcggcttcaagatccacaagccctgacatgattgatacatgagttgcagcaagccagaacttatacactcagatcaatttccggtcagtgagattcgtggtgattttcaattagcctggtgcttcttctatcaaagcagtgggttcccaacaatgcaaggtgaagtggggctccaaaagaaacaaagaaatggtacgattgattgattgattgatatggcaaatgaaatatggactgctagtggagcacaaggaatctctaggatttgtttttttatgaagtttaagtaagcatatatttttgtttggaagtgtgcgttttgccgtagttgataatagattaggtgaatatctctttcttttgttcaatggttttgttgacctagatacataaatattccatttctctaatgtaaacttcaacctcatcttttacatgaatttcctactttaaatccatggatatttcaaaaaaaaaaaaaaaaaaaaaaaaaaaaaaaaaaaaagggcggccataaaaaaaaaaacaaacttaaagacgcaagcatacaaaataatacctcttttatagtgccacctaaaaaaaatccactggccgtattaaaacaacgtaattaataaaaaaacccgggg

SEQ ID NO: 8782 - DNA, 798 bp, Gossypium hirsutum
  Clone ID: GOSHI-09MAY01-C3723_3
atagcttccttgtatctaaaatcgcttctggagaaccacagaaagttgctaaattggctgcctccattacgtattctctgctgcaagagatcctgatccttactcacctctccgtattcaacgactcgacagatggccctgatttatcatacgtgttaagagatgaaaagtccacgtagacaccatcttcacaatcctactaacccccacccccgggccaagatttttcacaaggctccaaaagattcctgttttacttgaaatatgctcgttcgacgaaatctaagtgcacttgctgtgtctgcttctctacttttaggaaagcgttcctcaccgagtttcaaccaaacccttttgagttttccacagatttcaccagtttatctggtatctcactcgatcaaaacagggtctccaaggtctctcgtgggtagtttgagatttgatcatactatggctgctgagtcctccaaggggtcagttcatgacttcactgttaaggatgcaaaaggaaatgacgtcgatttaagcatttacaagggcaaggtcctcttgattgtcaatgttgcatctcaatgtggcttgaccaactccaactacactgagctgagtaaattgtatgagaaatataaagatcaaggtttcgagattctggcatttccatgtaaccagtttgggggtcaggagccagggaacaatgaagaaatcttggagtttgcttgcactcgctttaaagctgaataccccatatttgataaggtggatgtgaatggcgagaacgcaactccgatatacaaa

SEQ ID NO: 8783 - DNA, 850 bp, Gossypium hirsutum
  Clone ID: GOSHI-09MAY01-C3723_2
tttacgcgtccgaaaaaataaataaattaaatcttgatatagttgctctgcttttgcttctcttatactgagttccaagcaaaaccctttttttgtttttcgcctgattccgctgttatggcttctcaatcttctaagggatcagttcatgatttcactgttaaggatgcaagagggaatgatgttgatttaagtatttacaagggcaaggttttgttgattgtcaatgttgcatcacaatgtggcttgaccaattccaactacactgagctaagtaaattgtatgagcaatataaagatcaaggttttgagattcttgcattcccatgtaaccagtttggaggacaggagccagggaacaatgagcaaatcttagagtttgcttgcactcgctttaaagctgaataccccatatttgataaggtcgatgtgaatggtgagaaggctgctcccatatacaaattcctcaagtctagtaaaggtggactttttggggacagcatcaagtggaatttttccaagttcttggtcgataaggagggccatgtcgtcgatcgttatgctcccactacttctcctcttagcattgagaaggatataaagaaactgctggcttgaatttgatgggtggaagagattagctgatcacctcatggagttaataaattagatatgcctacgaataaaaaaaaaactattctatctctgtttatgtttcccccatctcctaatgatgggttagactgtactacaatttagaagttgtaccttttataatattttattcaccatggaaaagcacacatctttgtttgtctttatgcttgaattaattttgctattagcaacg

SEQ ID NO: 8784 - DNA, 744 bp, Gossypium hirsutum
  Clone ID: GOSHI-09MAY01-C3723_1
cccacgcgtccgaaattaataaaatcttgatatagttgctctgcttttgcttctcttatactgagttccaagcaaaacccctttttgtttttcgtctgattcagctaaggtcttctttgggtagtttgagatttgagttattcatcatactatggcttctcaaccttctaagggatcagttcatgatttcactgttaaggatgcaagagggaatgatgttgatttaagtatttacaagggcaaggttttgttgattgtcaatgttgcatcacaatgtggcttgaccaattccaactacactgagctgagtaaattgtatgagcaatataaagatcaaggttttgagattcttgcattcccatgtaaccagtttggaggacaggagccagggaacaatgagcaaatcttagagtttgcttgcactcgctttaaagctgaataccccatatttgataaggtcgatgtgaatggtgagaaggctgctcccatatacaaattcctcaagtctagtaaaggtggactttttggggacagcatcaagtggaatttttccaagttcttggtcgataaggagggccatgtcgtcgatcgttatgctcccactacttctcctcttagcattgagaaggatataaagaaactgctggcttgaatttgatgagtggaagagattagtcacttatgagttataatttattgctcgataaaaaaactatcttttttatgtctcactcaagaggtgaa

SEQ ID NO: 8785 - DNA, 436 bp, Gossypium hirsutum
  Clone ID: LIB3585-057-P1-K1-C10
cccacgcgtccgaaattaataaaatcttgatatagttgctctgcttttgcttctcttatactgagttccaagcaaaacccctttttgtttttcgtctgattcagctaaggtcttctttgggtagtttgagatttgagttattcatcatactatggcttctcaaccttctaagggatcagttcatgatttcactgttaaggatgcaagagggaatgatgttgatttaagtatttacaagggcaaggttttgttgattgtcaatgttgcatcacaatgtggcttgaccaattccaactacactgagctgagtaaattgtatgagcaatataaagatcaaggtttgtttttggcatctttttggatttatatatatatataatattccaagaggttcttgtggttggaaaaagtggaaatgaaattttcaggcatttag

SEQ ID NO: 8786 - DNA, 592 bp, Gossypium hirsutum
  unsure (1)..(592): unsure at all n locations
  Clone ID: LIB3585-034-P1-K1-A8
aattaataaaatcttgatatagttgctctgcttttgcttctcttatactgagttccaagcaaaacccctttttgtttttcgtctgattcagctaaggtcttctttgggtagtttgagatttgagttattcatcatactatggcttctcaaccttctaagggatcagttcatgatttcactgttaaggttggttttgggtttaattcaaatttatacccccataggttaaatttaatttgtctttcatttatctcactgggttttgtttttgtattttggctgttcaggatgcaagagggaatgatgttgatttaaatatttacaagggcaaggttttggtgattgtcaatgttgcatcacaatggttaatttcaattttggagggttttttccccctattatccattattaggcatttgttaattaggagtatctagactcaagntttaatctttgctgcttaaatgttgatgcagtggcttgaccaatttccactacactgaactgagtaaaattgtttgagcaatataaagatcagggtttgtttttggcatctttttgggattaaaatatatatactaatattccaaga

SEQ ID NO: 8787 - DNA, 413 bp, Gossypium hirsutum
  Clone ID: LIB3146-004-P1-K1-B4
attgtacaagagaagtggaaatgagactatctcaagggaaattaaaccctggaattgacgtgagttctgcatttatagactgaatgtcttaacatattgggttatataacatccaatggttgttatttctatttgcagaaggatataaagaaactgctggcttgaatttgatgggtggaagagattagctgatcacctcatggagttaataaattagatatgcctacgaataaaaaaaaaactaatctatctcttgttatgtttcccccatcttctaatgattggaacgactcttctacacatttgaatgcgtgccctttgtacaaagtttttttccatggtgcaacctctaaagttcttcctccaattctaatattccctttttatttttgatctttttaagattttttatt

SEQ ID NO: 8788 - DNA, 1468 bp, Gossypium hirsutum
  Clone ID: GOSHI-09MAY01-C3653_1
cggacgcgtgggccgtcgcgggcggactgactgactctgagtaggggtaacaaagaagaagagaaaaagtgacaaaggccttagcttagcttagcttgggccttcccccaaaaagagaaaaatgttgtccattcgatccctttctactaccaagttggtggtgagaagctgtagttactactattcttcttccactgcatcggctgcggctgttgaagctgagagaactatccgggaaggccctaggaacgactggactcgccaacagatcgactccatctaccattctccccttcttgatctccttttccatggagctcaagttcacagatatgctcataacttcagagaggtgcagcagtgtactctcctctcaatcaagactggtggatgtagtgaggattgttcctattgccctcaatcctctaggtaccatactggcctaaagccccagaagctcatgacgaaggatgccgttatgcaggcagctaaacaggctaaagaggctggtagtacacgcttttgcatgggtgcagcatggagagacacagtccgaaggaaaactaacttcaaccaaattcttgaatatgtaaaagaaattagggatatggggatggaggtgtgttgcactttgggcatgctggagaagcagcaagcacttgaacttaagaaggcaggtcttacagcttacaaccataatctcgatacttcaaaagaatattatcccaacattattacaacaagaacctatgatgagcggttggaaacccttcaacatgtccgtgaagcaggaattaatgtctgttcagggggcattatagggcttggagaagcagtagaggaccgggttggtttattgcacacattggctacactccccactcacccagagagtgttcccattaatgccttggttgcggtgaaaggcacacctcttcaagatcaaaagccagtggaaatatgggagatgattcggatgattgccactgctcgaatagtgatgccgaaatcaatggtcaggttgtcagctggcagagttcggttctctatgccagagcaggcattatgtttccttgctggtgcaaattctatcttcactggtgagaagctattgacaactcctaacaatgattatgatgctgatcaagtcatgttcaaaatccttggactgattccaaaagctcccagttttactgaggaagaagcagaaaattgtgatgaagctgtttcaacttcaggttgatttaaagcagtgccttcttgatgtagttgtagtattgtggtcagtgacctttttcgttgttatgtttgttagttattatctgtaaggaattgcctgcgcaataataaatggcaacgagctcttttgttgcccagggtagtgtcgaaggcttagtctaatgcagtgaaagacttgtgacatatatttatttgataattaaaaaaagaagattagagttaacgtctt

SEQ ID NO: 8789 - DNA, 587 bp, Gossypium hirsutum
  Clone ID: LIB3831-001-Q1-N6-D6
aacttggaacttcattccaaagaagaaatgtccggacactgcctcggacagcagaggtcctcaattacattgaatcaaccaaaaaattactaaaaccataaggaatcaaacagaaaaacaaccaataaagttactaaacacagttttatggactgcaaactgttgacttctatcttcactaaacaaagagttttattgaccgagtgaaagttgttcacttatatttttattacaagatagcacaaaagtcatactggtgcacacatcatcgaatctgtacttagtggtaccattatagcaataaagatgaaaacaaggaaagagaaaaaaaagaacaatgaaacgagttccaatgccagtgttgcacattatctgtcgaggttagaattaccttttgatcttgaagaggtgtgcctttcaccgcaaccaaggcattaatgggaacactctctgggtgagtggggagtgtagccaatgtgtgcaataaaccaacccggtcctctactgcttctccaagccctataatgccccctgaacagacattaattcctgcttcacggacatgttgaagggtttccaaccgctca

SEQ ID NO: 8790 - DNA, 785 bp, Gossypium hirsutum
  Clone ID: GOSHI-09MAY01-C3643_1
gcccttaaaaatattagtagaactgatcccaacccatagcagaaagaatcaaagacagctaagagggtttcttccaacaatttcccttccaatgtcaaaagtttgttgtcaactggtatgcttgatggggttgttgtgaagtatgtttcctggtcgcgggagaaaagtcttaaagggtacatacaagggactgggtatatgtgtggctgtaaagactgcaactttaagaaagctttgaatgcatatgagtttgagcaccatgctaattgcaagaccaaacaccccaacaatcatatttactttgagaatggaaagaccatctatgctgttgttcaagagctcaagaacactccacaggagaggctttttgatgtaattcaaaatgtgacagggtctcaaatcaatcagaagaactttcgcatctggaaagcatcatatcaagctgccacccgcgaacttcagcgtatctatggaaaggacaatgctgttgtgtcatcttgagatgaagactgcctttcgaagcttgtgaggcaagtcagatttgggcagagcagtatgcatcttatactaaattatagacatgttttgggaatttaattaagctgggtaaatggatgtgaacagttatcatgggttttgtgaaattttctaaatgtgacctttatattttgatcaatcatagaatctagctttcctaaatgtttatgattgaaatctagagtttctgcatattgtccatcatgttgggcaaagcattcattttacaatgtctcttgtcgacttca

SEQ ID NO: 8791 - DNA, 616 bp, Gossypium hirsutum
  Clone ID: LIB3583-053-P1-K6-F12
cgacccacgcgttctttcctttttaaattgtttatgggggggggggggggggggggaatatataatgctgagctctatggcaaagttggagtaccttttgttatgggcaccactggtggagacagggatcgactctataagactgttgaagagtcaaaggtttatgctgtgatctcgccacaaatggggaaacagcgagggagagcatggctgagcagtttcctggagccttctctggatattccctccaggtgatggagtcccatcaagcaggcaaattggacacttctggtactgctaaggctattatttcttgctttcagaaattgggggtgtcatttgacatggatcagatacaaatgatccgggatgccaagcagcagattgagatggtgggagtaccagaagagcatctgtctggtcatgcctttcatttgtatcatctaacatcacctgatcaaacagtgtcgtttgagtttcagcataatgtttgcggcagatcgatatacgcggagggaactgttgatgctattcttttccttgctaagaagttaagtcgaaggcagacaagcgtttatataatatgattgacgtattgcgagaaggtaacatgaga

SEQ ID NO: 8792 - DNA, 605 bp, Gossypium hirsutum
  unsure (1)..(605): unsure at all n locations
  Clone ID: LIB3829-030-Q6-K6-B4
gntaaattatataatgctgagctctatggcaaagttggagtaccttttgttatgggcaccactggtggagacagggatcgactctataagactgttgaagagtcaaaggtttatgctgtgatctcgccacaaatggggaaacaggttgttgcatttcttgcagcgatggagatcatggctgagcagtttcctggagccttctctggatattccctccaggtgatggagtcccatcaagcaggcaaattggacacttctggtactgctaaggctattatttcttgctttcagaaattgggggtgtcatttgacatggatcagatacaaatgatccgggatgccaagcagcagattgagatggtgggagtaccagaagagcatctgtctggtcatgcctttcatttgtatcatctaacatcacctgatcaaacagtgtcgtttgagtttcagcataatgtttgcggcagatcgatatacgcggagggaactgttgatgctattcttttccttgctaagaaggttaagtcgaaggcagacaagcgtttatataatatgattgacgtattgcgagaagaaagaagatgaaaggcagcttatcttgagta

SEQ ID NO: 8793 - DNA, 1861 bp, Gossypium hirsutum
  Clone ID: GOSHI-09MAY01-C3613_2
cttctttcaatttatttatttatttatttttaccatttcatcgtcttcttcagtctggtaagaaggatcaggaagaaataaagagcccacagggaagacaaaggctgtgagtgagagagaaagaaaagaggcggcttctatcaatggagtcggaggagttggttttggtggcctaacgggtgctaccaaaacaccggcttccaccacttccttcttcacgatcctctcctttccgtgttcaaatctctgttcctgttgaagataagaagaggaattatacccttcaaatgtcacaagaggctttcaatgctgccctgcatttgatgcctggaggtgtaaattcttcctgctcgtgcttttaaatctcctggtgagacagcctatttccatggattcagttaagggttcgcacatgtgggacatagacggtaatgagtatatcgactatgttggctcttggggaccagctataattggtcatgcggatgacgaggtgcttgaagctttggctgaaacaatgaagaaaggaaccagctttggcagtccttgtcttcttgagagtgttttggcagagatggtaatctcagctgttccaagcattgaaatggttcgatttgtaaactctggtacagaagcatgcatgggtgtgctccgccttgcccgcacctttactggccgagaaaagataatcaaatttgaaggttgttaccatggccatgctgatccatttcttgtcaaggcaggtagcggagttgctaccctagggctccctgactctcctggtgttccgaaagcaaccacttccggaactctaactgccccttacaatgacatagcggctgttgagagtctatttaacagtaacgaaggggaacttgcggcggttattcttgaacctgctgttggcaactctggcttcattacccctaaaccagacttccttgaagccatacgtcgcctaaccaaggaaaacggtgcactcctcatatttgacgaagtgatggccggatttcgcttgtcttatggtggggcacaggagtattttggcataactcctgatttaacaacattagggaaggtaattggtggtgggctgcctgttggtgcatatggagggaggagggagattatggagatggtggcaccagcagggccaatgtatcaggctgggaccttgagtgggaacccattggcaatgacagctgggatacagacccttaagcggttgaaagcaccgggaacatatgaatacttagataggatcactagagaacttgttcaaggcattctaaatgctggaaagaagacagggcatgcaatttgcggagggcatattagagggatgtttgggtttttcttcacagaagggcctgttcacaactttgatgatgcaaagaagagtgatgcagcaaaatttgtcaggttttaccaaggaatgctgcgcgaaggtgtttactttgctccttcacaatttgaagctggatttacaagcttggcacattctcctgaagacatccagaagacagttgcagctgctgagaacgttcttagcaagatttaaggtatctattgcagtgtctttgattacattttcacagtttgaagctggatttacaagcttggcaagtcgtatgagtacttccgagaaatactagtcttgcaatcatgttcttagtcctgcccttttgttcttccttttgtctttgcatgattgagctttttgcacgcgagttaatggttcattagataaaagatctgtagtcatctcttgttgctcggaatctgtatttttactgatcaacccatttgtatgttggtaatgtataagaccattttaggcatttaaagcttgtttacaacc

SEQ ID NO: 8794 - DNA, 735 bp, Gossypium hirsutum
  Clone ID: GOSHI-09MAY01-C3613_1
cccgggtcgcccagcgtccgcccagcgtccgcccagcgtccgcggccgcgtggggaagataattgcccgcgcgccccctgttggtgcatatggaggaaggagggagatcatggagatggtggcaccagcagggccaatgtaccaggctgggaccttgagtgggaacccattggcgatgacagccgggatacagacccttaagcggttgaaagagccaggaacatacgaatacttggataagatcaccggacaacttgttcaaggcattttagatgctggaaaaaagacaggacacgcaatctgtggggggtatatcaatgggatgtttggatttttcttcacagaaggacctgtttacaactttgacgatgcaaagaagagtgatacggcaaaatttgccaggttttataggggaatgctggaggaaggtgtatacttggcaccttcacagttcgaagctggatttacaagcttggcacatactcaggaagacatccaaaagaccattgcagcagctgagaaagttcttagcaagatttaaggtactttgtccaatcctgttctcactttcctattgaatgattagccatttagctagggaatcaatggttcttttgttgtcagcttttcagattaagatttgtggtcattgcctcttactttagagtctgtatttctcatgaaactttgtaccgatgctaatgatagataattacggctttaaagcttgtttac

SEQ ID NO: 8795 - DNA, 675 bp, Gossypium hirsutum
  Clone ID: GOSHI-09MAY01-C103638_2
atgagcaggtttagagggaaggggctggagggtgataagtagggagaaagaccaactggtttataaaatggggcctaattaacctctcgaaatgtcaaatatttcatggtaaagatcattgcaggcgccactaaaaagacctacatggccaaacaaaagatacttgacctgataaattgcaataagattacatgatagtagctgtaattttttttttcttgtaagactcagatagttccctgatggcttcccaatcaatttccactgaagggtacttttccaaaccgaaaatttcgttgtcatcccactttgaatcagagaaatcgaagaaagtgatatcagattctggtgaagaagatcctgccaatgactcatcggataaatccggggatggggatgaggatgatgatgatgacagggagttcatctcaactttaggactagcaaatcttggagactgatcaaactcctcacgcttcacagggtaatcaaactcaaccttgggctttgaatcgtgaacagaacaggcctttcctgaattcttgtttctgtaggctctggcagatggcttggagctttgcatcaactgcagaatggaggggcttgtagtcaccaaattctccagaaatatgagctccctcgcgcttgaggtgggggaagttgagcctggcctac

SEQ ID NO: 8796 - DNA, 557 bp, Gossypium hirsutum
  Clone ID: LIB3825-025-Q6-N6-G8
gaactgataatagatttcttaacttacactgggcctataataatgcaaccaaacataaacttggtggtctccgatggccattcctaggaaaaatggaaccagcaagaccaatcccgtaaggagatacctctctcttacgcattcacataacacatcctaaactcacgacacctaattaaaactatgtagcagctctacaaatgtaaaaaaattcattgcggaggctacttgagatggactaggaaaccctaaatgacaaaaagaggcttggacctatgaaaatacaaagaaaattacatgatagtagctgcaatttaagactcaagacagttccctgatggcttcccaatcaatttccactgaagagtacttttccaaactgaaggcctcatcatcatcccactttgaatcaaagaaatccaagaaagtgatatcagattctggctaagaagatccagccaatgattcatcggataaatccggagttgttgatgatgataccaatggattctccactttagggtcagagaaccttggagactgatcaaactcctcac

SEQ ID NO: 8797 - DNA, 1149 bp, Gossypium hirsutum
  Clone ID: GOSHI-09MAY01-C3153_1
cccacgcgtccgcccacgcgtccgcccacgcgtccgcccacgcgtccgcttctcttcaccctttcattttccgatttccttcaagaatctctaaaggccaagcctccaacagagagaaaatacaaatggagtcttcaggaccttcaaggaggacttgtttcatccaagaagatgatggattggcttccattgtagatatggaggctggatattcaggaagccattaccaaaaggttaaccaaaatgggtttctttcaagacctctttgttactctagaaggagtagtttgaggaatctatcttctttttcttcgtcatcttcttctggttcagtttcttctccgaggcctgctcgcttttatgatgccagatttgaagacgttcatcaaccctatttcttggatgtttgctttctttgcaagaagcctcttgggtgtaaccgtgacatcttcatgtacagaggggacacacctttctgcagtgaagactgcagacaagaacaaatcgagatagatgaagctaaagaaaaggacatgaacctttcttcctcagtgaaagctatgagaaagaagagccaaagggagtctacatctccgaatgaagctcaaggttactctattcgaactagcacagttgcagctgcttaaatcacaccacaaaggaaataaacaaaaacatatctaccatatatatatatgaatagttgaatagttcaaaaaaaaaaaaaagaagagaagggaaaggtggtggagatcatcaatgaagaaaagggccaaggagagaggagaggatgaagaaatctatattttgagtggtttgttatcccctttataaaacatactgctatagttctagctctgtgaatgttatatctatatgaggatatgaaattagcctgcccaggatctactctatgatatggctccctttttctttttggggttttttgggggttaattactgatttttgttttgggttcttaagaaatgttaatgcatcacgaagaatgatgagaactgttttttttcatttctattttcagtatcactaatgtttaatgaaaatgacataaatggaacttactgaaaaaaaaaaaaaataaagaagaggaaagaaaaactaaaaattagtattcttattgggttaat

SEQ ID NO: 8798 - DNA, 589 bp, Gossypium hirsutum
  Clone ID: LIB3583-014-P1-K1-H1
ctttcattttccgatttccttcaagaatccctaaaggccaagccgttatttctccaacagagagaaaatacaaatggagtcttcaggaccttcaaggaggacttgtttcatccaagaagatgatggattggcttccattgtagatatggaggctggatattcaggaagccattaccaaaaggttaaccaaaatgggtttctttcaagacctctttgttactctagaaggagtagtttgaggaatctatcgtctttttcttcgtcatcttcttctggttcagtttcttctccgaggcctgctcgcttttatgatgccagatttgaagacgttcatcaaccctatttcttggatgtttgctttctttgcaagaagcctcttgggtgtaaccgtgacatcttcatgtacaggttcatccttaattttcagtctcttagaaagaaagatcagaattttgggaaggtcgattggatctttctatgcatatttgcttaatgaattttcccctttaaaaattttcttataagtctagtagacagatttggtttttgctgattggtgtttggtttttttgcagaggggacacacctt

SEQ ID NO: 8799 - DNA, 729 bp, Gossypium hirsutum
  Clone ID: GOSHI-09MAY01-C3173_3
cccacgcgtccgccggctgtcgatctggtaattcaggatgcaggcgtcgtcgcatttagtcagagggaagggcggcattgagatttcgaaacggagagtattcccttgctttggtgaagttaggcaacgctgtttaactttgaatcgcaatttttgcatccgaagtgggtccacctgcagcggtttaagatcaggtgacgtttcgatgggagcaggacttgtacgtgccaaaaatggtatcgaaactgccgttcgctcttcggtcaaatctcgatcgatcaaagctcaagcctctggtggagacattgaggatttgacaccgatcaaccctcaggcgaaatcttctggggcagttctgccatttgttggtgttgcgtgtttgggagctatgttatttggttaccatctaggggtggtaaatggtgctcttgagtatctatctaaggatctgggaattgctgaaaatactgtcatgcaagggtggattgtcagcacactccttgctggtgccactgttggttcatttactgggggaacattggcagacaaatttggcaggacaaggacttttcaattagatgctattccacttatcattggagcatttctcactgctacagctcagacagtccagactatgataattggccgctctctggctggtattggtattggcatatcatctgctatagttcctctttacatatctgagatctcgccaactgaaat

SEQ ID NO: 8800 - DNA, 1499 bp, Gossypium hirsutum
  Clone ID: GOSHI-09MAY01-C3173_1
ttccacttatcattggagcatttttcacgtctgtgccatttcatttcctattagcttgtcaactgtcagaagtttgttgaaaactaatgcattaaaatgccttaattgattttagtgctacagcccagacggtccagactatgataattggccgctttctggctggtattggtattggcatatcgtctgctatagttcctctttacatatctgagatctcgccaactgaaatccgtggtgcacttggatctataaatcaactttttatatgtattgggattcttgctgctttagtggctggattacctttagcaggaaacccactgtggtggagaacaatgtttggcgttgctattgtccctgctattttattggctgtaggaatggctttttccccagaaagtcctcggtggctgtttcagcaagggaaaattcctgaagctgaaaaagctataagaacattatatgggaaggaaagagttgctgaagttatgtatgagttaagaactgcaggtcagggctctacagaacaagaagcaggatggtttgatctatttagcagccgttactggaaaggtgtgagtgttggagctgcacttttcttattctcagcagttagctgggatcaatgctgtagtttactattctacagctgtgtttcggagtgctggaattgcatctgatgttgcagcaagtgctctcgttggggcatcaaatgtctttggctcagctattgcatcctctctgatggacagacaagggagaaaaagtcttctgatgacaagtttttctggaatggctgcttcatggttgctactttctttgtcattcacttggaaggtcttggctccctattctggcacactagccgttgtcggaactgttctctacgttttatccttttcacttggtgctgggcctgtgcctgctcttcttctgccagagatatttgcttccagaattagagctaaagcagtggctttatcacttggcacgcattggatctctaactttgtcattggcctgtatttcttgagtgttgtgaacaagtttgggatcagctcggtgtacttgggattcgctggtgtgtgcgctcttgctgtcttgtacatagctggtaacgttgtggaaacaaaggggcgatcattggaagaaatagagcttgctctgaatccgacgacttaatttgtacaatatccaaaggtatgcagaaataatctctgaagctggttaatgctcatctcatgagcattccattattttgcatcttttggttaaggccagagagaggcaactagttctagtgacgtgtacgtatacctatgttgcttgaaatatggaaagaagagatttttggtagtttgaactctgttggtttatgaaatgcaagatgttgcgtaagaaaattagtcccatgtacacgctttaagcgtgaaataattttattaaaaaaaggaaggaagataatgagatgatcaggagaaggggaaatttgaggt

SEQ ID NO: 8801 - DNA, 687 bp, Gossypium hirsutum
  unsure (1)..(687): unsure at all n locations
  Clone ID: AI055741.1
gaaagttgtgagtgttggagctgcacttttcttattccagcagttagctgggatcaatgctgtagtttactattctacagctgtgtttcgtagtgctggaattgcatctgatgttgcagcaagtgctctcgttggggcatcaaatgtctttggctcagctattgcatcctctctgatggacagacaagggagaaaaagtcttctgatgacaagtttttctggaatggctgcttcaatgttgctactttctttgtcattcacttggaaggtcttggctccctattctggcacactagccgttgtcggaactgttctctacgttntatccttttcacttggtgctgggcctgtgcctggtctttttttgtcccagatttatgcgttcacaaatttagcctctaaccaggcggctttatcattgggcaatcttgggatctcacactttggctatggcttgattctctgggtgtggagaccattttggaaacccctgggtgccttgggaatccctggtgtgcccccttttgttgtttgaacatcctggaaactttgtggacacagggggcatacttggaagattagacttcgtttaatccgcactatttggacattccagggttcaaaatatcttgagtggtaagccatcaaggccttctttttgcttttggtaagccaaagggccttttt

SEQ ID NO: 8802 - DNA, 552 bp, Gossypium hirsutum
  Clone ID: LIB3829-020-Q6-N6-E5
aaaacaaaaccataagcttgcatattcttattactgagagaccaaacaaagaaaaatcctgttcctaaatctcagacagcttctaccaagtgctagaagcctagaacaccaatgcaggttactatcagagcttacccaaagatttgtggaaaaaagtcttaccaagataacagaaacaatccatgtgactgcgcttcatgggatgaacattaacaagtcacggagattattctctgaatcaagttgtcggattaagagcaagctcaatttcttccaatgatcgccccttagtttctacaacattaccagccataaacaagacagcaagaagacagacagcggcgaataccaaataaactacactgattccaaacttgtccacaacactcaggaaatacaggccgatgacaaagtttgatatccaatgcatgcaaagcgataaagccactgcttttgctctaattctggaagcaaatatttccggaagaagaagagcaggcacaggaccagcaccaagtgaaaacgataagacataaagaacagtcccaacaa

SEQ ID NO: 8803 - DNA, 476 bp, Gossypium hirsutum
  Clone ID: AI726696.1
actttgtttgtcattcacttggaaggtcctggctccctattgtggcacaatagccgttgtcggaaccgttctgtgagctgatgctttttatacaattaatgaagcccatgaaagtttcttcttattttgatacctgctattgttatctcctattgtctaataagatctaaacctggcttcgatatcttctacacagctacgttttatccttttcacttggtgctgggcctgtgcctgctcttcttctgccggagatatttgcttccagaattagagctaaagcagtggctttatcacttggcacgcattgggtaagtcaccatcgagaacctgcccaaagctgttgatattcatgcatatccgtaaaagcaagtttgtaaatgtagatactgtgacaggaccaactgtttttgttcttgcttatctgtgttacctggactttttattaccattaagtatccatacagtatattcgt

SEQ ID NO: 8804 - DNA, 1074 bp, Gossypium hirsutum
  Clone ID: GOSHI-09MAY01-C3113_1
agtctcttagctttcaccgacaaaaaaaatggcagcgaagcaaacgacgatcctagttgccgccatcctcgtaacggctttttacggcggcgcggtgacatcggcgcaggcaccggcagctgatccagcgatggccatgtcgccgtccgccatggcaccgacgccggactgtatgacgaacttgctcaacttatcggattgtttgacgtacgtggaggccggaagcaacttgacgaagccggacaagccttgctgtccggaattggctgggctagtggaaagtagccctcaatgcttgtgttatttgctggataagaacgcgacggcgaactatgggttcaacattgacatggatagagctcttaagcttcctgatgtttgccatgttaaaactcctcctgttagtctttgttcagctattgtcggggctccaatcggagttccaactcaaagcactgaaggatctatgtcaccagcatccgagccaacaggttccgtagcatacggaccgtctccatccgccatggcaccaacaccggactgcatgacaaacttgtttaacttgtcggattgtttggggtacgtgacggctggaagcaacctaacgaagccggacaaaccttgttgcccggagttggccgggctcgtggaaagcagccctcagtgtttatgtttattgttggataaaaacgcgacctcgagttatggggtcgacattgacatcgatagagctcttaagctacctaatgtttgccatgttaaaacccctcccgttagtctctgctctactatcaatggtggcgctccaattggggttccaacttcaggcactgaagtatctttatcaccaggattagctccaggcccttcaaaaggaagcaacactggtgcttcaaacatggaaatatttggtctggcttccttcattgccttaccaattgcctttcttcccatgctttttgggatttaaagctcttattttcccattattaaaacttattttcctccattaatattcatttaccatatttatatttatatttatatatggtttgcaagttttttctttttttt

SEQ ID NO: 8805 - DNA, 834 bp, Gossypium hirsutum
  Clone ID: GOSHI-09MAY01-C103098_1
gatttttataatagaatctaccccattcaagctggtggaggaagtaaaagatttgaaggagttagcagctaaattacgcaatgtggatgagtttgcggttgatttagagcataaccaatatcgatcttttcaaggattgacttgcttgatgcaaatttccaccagaaccgaggattttattgtagatactttgaagcttcgaattcatattggcccatatcttagagaagtattcaaggatcccatgaagaaaaaggttatgcatggagcagacagggatatcgtgtggcttcaacgggactttggcatatacgtgtgcaatctccttgacactggacaggcctcaagggtcttgaaattggaaagaaatagcttggagcatcttctgcaacacttctgtggagttactgccaacaaagagtaccagaatgcagattggagagtgcgtcctcttcctgatgaaatgctcagatacgctagagaagacacacactacttactgtacatttatgatttaatgagaatcaaattgttatcaatgccccaggaaggtgaacatttggatgctcctttggtagaggtctacaagcgaagttctgatgtatgtacacaactgtatgggaaagagctcctgacagagaattcatatctccatatacatgggttgcaggtggctggtttcaatgctgagcagctagcagttgttgctgggctttgtgaatggcgagacattattgctcgtgcagaggatgaaagtactggttatgtattgccaaacaaaacgcttcttgaaatcgccaagcagatgcctgtagctgctcacaagttacgtca

SEQ ID NO: 8806 - DNA, 1283 bp, Gossypium hirsutum
  Clone ID: GOSHI-09MAY01-C3053_1
gttggttctgtgagtactggtcctgggggatttcctatcacccgccccggtactggaggtttgatgcctggaatgccaggaacccggagaatgcctggtatgcctggaatggacaatgataattgggaagttcctaggggtcggtcaatgccgaggggtgatgcacaaagcctgcctgtagggcgtggccagtcaccatcaatccaaaaatcttcaatgaatccaaggctgttgcctcaaggtagtggtgaccttatgagcggcaagacaagtgccctattgcagggaagttcagcccctcctgcttggcaatccaacactagtttgggtgccgagcctatggcacaaccttctgtttctgctaaacctgtgcctgtggctgctgtgtctccaatcgcggagaaatctccggccccagctgcaatactaaatccagatgatcttcagagaaaaatacgagcgctgttggatgagtatttctacgttaggctgcttgatgaagctttgctgtgcgtggaggaactaaaatctccatcacaccaccctgaggttgtgaaagaagcgatttcaattgccttggacaaaagcccaccgtgtgtcgagccagtctggaaacttcttgaatacttgttttccaagaaagtttttgctgcaagagacatcgcgaccggatgcctcctctacggtgccttgctggatgacattgccattgacttaccgaaagcaccaaataattttggagaaataatcgggagactcattttggctgggggactagattttaaagtggtgaaggaaatccttaagaaaatggaggataacttttatcagaaagctgtattcgatgcagcaacgaagaccattagcttgaatccatctgggcaaggcctgctcgatgcatcagcctctgaggtggaggcctgtcagaatctattctaagttttgcctgcttattattgttgttctgtatcggcaaggacttgtattatttgataaagttgcagctgccaaggacaggtaaaattttctcgagttgtatacttttctttttcaaggtcatcatcagcagtgtgtttattgagaaaaaaaaaggacagcaaagcatagtaccatggatttgccttgcctacaatcatcgtcaatatgtcatttatactaattttgatacagtgttcttgcactttcttaagtgtgaaagcatttaattaataataatagtagaatctaaaatgtttgcttcggagacagcaactctaatgactgatacctaaacatgaaagaat

SEQ ID NO: 8807 - DNA, 1390 bp, Gossypium hirsutum
  Clone ID: GOSHI-09MAY01-C3043_1
cggtgacgttttctgttgggattcggactatcggtggaggagatgggtccgggcccgggttcggattctcggaggcaccggattatcgtaacggagtggaatgtccggtttctgtcaataaagaagtagtttcgtcgtgcgacccggatttagtccacgtggcgatgacgttagactcggaatacttgcgtggctcgatcgccgccgtccactccgtcctccggcacgcttcgtggccggaaaacgtcttcttccacttcattgcggccgagttcgacccggcgagtccaagagtgttgagcagactcgtgcgatccacgttgcctggactcaacttcaaaatctacatattcccggaagacgcggcaatcaacttaatctcgtcttcaatccggcaagccctggaaaacccactcaactacgctcgaaattacctcggagacatactagatctctgcgttgaccgagtcatttatctcgactcggacttggtcgtggtcgacgacattcacaaactctggaacacagccctcacaaactcacgcgtcatcggcgcgcccgaatactgccacgccaacttcaccaagtatttcacggacgggttctggtccgacccagttctttcccgggttttccattcgaggaggccgtgctatttcaacacgggggttatggtgatggatttggttcggtggagagaagggaattacaggaaaagaatcgagaattggatggaaatacagaggaaacgaaggatttacgaattgggttcgttgcctccgtttctgctagtatttgctgggaatgtggaagcgattgatcataaatggaaccaacatggacttggtggggacaatgtaagaggttcatgtcgttcgttgcatacgggtccggtgagtttgttgcattggagtgggaaagggaaaccctgggttcgactcgatgccagaaacccttgtccgcttgatcatctttggaaaccctacgatctttacaagggcagttcaatcaaagatcggtcttcttttccttcttcaattttcttgggattttccagttttttgtcatgattatcattttttctttgttttaaaatattacattgttacagaaatgatgactgattcttttgatagaaaagctcagctgtatacgaactgaatatatattttttgggttattaatttgtgctctgcatatgagtaccaaatatcaattcgtttcattcatcagataagggtggaacaatttttggttgggttgattcctttgtatgtaattatggagagaggaataacgttgagttgttcattgattcattttccatttcccttgtgctctacatttttttttggtgggttctcttttagaaaatgaaatgggaattagt

SEQ ID NO: 8808 - DNA, 376 bp, Gossypium hirsutum
  Clone ID: LIB3166-024-P1-K1-C6
gggcccacgccgtcggccaacccttccgccaacccttccttctatcttccggtccaaaagtgttaagcagacgcttccaatccacgtttccttcactcaacttcaaaatctacatattccgggaagacgcggtaatcaacttaatctcgtcttcaatccggcaagccctggaaaacccactcaactacgctcgaaattacctcggagacatcctagatctctgcgttgaccgagtcatttatctcgactcggacttggtcgtggtcgacgacattcacaaactctggaacacagccctcacaaactcacgcgtcatcggcgcacccgaatattgccacgccaacttcaccaagtatttcacggacgggttctggtc

SEQ ID NO: 8809 - DNA, 328 bp, Gossypium hirsutum
  unsure (1)..(328): unsure at all n locations
  Clone ID: LIB3148-057-Q1-K1-B12
cttcttttccttcttcaattttcttgggattttccagttttttgtcatgattatcattttgtctttgttttaaaatattacattgttacagaaatgatgactgattcttttgatagaaaagctcagctgtatacgaactgaatatatattttttgggttattaaanaaaaaaaaaaaagaaaaatttttattgtgtggccgttttaagggaaaaaaacttaaaaacgcgcctatgggacgcaaaaaaaaatttttttgtgacaacctaaataaaaaaaaaagggggggcgttttaaaggtcccaaacttaaaaacccgggtttggaac

SEQ ID NO: 8810 - DNA, 1166 bp, Gossypium hirsutum
  Clone ID: GOSHI-09MAY01-C3073_1
atcaaactcaccgctctcttctatctatcagatttggtcgcatgtgatgtcccaaaagcattgcctcagctccattagatcttccctttccctctcttagatcatttgcttgctcccaatccatctcctccaaaaatgggctccacccaatccgttcaagcagtcgaagaagaacacgaagaaagcccagacgatgacgaagacgacgacgaagacgaagaagaagacaataaccaaggaggacccaacatgaggcaactcgaaaacaaccacttggtgaagaaagtactggaacaggagccggaaatgttaccctgttacgcttcagcgacccctctctctccacaactatcttccctgggtactcctaggatgggtccttctatcaaagtgtgggacccatataatgttttagctccacctcctccgctgcctccgcctcctgttttctcccgttctttctctttccaccatgatcgattgctgcttgaggtttatttcatttgccatggcgagtctgatttgaatttgaggcctgatattgtcggtggaagatgcgacggtgccgccttaacctctaatggcaagcgccaagccagggctttggctgtcttcctaaattctcaaggggtcacctttaatgccgtttattgctctcccttggatcgggctagatccatggctctctccgtttgtcaggagatgaattttgcagtgtcagagatacaatcctctgatgcacttatggatctgaacatgggccattgggaggggtgccctcgatcagaaatatatacgcctgaagttttgactctgatggaaagataccagcctgatttttccgcaccgtctggagaatctcttaggcaactggaatttcgaatggttcaattcttgaatgggactgtccttgggcttcctgaaaaatttagatctgaattttctttacaccaaaatgagagtcaaggatttacacaccataacaaccctgctttagccaactcagttcatgacagagatgtagcttctcttcaactaccccattgggacaggcagcggcatgtgctatcaaggaagaagtctggtaagagcaggctccaatttgtgtcgaatattggtgaacatgatgctgacgatgaaatgtctcctcgggaagccagtcatca

SEQ ID NO: 8811 - DNA, 1621 bp, Gossypium hirsutum
  Clone ID: GOSHI-09MAY01-C3063_1
cccacgcgtccgcccacgcgttcggtgtggtcactgaagtcaaacaaacatggtgaaagcagtggtcggagaagaaagccaactccagctagcggaggatcgtctctcccgatcttcagaaccggctcacgttggtctggtgatagggaaactctactccgttctggaccgcggcttcgtgttcgagttagtacccactcaaaacgacgccggacaaccagctagttcggctctggagccagcaaaagacaacaagaaaaagggatcgaaatccaaatctcagacgtctgattcttcctctaatttggtcattgacaaggattgggtcgctgaacatgctcgccaagtgtcaagaatgatggtgggtggaatcaaagtagtgggtatttatgtgtgggcaagtgagtccgctttcaagaattcgaccatggtgctttgccagactgtgaagggagttgctgaagcagcttccactttggaggatgaccttgatgaaagattgcttattcacatatgttatagcccaaggagatggacatgtcggaattgtacactgtcatcaaatattacgtcaagcagcttacggccttgtgacttcaaaatggggagggtcttaacttctcttcaaacttttaagtgcttgtacaattttgatcttaggctgccaatttatcaagagaaaacatcaaaatctgagacgcttgttgatgttctctataatggaatttctaattacgttaaagagctgcgaggtgcaaaagctgtgattgatgggaacctggttgttaatgatgaagcatgcaccacagagggtttgcatgaagttgagttgcttctaccatttatgaaggatatgtacattggagcatgcagccagaaagatgttgtaggtgttgtcaattttactggctctctatgttccttttcattcttgaattccaaggaaccaatttcacaagcttttgctgatataaaggatgatatcatcaggagtttgcgaagcaggcttgatattatttgcgatgaagcagatgaagacccagggccaatcgacaatggaattaaggaagcaggaaatgacttagcttctgagaagccggtttcccaactcgttttacactccttgaggaaaaattgcaatctttcgctacctcggagagtctttgttccatggttggcgggtacatatatctgtgactatctccaaccatcagagacacttgaggttttaaaagatcattgtgttgagttgatgtccatggaagctccaaatgatgcatcaaaaatattggaacctgaagaagaagccattagagtgtccactagatctttttgggatgtagttctcccttactgttcgacatcaagctctacccaagaaaagaacatggaaattaccggcaaagaaaatagccagaaaactagcaagtcacccagtctctacttcattgcagccgttatcatcctcctcctctcagtattagtaggtttcgtgtttgtaagaaaatcatagtgcagtgggtgaacatttcggtagtaatatggagcctttttagaaccaatatcatatcaagtagtgttatgattgattacctcaaattataatagaaagcaatttttt

SEQ ID NO: 8812 - DNA, 786 bp, Gossypium hirsutum
  Clone ID: GOSHI-09MAY01-C3013_1
ggcaactattgagactgaaattgagactttggtcaattctgccatggatgatgaatcaagtactgaaatcaaggatcatatgccaagtccaatgccattatcaagtgtgactaataatttgggtgttaatgaaacattatgggaagagttagtacatgaagacttaatagctggtgagccaaaagaggaaattgtggttggtgatcaagctgaagttgatgttgaagttgaggatttagcagcaaatcctattgattggggtgatgatttgcaagaacttgtggatcagatgggttatctcaggtcaaatccatgaccaaaaaaaactaaacacattaaatggaatgtaatggatgatgttgttgttctagcccttttgagttggtctccttgacaccattccttgttttctaaaaccgccggggttggtgaccgttgctttggggtcaacagatatgttcccgttattcaccgtatcctttatttaatcatcaaaatttgtcttcaatttcctttccatagactcctttaaagcattacattatattcattgtttttttcttgtaatttttcgcaggcgaagtaagtgaacagaggtttatgaaggaaccctttgaagccatgcatcttccacaggcttcaaattccacatttttggtgtttctgctctaacgctcgtttggtttccatgttaatttcttatttgtgtttacttcatgtatatatggtccatgtatgtatacattgtgattggctggtattagtaatggattaaggattgattat

SEQ ID NO: 8813 - DNA, 707 bp, Gossypium hirsutum
  Clone ID: GOSHI-09MAY01-C3353_1
cggccgcgtgggcggacgcgtgggcggtgatcaaatccatggtggagaactaagtttgggtgcaatggaacaaatgccgttgatgaaatcggtggtgtacgaagctttccgtattgaaccaccggtgccggcgcaatatgcaaaagcaaaggaggatttgttgattgaaagtcacgacgccgttttcgaagtgaaaaaaggggagatgttattcgggtaccaaccgtttgcgaccaaagatccgataatatttgaaagagctgaagagtttgtaccggagaggtttatgggtgttgaaggggagaaattgttgaaacatgtgttttggtcgaacggaccggaaacggagcatccgacggtggagaataaacagtgtgccggtaaggaatttgtggtgttgatttctaggttgtttgtggtggaacttttccgacgttacgatacgtttgagattgaagttgggacatcgacgttgggggccgccattaccataaagtcgttaaataaaacaagcttttaagtacactgtaattttcgtcaatgcaagggctttgtcaaatgtgtcatgttttttcttgaataaataatgtattataatttcgaaaaagatcacagtaaaaggattaattattcaccatattttatataactaagatatgtagccaattcttgtattatttgaataaaattggttaaattttactatt

SEQ ID NO: 8814 - DNA, 393 bp, Gossypium hirsutum
  Clone ID: LIB3149-039-Q1-K1-B1
ggagaaattgttgaaacatgtgttttggtcgaacggaccggaaacggagcatccgacggtggagaataaacagtgtgccggtaaggaatttttggtgttgatttctaggttgtttgtggtggaacttttccgacgttatgatacgtttgagattgaagttgggacatcgacgtttggggctgccattaccataaagtcgttaaataaagcaagcttttaagtatactggaatattcgtcaatgcaggggctttgtcaaatgtgtcatgttttttcttcaataaataatgtattatcgaatgttgaatttccgtttatgcaccatattttatataactaaaatatgtagccaattcttgtattatttgaataaaattggttaaattttactatt

SEQ ID NO: 8815 - DNA, 328 bp, Gossypium hirsutum
  Clone ID: LIB3196-009-P1-M1-H10
gtttgtaccggagaggtttatgggtgttgaaggggagaaattgttgaaacatgtgttttggtcgaacggaccggaaacggagcatccgacggtcgagaataaacagtgtgccggtaaggaatccgtggcgttgatttctaggatgctagtggtggcacttttgcgacgtttcgatacgtttgggattgaagttgcgacatcatcgttgtgagccgccaattccataaaatgcgctgatagaacaagcttataagtacactctatatatgcccaatgcagggcctactgaatatagtggatgtatttccattgaatgaattatgtttta

SEQ ID NO: 8816 - DNA, 653 bp, Gossypium hirsutum
  Clone ID: GOSHI-09MAY01-C3313_1
gaaaaagcagtccaaggcgttgaaggttgcttgcaatctgaacgatgctgcttgcaaattgaaactaaaggactacaagcaggctgagaagttgtgcaccaaggttttagaattagaaagtgcaaacgtaaaagcactgtatagaagggctcaagcatacatcaatctggcagatttggatttggcggagcttgatatcaagaaagctcttgagcttgaccccgataatagggaggtgaagctcgaatacaaagctttgaaagagaagatcaaggaatataacaagaaggaagccaaattctatggcaacatgtttgccaagatgaataaaatggattctggggattccagtaaatcagctgcaaaggaacccgaaccaatgagcatagatagcaaggcataggtggagatgaagcaaagcttggagaccttaatcaattaaagtgaagttgatgatccctagccttttatggtcttttaactacgtttgttctatttgcaggacaacttatctttgacatagagaatttgagttgtaatggattcgtttctatctgaggtttgttgacattttaaaaaaaaaagatttctgtttattggagatttattttcaattaaggggtactgccccaactgattgtgaaaaaacatgg

SEQ ID NO: 8817 - DNA, 1347 bp, Gossypium hirsutum
  Clone ID: GOSHI-09MAY01-C3303_1
cccacgcgtccgcccacgcgtccgcccacgcgtccgggattatcttctgaattttcaattaacaagaagaggaagagagcatctcacgttggtatgaagatgaaaaagggtaagaaagatattgacagctccactattgatcctagcgctggtgcactagctaaaccagcttggtttagggtgatactggatgaagcccaaacaataaaaaatcatcgaacacaagttgctagtgcctgctgctctcttcgagctaagcgtaggtggtgcttatctggaacacctatacaaaatgctatcgatgatttatacagctatttcaggttcctgaaatatgaaccatattcagtatatacagcattttgccatgggataaaaggttctatagctaaagactatgtaaaaggttacaagaagctgcaagctattctgaaggtagtaatgctgcgacgcacaaaagcaaccttgattgatggggagccgataattaagttgccgccaaagtcagttctcatgtctaaagtggactttacagctgaggagcgggatttctatacccagctagaagctgattcacgttctcaatttaaggcatatgcagctgctggcacggtgaaccaaaattatgcaaatattcttttgatgcttttgcgccttcgtcccgcgcgtccccacccactccttgtccaaggatttgactccgactccattcgaaagtcttgactctgttggacaagtttctgtggaaatggcaaagtcacttcctagagaaatgctgattaatctagtgaactgcttggaagcttctgccatatgtcttgtatgcaaagatccacctgatgaccccgttgttaccatgtgttgtcatgttttctgctaccagtgcgtgtcggaacatctgactggtgatgataatacatgccctgcacgtggatgtaaagaacaacttggcgctgatatagttttctctagaagtactcttaggatctgtattacggatggttataatggtagtcttgtgcatcctcagtttgaaaattcagtgattttacaggatgagtacagttcatcaaaaatcaagactgtcattgaaattctgaagtcaaaatgtttattaaagaattcaagtctggaatcgcagagtgccattggatgcagtgaaacttctttgtcctctgagcagacatataaagaaactgaccattcaggcattagagttgtaaagcgcacaacagtttattccaactcactagctgaccgaccgacgaaagcaattgttttctcacagtggactagaatgttagacttagtggagcactcactacgtaatcatagtataaactatag

SEQ ID NO: 8818 - DNA, 740 bp, Gossypium hirsutum
  Clone ID: GOSHI-09MAY01-C3333_3
gtcggccacgccgtcggccaagccgtcggccaagctttcggtggacatttcaagcaggtggaaaagaaggggcgattagctatggaaatggcggcggtgaaaggagttgtgctaaagcacctgagagtgaatgcaacatccttgtccctgcttcgtaaccctaaacccatccctaacggccactgtgctctcaccttcaacgccatacggcgccgatattccgacgacgtcatgggctcattccttgacaaatctgaggtcaccgatcgcgttgtctccgtagtaaaaaacttccagaaaattgatccatccaaggttactccaaatgcccattttcaaaaagatctcgggttagatagtttggacactgtggaggttgttatggctcttgaagaagattttgggtttgagatacctgataatgaggcagacaagatcagcacgatcagtcatgctgtcgagttcattgcttctcacccccaggcaaagtagacaggaaattatgactcaaatctttttctttattttacttcgttcatgtgagacatgaaactgcattggataattccctaatttcctcgcctggacaaatgcctgtagtatcgaggaggaacatatttactagttatatcatttgcaatcgcctgaattttgaggtactcttcgaaccaaaaaaaaaaaaaaaaaaaaaaaaaaaaaaaaaaaaaaaaaaaaaaaaaaaaaaaaaaaaaaaaaaaaag

SEQ ID NO: 8819 - DNA, 822 bp, Gossypium hirsutum
  Clone ID: GOSHI-09MAY01-C3333_2
cgagtgaatttcatatcttctactatcactctatttcatatagttggtagccctccgagagtgagccggcagcagaaaataaaaggtttcttttccagcagacacaagaggatagaagagcgctattatctattgaaatggctgcggtgagagaagctttgctaaagcgcctgagggtgaacgcaacatctctgtcgctgctccgtaaccctaaacctagccttaacggtctctttgctctcaccttcaacgccgtccatcgtcgtttttccgacgacgtcatgggctcatttctcgacaaatctgaggtcaccgatcgcgtcgtctccgtcgtcaaaaacttccagaaagtagatccttccaaggttaccccaaatgcccattttcaaaatgatctcgggttagatagtttggacactgtggaggtagtcatggcccttgaagaagaatttgggtttgagatacctgataatgaggcagacaagatcagcactatcaatcatgctgttgagttcattgcttctcaccctcaggcaaagtagagtgaaaagtataaactctttttctttgctttcactttgctcatgtgagacatggaaactacattgcataattccctaacctccacgcctggtcaaatatgcctgtagtgtcctctgggtgtgttattgaggaggattaggattgttttggatatttactgcttcaatggtattgttccaattcataaaatgcaacacattttggtggggaatgctttttcttttattttccttgataatatttcattttaaagtaataaatttatataattgggttact

SEQ ID NO: 8820 - DNA, 669 bp, Gossypium hirsutum
  Clone ID: GOSHI-09MAY01-C3333_1
gcgttcgagcgcgacagaaaagattaggtttcttgacattttcagcaggttgaagagaaggtgcgattagctattgaaatggcggcggtgagaggagttgtgctaaagcacctgagagtgaatgcaacatccctgtccctgcttcgtaaccctaaacccatccctaacggccactgtgctctcaccttcaacgccatacggcgccgattttccgacgacgtcatgggctcattcctcgacaaatctgaggtcaccgatcgcgttgtctccgtagtaaaaaacttccagaaaattgatccatccaaggttaccccaaatgcccattttcaaaaagatctcgggttagatagtttggacactgtggaggttgttatggctcttgaagaagaatttgggtttgagatacctgataatgaggcagacaagatcagcacgatcagtcatgctgtcgagttcattgcttctcacccccaggcaaagtagacaggaaagtatgactcaaatctttttctttatttcactttgttcatgtgagacatgaaagtgcattggataattccccaaatgcctgtagtatcctctggatcaagggtcttgggttagttttgatgtttactgcctcaacgctgctgttctaattcataaaatgtaatattgctattttgttta

SEQ ID NO: 8821 - DNA, 622 bp, Gossypium hirsutum
  Clone ID: GOSHI-09MAY01-C3253_1
ctagattattggggccaacgggataaagattatcaaatatttgcactttctaacgaggagtggagaaatgttgctattctttgcaaatttttgaaagtcttttatgatgtgacttgtgttttttctggttctaattatccaacggctaatctttattttagaggggtttggaaggttcacaatgtcttgcttgatacagttaaaggtccttattcatttttaactccaatggttaagcaaatgcaagagaaatttaataagtattcggctcagtattcgttgatattgtcatgtgctgcaattttagatcctcgttacaagttcaattatgtgcagtattgctttactacaatctatggtgtccatgcttcagattttgttgagaccattcttagcaatcttagactcttgtttgacgagtatgttgagaaatccaaatccacgccttcctctttcgctgggagttctaatgtttcggataaaaatcctgttgattctggtttggatgaacacaatgttagtagtgctgattttgagggatattttgatgagagtgacgattataaacggtatttaaatgaatctagcactagaagtgagaagtcacagttggacatttatt

SEQ ID NO: 8822 - DNA, 542 bp, Gossypium hirsutum
  Clone ID: GOSHI-09MAY01-C3263_1
attcttgagacactgactcaactacactgccaccatgcatttcacacacagcctagtctctaccaaacctctgcctgggaggatcccagatgtccactgccgccgcatccctccaccaacctccaccgtcagattctcccctatctctgccgtggcggcagctcctccaaaacctcaaaaaacccactccatgccacctgaaaagcaagagattttcaagtcactagaaaactgggctacccaaaatgtgttaccgctgctcaaacctgtgaaagagtgttggcaaccccagacattcttacctgaccctgcattgccgttgggagagttcaacgagcaagtgaaggccctgagacaacgcactgcggatctgccggacgagtatttcgtggtgttggtgggggatatgattacggaggaagccttgccaacgtaccagaccatgatcaatacacttgatggggtgagggatgacactggggctagctccagcccctgggcaatctggactcgggcttggactgctgaggaaaacaggcatg

SEQ ID NO: 8823 - DNA, 416 bp, Gossypium hirsutum
  Clone ID: GOSHI-09MAY01-C3213_9
cggaaccggccattccccgtgtcctcgccacgcaaagaaaagaaaagggttttcctccattttctatttatctttttcatttcgaatttagggaaaaaatggccactttcatcgaatttccaatctaatttcccattaatattttttattttaaattctcgtttctaattttttttttcagtcatttcaaccatggcttccaattcgaagaagcccgctactgctgatgagaaatcggctttgaaaacggagagcaaaagttcaaagcctgaaacatccaccactgagaagaaaacttcaacacctgagccttcaactgggggttcacagccagcacaagcaggggccttccctcccaacgctatgcctggtcctgggtttgccccacccaatccatttgatttctcagccatgag

SEQ ID NO: 8824 - DNA, 499 bp, Gossypium hirsutum
  Clone ID: GOSHI-09MAY01-C3213_8
cccacgcgtcgcccacgcgtccgaatttatctttcccagctttcaaagcaacccttcccttccgttttgttctcctaactgggttttaaggattccaccctccaatcaagctatttccctatggcttccaatttgcagaaggaatccacttcttccgatgagaaatcgactttgacaacggagagcaaaagttctaacccagaaacatccaccgccgagaacaaaacttcttccactgggccgtctcaaccagcacaggctggagcttcccctaccactatgcctgggtttgtgccacccaatccttttgatttctcagccatgagtggccttcttaatgatccaagcatcaaggaactagctgagcagatagctaaagatccttcattcacccaaatggcagaacggctcactaagacatttcaaggggcagcaactgaagatagtatgccgcaaattgatccacagcaattcctttcaactatacccccaggttttt

SEQ ID NO: 8825 - DNA, 549 bp, Gossypium hirsutum
  Clone ID: GOSHI-09MAY01-C3213_5
gtgccttacttcatctcagaaaacaaagaaaagaaaaggtcatttcaaccatggcttccaattcgaagaagcccgctactgctgatgagaaatcggctttggaaacggagagcaaaagttcaaagtctgaaacatcctccactgagaagaaaacttcaacacctgagccttcaactgggggttcacagccagcacaagcaggggccttccctcccaacgctatgcctggtcctgggtttgtcccacccaatccatttgatttctcagccatgagtggccttcttaatgatccaagcatcaaggaactagctgagcagatagccaaagatccttcatttaatcaaatggcagagcagctcactaaaacgtttcaaggggcagcagctgaagagaccacaccgcagtttgatccacagcagtattattctactatgcaacaggttatgcagaatccccagtttatgaccatggctgagcgccttggtaatgcattaatgcaggatccagctatgtctaccatgcttgacagtttggctaatcctcaacaaa

SEQ ID NO: 8826 - DNA, 498 bp, Gossypium hirsutum
  Clone ID: GOSHI-09MAY01-C3213_3
ttcagagggaagaacagcattgcattttgcatgtggatatggcgaggtgaaatgtgcccaagtccttattgaagctggagcaaaagtggatgctttggacaagaataagaatactgcacttcattatgcagctggttatggaaggaaagactgtgtggcccttttacttgagaacggtgctgctgtcacactccaaaacatggatggcaagactgctatagatgtagccaagctcaacaaccagcatgaggtgcttaagttactggagaaggatgctttcctgtgagttggagtgtcggcagcagccatgtgtattgtgtgggtcctagcatgtgataggccatttcactgtgctattagacaaaaacaaatttgctttcatttcgtatgcgggttatgatcacacagtcacggctcgactagttgtccatgctgtctggttgctacatgtagcattttttttccctctctaaatattagttttacaattgattttct

SEQ ID NO: 8827 - DNA, 734 bp, Gossypium hirsutum
  Clone ID: GOSHI-09MAY01-C3213_2
tttttcgcccagcgtccgcgccgcggggggggggggggggaaaaaaaatatttccttcacttttagctacacaaactccaaaacctcaaaaatcaagagctatttgacccgatatgtcttccaactcgcagaaggaatccactgctactggtgagaaatcgaatttgacaacggagggcgagggcgcgggacctgaaacctccacgggagagtcaaaaccagtacaggggggagcttcacctgataccatgcctggaatggggttcaccccacctaatcccttcgatttctcagccatgagtggccttcttaatgatccaagcatcaaggaactagctgagcagatagcaaaagacccttcgtttaaccaaatggctgagcagctcagtaaaacttttcaaggggcagcggttgaagagagtattccacagtttgatccgcagcagtaccattcaactatgcaacaggttatgcaaaatccccagtttatgagcatggctgagcaccttggtaatgcattaatgcaggatccagctatgtctagcatgcttgacagtttgactaatcctcaacacaaagatcagattgaggaaaggatgtcacgcattaaagaagatccatcattgaaacatatcctaaaagaaatagagaccagcggtcctgcagcaatgatgaggtattggaatgataaaaaattctgcaaaagttagtgaacaatgggtgtggctggttct

SEQ ID NO: 8828 - DNA, 1510 bp, Gossypium hirsutum
  Clone ID: GOSHI-09MAY01-C3213_1
gagagttttctgattctctattcctcattttacgttacatttttccccagagacacaaaccaatacactggcagctctcttcatttttttcctttccagtaccaatttcttctttcaattaagctattattcctccatggcttccaatttgcaacacgattccacttcttccaatgagaaatcggctttgacaacggacaccaaaggtctgaaatcagaaacatccaccattgacagcaaaacttcgaaaccagaagcttcccaaccagctcaggctggagcctccccttccaatatgggacctgggtttgtcccccccaatccgtttgatttctcagccatgagtggccttcttgaggatccaagcattaagacactagctgagcagatagccaaagatccttcatttaaccaaatggcagagcagctcactaagacgtttcaaggggcagcagctgaagagagtatgccgcagtttgatccacagcagtactattcgactatgcaacaggttatgcagaatccccagtttatgaccatggctgagcgccttggtaatgcattaatgcaggatccagctatgtctagcatgcttgacagtttggctaatcctcaacaaaaagaccagattgaggaaaggatggcacgtatcaaagaagatccatcattgaagcatattctagatgaaatagagactggtggtcccgcagcaatgatgaggtactggaatgataaagatgttctgcagaagttgggtgaagcaatgggtcttgcagtttcaggggatgcagccacttctgccggcaactctgcggcagatgaaggggatgaagcaggaaatgaggatgagtcaattgtacaccattgtgctagtgttggtgatgttgagggtctgaaagctgcactagcctctggtgctgacaaggatgaagaagattcagagggaaggacagcattacattttgcatgtgggtatggcgaggtgaaatgcactcaaatccttcttgaagctggggcaaaagtggatgctctggacaagaataagaacactgccctccattatgcagctggctatggaaggaaagactgtgtggcccttctactcgagaatggtgctgctgtcactctccaaaacatggacggcaagactcccatcgaagttgccaagctcaacaaccagcacgaggtactaaaattactggagaaggatgcgttcctttgaagcgtgaagtggtggggatgcgaatggtatgtgtatgtttgggtcttagcatgtttgttataggcatctgattttattacccagctattggacaaatttggttgtaatcatggctgaacggcatgatatgctgtctttgctttggcctggttgcctacgttttgcaaattttatttagtggggttttttaagaaaaagaatcatttcctgaaatagtttctgcatgggaaataatgggagtatttggaccagagaaactttatttaagaattcttttgagtcctgagc

SEQ ID NO: 8829 - DNA, 606 bp, Gossypium hirsutum
  Clone ID: uC-gsronu33B011f02b1
ttggacgcctgccggaccggcccggaactgtgactggctcgagctccacccacgcggcctatctttctgtcttgcagttacaggagatgcaagaacacttctgctggtaattctgcggcagatgaagaggatgaagcaggaaatgaggatgagtcaattgtacatcattgtgctagtgttggtgatgttgagggtctgaaaactgcactatcctctggtgctgacaaggatgaagaagattcagagggaaggacagcattacattttgcatgtgggtatggcgaggtgaaatgcactcaaatccttcttgaagctggggcaaaagtggatgctctggacaagaataagaacactgccctccattatgcagctggctatggaaggaaagactgtgtggcccttctactcgagaatggtgctgctgtcactctccaaaacatggacggcaagactcccatcgaagttgccaagctcaacaaccagcacgaggtactaaaattactggagaacgatgcgttccttgaagcgtgaagtggtggggatgcgaatgcgatgtgtatgtttgggtcttagcatgtatgctataggcatctgattgtataccca

SEQ ID NO: 8830 - DNA, 533 bp, Gossypium hirsutum
  Clone ID: LIB3543-031-Q1-K6-E9
gcgttcgtttctaatctctaacctttctttttggtttttaaattgttgaattcagctatttgacccgatatgtcttccaactcgcagaaggaatccactgctactggtgagaaatcgaatttgacaacggagggcgaaagctcaaaacctgaaacctccacgggagagtcaaaaccagtacagggtggagcttcacctgataccatgcctggaatggggttcaccccacctaatcccttcgatttctcagccatgagtggccttcttaatgatccaagcatcaaggaactagctgagcagatagcaaaagacccttcgtttaaccaaatggctgagcagctcagtaaaacttttcaaggggcagcagttgaagagagtattccacagtttgatccgcagcagtaccattcaactatgcaacaggttatgcaaaatccccagtttatgagcatggctgagcaccttggtaatgcattaatgcaggatccagctatgtctagtatgcttgacagtttgactaatcctcaacacaa

SEQ ID NO: 8831 - DNA, 426 bp, Gossypium hirsutum
  Clone ID: LIB3197-025-Q1-M1-C6
agaaaacaaagaaaagaaaagggttttcctccattttctacttatctttttcattttttcttcattttaatttcgaatttagggaaaaatggccaatttcatcgaatttccaatctaatttcccattaatattttttattttaaattctcgtttctaaatttatttttttttcagtcatttcaaccatggcttccaattcgaagaagcccgctactgctgatgagaaatcggctttggaaacggagagcaaaagttcaaagtctgaaacatcctccactgagaagaaaacttcaacacctgagccttcaactgggggttcacagccagcacaagcaggggccttccctcccaacgctatgcctggtcctgggtttgtcccacccaatccatttgatttctcagccatgagtggccttcttaatgat

SEQ ID NO: 8832 - DNA, 356 bp, Gossypium hirsutum
  unsure (1)..(356): unsure at all n locations
  Clone ID: LIB3197-014-P1-M1-F3
cccacgcgtncgatttagggaaaagnnggccgcgtgcatcgaattgccgatctaggtgcccattaatattttctattttaaattctcgagggtgggggtgtggggggagtcatttcnaccatggcttccaattcggagaagcccgctactgcggatggggnggggggtgttgatggtcggggagcaaaagttcaaagcctgaaacatccaccactgagaagaaaacttcaacacctgagccttcaactgggggttcacagncnagacaaggaggggccttccctcccaacgctgtgcctgggcctgggtttgccccacccaatccattggattttgcaggcatgagtggccttctt

SEQ ID NO: 8833 - DNA, 234 bp, Gossypium hirsutum
  unsure (1)..(234): unsure at all n locations
  Clone ID: LIB3493-009-P1-M1-G9
ggctgtttgtaaattgatatgtagcttgttctttatgtttctcttgtctttgttagatgagaaatcggctttgacaacagacaccaaaggtatgaaatcagaaacatccaccattgacagcaaaacttcgaaaccagaagcttcccaaccagctcaggctggagcctccccttccaatatgggacctgngtttgtcccacccaatccgtttgatttctcagccatgagtggcct

SEQ ID NO: 8834 - DNA, 946 bp, Gossypium hirsutum
  Clone ID: GOSHI-09MAY01-C3223_1
gaagactttgaaaactccaaaacagccttctctgttcagatttatttctcttttgatttcttcttcttcctctctctgttgatttgatatttgataaattataataatatataatcatatcaaagccgccccattaatatctatcttcttcttcaaagcttggctttttcagccaacccagatcagttttggactcaattctgcagaaatttccggttgagagttcttggtaagtgtttaattgttgtaaatatcggaaaccaaccacttcagaggaatcttggcatatttgcaagtcatttagactgagatttttttgtatagatttggggataagtccatattgggtagggattagattttggaagatggctagtgtgcaagatcagttggagatcaagtttcgattgacagatggatccgatatcggtcccaaaactttccctgctgctactagtgttgcaactttgaaggaaagtgttgttgctcaatggcctaaagagaaggaaaatggtccgaggacagtgaaagatgtcaagttaatcagtgctggaaaaatattggagaacaacaaaactttgggagaagtgtcagagccctctttgtgatattcccggtggggtaacaacttgcacgttgttcaacctttctcctggtggaaaaagaaaagaaagcagtaatcgaaccaaagcaaacaaatgtgtttgtgtcatattataatccacagcttgaagaggggacaacattattttcagatgagagtgacggaactgatttacaatgaagttgaaactttgatcgaagattcggtttgtagctgcacatttatattagaatgtggtatttctgctttcttggcgattatgtagtcgatgattgtcatctatttgttactttgtcatttacattatagacttgtatcagcaataaatctagaatacgtcga

SEQ ID NO: 8835 - DNA, 542 bp, Gossypium hirsutum
  Clone ID: uC-gsflmaxxa047g10b1
ggctttttcagccaacccagattagttttggactcgggtaagataacccatcaagggtttttcacttcttttcttcttcttcttcttcttcttcttcttcttcttttatttggttttggtgtgacccattattggatcttttagctgattttgcaatcttaaagactataatttggggattttctcttccttttcttttatatatagttcatattcatggatctttgcttattcgatgtttctactttttggatttacccaatttgggttacttggaaactatcattcaaatctatgtactccttgaacttttaactttttatgctctttttttccttaaatagatcgcctgcatatgtaattcaatttttcttttcttttttcttctttttccttttttaatttcagttctgcagaaatttccggttgagagttcttgggaagtgtttaattgttgtaaatatctgaaaccaaccacttcagaggaatcttggcatatttgcaagtcatttagattgatatttttgatagatttggggata

SEQ ID NO: 8836 - DNA, 407 bp, Gossypium hirsutum
  Clone ID: uC-gsronu33B109h03b1
cgcagtattcggggggccacccacgcctccgattcttgaacggacgcgtggccggacccgtgggtgcggatttctgcggcttactgtctctgttgatttgatgtttcataaattataataatatataatcatatcaaagcgcgcccattaatatctatcttcttcttcaaagcttggctttttcagccaacccagattagttttggactcaattctgcagaaatttccggttgagagttcttgggaagagattaattgttgtaaatatcggaaaccaaccacttcagaggaatcttggcatatttgcaagtcatttagattgatatttctgtatagatttggggataacaccatattgggtagggtttagattttggaagaatgctagtgtacaagatcagttggag

SEQ ID NO: 8837 - DNA, 354 bp, Gossypium hirsutum
  Clone ID: LIB3166-005-P1-K1-A10
aaacagccttctctgttcagatttatttctcttttgatttcttcttgttcctctctctggtgatttgatatttgataaattataataatatataatcatatcaaagccgccccattaatatctatcttcttcttcaaagcttggctttttcagccaacccagatcagttttggactcaattctgcagaaatttccggttgagagttcttgatttggggataagttcatattgggtagggattagattttggaagatggctagtgtgcaagatcagctggagatcaattttcgattgacagatggatccgatttctgtcccaaaacttttcctgctgctactagtgttgctactt

SEQ ID NO: 8838 - DNA, 373 bp, Gossypium hirsutum
  Clone ID: LIB3196-048-P1-M1-B3
aacacgtagatatggcgattaacccttctttgctctttctttcccttctttttctcttcaatggctgcctagctcgccagaccttttcgtcacagcagctttcaacgttgaccacgacatcattaggaaaatccaacgtgtacgaggaaatagaggcaccatcatcagagtcagggacagactccaagtcgtaacaccacccagaatggaggaagaagaacgtgaggagcgccagcaggagcagcgataccgccatacgagaggagggtctcaagataatggcctcgaggaaactttctgctccatgaggatcaaggagaaccttgctgaccctgaacgtgccgacattttcaacccacaagccggtcgtatt

SEQ ID NO: 8839 - DNA, 657 bp, Gossypium hirsutum
  unsure (1)..(657): unsure at all n locations
  Clone ID: LIB3582-055-P1-K1-F12
acgtagntatggcgattaacccttctttgctctttctttcccttctttttctcttcaatggctgcctagctcgccagaccttttcgtcacagcagtcccaaaatgagtgtcaaatcaataggctccgcgcctctgcaccccagacccgaattcgctccgaagccggcaccaccgagtggggggaccccaactgtcaacagctcaggtgtgctggtgtatctgtaatgaggcagactattgaacctaatggccttgttttgccttccttcaccaatgctcctcagcttctctacattgtccaaggaagaggtattcaaggtattgtgatgcctggatgtgccgaaacattccaggattcacagcaatggcagcatcaaagccgtggcaggttccaggaccagcaccagaaagtccgacggttccgccagggtgacatcattgctttgccgcagggtgtggttcactggagctacaatgatggcaatgagcgtgttgttactatcaatctacttgacactggcaacagtgctaatcagctcgacaacatccctagaagaaggagaaggagaagaagaagaagaagaagacaaccccagccgccgcagccgccaccaggaggaggaggagcaggggcgggaaagctcatcatgcaacaac

SEQ ID NO: 8840 - DNA, 657 bp, Gossypium hirsutum
  unsure (1)..(657): unsure at all n locations
  Clone ID: LIB3582-059-P1-K1-G7
gtanattggcgattaacccttctttgctctttctttcccttctttttctcttcaatggctgcctagctcgccagaccttttcgtcacagcagtcccaaaatgagtgtctgaggaagaagaaggagaaggagaagaagaagaagaagaagacaaccccagccgccgcagccgccaccaggaggaggaggagcaggggcgggaaagctcatcatgcaacaaccttctctgtgccttcgacagaaacttcctcgctcaagctttcaacgttgaccacgacatcattaggaaaatccaacgtgtacgaggaaatagaggcaccatcatcagagtcagggacagactccaagtcgtaacaccacccagaatggaggaagaagaacgtgaggagcgccagcaggagcagcgataccgccatacgagaggagggtctcaagataatggcctcgaggaaactttctgctccatgaggatcaaggagaaccttgctgaccctgaacgtgccgacattttcaacccacaagccggtcgtatttccaccctcaacaggtttaacctccccatcctccaacgacttgagctcagcgccgagaggggtgtcctctacaacagagctggtttgattccacaatggaacgtcaacgctcacaaatactctac

SEQ ID NO: 8841 - DNA, 465 bp, Gossypium hirsutum
  Clone ID: LIB3582-012-P1-K1-G1
gccacgcgttcgtcatctcaacacgtacatatggcgaacaacccttcatcgctctgtctttacctcctatttctctggaatggcgtgcctagctcgccagaccttttcatcacagcagacccaaaatgagtatcaaatcaataggctccgcgcctatgcaccccagacccgaattcacttcgaaccctgcaccaccgagtggtggaaccacaactgtcaacacctcaggagtgctgttgcatctgtaatgaagcacactattgaacctaatggccatagtatgccttacttcaccaatgctgctcagcttctctacattgtccaaggaagaggtaatcaaggtattgagatgcctggatgtgcccaaacattccaatattcacagcaatggcagcatcaaagccgtcgcaagttccatgaccagcaccagaaagtgcgacggttcactcactgtgacatcattgc

SEQ ID NO: 8842 - DNA, 280 bp, Gossypium hirsutum
  unsure (1)..(280): unsure at all n locations
  Clone ID: LIB3583-026-P1-K1-A6
catctcgtagttttggcgttttacccttctttagctctnttctttcccttctttttctcttcaaagagctagccgagctagccagaccttttcgtctctgctgtccctaaatagagagtctaatctattggctccgcgcctctgcaccccagacccgtattcgctccgtagccggctcctccgagaggaggtaccccttctgtcaactgctcaagagtgctggtgtatctgtatagtggcagactatagtacctataggcctggtttggccttccttaac

SEQ ID NO: 8843 - DNA, 438 bp, Gossypium hirsutum
  Clone ID: GOSHI-09MAY01-C13_6
cggccgcgtgggttttttttctcaaattgcaattcccacttgttttcatccctatcattctcatcctcactatcttcttcggtatccgaatccgtggggacatcaagcattagatcaatatcttgttccgttaactccttcttttcaagcttggctatcaatggcgttacacccattgatataaagagaggagaaaaaccttgtgatgaaactcattgatgtaagagttttcattagagttccatttaagagtccttgactcgattaatagaactcagtagccattgagttgattgctgcaaactcatgttagaccaataatgatttgctaattcagagggatggttgcagatgagaatgtgcattcttagtttatgttatccggatttttcttttcctgaacttggatatgagaatataccctacccgtcccgaagt

SEQ ID NO: 8844 - DNA, 487 bp, Gossypium hirsutum
  Clone ID: GOSHI-09MAY01-C13_7
gaaaaggaacagaaaaggcaaagatttaaaggatctggtgaggagatgttagatgtgaaaatatgaagggatggggaaaacaatgtggagatgaatccaacattaagcaattgttggagctggatataattaattcaacccaggagtggaagaatgctttttgaatcccagaagagggatatggggatagtaatttgaaatgtcattgtagaagagattacaagtgaagtttgggattggacaatgtttgtttaaatgtcacaataaatatgacatttcatttctagttctgttactatttcactttgaaaagttttagtatgatcatgaaatcattacaaacatgtatatagggttggacattgcttaatgctagttggatatttggtgtatagatgttttaatgttactgctaagtttgtttggtgtatagatgtttgatatttttcatatatataaacatgtgaataattattgtttttggatc

SEQ ID NO: 8845 - DNA, 758 bp, Gossypium hirsutum
  Clone ID: GOSHI-09MAY01-C13_8
gtggatatggcgcataacccttctttgctctttctttcccttctttttctcttcaatggctgcctagctcgccagaccttatcgtcacagcagtcccaaaatgagtgtcaaatcaataggctccgcgcctgtggactactatcacggagcgggtccggatgtaatgccggccaacccataccatcaacaacaacaacagcaacagtgtgctggcggatatgataaaccagcaactatccatgccaggaggaaatgagaggtctcagcccatgatgcatgctaggccacccgcagctgtgaattacatgccaccatacccatatcaatatccatacccgtatccaacatcccaagcttaacagcaacgtcagcatcaaccccaccgttatacccactactatagtgatgagaatacctcaagctgcaatgttatgtgaagatgatgatgatttggattttcattttaccccctaaaaaaaaaagttcaagtttgatgccataatatacttgaaaatgttttttttttttaattttagtttttatcttttttttcttttttcaattttatgttggattaggggttaaattatgatatagataatatttttgttgaaggttttaggggaggattgataatgttgtacgtggaaagtcaagggtgtggctttccctttttttatgagaatgttgttgatattatataaattatatgtagcaatacaaataagattagcacaaataaatatttgttctgcttc

SEQ ID NO: 8846 - DNA, 779 bp, Gossypium hirsutum
  Clone ID: GOSHI-09MAY01-C13_9
ctttcttcaacactcatccaaacccatttctcaaacaccgttcttcattccaatcttccccacaaacaccataaacctgtacaatcaacgttaccaaaacctccaattccaaatccggtccaactcaacatccataatgtcatcatcagctttcaagcctgaacaagcgaggctaccacctgctcttcctctttcctcccctcctctcaccaagttcaagattgggatttgtcagttggcagtgacacctgataaagagaggaacatacagcatgctcgggaggccatcgaagagtctgctcaaaagggtgcccatcttgttgtcttgcctgaaatatggaacagcccatattcaaatgacggttttccagtttatgctgaagatatagatgcaggtcatgatgcatctccttcaacagctatgctgtctgaagtttctagtcgtctgaagatcacggtagttggtggatctattcctgaacgctgtggggataaattgtataatacttgttgtgtctttggtaccgatggaaagctgaaagccaagcaccgcaagattcacctttttgatatcgatattcctgggaagattaccttcatggaatccaagactcttactgctggggaaacttctaccattgtggacacagatgttgggcgaattggtgtagggatttgttatgacattcgttttcaggaattggcaatgatatatgcctcaagaggtgctcacttgctatgttatcctggagcatttaacatgacaaccggaccattgc

SEQ ID NO: 8847 - DNA, 994 bp, Gossypium hirsutum
  Clone ID: GOSHI-09MAY01-C13_10
atttcatactcgtagatatggcgatttacccttcttagctctttctttcccttctttttctcttcaatagagctgcctagctcgccagaccttttcgtcactgctgtcccaaaatagagagtctaatcaattagctccgcgcctctgcaccccagacccgaattcgctccgaagccggctccaccgagaggaggtaccccaactgtcaactgctcaagagtgctggtgtatctgtaatgtggctgactattgaacctaaaggccttgttttgccttccttcaccaaagctcctcagcttctctacattgtccaaagaagaagtattcaaggtattgagatgcctggatgtgccgaaacattccaagattcacagcaatggctgcatctaagccgaggctagttccaagacctgcaccagaaagtccgacggttccgccagggagacatcattgctttgccgcatggagaggttcactggagctacaatgatggctatgtgcgtgttgttactatcaatctacttgacactggcaacagtgctaatcagctcgacaacatccctagaagattccatcttgctggtaacccagaagaggaacagaggcaactgaggaggctagcacagcagatgcagggaagaagtgagaggggggaggagtctgagaaagaaagaaaaagagagagacgaggagaggaaaagaaagaagagaaaagagaaagaaaggaaagcaaagaaaaagaaggataagttagagaaagggaagaaaggtgctgttacaaattcgtgggggaaatatggaattatcagagaaactgatatgtggaataagcgacctgaattcacagcatggttagctgaagtgaaacagataaacttggaaagcttgcccaactgggaagagaagcagttgtttaaagattttatggaagatcacaacacagccacctttccttccaaaaaatattataaccttgatgcttattataagcgcc

SEQ ID NO: 8848 - DNA, 1691 bp, Gossypium hirsutum
  Clone ID: GOSHI-09MAY01-C13_11
cagcttcatcgtagatatagagcgtttttcccttctttagctggttctttcccttctttttctcttcaatagagctagccttgctcgccagtccttttcgtctctgctgtcccttaaagtgtgtctaatctattgagctccgcgcctctgctccccagacccgtattcgctccgttgccggctcctccgtgtggaggttccccttctgtcttctgctctagtgtgctggtgtatctgttaagtgagctgactattgttcctaaaggccttgttttgccttccttcaccaaagctcctcagcttctctacattgtccaaagaagaggtattcaaagtattgagatgcctggatgtgccgtttcattccaagattctctgctatggctgcatcttatccgaggcaggttcctagacctgctccagttagtccgtcagttccgccagagagacatcattgctttgccgcaaggagaggttcactggagctactttgatggctatgagcgtgtagttactatcaatctacttgacactggcaacagtgctaatcagctcgacaacatccctagaagattccatcttgctggtaacccacaagaggaacagaggcaactgaggaggctagcacagcagatgcagggaagaagtgagaggggggaggagtctgaggaagaagaaggagaaggagaagaagaagaagaagaagacaaccccagccgccgcagccgtcaccaggaggaggaggagcaggggcgggaaagctcatcatgcaacaaccttctctgtgccttcgacagaaacttcctcgctcaagctttcaacgttgaccacgacatcattaggaaaatccaacgtgtacgatgaaatagaggcaccatcatcagagtcagggacagactccaagtcgtaacaccacccagaatggaggaagaagaacgtgaggagcgccagcaggagcagcgataccgtcatacgagaggagggtctcaagataatggcctcgaggaaactttctgctccatgaggatcaatgagaaccttgctagtccctgaacgtgccgtcattttcttcccacaagccggtcgtatttccaccctcaacatgtttaaccttcccatcctccaacgacttgagctcatcgccgagaggggtgtcctctacaacagagctggtttgattcctctatagagatcgtcttcgctcacaaaatactgtacttgttttgagagctgagcctgagtcctagaggtagttcctcttcggcgtcgctgagttcgtcgatttcgaggagctaggtctgctcctgacggagccactgttctttgcgttcatgtttcaagctggtttcgtaagtgccgtaaggatttccttcttctccaattgcgtagccaccatcaccccaaaggctggttgtgtctccttcatgcgagctctgccggaggaagaggtggctgcgtcgtatctagagtcttgagtagatgctaggcggatttagttctacatcaattacacctttttcttcactccttcactgtccgagaggagggccgatgcttaaactccagccgatgccaatgcaatctaaatctgggggatctttgtagggttacgtaagtaggtagttatatatagagtagcagagctatgtccgccatggattttgctgccgatcgttgacgtactgaaagat

SEQ ID NO: 8849 - DNA, 878 bp, Gossypium hirsutum
  Clone ID: GOSHI-09MAY01-C13_12
ccccgcgtccgccccgcgtccgcccacgcgtccgcccacgcgtccgcggacgcgtgggtttcaacacgtagatatggcgattaacccttctttgctctttctttcccttctttttctcttcaatggctgcgctagctcgccagaccttttcgtcacagcagtcccaaaatgagtgtcaaatcaataggctccgcgcctctgcaccccagacccgaattcgctccgaagccggcaccaccgagtggtggaaccccaactgtcaacagctcaggtgtgctggtgtatctgtaatgaggcagactattgaacctaatggccttgttttgccttccttcaccaatgctcctcagcttctctacattgtccaaggaagaggtattcaaggtattgtgatgcctggatgtgccgaaacattccaggattcacagcaatggcagcatcaaagccgtggcaggttccaggaccagcaccagaaagtccgacggttccgccagggtgacatcattgctttggccgcagggtgtggttcactggagctacaatgatggcaatgagcgtgttgttactatcaatctacttgacactggcaacagtgctaatcagctcgacaacatccctagagtatataattttttataattttgacaatccctttctatacatataactttttgtttttgtttttgtttttgatgatctctctcttgtaatgttatagagattccatcttgctggtaacccagaagaggaacagaggcaactgaggaggctagcacagcagatgcagggaagaagcgagagaggggaggagtctgaggaagaaggaggagaaggagaaggagaagaagaagaagaagacaaccccagccgccacagcc

SEQ ID NO: 8850 - DNA, 1931 bp, Gossypium hirsutum
  Clone ID: GOSHI-09MAY01-C13_13
cccacgcgtccgcccacgcgtccgcccacgcgtccgcccacgcgtccgcggacgcgtgggtttcaacacgtacatatggcgattaaccctcctttgctctttctttcccttctttttctcttcaatggctgcgctagctcgcgcagagccttttcgtcacagcagtcccaaaatgagtgtcaaatcaataggctccgcgcctctgcaccccagacccgaattcgctccgaagcccgcaccaccgagtggtggaaccccaactgtcaacagctcaggtgtgctggtgtatctgtaatgaggcagactattgaacctaatggccttgttttgccttccttcaccaatgctcctcagcttctctacccattgtccaaggaagaaaggtattcaagggtatttgtgatgcctggatgtgccgaaacattccaggattggacagcaatggcagcatcaaaggcccgtggcaggttccaggaccagcaccagaaagtccgacgcgttccgccagggtgaccatcattggctttgccgcagggtgctggttcacttggagctacaatgatggcaatgagcgtgttgttactatcaatctacgttgacactggcaacagtgctaatcagctcgacaacatccctagaagattccatcttgctggtaacccagaagaggaacagaggcaactgaggaggctagcacagcagatgccagggaagaagtgagaggggggaggagtctgaggaagaaggaggagaaggagaaggagaagaagaagaagaagacaaccccagccgccacagccgccaccaagaggaggaggagcaggggcgggaaagctcatcatgcaacaaccttctctgtgccttcgactgaaacttcctcgctcaagctttcaacgttgaccacgacatcatttaggaaaatccaacgtgtacgaggaaatagaggcaccatcatcagagtcagggacagactccaagtcgtaacaccacccagaatggaggaaagaagaacgtgaggagctgccagcaggagcagcgataccgccatacgagaggagggtctcaagataatggcctcgaggaaactttctgctccatgaggatcaaggagaaccttgctgaccctgaacgtgccgacattttcaacccacaagccggtcgtatttccaccctcaacagggtttaacctccccatcctccaacgacttgagctcagcgccgagagggggtgtcctctacaacagagctggtttgattccacaatggaacgtcaacgctcacaaaatactctacatgttaagaggctgtgccagagtccaagtggtgaaccacaacggcgacgcagtgttcgacgataacgtggagcaaggtcagctcctgacggtgccacagaactttgcgttcatgaaacaagcaggaaacgaaggagccgaatggatttccttcttcaccaatagcgaagccaccaacaccccaatggctggaagtgtctccttcatgcgagcactgcccggaggaagtggtggcagcgtcgtatcaggtgtcaagagaagatgcaaggcggattaagttcaacaacaaaaacacctttttcttcactccttcacagtccgagaggagggccgatgcttaaactccagccgatgccaatgcaatcaaaatcaaggggatctttgtagggtaacgtaagtaggaagtaataaaaagagttgcagagctatgtccgccatggattttgttgttgatcgttgaggtactgaaagattagggtttagaggatgaataataaaaagaaagggtcttacaagggcggccctttcatttcatgtaatcggctgaaatgttacaacttcaatatatgtaactttctattaaaaaaaaaaaaattaataattatattaatttaattaactaattatcttttataatta

SEQ ID NO: 8851 - DNA, 705 bp, Gossypium hirsutum
  Clone ID: GOSHI-09MAY01-C3_3
cttcagtcttcacttcaccctctttctctttcacacgggttgtggcgtagtttaagcagagaggttgcgcaggataaagtctcttcaccattgtttcaacatgaaggtttgtaataaaaatttgtttctatcagcattgctttgcattgctattgcaggagttttgggtcaagctcctagtaatcctcctacgtctacgccggcgcaaccccccccacctgcaactcctcctgctaccccaccaccagctccattggcttctcctccagccacagtcccagctatctctccagtacaaacaccattgacctcgccaccagctccgccgaccgaggccccagcacctaccctcggggctgctacgccaggtccagctggaacagacacgagcggagcaaatcaaatgtggaccgtacaaaagatgatgggaagcttagccatgggatgggctctgctcaatctgatggtttaaaacaaccgtgtgcctcacatttgatgccatagctctgtaatgtttcattcaattgcttatttcggccttgtttttctcgtattttatgggctgatgtctcatatgggacttttctactatacgtatatgagagcctacattactttaccattatattgtattctttgagacattattattattttttaccttttgaggacactcttttttgtattagaaggaatttattgttt

SEQ ID NO: 8852 - DNA, 753 bp, Gossypium hirsutum
  Clone ID: GOSHI-09MAY01-C3_2
tttcgttttctcatttcacacgggttgtggcggggggtagagccgtgaggttgcgcacgataaagtctcttcaccattgtttcaacatgaaggtttgtaataaaaatttgtttctatcagcattgctttgcattgctattgcaggagttttgggtcaagctcctagtaatcctcctacgtctacgccggcgccacccacaccaccggcttctactcctcctccgacgactcaaccaccgcctacaccaaccgccactccgccaccggtttctactcctcctcccacttcatcaccgcccccagtgacagcttctccacccccagtttcaactcctccacccagttctcctcctcccgcaactccaccacctgcttctccacctcctgcaactccacctccagcttctccaccttctgcaacttcaccttccgccactcctccaccagcttctccacctgccgccactccaccaccagcaacccccccacctgcaactcctcctgctaccccaccaccagctccattggcttctcctccagccacagtcccagctatctctccagtacaaacaccattgacctcgccaccagctccgccgaccgatgccccagcacctaccctcggggctgctacccatgtccatctggaaaatacactagcggatcatatcaaatgttgaacgtacaaaagatgatgggaagcttaccatgggatgggctctgctcaattctgatggtttaaaacaccctctc

SEQ ID NO: 8853 - DNA, 1328 bp, Gossypium hirsutum
  Clone ID: GOSHI-09MAY01-C3_1
cccacgtttctctttctcatttcacacgggttgtggcgtagtttaagcagagagggtgcgcaggataaagctattcaccattgtttcaacatgaaggtttgtaataaaaatttgtttctatcagcattgctttgcattgctgttgcaggagttttgggtcaagctcctagtaatcctcctacgtctacgccggcgccacccacaccaccggcttctactcctcctccgacgactcaagcaccgcctacaccaaccgccactccgccactggtttctactcctcctcccacttcatcaccgcccccagtgacagcttctccacccccagtttcaactcctccacccagttctcctcctcctgcaactccaccacctgcttctcctcctcctgcaactccacctccagcttctccacctcctgccactcctccaccagcttctccacctcccgccactccaccacctgcaaccccaccgccagcaactcctcctcctgctaccccaccaccagctccattggcttctcctccagccacagtcccagctatctctccagtacaaacaccattgacatcgccaccagctccgccgaccgaggccccagcacctaccctcggggctgctacgccaggtccagctggaactgacacgagtggagcaaatcaaatgtggaccgtacaaaagatgatgggaagcttagccatgggatgggctctgctcaatctgatggtttaaaacaaccgtgtgcctcacatttgatgccatagctctgtaatgtttcattcatttgcttatttcggccttgtttttctcgtattctatgggctgatgtctcatatgggacttttctactatacgtatatgagagcctacgttactttaccattatattgtattctttgagacattattattatttttttaccttttgaggacactctttttttgtatttgaaggaatttattgtttattttgtttggaatatgttggttgatttattcgattcatatatattatataaaagtaattatgttattcaaaaaaaaaaaaaatactgtatgtaatgaagaaccgaaagaactagaaaaaaacaaaaataaattagcgggatgacaagtcaatgggtcattgattaccctggaccaacaccaatatcaacatcttagggagaagaactaaaaaagatgagtggggcacttacttatatagaatgcagattcaaaacccaccagagtggaaaagtctgttttcgatgctgcaataaaagtttctgggaggcccctaaaaccaaagagggcgctttgcaaacggcctacatatgcttttt

SEQ ID NO: 8854 - DNA, 696 bp, Gossypium hirsutum
  Clone ID: AI726118.1
cggccgcgtcgacctgatttctacgcctttgtcggaagcggtgagttccgacaaacaggacatttcacacgggttgtggcgtagtttaagcagagaggttgcgcaggataaagtctcttcaccattgtttcaacatgaaggtttgtaataaaaatttgtttctatcagcattgctttgcattgctattgcaggagttttgggtcaagctcctattaatcctcctacgtctacgccggcgccacccacaccaccggcttctactcctcctccgacgactcaaccaccgcctacaccaaccgccactccgccaccggtttctactcctcctcccacttcatcaccgcccccagtgacagcttctccacccccagtttcaactcctccacccagttctcctcctcccgcaattccaccacctgcttctccacctcctgcaactccacctccagcttctccacctcctgcaactccacctcccgccactcctccacaagtttctccacctcccgccaatccacaaccagaaacccccccaacttgcaactccccttgctaccccaccaacagcttccattggctttctcttccatgccacattcccacctatctcctcagttaaaaacacaattgaacctccccccaacttcccccagaccaaggtctccatccctacccctcggggtgtgttccccgaa

SEQ ID NO: 8855 - DNA, 588 bp, Gossypium hirsutum
  unsure (1)..(588): unsure at all n locations
  Clone ID: AI727118.1
tcacacgggttgtggcgtantttaagcagagagggtgcgcaggataaagctattcaccattgtttcaacatgaaggtttgtaataaaaatttgtttctatcagcattgctttgcattgctgttgcaggagttttgggtcaagctcctattaatcctcctacgtctacgccggcgccacccacaccaccggcttctactcctcctccgacgactcaagcaccgcctacaccaaccgccactccgccactggtttctactcctcctcccacttcatcaccgcccccagtgacagcttctccacccccagtttcaactcctccacccagttctcctcctcctgcaactccacctccagcttctccacctcctgccactcctccaccagcttctccacctcccgccactccaccacctgcaaccccaccgccagcaactcctcctcctgctaccccaccaccagctccattggcttctcctccagccacagtcccagctatctctccagtacaaacaccattgacatcgccaccagctccgccgaccgaggccccagcacctaccctcggggctgctacgccaggtccagct

SEQ ID NO: 8856 - DNA, 419 bp, Gossypium hirsutum
  unsure (1)..(419): unsure at all n locations
  Clone ID: LIB3189-013-P1-K1-H1
tttcacacgggttgtggcgtagtttaagcagagtgtttgcgcaggataaagtctcttcacattgtttcaacatgaaggtttgtaataagagatttgtttctatcagcattgctttgcattgctattgcaggagttttgggtcaagctcctagtaatcctcctacgtctacgccggcgccacccacaccaccggcttctactcctcctccgacgactcaaccaccgtctacaccaaccgccactccgccaccggtttctactcctcctcccacttcatcaccgcccccagtgacagcttctccacctcctgcaactccacctncagcttnttcaccttccggcactcctgcaccagcttttncaccttccgccacttcaccaccagcaacccccccacctgcaacttcttctgctacccc

SEQ ID NO: 8857 - DNA, 202 bp, Gossypium hirsutum
  Clone ID: uC-gsflnu33B025d04b1
cctacttcacacgggttgtggcgtagttcaagcagagagggtgcgcaggatacagctattcaccattgcttcaacatgaaggtttgaaataaaaatttgtccctatcagcactgctttgcattgctgatgcaagtgtcatcacatctactcctttttcagctgtgttgaaaggcaccgtattggaacctcacacctctctca

SEQ ID NO: 8858 - DNA, 1343 bp, Gossypium hirsutum
  Clone ID: GOSHI-09MAY01-C93_1
gaagaattcgccaaaccacgctaacccaaaacacaagaaaaagaaagaaagaaaaaaaaaaaggaataccccttaccttcatagagagaacaaaagaaacaaagcaaggtatttcttttcttttcttcacctgtaaaatggcgacggcgagtacttggatattgtcgctaaaggtatttttaatttctaccggtatattgggtatagttttaggacttaaaatctctgttccattggttttggaattctctgtttctcaagctccgttatggtggagtggtttccgttcttggctcaagcctccatatctttacgtcgtcatcaacggaatcatcatcacaatagcagcatcgtcgcggtttaaccaaaacaacggcgagaaagatcagatggagcagatgcaaccgcggccgaagatctcggaggatcaacaaccaattgtggagtatgatacaaagagcgggtggggctccgacgcagtggaatccagtgatttcgtgtacgaggaaaatcagagaggagaagaggtggcaaccagggtttccgaggaggagagcaatgtggcggttgaagatgacagagatggaaacgagtttgttatctctaagtcggagtggattcctccaagtagaacggattcttcggagattccgttggatgctctgcttatacaggagaaacctgctccttcttctagattcggtcaccggaaacctgttaaagtcaatcccgaaggtgggcgagcgttgaaagcggcgaagccaaaacggcatgagacgctggaaaacacttggaagatgataacggaggggaaatcaatgccgttgtccagacacttgaagaagtcggacacgtgggagaatcacggccgtgatatcaacgtggaggcattgaccagctcccctctgatgaagaaatcggaaacgttcagagaccggaccaattaccagctgccacccgaacaagtaagctctttcccggcttcaggaaagctgagaaaagaaccgtcgctgagtcaggacgagttgaatcgtcgagtggaagcttttataaagaagtttaatgacgagatgaggttacagagacaagaatcacttaatcagtacatggaaatggttaaccgtggaagttagccactaaacacaatagtccaatatcttctgccataaccctcaagagaagaaaagaatatatattagattaacttttgggaatatgttttgctccaataaatttaaaaaggttggagatttgaaaggaaaaaaaaatttatgcagggttttatgtttttggtggtttggcgaattcttcgaagatttcataggaatttactgaactcttgt

SEQ ID NO: 8859 - DNA, 3269 bp, Gossypium hirsutum
  Clone ID: GOSHI-09MAY01-C53_1
tctgtggaccctgtggttagcatattgtttgtagcattgggtttttgtctcaaggaagaagaaggagaaagataagtaatgtttttgagaatgatggaatctggggttcctgtttgccacacttgtggtgaacatgttgggttgaatgttaatggtgaaccctttgtggcttgccatgaatgtaatttccctatttgtaagagttgttttgagtatgatcttaaggaaggacgaaaagcttgcttgcgttgtggtagtccgtatgatgaaaacctgttggacgatgtcgagaaggccaccggcgatcaatcgacaatggctgcacatttgagcaagtctcaggatgttggaattcatgcaagacatatcagcagtgtgtctacattggatagtgaaatgactgaagacaatgggaatccgatttggaagaacagggtggaaagttggaaagaaaagaagaacaagaagaagaagcctgcaacaactaaggttgaaagagaggctgaaatcccacctgagcaacaaatggaagataaaccggcaccggatgcttcccagcccctctcgactataattccaatcccgaaaagcagacttgcaccataccgaaccgtgatcattatgcgattgatcattcttggtcttttcttccattatcgagtaacaaaccccgttgacagtgcttttggactgtggctcacttcagtcatatgtgaaatctggtttgcattttcctgggtgttggatcagttccctaagtggtatcctgttaacagggaaacatacattgacagactatctgcaagatatgaaagagaaggtgaacctgatgaacttgctgcagttgacttcttcgtgagtacagtggatccattgaaagagcctccattgattactgccaatactgtgctttccatccttgccttggactacccggtggataaggtctcttgttatatatctgatgatggtgcggccatgctgacatttgaatctctagtagaaacagccgactttgcaagaaagtgggttccattctgcaaaaaattttccattgaaccccgggcacctgagttttacttctcacagaagattgattacttgaaagataaagtgcagccctcttttgtaaaagaacgtagagctatgaaaagagattatgaagagtacaaaattcgaatcaatgctttagttgcaaaggctcagaaaacacctgatgaaggatggacaatgcaagatggaacttcttggccaggaaataacccgcgtgatcaccctggcatgattcaggttttccttggatatagtggtgctcgtgacatcgaaggaaatgaacttcctcgactggtttacgtctctagagagaagagacctggctaccaacaccacaaaaaggctggtgctgaaaatgctttggttagggtgtctgcagttcttacaaatgctcccttcatcctcaatcttgattgtgaccactatgttaacaatagcaaggcagttagggaggcaatgtgcttcttgatggacccacaagttggtcgagatgtatgctatgtgcagtttcctcaaagatttgatggcatagataggagtgatcgatatgccaataggaacacagttttctttgatgttaacatgaaaggtcttgatggaatccaagggcctgtttatgtgggaacaggttgtgttttcaataggcaagcactttatggctatggtccaccttcaatgccaagttttcccaagtcatcctcctcatcttgctcgtgttgctgcccgggcaagaaggaacctaaagatccatcagagctttatagggatgcaaaacgggaagaacttgatgctgccatctttaaccttagggaaattgacaattatgatgagtatgaaagatcaatgttgatctctcaaacaagctttgagaaaacttttggcttatcttcagtcttcattgaatctacactaatggagaatggaggagtggctgaatctgccaacccttccacactaatcaaggaagcaattcatgtcatcagctgtggctatgaagagaagactgcatgggggaaagagattggatggatatatggttcagtcactgaggatatcttaaccggcttcaaaatgcactgccgaggatggagatcgatttactgcatgcccttaaggccagcattcaaaggatctgcacccatcaatctgtctgatcggttgcaccaggttcttcgatgggctcttggatctgttgaaattttcctaagcaggcattgccctctatggtatggctttggaggtggtcgtcttaaatggcttcaaagactagcatatataaacaccattgtctatcctttcacatcccttccactcattgcctattgttcactaccagcaatctgtcttctcacaggaaaatttatcataccaacgctctcaaacctggcaagtgttctctttcttggccttttcctttccattatcgtgactgctgttctcgagctccgatggagtggtgtcagcattgaggacttatggcgtaacgagcagttttgggtcatcggtggcgtttcagcccatctctttgccgtcttccaaggtttccttaagatgcttgcgggcattgacaccaactttactgtcactgccaaagcagctgatgatgcagattttggtgagctctacattgtgaaatggactacacttctaatccctccaacaacactcctcatcgtcaacatggttggtgtcgttgccggattctccgatgccctcaacaaagggtacgaagcttggggaccactctttggcaaagtgttcttttccttctgggtcatcctccatctttatccattcctcaaaggtcttatgggacgccaaaacaggacaccaaccattgttgtcctttggtcagtgttgttggcttctgtcttctctcttgtttgggttcggatcaacccgtttgtcagcaccgccgatagcaccaccgtgtcacagagctgcatttccattgattgttgatgatattatgtgtttcttagaattgaaatcattgcaagtaagtggactgaaacatgtctattgactaagttttgaacagtttgtacccattttattcttagcagtgtgtaattttcctaaacaatgctatgaactatacatatttcattgatatttacattaaatgaaactacatcagtctgcagattttacccgttctaatgtttctgatctcgaatattgtacctaaatacatttcatgctgattatgtatg

SEQ ID NO: 8860 - DNA, 497 bp, Gossypium hirsutum
  Clone ID: uC-gsronu33B002c10b1
attttaacaaaacatgaagaaaattctaaaacccctgaaggaattctgagggagatcttctgtcttggagtagctctggcttttgggatggatcgtctggcttccttaaagtaattcttggcaaagtgttcttttccttctgggtcatcctccatctttatccattcctcaaaggtcttatgggacggcaaaacaggacaccaaccattgttgtcctttggtcagtgttgttggcttctgtcttttctcttgtttgggttcggatcaacccgtttgtcagcaccgccgatagcaccaccgtgtcacagagctgcatttccattgattgttgatatattttgtgtttcttagaattgaaatcattgcaagttgactgaaacatgtctattgactaagttttgaacggtttgtacccattttattcttagcagtgtgtaattctcctaaacaatgctatgaactatacatatttcattgaaatttacattaaatgaaac

SEQ ID NO: 8861 - DNA, 326 bp, Gossypium hirsutum
  Clone ID: LIB3083-066-Q1-L1-G3
gtggctatgacatgaattgcttccttgattagtgtggaagggttggcagattcagccactcctccattctccattagtgtagattcaatgaagcaattcatgtcatcagctgtggctatgaagagaagactgcatgggggaaagagattggatggatatatggttcagtcactgaggatatcttaacccggcttcaaaatgcactgccgaggatggagatcgatttactgcatgcccttaaggccagcattcaaaggatctgcacccatcaatctgtctgatcgggtgcaccaggttcttcgatgggctcttggatctgttgaaat

SEQ ID NO: 8862 - DNA, 248 bp, Gossypium hirsutum
  Clone ID: uC-gsronu33B060a12b1
ccctttcgatttttatacctaaggcatccacaaacacactgacttgaaaggagctcacgatgagatcccatctgtcgccattcctgccgctagagctgcaagccccttgttataatctgttccatgcttctactacatgtataaggccattatgaagagtctgagagagcactgattatctgtcagacaagctgtgagaaaacttttggcttatcttcagtcttcattgaatctacactaatggagat

SEQ ID NO: 8863 - DNA, 730 bp, Gossypium hirsutum
  Clone ID: GOSHI-09MAY01-C73_2
gcatgtataaaaactggttaccttcactgttcgctttcttttttttttttcttttctgatcgagaatcagataaaaatatcttattctacaatattttccgatcaaatcgagatccccgcgaaaatgaacgacggagatgtttccaggcagattcagcagatggtgagattcatccgccaagaagcagaggagaaggctaacgagatctctgtttcagcggaagaggaattcaacatcgagaagctccagttggtggaggcagagaagaagaagatcaggcaagagtacgagaaaaaggagaagcaagttgaagttcgaaagaagattgagtattcgatgcagcttaatgcatctaggattaaggtccttcaagctcaagatgatgtggttaatgaaatgaaagagtcggcagccaaggaacttctgaacgtgagccgtgatcaccatgtgtacagaacgcttttgaaagatgtaattgttcagagtttggtcaggctgaaagagcctgctgtcttactgcgctgtcgcaaagatgatgtgcccttggtggagtctgtcctggattcagcaaaagaagaatatgcttccaaagtgaatgtccatccaccagagatattcattgacaatgtccatcttcctcctgcaccttctcatcacaatgctcatggccctttctgctcagaggtgttgtgatagcatctcgagatggaaagattgtgtgtgagaaca

SEQ ID NO: 8864 - DNA, 1184 bp, Gossypium hirsutum
  Clone ID: GOSHI-09MAY01-C73_1
gaaaaataaaaactggttcagcgacagagttggcttcatttctcttacctgtatcaaataccacccaaacatcgtcgtcttctacactcttctctggtaagttcatcgaaagatcaaatcaagatccctgccaaaatgaacgacgctgatgtatccaagcagatccagcagatggtgagattcatccgccaggaagcggaggaaaaggctaacgagatctctgtttccgctgaagaggagttcaacatcgagaagcttcaattggtggaagcggagaagaagaagattaggcaggagtacgagaagaaggagaagcaagttgaaatccgaaagaaaattgagtattcgatgcagcttaatgcatctaggatcaaggtccttcaggctcaagatgatgtggttaatgcaatgaaagaatcagcatccaaggaccttctcaatgtgagccatgatcaccatgtttacaaaaggcttttgaaagatctaattgttcagagtttagttagactgaaagagcctggagtcctactccgttgtcgcaaagaagatttgcatttggtggagtctgttctggattcagcaaaggaggaatatgcttctaaagtgaatgttcatccaccagagataatcattgatgatgtccatcttccccctggcccttctcatcatcatggttttttccatcatcatgctgaggctcacgggcctttctgctctggaggtgtagtcatagcatctcgagatggaaaaattgtgtttgagaataccctggatgcacggttggatgttgcattcaataagaaacttccagagatccgcaagtggctttttggtcaggttgctgcttgaaggcttaagatggtattgtttttctcagcagcttttgtcatcggccatagagcatagtgattaagttatttgttccatgtatttgctttctcatattgttctccccgaatagtttatttgtttgataaaagtcagtgaaactcttgttcgattggtccgtatatcattttctgggattgtgaaagtactgtttttaaataatgaataaaatttgaaatgtttgcttattcaaaaaaaaaaaaaaaaaaaaaaaaaataaaaattataaatgtgttttaattataaagttttaaaaatgtgtttattggctttagcgttaaattttttttatccat

SEQ ID NO: 8865 - DNA, 559 bp, Gossypium hirsutum
  Clone ID: GOSHI-09MAY01-C33_3
aatgagtgatgaacagatgagagacttcatcccaaggatagccaagcttggtttctgttggcagttcataacactagctggtttccatgctgatgcactcgtgaccgacacattcgccagagatttcgcgaggaggggaatgctagcttatgttgagaagatccagagggaagagaggaacaatggggtggacacattagcccatcaaaaatggtcaggtgccaacttttatgatagatatctcaagacagtccagggaggcatatcatcgactgcagccatgggcaaaggagtgacagaggagcaattcaaggaaacatggacaaggccaggagccatggaggttgcaaatgaaggcaatatggtggttgctaaggcaaggatgtaggatgaagctaagctgattggaaattggatcattctattggagcatcacccaattctagtgtttctttttttttttccttcttttttagatctcttttgcttatgttaaaagatgaaactggtttctgtaatagttttaaaatggcaatgagaaaatgctttggtttttttt

SEQ ID NO: 8866 - DNA, 2144 bp, Gossypium hirsutum
  Clone ID: GOSHI-09MAY01-C33_1
gttgttaccattttgtaaagggggggtggcaggggtatgccccgttctcgcttataaattgagggacttgggagggtaagagcatgccatgaccctctcttagctgttttcacaaaggtttctttatttgtatttacaaaaacccaagttctagccatggctgcatctttctcagtgccttcaatgataatggaagaagaaggaagatttgaaactgaagttgctgaggtgcaagcatggtggaactcggagaggttcaagctaacccgacgaccatactcggctcgagacgttgtggctttacgaggcagcctcaagcagagctatggctccaacgagatggcaaagaagttatggacgactctcaagacgcaccaagccaatggcactgcttctaggacttttggtgcacttgaccccgtccaagtaaccatgatggctaagcatttggactccatttatgtctctggttggcaatgctcctccactcacaccaccaccaacgagccaggtcctgaccttgctgactacccttacgacaccgttccaaacaaagtcgaacaccttttctttgcacaacagtaccatgaccgcaaacaaagagaggcacgaatgagtatgagccgggaggagcgcgctcgaaccccttatgtcgattacctgaagccaatcatagctgatggtgatactggctttggtggaaccacagcaaccgttaagctttgtaaacttttcgttgaacgtggtgctgcaggtgtccacatcgaggaccagtcatctgtaaccaaaaaatgtggtcacatggctggtaaagtgcttgttgctgttagtgaacacattaacaggctagtggcagcgaggttgcagtttgatgttatgggagtcgagacagtgttggtggctcgaaccgatgctgttgcagctactttgatccaaaccaatgtcgacaccagggatcatcagtttattcttggtgcgacaaatccgaatcttcgggggaaaagtctggcaaatatgttggctgaaggaatggctgctggtaaaaatgggccccaacttcaggccattgaagataattggctagcaattgcacaacttaagacattctccgaatgcgtaatggatgccattaagagcatgaacataacagaggatgaaaagagaaggagaatgaatgaatggatgaatcattcaagttatgataagtgcctatcaaatgaacaagcaagagagattgctgagagattgggacttcagaatcttttctgggactgggatttgcctagaaccagagaagggttctataggtttagagggtctgtaatggctgccattgttcgcggttgggccttcgcacctcatgcagaccttatttggatggagacatcgagccccgacatggtcgagtgcaccaggtttgctgaaggggtgaaatcaatgcaccccgagatcatgttggcttacaatctctccccatctttcaattgggatgcatcgggaatgaccgatgaacagatgagagacttcattccaagaatagccaagcttggtttctgttggcagttcataacgttagctggtttccatgctgatgcattggtgaccgacacatttgcgagagatttcgccaggagggggatgctagcgtatgtggagaagatccaaagagaagaaaggaacaatggagtggacacattggctcaccaaaaatggtcaggtgccaacttttatgatagatatctcaagacagttcaaggaggtatatcatccacagcagccatgggcaaaggggtgactgaggagcaattcaaggaaacatggactagaccaggtgcagggaacattggaagtgaaggcaatctggttgtggctaaggctagaatgtaagacaagcaaaaatgagctgaaggatggtctattttggacttgggagaataacccaattcttgaattttggaattgggacggaaaaaaaaaaagtggtaataaaatcatttgacaatggatcagtctgggtatttcgttttctttttggtttctgttgggccatattgtgccttctcttttttaaagctttctaatgcttttgttagagacgaaacttgttccttttataatagaaaatgttctgtttatttcggctc

SEQ ID NO: 8867 - DNA, 641 bp, Gossypium hirsutum
  Clone ID: LIB3583-022-P1-K1-C2
cccacgcgtccgcccacgcgtccgcccacgcgtccgcccacgcgtccgcgaggttgcagtttgatgttatgggagtcgagacagtgttggtggctcgaaccgatgctgttgcagctactttgatccaaaccaatgtcgacaccagggatcatcagtttattcttggtgcgacaaatccgaatcttcgggggaaaagtctggcaaatatgttggctgaaggaatggctgctggtaaaaatgggccccaacttcaggccattgaagataattggctagcaattgcacaacttaagacattctccgaatgcgtaatggatgccattaagagcatgaacataacagaggatgaaaagagaaggagaatgaatgaatggatgaatcattcaagttatgataagtgcctatcaaatgaacaagcaagagagattgctgagagattgggacttcagaatcttttctgggactgggatttgcctagaaccagagaagggttctataggtttagagggtctgtaatggctgccattgttcgcggttgggcctttgcacctcatgcagaccttatttggatggagacattgagcccccacatggtcgagtgcaccaggtttggttaaggggtgaaaataatgcaccccgag

SEQ ID NO: 8868 - DNA, 1300 bp, Gossypium hirsutum
  Clone ID: GOSHI-09MAY01-C23_1
atggcttcaagttggtttttcattgtgttcctagtcctaactgttgccagtgtgaggtgcacgaccgtggaccacatgccatcgacagatgaggatgctagagattattcaaagttaaagacgaagacagaagaagccactgatgaacaccaccgcccggctccccgggccaccgagcggccggaaagcaaggcggatcatgctgcaaatgaggtaaagagcaacacacaacaagcaaaggatagggcatcagaggtagggaaagaagccaaggagtacacagagtcatggactgaatgggctaaagagaagatatctgaagggcttggattcaagcaagacgatgatcctaagggttctgtcgggaaagcctctgattccgtagctgacactgctaccaagaccaaggacaagttacaagacatggcctcaggagctggtgaatacagtgcagggaaggcaaaggacatgaaagatacagcctacaagaagaccgatgatgtgacgaatgcggcaaagggaaagagcagtgagatgagacaagcaaccacagagaaggccagggaattagcagattctgcaaaagaaaatgcgaacacagcatatattgcagcgaaggaaaaggtgagggacatggcggataggacaagtgagatgacgaatgaagcgcaggaaaggggggctcggaaggcggaagaagcgaaggaggtagttgccgagaaagcagagggtgcggcggaggaaaccaagaaaaagaacgaagagacaggggagagcctgaagtgggcgaaagagaaagctaaacaagggtacgatgcggccaaaagcaaagctgaagagaccatagaatctgcaaaggataccatagcttcgggctacgagtcggcgaagcagaaatcacaagaactgaaagataactatgtgaacggtgggggacaagggcgaggacgtgagcgagatgaggagctgtgagttgctgcaatgctgagtggtggtgatgagattaagatttgagagtagatgagtttttatatgctttgtttcggtggttgtataaatatgtttggttttgaaacttcggtagacaataatggatggttagctttccgtcccgtaaaaaaaaaaaaaaaaaaaaaaaaaaaaaggaagaaaaaaataaaagaaaaaaaaaaaaaggaaaaacaatctaaaaaaaacaaaacttacataacacaataatagcaacctaaaaactttttctatagcggcaccctaaacacaattcactaggccgaaaaatctacaactttaccaaccttta

SEQ ID NO: 8869 - DNA, 552 bp, Gossypium hirsutum
  Clone ID: LIB3827-002-Q1-N6-E12
tgttttttttttttggaaagcaatcatccattattgtcgaccgaagtttcaaaaccaaacatatttatacaaccaccgaaacaaagcatataaaaactcatctactcttaaatcttaaaatcatcaccaccacttagcattgcagcaactgacagctcctcatctcgctcccgtcctcgcccttgccctccaccgttcacatagttatctttcagttcttgtgatttctgcttcgccgactcgtagcccgaagctatggtatcctttgcagattctatggtctctccagctttgcttttggccgcatcatacccttgtttagctgtctcctttgccttctctgtcgtcgcatcgtatccttgtttagctttctccttcgcccacttcaggctctcccctgtcttttcgttctttttcttagtttcctccgccgcatcctttgctttctcggcagctacctccttcgctttttccgccttccgagccgccctttcctgggccttattcggcatcttacttgtcctatcgggcctgtccctaaccttttccttc

SEQ ID NO: 8870 - DNA, 524 bp, Gossypium hirsutum
  unsure (1)..(524): unsure at all n locations
  Clone ID: LIB3827-002-Q1-K6-E12
ccgggttcgacccacgcgctccggcggttcgctcgcggatctanaacttcaaagttaaagacgaagacagaagaagccactgatgaacaccacagcagaactcagcaagccaaggatgagttgaaaagcaaggcggatcatgctgcaaatgaggtaaagagcaacacacaacaagcaaaggatagggcatcagaggtagggaaagaagccaaggagtacacagagtcatggactgaatgggctaaagagaagatatctgaagggcttggattcaagcaagacgatgatcctaagggttctgtcgagaaagcctttgattcagtagctgacactgctaccaagaccaaggacaagttacaagacatggcctcaggagctggtgaatacagtgcaggaaaggcaaaggacatgaaagatacagcctacaagaagaccgatgatgtgaagaacgcggcaaagggaaagagcagtgagatgagacaagcaaccacggagaaggccagggaattggcagattctgcaaa

SEQ ID NO: 8871 - DNA, 1062 bp, Gossypium hirsutum
  Clone ID: GOSHI-09MAY01-C953_3
cccaattccagaatcagaggttagagcagtgcttctaccgttctacgtcttctacctttgaatttcaaagggtttggacatacatggccgaatctatataaacgaacaagggattaacgcacagttatgtagaaaacgaaggtttctcttttgtggacgtcggccattcatatcaacccaagccggcagccgctacaacccatccctcacagcctctttccgtcactcaactcaacctttgcaatcgacagtcagtcgcgcggctcgcaagcagtgcaatcggtagtcagtcgcgcggctcgcaagcagtgcaatcggtagtcagtcgcgcggatcgcaagcagtgcaatcggtagtcagttgcgcagctcgcaagcagcaaactcgtcgccgccgtctcacaccctgaagtttcctgcaaaattataataggttcatttgaaatctgttgctggtttaaatttcataatacagatcgttgaatatattctgcggaaaaatgcaccctcctctgactttacacaggcatcctatgtgtgctgaaatcatcgaggaattccaaaagtgtcatttagagcatccaataactaaattcttcggtgaatgtacagaattaaagataaagctccctcgctgtttccggcaggaagtgagttattctcagctctagggggaaattcagtttctagtatcattgtcgtgactctgtttgaaacaggatgtttttatttggcagaaagctttgaagaggaaggctaattttgaacagagtaagaaactgaaagaaagacttcaggcccgggggcgggcccccgccgtccgcgattcatgaatctataccaattcatgaatctgttttacgatgctgtggttggttgggccactggtatttggttgctgctacaaaaaattgtttaattgtttccgttgcctacttgagaatgatatatgatgaacaaagacatggttccttcttgattttacataaagaaactttgattgtatacctatgtccttggactgctgaaaatcttaaataacaatccctttactttattcttc

SEQ ID NO: 8872 - DNA, 956 bp, Gossypium hirsutum
  Clone ID: GOSHI-09MAY01-C953_1
gagaaatttaattgaataatattatattaatttaaactatgacaattagttgaatttatgtcaacttaatttttttttatcatcatcacgaaggtgacattagttcatatgagcacagtacgaatggtgttaaatattctttttgtttagtgggttttagaggtatgtgaatgaatatttaaataaaaattaaattttttaaattttttagaaatagaattaaattggcaaattttgtaaagttggagagttaaattattgaatttagaatttaaactaaaatgataaattttgtaaacattaaaggataaatttgttgaatttttagatttaggattaaattgatagaatctataaatattagagagctaaaattgttattaggcaaaaaaaagacacaatttagcttcctgataattaatgggaaataattaaaatatttaattttaaaaaattgaatcatcaaaatagaatcaaagacgtggttaagtgatgatttttgtagtttaaccaaagatttaacgatacaaataaaaaattaaattaagcctattcctaatccttaaattcctaaaacggaaacacccttagatagtcggtccctcatccacctcctagacagatcacccttcaccttcgagtcatcttatctctcacctcaaccggtgctgttcaggcagaactcactctctccactcgattctcagccggcagccgctacaacccatccctcacagcctctttccgtcactcaactcaacctttgcaatcgacagtcagtcgcgcggctcgcaagcagtgcaatcggtagtcagtcgcgcggctcgcaagcagtgcaatcggtagtcagtcgcgcggatcgcaagcagtgcaatcggtagtcagttgcgcagctcgcaagcagcaagctcgtcgccgccgtctcacaccctgaggtttctgcaaatttattaata

SEQ ID NO: 8873 - DNA, 611 bp, Gossypium hirsutum
  Clone ID: LIB3825-026-Q6-K6-B2
cggacgcgtgggctcctggccagatcgcccttcaccttcgagtcatcttatctctcacttcaatcgatgctgttcaggcagaactcactctctccactcgattctcagccggcagccgctacaacccatccgtcacagcctctttccgtcgctcaactcaacccttgtaatcggcagggaggcgcgcggcttgcaagcagtgcaattggtagtcagttgcgcagcaagctcgtcatcgccgtctcacaccctgaggtttctgcaaatttattaataggttcatttgaaatctgttgcttgtttaaatttcataatacagatcgttgaatatattctgctggaaaaatgcaccctcctctgactttacacaggcatcctatgtgtgctgaagtcatcgaggaattccaaaagtgtcatttagagcatccaataactaaattcttcggtgaatgtacagaattaaagataaagctcgatcgctgtttccggcaggaaaaagctttgaagaggaaggctaatttagaacagagtaagaaactgaaagaaagacttcaggcgttaaggaaggaaactgctgaaaacgattcatgaatctatagcaattcatgaat

SEQ ID NO: 8874 - DNA, 503 bp, Gossypium hirsutum
  unsure (1)..(503): unsure at all n locations
  Clone ID: LIB3583-055-P1-K1-B2
cttatctctcacctcaaccggcgccgttcaggcaaaactcactctctccactcgattctcagccggcagccgctacaacccatccctcacagcctctttccgtcgctcaactcaacccttgcaatcggcagtcagtcgcgcaactcgcaagcaatgcaatcggtagtcagtcgcgcggctcgcaagcagtgcaatcggtagtcagttgcgcagctcgcaagcagcaagctcgtcgccgccgtctcacaccctgaggtttctgcaaatttatcaataggttcatttgaaatctgttgcttgtttaaatttcataatacagatcgttgaatttattctgctggaaaaatgcaccctcctctgactntacacaggcatcctatgtgtgctgaagtaagtacaaactgggtgttgaatctaatatttttagctgttggattggaaggaaagtttggttcttgttaaattaatcatatgactttatcttttggcaaatcatcgaggaa

SEQ ID NO: 8875 - DNA, 1831 bp, Gossypium hirsutum
  Clone ID: GOSHI-09MAY01-C943_1
cccacgcgtccggacaccaagtaaaagcctcaccacaagcctctcatcgacaatggcggctgccacttcgaactccgctttgcctaagctttctacgttaacttcgtccttcaaatcttccatacccatttccaaatccagccttcccttctccacaacccctcaaaagcccaccccttaccgctccttcgacgtttcctgctctctttctcatgcaagctccaaccccagatccgctgccgcatccgttacccaaaaaactgctcctccccattatttcatttccaggtatgcggatgatgagccccggaaaggcgctgatatcctggtggaagccctggaacgtgaaggggtcaaggatgtgtttgcctacccaggtggagcttcaatggagatccaccaggctttaacccgctcaaaaatcatccgaaatgtccttccgcgacacgagcaaggtggggtctttgccgccgagggttacgcgcgctcctctggcatttccggcgtttgcattgcgacgtctggccctggggcaaccaacttggtgagtggtctcgctgatgcgatgctcgatagtatccctctcgtggcgatcactggtcaagtccctcgtcggatgatcggtaccgatgctttccaggaaactccaattgttgaggtaacaaggtctattacgaagcataattatcttgttcttgatgtggatgatattcctaggattgttagtgaggctttctttttagcttcctcgggcaggccgggacctgttctgattgatgttcctaaggatatacaacagcaacttgctgttcctaaatggaaccattctcttagattgccagggtatttgtctaggttgcctaaggctcccggtgaggctcatctcgaacagattgttagattggtttctgagtctaagaagcctggtttatatgttggtggggggtgtttgaactctagtgacccgcgcgtccggtttgttgagcttacagggatacccgttgcaagtactttgatgggtcttggagcctttccgatttcggatgacttgtcgttacaaatgcttgggatgcacggaactgtgtatgccaattatgctgttgataagagtgatttgttgcttgcttttggagtgagatttgatgatagggtgacgggaaaacttgaggcttttgccagccgggcaaagattgtgcatatcgatatcgactctgctgagattgggaagaacaagcagcctcatatgtcagtgtgttccgatgtgaaattggcattgcaggggataaataagatattggagaccacgggagctaagctgaatcttgattattcggaatggaggcaggagttaaacgagcagaagctgaaattccctttgagttacaagacctttggtgaagctattccacctcaatatgcaattcaggttcttgatgaattaactggcgggaatgcaattataagtaccggtgttggccagcatcaaatgtgggctgctcaattttacaagtataagaagcctcgtcaatggttaacgtctgggggattgggtgctatgggatttggattgcctgctgctattggagctgctgttgcaaacccggaggcagttgttgtagacatcgacggtgatggaagttttatcatgaatgtgcaagagttggcgactatccgtgtggaaaatcttccggttaagatattattgttgaataatcagcatttgggtatggttgttcaatgggaggaccggttttacaaggcaaacagggctcatacatacttggtgagacctatccaacgagtcggaaatatttccaaatatgttgaaatt

SEQ ID NO: 8876 - DNA, 336 bp, Gossypium hirsutum
  unsure (1)..(336): unsure at all n locations
  Clone ID: LIB3166-020-P1-K1-A11
gaacaagcanccncaaatgncaaagngatttgttttgaaanacgcacngcaagggccgaacgctatatttaaaaccacgggagctaacctcaatctngattattcagaatggaagcaggagttaaacgagcataagctgaaattccctttgagttacaagacctttgatgaagctattccacctcaatatgcaattcaggttcttgatgaattaactggctggaatgcaattataagtaccggttttggccagcatcaaatgtgcgctgctcaattttacaagtataagaaaccttctcaatggttaacgtctgggtgattgagttctatgggatt

SEQ ID NO: 8877 - DNA, 553 bp, Gossypium hirsutum
  Clone ID: GOSHI-09MAY01-C893_1
acaaaacctacaatctttcttgtttgcttcatcattagcgtcagttttaaaagtggtgtaggaatattttggatgatagtggatgttggataaataggtttgaaattttgatcctttaatcttcgagtcctaacaaccatggagtgtaacaaagaagaggctgtcagagcgaggggaattgctgaacaaaagatgcaaaatggtgattttgagggtgctaagaagtttgcattaaaggcccaaaagttgttccctgagcttgagaacataccacagttgttgacagtatgtaatgttcactactgtgcaaaaaacaaactttttggttctgaaatggactggtatgggattcttcagatcgagcaatcagctgatgagacttccatcaagaagcagtacagaaagcttgcactactgctccatccagacaaagaataaatttgctggtgccgaggctgcttttaagttgattggggaagcaaacagggttctttcagaccaaacgaaccggtctctatttgtttggtggggccgttccccgtgggaccccgcc

SEQ ID NO: 8878 - DNA, 989 bp, Gossypium hirsutum
  Clone ID: GOSHI-09MAY01-C883_2
agctcgccatgacaagctcgcttcacggaacattgaccactctggtgttgggtgaatgtactttgagctaatccttctctattgcctccatctccatagtaatatgaacggtgccacaaggatctgattttcctttgttaacacgtttggagcgctcgtaagcatgcacatgacctgcaaatactaaatcaacaccagcagcataaagcagtggttccatggctgtcatcatcccatccccttcaccttgatgagcatggttactattgtaccatggaacatggaacaacacaactaaccagggtgtcttctttctgtccacctttgaaagatcagccttcaaccagctatattgatctgaaagctcgtcgtaatccgtatatgaaccaagcatgataacatggacccctgcaacttcgaaagaataataaagatttgaggtcgattcactttcctcaaacggcattttccatcttgcattataggactcaaatgcatctgtaaaaaatggtatcttctccttttcatggttgccttgtgttaccatccacggtctggcactcgcaagtggctgtaccagctcaccaaagttgtcccagagatgctgcatgcaatcagcataagaaaggtccccaggaagcagatgtacatcatatttgcattggtcgatgtggtctaatgttgatttagtccagccagtttgacctaaatcgccagctacggcaaaggtaacaggaaattgtccgggtggggtcttgagctgaaattcaggaccttgtcctccgcaccgatagaaataaatggtatcatgttccagcccccccgtcccagtatggtgtatctttccggagctataaaataagtaattataagaggcggtctctcctgatgatgaaaaggtgtattgtccaggcaaggttccgtattcaacaattgaaggagcggagttatcatcagtgatccatgaaattcgcatgtgattttctccc

SEQ ID NO: 8879 - DNA, 563 bp, Gossypium hirsutum
  Clone ID: GOSHI-09MAY01-C883_1
gcagcgctccaaacgtgttaacaaaggaaaatcagatccttgtggcaccgttcatattactataggagatggaggcaatagagaaggattagctcaaaagtacattcacccaacaccagagtggtcaatgttccgtgaagcgagctttggtcatggcgagctcaagatagtgaattcaactcatgcattttggagctggcaccggaatgatgacgatgaaccagtaaggtccgatcaggtttggataatctctctcatcggttctggatgtcttgcagaaaaggcttatgaatcaagtaaaattcttgtttctccttaaactaagacttggcggtcagtgtccctagattcgagctaagttgttgctaaacagcttgatctgtgttatgtgtatatatacactaatactagaagacatggtttccattagtaaaatggttattcgtttcatgtaattgagcataaaggccatctccatttgaagttgtcctattgctcatttcttatatgtaacttttcaaagataattttgtttccctatgcgcatactgaaaagttgctcc

SEQ ID NO: 8880 - DNA, 561 bp, Gossypium hirsutum
  Clone ID: LIB3583-054-P1-K1-D12
ctagttctagatcgcgagcggcctagctttctttcttattcttatgttattagttggatatatgataatgttgttctctacctggcagaaacgtgttaacaaaggaaaatcagatccttgtggcactgttcatattactattggagatggaggcaacagagaaggtttagctcaaaagtatgtcataacaaacaaatttcttaaattctgatcttagttgtaatacaaattgaacatcatacatttatcttgtttgttgtaacaacgttgagccagaatatagtaagtcatgtaaatttacttacaggtacattcacccaacaccagagtggtcaatgttccgtgaagcgagctttggtcatggcgagctcaagatagtgaattcaactcatgcattttggagctggcaccggaatgatgacgatgaaccagtacggtccgatcaggtttggataacctctctcatcagttctggatgtcttgcagaaaaggcttatgaatcaagtaaaattcttgtttctccttaaactaagacttggcggtcagtgtccctagattcga

SEQ ID NO: 8881 - DNA, 397 bp, Gossypium hirsutum
  unsure (1)..(397): unsure at all n locations
  Clone ID: LIB3166-057-P1-K1-D10
ccgggtccgacccacgccgtctcggaccggggtnattgtaaggtggcagaagttgctctttgctgcnncacgatccactgagattgagcggcctttgtcgctttcgattcgtccaganaaaggcttatgagagaggttatccaaacctgatcggaccgtactggttcatcgtcatcattccggtgccagctccaaaatgcatgagttgaattcactatcttgagctcgccagaccatggatggtaacacaaggcaaccatgaaaaggagaagataccattttttacagatgcatttgagtcctataatgcaagatggaaaatgccgtttgaggaaagtgaatcgacctcaaatctttattattctttcgaagttgcaggggtccatgttatcatgct

SEQ ID NO: 8882 - DNA, 280 bp, Gossypium hirsutum
  Clone ID: LIB3493-043-P1-M1-G4
acggaaccttgcctggacaatacaccttttcatcatcaggagaggccacctcttataatggcttattttatagctgcggaaagatacaccatactgtcattgggcctctggaacatgatccgtttatttctatcggtgtgggcgacatggtcataaatgttagattaagacctcaatctagacaatattatgttacttttgcctcgggtggagaattaagtcaaactgggttgaccatatcaacattgaatcacatgtaccaatgcttatatgatgtaca

SEQ ID NO: 8883 - DNA, 537 bp, Gossypium hirsutum
  Clone ID: GOSHI-09MAY01-C853_1
gaaaagctagagatatacacaatgggcggcaacggcgaagagatccttatgttggaggcaccgcctgaaactgctcggccatgggcctctgcttgcgactgcccagactttggacgcattaccctacattgacgacgactacgggaacccaatggtcaaggaagaggttgatcgattggtcgaagaagagatgcgaaagagtatcaagaagccggctgacttcctcaaggatttaccccctcttccctccttcaattttcagcatcacccaatgattggcaaagaatatgagcgcgtcagagcgggtaggccacccgtgacccttgatttttcttcacggtatcaagttgaaccaccgcccatgaataagagaaacgatgaaactgcttggaaacaggcacttcaaagatctcagcgctcattgcaacatcaagtaattaggttggaaaatttggagttgatgttaaaatatggccctgatgtttggagacagaacaaccaacgactgggaggattttggccaggatgcataaacta

SEQ ID NO: 8884 - DNA, 1059 bp, Gossypium hirsutum
  Clone ID: GOSHI-09MAY01-C803_1
cggccccgccgccatcaactcagaacagctcaaaaaagcttccaacattttgaagaaacaaagaatcaaacatgtcgaaggaagtgagtgaagaaggggtgagccgaaaggactatgtggatcctccaccggcaccgctcatcgacgtggctgagatcaagctttggtctttttacagagctctcatcgccgaattcatcgctactctcctcttcctatacgtcaccatagccaccgtcatcggccacaagaaacaacacgatgcatgcgatggtgttggtcttttgggcattgcttgggcttttggtggcatgattttcattcttgtttactgcaccgccggtatctcaggtggtcacattaacccggcggtgacatttgggttgtttttggctaggaaggtgtcgttaataagggcggtggcttacatggtagctcaatgtttgggtgctatttgtggtgttgggttagttaaggcattcatgaagagtgaatacaactcccttggcggcggtgttaacacggtggcgactggttataacaaagggactgctttgggagctgagattattgggacattcgtgcttgtttacactgttttttcagctactgaccctaaaagaagtgcccgtgattcacatgtacccgtgttggctccacttcctataggatttgcagtgttcatggttcatttggctactattcctatcaccggaactggtattaaccctgctagaagcttcggcgccgccgttatttacaacaacgacaaggcttgggatgaccactggatattctgggttggaccaatggtgggagcacttgcggcggcggcatatcatcagtacatccttagagcggcggctattaaggctttgggatctttccggagcaaccccagcaattaaaagctaaaaagagaagaaaaccacaatatgtttgtctcattgtgtttataatgtttcttcattgttggttcctgtgtgtgtattgtattatgattgatgattattaattcagacctttttatttattattctttagaactaaaaaaaaaaa

SEQ ID NO: 8885 - DNA, 395 bp, Gossypium hirsutum
  unsure (1)..(395): unsure at all n locations
  Clone ID: LIB3148-037-Q1-K1-B5
cccacgcgttcgcccacgcgtccgcgccgaattcatcgctactctccttttcctatacgtcaccatagccaccgtcatcggccacaagaaacaacacgatgcatgcatgattttcattcttgtttactgcaccgccggtatctcaggtggtcacattaacccggcggtgacatttgggttgtttttggctaggaaggtgtcgcttataagggcggtggcttacatggtagctcaatgtttgggtgctatttgtggtgttgggttagttaaggcattcatgaagagtgaatacaactcccttggcggcggtgctaacacggtggcgactgggtataacaaaaggactgctnntggagctgagattattggacattcgtgcttgttacactgttttt

SEQ ID NO: 8886 - DNA, 329 bp, Gossypium hirsutum
  unsure (1)..(329): unsure at all n locations
  Clone ID: LIB3197-015-P1-M1-H3
gggtccacccacgcctgcttttttgctcaaaaaagcgggcaacattcngccgggacagttaatcaaacgtggggcacgatgtgacttaccaatggttgatccgtaaggactataaggatcctccaccggcaccgctcattgacaaggctgacatcaagcttaggtctttttacagaggtctgatcgccgaattcatcgctactatccttttcctatacgtcaccatagccaccgtcatcggtcacaagaaacaacacgatgcatgccatggtgtctgtcttattggtattgcttggctcttggtgcatgattacattcttgttactgca

SEQ ID NO: 8887 - DNA, 907 bp, Gossypium hirsutum
  Clone ID: GOSHI-09MAY01-C823_8
attgttcaatcgtctacgctgttagaccgctagggggcagatttaaaccattttttccccaaaactaccagaagacgcagatctttgtgaaaacccttactggtaagaccatcacccttgaggtagaaagctccgatactatcgaataagtcaaggccaaaaaccaagacaaagaagggattcctccagaccaacaaaggcttatctttgccgataaacaactagaggatggccgaactctcgccgactacaacatccaaaaggagcccaccctccaccaagaccttcgtttaaggggtggcaagcagatatttgtgaaaacccttactggcaagaccatctcccccgaggtcgagagccctggacaccactgacaatgtcaaaggccaagatccaggacaaggaggggaatccctccacaccagcacaggctgatctttgctggtacgcagcctggggatgggaggacactcgcggactataacatccaaaaggagtccaccctgcactaggttttgccactgcaaggagggatgcaacatatttttaaacaccttgactgacaaaaccattaccccagcaggcgaaagctcgaacacgatcgacactgtcgaacttaacatccatgacaagagacggattggctacagaacacgcgcactgtattggtgcactaaaggcaggtggagatggggtgacactcaccgactatgacatactaaccgaatccaccctcgctcggtcttttcgccttatacgagcattcatatatcgttcaaaccttgactgcgaaaaccatcaccctgggggctccctatctgggtacccaattgagcgttttacagctcatattcccgacaaagctgggtattgctgcatgaccaacgagtggggcctttgctgggaa

SEQ ID NO: 8888 - DNA, 663 bp, Gossypium hirsutum
  Clone ID: GOSHI-09MAY01-C823_7
gagagctccgacacggttgataatgttaaggccaagatccaagataaggagggtatcccacctgaccaacagaggttgatttttgccggaaagcagctcgaggacgggaggactcttgcggactataacattcaaaaggagtcgaccctgcatttggttttgcgccttagaggagggatgcagatatttgtcaagaccttgactgggaaaaccatcaccctggaggttgagagctcggatacgattgacaatgtaaaagcaaagattcaggacaaggagggaattcccccggatcagcagaggttgatctttgctgggaagcagttggaggacggtcgaaccctagctgactacaatatccagaaggagtctactctgcatcttgtccttcgcctccgtggtggtttctgatttgggtccttttgccattccgcctgggggggggtcttgttttctttttatttcatgatgttcacccattagataacctgtgttttttaaggtaatgatactttggtgtgaagtggttagagacccacaactcacttactatattaaataaggttcggactatttcataatctcctatccaaatatcctttggtgtgaagtggttacagacctccaactcggttctaatattaaataaggtacggcttattt

SEQ ID NO: 8889 - DNA, 979 bp, Gossypium hirsutum
  Clone ID: GOSHI-09MAY01-C823_6
cccacgcgtccgcggacgcgtggggcagatctttgtaaaaacccttactggtaagaccatcacccttgaggtggagagctccgatactatcgataatgtcaaggccaagatccaagacaaggaagggattccaccagatcagcagaggttgatttttgccggagaacaactcgaagatggtaggacacttgcagattacaacatccagaaagagtctaccctacaccttgtccttcgtcttacgggtgggatgcagatttttgtaaaaaccctcaccggaaaaactattacattggacagggagagttctgatacgactgataatgttaaggccaatagtcatgataaggaagggatcccaccggaccagcataggttgatttttgctggaaagcaacttgaaaatggccgaactcttgcggactataacattcagaaggaatcgaccctccatttggtgttacgtctgcgtggcggcatgcaaatttttgtgaagactctcaccggaaagactattacttttggaagttgagagttctgacaccgttgacaatgtgaaagctaagatccaggacaaggaagggattccaccagatcagcagaggttgatttttgctggcaaacagctagaagatggtaggacacttgcagattataatatccagagagagtctacccttcacttggtgctccgactgcgtggtggaatgcagatttttgtgaaaactttgactggaataactatcacattggaggtggagagctcagacacaattgataatgtgaaggccaagatccaagataaggagggtatcccacctgaccagcagagcctgatttttgctggaaagcagctcgaggatgggaggacacttgcggattataacatccagaaagagtctacccttcacttggtgctccgactgcgtggtggaattgcagatttttgtgaaaactttgactggaaaaactatcacat

SEQ ID NO: 8890 - DNA, 1273 bp, Gossypium hirsutum
  Clone ID: GOSHI-09MAY01-C823_5
ggccgcacccttgctgactacaacatccagaaagagtcgaccctccaccttgtccttcggcttaggggtggcatgcagatctttgtaaaaacgctcactggaaaaaccatcactttagaggtggatagttctgatacaattgataaccccacgcccccgattcaggacaaggagggcatcccaccagaccagcagaggttaatttttgctgggaaacaacttgaagatggcagaacccttgcagactataacattcaaaaggaatctaccctccatttggtgttgcgtcttcgtggtggtatgcaagtttttgtgaagaccctcacaggaaagactattaccttggaagttgagagttctgatacgattgacaatgtgaaagctaagatccaggacacggaaggtattccaccggatcaacagaggctgatttttgctggcaagcagctggaggatgggaggaccctcgctgattataatattcagaaagagtcaaccctccacttggtgcttcgcctgcgtggtggaatgcagatatttgtgaaaactttgaccggtaaaaccattacgttggaggtggagagctccgacacggttgataatgttaaggccaagatccaagacaaggaggggattcctccagaccagcagaggttgatttttgccggaaagcagcttgaggatgggaggacacttgcggactataacattcaaaaggaatccaccctgcatttggttttgcgccttagaggagggatgcagatattcgtgaagactttgactgggaaaaccatcaccctggaggtggagagctcggacacgattgacaatgtgaaagctaagattcaggacaaggaggggattcctccagaccagcagaggttgatctttgctgggaagcagttggaggatggtcgaactttagcagactacaatatccagaaggagtccactctgcatcttgtccttcgcctccgtggtggtttctaattgggtgtcttctgcttcttgtcgtaattttcatttctatggaactgtgggtgttatataatgaacactgtgttttgtggtgctgaaatggtcagtgaaccacatctttagttactgtatcgaataaagtttgatgttcaaacattattactgtgttatacttaaatcgagcttagctaagtttgtgtttatattttaagtaatattgaatttctgtattatctcttttgtttcatatattctctccgtggcaatattacggtcagtgaggatggcgtgctct

SEQ ID NO: 8891 - DNA, 1012 bp, Gossypium hirsutum
  Clone ID: GOSHI-09MAY01-C823_4
cggaccgccttcccggtcgacccagcttttggggggcgcttgcggttataacatccaaagggatcaaccctgcacttggtgctgcgactgcgtggtggaatgcagatttttgtgaaaactttgactggaaaaactattacattggaggtggagagctcagacacaattgataacgtgaagaccaagatccaagacaaggagggtatcccacctgaccagcagaggttgatttttgctggaaagcaactcgaggatgggaggactcttgcggattataacatccaaaaggagtcaaccctgcacttggttctgcgccttcgaggagggatgcagatattcgttaagaccctgactggtaaaaccgtaacactggaggtcgagagctcggacaccattgacaatgttaaagcgaagattcaggacaaggagggaattcctccagaccagcagaggttgatttttgccggaaagcagcttgaggatgggaggacgcttgcggactataacatccaaaaggaatccaccctgcatttggttttgcgccttagaggaggaatgcagatatttgtgaagaccttgactgggaaaaccatcaccctggaggtggagagctcggacacgattgacaatgtgaaatctaagattcaggacaaggaggggattcctccggaccagcagaggttgatctttgctggaaagcagttggaggatggtcgaactttagcagactacaatattcagaaggaatccactctgcatcttgtccttcgcctccgtggtggtttctaattgggtgtcttgtgcttgttttcataattttcatttctatggaactgtgggtgttttaagtggcgaaagccattagtagcttgtggtgttgaatgaacacagtgttttgtggtgctgaaatggtcagtgaaccacatctttagttactgtattgattaaagtttgatgttcaaataatattactgtcttatacttctctaaaaaaaaaaaaatggctcgtaga

SEQ ID NO: 8892 - DNA, 923 bp, Gossypium hirsutum
  Clone ID: GOSHI-09MAY01-C823_3
cgattaagtcggcaatctctccctataaataaatcaacaaattcccccaatttcccatccaaatccaattatttcaatagtcttctcttgattccaaatctctcccagaagatgcagatctttgtgaaaacccttactggtaagaccatcacccttgaggtagaaagttctgatactatcgataatgtcaaggctaaaatccaagacaaagaagggatccctcctgaccagcaaaggcttatctttgccggaaaacaactcgaggatggccgaactcttgccgactacaatatccaaaaggagtccaccctccacctagtccttcgtctaaggggtggcatgcagatattcgtgaaaactcttactggcaagaccatcaccctcgaggtggaaagttctgatacaattgataatgtcaaggccaagatccaagacaaggaagggatcccaccagaccaacagaggcttatctttgccggtaaacagcttgaagatggccgaactcttgcggattacaacatccagaaagagtctacccttcaccttgtccttcgtcttaagggtgggatgcagatctttgttaaaacccttactgggagaaccttacccttgaagggggaaattcaaacctttgcaaatggaagggccaaatccaaaaagggaggggttcctcgataaacaagagttaatttttccgggacaaatctaaaatagggtgcactttggattttaaccttcaaaaagatttcccttccactggctttgtatgggggggaacaaaattttgaaaccctcccggaaactttcttggggggaagactctccccattgatatttaggcaatatatgaatgggggcccccccacccaatgttttttcgggaaactttaaaaggcctttttggtaaatactaaagaaacccc

SEQ ID NO: 8893 - DNA, 1396 bp, Gossypium hirsutum
  Clone ID: GOSHI-09MAY01-C823_2
acacggtcctggatgaccggccctcgcccccctctttcagtcgtcttctcttttagtcctctcgatcccaaagcaagctctcgattccgaatctctcccagaagatgcagatctttgtgaaaacccttactggtaaaaccatcacccttgaggtggaaagctccgatactattgataatgtcaaggccaaaatccaagacaaagaaggcattcctccagaccaacagaggcttatttttgccggaaaacaactcgaggatggccgaactcttgccgactacaacatccaaaaggagtccaccctccacctagtccttcgtctaaggggtggcatgcagatatttgtgaaaacccttacgggcaagaccatcaccctcgaggtggaaagttctgatacgattgataatgtcaaggccaagatccaagacaaggaagggatccctccagaccaacagaggcttatctttgcaggtaaacagcttgaagatggccgaaccctcgcggattacaacatccagaaagagtctaccctccaccttgtccttcgtcttcggggtgggatgcagatatttgtcaaaaccctcaccggcaagacaatcaccctggaagtggaaagctccgacacaattgataatatcaaggccaagatccaagacaaagaaggtatccctcctgaccagcagaggcttatctttgctggtaaacaactggaggatggccgcacccttgctgactacaacatccagaaagagtctaccctccaccttgtccttcgtcttaggggtggcatgcagatctttgtaaaaacgctcactggaaaaaccatcactttagaggtggagagttctgatacaattgataacgttaaggccaagattcaggacaaggagggcatcccacctgaccagcagaggttaatttttgctgggaaacagcttgaagatggcagaacccttgcagactataacattcaaaaggagtctaccctccatttggtgttgcgtcttcgtggtggtatgcaaatttttgtgaagaccctcacaggaaagactattaccttggaagttgagagttctgatacgattgacaatgtaaaagcaaagattcaggacaaggagggaattcccccggatcagcagaggttgatctttgctgggaagcagttggaggacggtcgaactctagctgactacaatatccagaaggagtctactctgcatcttgtccttcgcctccgtggtggtttctgatttgggtccagttaaccattctgcctttggtgttgtctggttttctttttatttcatgatgtttagccattaaagtggcaaaaccttctattagttgaaggtccttgtgttttttatttttaaggtaatgatattagttgaagatc

SEQ ID NO: 8894 - DNA, 1893 bp, Gossypium hirsutum
  Clone ID: GOSHI-09MAY01-C823_1
ccccgcgtccgtcaatcgtcttttcttttaatatttgttcaaagctttcgattacaaatccctcgcgaaagatgcagatctttgtgaaaactcttactggtaagaccatcaccctcgaggtggaaagctccgacacaattgataatgtcaaggccaagatccaagacaaggaagggatcccccctgaccaacagaggcttatcttcgccgggaaacagcttgaggatggccgtacccttgctgactacaacatccaaaaggagtccaccctccaccttgtccttcgtctcaggggtggcatgcagatcttcgtgaaaacccttactggcaagacaatcaccctcgaggtggaaagttctgatacaattgataatgtcaaggccaagatccaagacaaggaagggatccctccagaccaacagaggcttatctttgccggtaaacaacttgaagatggccgaacccttgctgattacaacatccagaaagagtctaccctccaccttgtccttcgtcttaggggtgggatgcagatatttgtaaaaacccttactggtaagaccatcacccttgaggtggagagctccgatactattgataatgtcaaggccaagatccaagacaaggaagggattccaccagatcagcagaggttgatttttgccggaaagcagctcgaggatgggaggacacttgcggattataacatccaaaaggagtcaaccctgcacttggtgctgcgactgcgtggtggaatgcagatttttgtgaaaactttgactggaaaaactattacattggaggtggagagctcagatacaattgataacgtgaaggccaagattcaggacaaggagggtatcccacctgaccagcagaggttgatttttgctggaaagcaactcgaggatgggaggacgcttgcggattatagcatccaaaaggagtcaaccctgcacttggttctgcgccttcgaggagggatgcagatattcgttaagaccttgactggtaaaaccataacactggaggtcgagagctcggacaccattgacaatgttaaagcgaagattcaggacaaggagggaattcctccagaccagcagaggttgatttttgctggaaagcagcttgaggatgggaggacactcgcggactataacatccaaaaggagtccaccctgcacttggttttgcgacttcgaggagggatgcagatatttgttaagaccttgactggtaaaaccatcaccctggaggtcgagagctcggacaccattgacaatgttaaagcgaaaattcaggacaaggaggggattcctccagaccagcagaggttgatttttgccggaaagcagcttgaggatgggaggacacttgcggactataacatccaaaaggaatcgaccctgcatttggttttgcgccttagaggagggatgcagatattcgtgaagaccttgactgggaaaaccatcaccctggaggtggagagctcggacacgattgacaatgtgaaagcgaagattcaggacaaggaggggattccaccagaccagcagaggttgatatttgctgggaagcagttggaggatggtcgaactctagctgactacaatatccagaaggagtccacactgcatcttgtccttcgcctccgtggtggtttctaatcgggtgtctattttggttgatttcgcaattttcttttctatgaactgtttgtgttttaaagtgaactatgctttgcggtgcagaaatggtcagtgaaactatatgaataaaggtttatgtttatatttaacagagaagaaaaaaatacaaaaagaataaaatgaaaaaaaaaagagttcaaaaaaaaacaaaaaaaagtaaaaaacaaaaaaaacaaag

SEQ ID NO: 8895 - DNA, 381 bp, Gossypium hirsutum
  Clone ID: LIB3083-100-Q1-L1-C10
gcatcttttatgagagatttggaatcaagagaagacgcagatctttgtgaaaacccttactggtaagaccatcacccttgaggtagaaagttctgatactatcgataatgtcaaggctaaaatccaagacaaagaagggattcctcctgaccaacaaaggcttatctttgccggaaaacaacttgaggatggccgaactcttgctgactacaatatccaaaaggagtccaccctccacctagtgcttcgtctaaggggtggcatgcagatattcgtgaaaactcttactggcaagaccatcaccctcgaggtggaaagttctgatacaattgataatgtcaaggccaagatccaagacaaggaagggatcccaccagacca

SEQ ID NO: 8896 - DNA, 512 bp, Gossypium hirsutum
  Clone ID: GOSHI-09MAY01-C593_2
gccaccaaaaagaaaaacagaaaacaattctgaagtaaccgcttaggaaccttcactcttcagagcatccattgttatccccaagtagctttagtactctaccaccgaaatccaacccttaaaacaataccatttgcagagtggaaatgggcatctacgccatggattttgcactcaaattcaaccattctattttctctactccatacccacctaaaccttcacccaaatgtagatttctaaccgcaagatgctccctccctctctcctctgacggtgccgccactgggttggcagagaggccatggaaggtagcggatgctaggctggttcttgaagatggttctatttggagggccaaatcttttggtgcctctggtacccaagttggcgaagtggttttcaacacttttttaacagggtatcaggaaattctaacagatcctagttacgctggtcagtttgtcttgatgaccaatccacatattggcaataccggagtaaattttgat

SEQ ID NO: 8897 - DNA, 716 bp, Gossypium hirsutum
  Clone ID: GOSHI-09MAY01-C593_1
caccctgcagtcttcgtagcagccgctgtttgtttaagtgtgttgtagccaaaaacccaaaagccagacaccgaataaaaccctaaaagaacaccattttcactgtaaaaatgagcattaaagccatggatttttctctcagaatcaacccatccatttgctttacacaaaacctaccaaaaccttcctccaagcttaggtttctcactgttagatgctctctccctctcacctcggacgatgccgccactgggttggcggagaggccatggaaggttgcggatgctaggctggttcttgaagatggttctatttggaaggctaaatcttttggtgcctctggaacccaagttggtgaagtggttttcaacacttctttaacagggtatcaggaaattctaacagatcctagttacgctggtcagtttgtcctgatgaccaatccacatattggcaataccggagtaaattttgatgatgaagaatcgaggcagtgctttcttgccggtctggtgatcagaagtctaagtatcactacttcgaattggagatgtgcggagacccttggtgattatttagcagaaagaaatataatgggaatttacgatgttgacacgcgcgcaataacccgcagattgaggcaagatggaagtcttattggggttttgagcactgaacaatctagaagtgatgaggtacttttggaaatgtcacgt

SEQ ID NO: 8898 - DNA, 1573 bp, Gossypium hirsutum
  Clone ID: GOSHI-09MAY01-C553_1
acgccccccccccccccaaaaatctctctcagtttcttctttatccccctaaaactcttcagcaatttcccttcgttaaccaaaatgagagagtgcatttcagttcacattggtcaagctggcatccaagttggtaacgcctgttgggagctctactgtcttgaacatggcattcagcctgatggacaaatgccgggtgacaaaacagtcggaggtggggatgatgctttcaacacctttttcagtgaaaccggcgctggaaaacatgtccctcgtgctgtttttttggatcttgaaccgaccgtaattgatgaagttagaaccggggcttatcgtcaattattccaccctgaacagcttattagtggcaaagaagatgctgcaaataactttgccagaggccactacacaattgggaaggaaatagtggatctttgccttgataggatcaggaagctagcagataactgtactggacttcaagggtttttggtgtttcatgctgttggtggtggaactggatctggtcttggatcattgcttcttgaaaggctttcagtggattatggaaagaaatcaaaactgggtttcactgtttacccttccccacaggtttccacatctgttgtagagccttacaatagtgtattgtcaactcattctctgttagagcacactgatgtcgcagttctcctcgataatgaagctatctacgatatttgccgaagatcgcttgatattgagaggcctgcttacactaatctcaacaggctggtctctcaggttatttcttccttgactgcatctttgagatttgatggtgctttgaatgtggatgtgaatgagtttcagaccaatttagtcccataccctagaatccatttcatgttgtcttcatatgcaccagtgatttcagcggaaaaggcttaccatgagcagctatcagtagcagaaatcacaagcagtgcatttgaaccagcttcgatgatggccaaatgtgatccacgccatgggaaatacatggcttgttgcttgatgtacagaggagatgtggtgcctaaagatgtgaatgctgcagtggcaacaatcaagaccaaaaggaccatccagtttgttgattggtgtcccacagggttcaagtgtggcatcaactaccagcctccaactgtggtacctggtggggatttggctaaggttcaaagggcagtttgcatgatttcaaattctacaagtgttgctgaagtgttctcaaggattgatcataagtttgatctgatgtatgcaaagcgtgcatttgtgcattggtatgttggtgagggtatggaggaaggtgagttttctgaagctagagaagacttggctgctcttgagaaagattatgaagaagtgggcttggaatctggtgaaggagatgaagatgaaggggatgagtactaggctagaatatagagtaaaatctgccaatggacttattggtcagctaataaaaatgggttcttttgtttgtcttctctattgtagtatcaaatttcaaaacatgttttaatggatctatgcttaatgtttttttatt

SEQ ID NO: 8899 - DNA, 538 bp, Gossypium hirsutum
  unsure (1)..(538): unsure at all n locations
  Clone ID: LIB3582-025-P1-K1-G3
cccacgcgtccgcccagtttcttctttaccccctaaancctcttcagcaatttccctttgttaaccaaaatgagactgcatttcagttcacattggtcaagctggtaacgcttgttgggagctctactgtcttgaacatgatattcagaacagtcggaggtggagaccatgctttcaacacctttttcagtgaaaccggcgccgggaaacatccccttcgttctaaatttttggatcttgaaccgaccgtagttgatgaagttagaagcgggtcttatcgtcaattattccaacctgaacactttattagtgccaaagaagatgctgcaaataactttgccagaggccacttcacaagtaaccaataagtgttcgaaaagttgggtctttttcttctaaattaaccattttggtgtttcgttcttggattattgcttcttgaaaggctttcagtggattatggtaagaactaaaaactgggtttcactgtttacccttcccacaggtttccacatcttttgtagagccttacaagcgt

SEQ ID NO: 8900 - DNA, 561 bp, Gossypium hirsutum
  Clone ID: GOSHI-09MAY01-C573_1
cccacgcgtccgcccattctgcgtctttccctttttttctcttccgttttctgccctcgtcctgaatgctccaattcttccacgcttccttgcccggggtgaaggggtgaggcccttatcagaaattgttgatctttccagcacatcctcaaagttgaacacaaccatcaatggaccaagagggtcacggattgttggtgaccggggatctagagaaggttcatctgttgctcaatggccacatggggaggaagcaccttattggcttgggcagcaggctcttgaaactgaaagtgctcccagagacaagcagtggtcatcacaactgtcacccaatttggactcaaagcatctctgcaggacatcctcataccccgagcagcagcaaaaccaacatttttctagtgaaccaattctagtttttgattttgatcttcttctacttttcttgtgtttgattttgatcggggaggtaggagtaggggcatcgggtatgatgttaatccttctgtttttttccacttgttaacttttatataaaccgcttgagtattatctcct

SEQ ID NO: 8901 - DNA, 1103 bp, Gossypium hirsutum
  Clone ID: GOSHI-09MAY01-C563_1
aaccaaacagcactcctaacgatttcactttattactattgcaagttaaaacgaaagtcacaacagtgaatggaaagaccagcattttaaaggaaatagtccacatttgttcacaaggtcttaagattactagatttttgttttagtgcagaaaacctcatgaacttaaagcttaagagcttgagcatggtggcggatgtgatcatcaatgaaggtggaaatgaagaagtatgagtgatcatatccaggctgcaaccgcaataacaacggcacattcacactcctacatgcctcctcaaacttgtgcgccagaagttggtctaaaaatttgtcatcctccccctgatcaatcaaaatggtagctgatacattatggaatttttttatcaggcaagtggcatcatattcctcccaagcagctttgtcattgccaagatagtttgtgaatgccttctgaccccaggggcaatttataggattggcaatgggtgcaaaggcagacgctgacttatacttatcaaggtttttcagataaattgtgagagcaccatgtccacccatagaatgaccagaaatagatgcttttgatgtatcaagttgaggaaaattttcactcagaagttttggcagttctttcacaacataatcgtacatacgccagttcttccacttctgttgtgtagcattaagataaaatccagcacctacaccaaaatcccagctgtcagcctctccttccacattcaggcctcttggagatgtatcaggagcaattagagcaacaccctcagcagaagcagcacgttgtgctcctgacttgattatgaaattctcatcagtgcaagtaagcccagagagccagtaaagtatagggaacttgtgggaaggagaagaagaaggagggaagtagatatggaaagtcatggaacagccgagggtgggactgaaatgcttgtatcttttgttgtaccctccaaacatctttgaactcccaatctctgtgggtttggtctccatcttcttcactcactctgcttttccttcacttaccagaaaatgtttctgatttttttttacaccggacgcgtgggcggacgcgtggg

SEQ ID NO: 8902 - DNA, 1132 bp, Gossypium hirsutum
  Clone ID: GOSHI-09MAY01-C503_1
aagcaagcaggactttatacagaagcaatccaccaaaacaaaatctgaaaacttttatctcactgctgatgatcgtagatggttcgtcgccactgcctttgaagaggagaagattcactagcattgattccatggaggctgaatcggccaaggccaagctcgctgctgcaaaagagaaatttggacgggaaattcgtgtttttgaaactgctagtctgcttccaacacaagatggagtgcccaacactgaggagccagatgacttctatgatttcaccgcggaagattattatcgactaatggcaagtaaaaaagaagataagcacttgaaaacaagaaaaatccgagaagcagaagaggctgctcgaagatcaagaataacaaaggctgttgtaaggattcgctttccagataaccacacattagagcttacatttcatccatccgagacacttcagagcttggttgaccttatttctaaattgattgctcgaccagatttgccattctacttatatactacgcctcctaagaagcaaataaaggacatgacacaggatttcttctctgccggtttcattcctggtgcaatcgtgtatttttcatatgatctgccaaaaggtgaggatgctgcagctgcaaattcaggcccctttcttcaggaagagatcatgtctttgaaaggtttggaagtcattgctggagctgagcagccagagtcacttcaatctgcccctgagcctgcttctgccagtgcagtgccatcccctgctgtgcacgagagcaagcctaccgagaaaaaaacctgccaagccaaagtggttcaaaatgtgagcttcggcacatgatctcaacattaatagatttcgagaagcggttaacttgattgtcagatcaaatgataaagtttgttcaatggcagtgactaccgggtgactctatgtgaaggatattaacacttctacaaagtttgatgtgaatattttgctctgttgaacttctttttttacagtttgataattgcttccttttgcttcgatatttcaagcccgtggaactctgagtaaaaatttcatgctgaaaccaatgtccggatatctgggctttagccaaagttcaccatcatttagag

SEQ ID NO: 8903 - DNA, 762 bp, Gossypium hirsutum
  Clone ID: GOSHI-09MAY01-C533_1
cggacgcgtggggcatgacaacccatgaggacgcaacgtctgagacggcagttttctgcggttctatcctaatctactactttcccatccttagcttcaacacattcatttcattcttcatcaatggcttcttctctcaatttaaccactctttctcttactttacccattccccatccccatccccatccccatccccgtccctcctcatccactcgactccctcgtggctcgctccaactcccccaattcaacaaggtgcgcaaagccttgaaactcagttcctctcaaaccatctctgctttcccttcctttgcttccaaggcccttcccgctttctcccctgccccccaaacactccaatcccccactgtctttgcggctaaaggctacaaaatgaaaacccacatggcttcagcaaagcgattcctggtgacaggacgagggaaaatagtaagaaggagagctgggaagcagcatttgttggctaagaagaacaccaagcgtaaattgcgccccgccaaaatgcacgctgttagccggagtgactatgataacgtgattggcgccttgccgtatctcaaagtaaatagaaatgccaagtgaagagttgccatgtgatgagttatttatgttgctttcttgtgatttctcacaattatgttagagaaagttgtgtttattgctttaatctatggtgcacttagtggccattgataaaattcctagttgaattttatttatttcaatcattttggcact

SEQ ID NO: 8904 - DNA, 1561 bp, Gossypium hirsutum
  Clone ID: GOSHI-09MAY01-C453_1
gtctccaccaggccatcgatcagttaaggggaaaaaaaggctaaaaatgggaaaaggagtgagctttttgcttctagcacttgttctctgctatggggtgacagtgacaatgggttacagaggcgagaaacaatggaggaaagaaagagaaaggagggaagaggagatggaacctgaagaagaagaagaagaagaaagtgaaagtagaaagagttggttcttgatgccaaaatcaaggcctgtgatgacaactgatgctggagaaatgaggctggtgagaagccctggagggaggaccgttgataaaccgttgcacatgggattcattacaatggagcctcagtcccttttcatcccccagtatcttgattccagtttgatccttttcgttcgtacaggggaagccagggttgggtgcatttacaaagatgagatggtggagagacgattgaagataggggatgtgtatcatatacctgctgggtcaacattttacattttgaacccaggtgaggggcagaggcttcacatcatctgcagcattgatccctcagagagtttaaatttggatactttccagtctttcttcattggcggaggaacccatccaacatctgtccttgctggttttggtcctgaaactctttctacagccttcaatgtgtcgatgtcgaaattggaggaaataatgagagggcaacaagagggtccaattgtgcatgtgaccaagtttcatgcaccaagcatttggacaaagttgtctcaacttcaagagcaagataggctaaagcaggtgaagagaatgatccagggagaagctgatgaagacgagaaagagtggtcatggtggaaactgtttggtatgttttctgggaatgaaagaagagttttcggggataaagcccccgactcatacaacatctacaagagaaaagccgatttcaagaacgactatggatggagtgttgcagtggatggatccgtttataaacctttcaaacactctggcaccggcgttttccttgtcaatctcactgcgggatcaatgatggctccacatgtgaatcccagagcaactgaatatggcattgtgttaaggggaacaggtagaatccagattgtgtatccaaatggaacattagccatggatgcgagggtaagagaaggggatgtgttttgggtaccaaggtacttggcattctgtcaaatagcatcacgatcaagccctttcgagttctttgggttcacaacaacatcagacaagaaccggcctcagttcctagtgggtgcaaactccctgctgcacaccttcaacaccccagagctggcggctgcatttggtgtgacggaggagaggatgaggcgtttcatcaatgcacaaaaggaagcagttatcctgccatcagcatcagcagcaccgcctgacgaggatttgaaggagagggaagagaaatctgaagatggaggcccaaaggtgataaggaactttggggatcaaatgattatgggttttgattaaatgaattgagttgttgggtttggggtgtgaatgggaatggga

SEQ ID NO: 8905 - DNA, 488 bp, Gossypium hirsutum
  Clone ID: LIB3583-015-P1-K1-E9
agagagtttttattaggatactttccagtctttcttcataggcggaagttcccatccttcttctgtcctgagctggtttaggtcctgaaactctttctactgccttctaagagtcgatgtcgttttaggtagtttttttgtgtgggcttctagagggtccttttgagcatgtgtccttgtttcatgctccttgcatttggtctatgtagtctctacttcttgtgcttgattagctattgctggtgttgtgtttgttcctgggtgttgctgttgttgtcgtgtttgagtggtcttggtggtttctgtttggtatgttttctgggtatgtttgttgagttttcggagattatgcccccgactcatactacatctacttgagtttagccgatttcatgttcgtctatagatggtgtgttgctgaggatggatccgtttataaacctttcaaacactctggcaccggcgttttccttgtctttctcactgcg

SEQ ID NO: 8906 - DNA, 538 bp, Gossypium hirsutum
  Clone ID: GOSHI-09MAY01-C443_1
tcgccttgtgttggttaatttatcttcgaatcttttaaccggcgagctgccggcgtgtctgcgagaaaacgtcgaggaaggggctggttcttatgacgggaactgtttgtccggcgaagaaggaaatcaaatgccttcgagtttctgccataacgaagcgtcggccgccgaagtttcgcctcaaaagttgcggcataaagaacgtaaagccatggctgtgcttgtatcgagtttagtgggagggatcgttggattagcggtgatagctggtttgagtttatggggtttttcagagaagaaatagaacggcggccatgaaaggaccttcaacaaggttgataactgagaagctttcgacagttaatacagcgaagctattatctgatgcaaggtatatatcagaaacaatgaagatgggagcaaacctccctacgtatcgtgcctttgctttggaagaactaaacgaggctactaattatctctctcatccattcatcggtggtgaaccttcacttattcaaatttacataggaaaact

SEQ ID NO: 8907 - DNA, 412 bp, Gossypium hirsutum
  Clone ID: GOSHI-09MAY01-C413_2
gctaaatgccgattcatcttcaccatgtgggactgttcgagcctgaaggaatcttagcccgaaatccctcctcaactccgatttcgacgaagaagggagaagaaatccatggcttgctcgcacggtaccggtgcaaggcgcgtgtacgggggtcgtgctggcgcttggcgtgaggcgtacggaggcgtgcgtacagtcgtacggggctgaaggcacatggaggctgctgttgcggcacaggagaaaaggggggtgacctaggtttctgaaactgttggggaaatgggcctattgggcttgttctgatttgggttttaatattattttgggcttgtaataggtattactttgtaaaaggacattaaatggactttgggttatttatttaccccaaaaaaaaaaaaaagaattc

SEQ ID NO: 8908 - DNA, 455 bp, Gossypium hirsutum
  Clone ID: GOSHI-09MAY01-C413_1
cccacgcgcccgaaccgaagcaacacgcacccaacctgcttattgtcaaatccctaatcccctctgcgaaatgccgattcatcttcaccatgggggactgctcgagcctgaaggaatcttagcccgaaatccctcctcaactccgatttcgacgaagaagggagaagaaatccatggcttgctcgcacggtaaggtcctttcctcttcactttatttgcttttgaaataaaataaaatgaaagaacacaacaaaacaagagaataatcacaaaaagaaagcccgtagatttagatcggaaaatcaccttccgatattggctgtctttttgtattgcctattgtgcgtccaaaaaaatacaatgatcaaatgcttttgctttatagccgaaaatgatagaaaataaatagataaaaatacaaaattctttcttttgcttccgcattgggatatgct

SEQ ID NO: 8909 - DNA, 544 bp, Gossypium hirsutum
  Clone ID: GOSHI-09MAY01-C783_1
accggaatggttgggtcagtccctcccgtccgcccacgcgtccggaatttcttgcaagtttttattttatttttctctcaaattgctcgtgttttgcggtgagtgggactgccttgtgtctttttagcgattgatcttcaattttcttgagatttgaaagttttcaagaggagatgtggttcgcatctgccgccttctagacaagtggaaattctggttttttgcatacaatgagttttgttttcccagggactagaggggatattgaaagcgggttttcaggatttattcctgaacgtccagctgtgcgcatgcctgcagcccgaccagctaattctaattcgctggcctttcttgtcacagctctgttgctgttcatgattttaaactctcatcaaatgtcaccaaactttctgctttggctagtagtgggtgtctttctaatggctacgagtctaatgatgtatgcaacttgtcaacatacttaagctcacgcccgagctcacgctgctgcagctagtgggttgcttggtcatactgagct

SEQ ID NO: 8910 - DNA, 928 bp, Gossypium hirsutum
  Clone ID: GOSHI-09MAY01-C743_1
cggacgcgtggggcagcggtgcgagggtgaatatttggaatgatccgtggataccgggctctgggaatggtcgactgttagttcattctatggatattcaatggatcacggtggagcaacttataactgcagagactcgtacctggaataaagaggtcctttatcgactttttggtgttgaacaggctgagcgtatcatcactatccccattgctgggtgtgggtcttctgatttgcaagtttggaggcatgacgcttctggggaatactcagttaagagtggatataggttcttgattacaagtatgatcaatcagacagtatctgagggttacagtaaaatttttacatcaatttgggatcttcagatccctgctaaaaataaaatccatctttggcgtcttcttaagaactatgtgccgcatttcatgaacttggtgaaaaggcgattacgagcagatccggtgtgccctctgtgcaaatcagagccggaggattctcaccatttattatggcaatgcaatgtcctgcagcagctgtggtctcttttgaaattctcaatgggttctggtgtatttacctcggatggaacaacaaactttgtcagtgcctttctagcaatgaacatgaatgaaaagaaactttgtgctatttcgttataggccttttggtacaagagaaataaactagtcaatgagggtttaaaatttgagctccatgatttggttggttttatccagagctattatcaggatttaagttttgttaaagctaaagatttgactggtggtatgagaaggaatgagctgtggagacctcctatggccgggttataaagctgaattttgatgcctcgtttgcaagtaggtctaatagttctgtttcagcggtgcttgcaagggatctgagggtctaatatgggtgcatg

SEQ ID NO: 8911 - DNA, 438 bp, Gossypium hirsutum
  Clone ID: GOSHI-09MAY01-C773_3
aaaactccaactaataccacccttgctgcacaagttttggttcgaagaacccttgcatggataactggagttgttcttctcatcgcaactctcctgggggtttacttccttctcaatatgccactgacaagggacacacttttatactctaatgtcaagctcgactaagcagtttcgcagcagcctggaattagtagctgcatcaagtataaaatttggctattttcgggtgtcatatggctaagagactgcagatgagacaggaagattgagccttatgatgattgtatctatatgcttttcaaggttagcttgtctttaaccatttgactttatgtagatttcttttttggccttttgtattcaattcttaaatgtttgtttttggtaaatattattttcagaaattccgaataaagaaaaaataatgtagcgttg

SEQ ID NO: 8912 - DNA, 702 bp, Gossypium hirsutum
  unsure (1)..(702): unsure at all n locations
  Clone ID: LIB3582-049-P1-K1-A12
cagcaggatgctgatggttttgataagctaggaatgaggcttctgcttgccacacttccaaagatatttgattcactgcagacagcatatgaaggtcaaattgttggagtttttgtctttaatggggcatctcagccagtatcaaaaccattgataaatgtgatgtttacctctcgtccatctccacgttggttggcagaaacaaaaactccaactaataccacccttgctgcacaagttttggttcgaagaacccttgcatggataactggagttgttcttctcatcgcaactctcctgggggtttacttccttctcaatatgccactgacaagggacacacttttatactctaatgtcaagctcgactaagcagtttcgcagcagcctggttgatccggcgaacaaaatgtcggttttttttaggaattagtagctgcatcaagtataaaatttggctattttcgggtgtcatatggctaagagactgcagatgagacaggaagattgagccttatgatgattgtatctatatgcttttcaaggttagcttgtctttaaccatttgactntatgtagatttcttttttggccttttgtattcaattcttaaatgtttgtttttggtaaatattattttcagaaattccgaaataaagaaaaaaataatgtagcgttgaaaaataaaatttagtttttggg

SEQ ID NO: 8913 - DNA, 500 bp, Gossypium hirsutum
  Clone ID: uC-gsflmaxxa011b08b1
ggcaattcccttggaaaatggtgacaatgtgaaccttcatatgtcaaagaaagtacagggaatttgcatcaaaactgtttgctctgtcccacaatataaggaaagcaatgcaaatgcatgaagatctgtcacaggctttgcatagacctgctgagttgatagtgggttcttttgatgggattaaggctttgcaagagcagcaggatgctgatggttttgataagctaggaatgaggcttctgcttgccacacttccaaagatatttgattcactgcagacagcatatgaaggtcaaattgttggagtttttgtctttaatggggcatctcagccaggatcaagcctgttgatttctggagatcttattatggtgctgatcattacatatctagatttcagaaacctggagaaatagaaggtgaatttgcagagattggagtggagagagttgagaaggaacttttgactgatttccagttatcttgccaaaagggaaact

SEQ ID NO: 8914 - DNA, 638 bp, Gossypium hirsutum
  Clone ID: GOSHI-09MAY01-C763_6
gtgaactgaataaaccgattgacattatattctcaaggttctgacttagtagtgcatctaatatttatcaggttgacatggtaatagttccagcaacaactggacagatgggtgttttgcctggtcatgtccctacaattgctgaactgaaacctggatcttgtcggccgcgtgggcggccgcgtggggggaatgatgtcacaaaatatttccttagcagtggttttgctcttatccatgccaactctgttgcggatattattgctgtggaagcagtgccagtcgaccgccttgacccagccttggtccagaagggtctggctgactttactcaaaagcttgtctcggctacaactgatctggagaaagctgaagcccaaataggtgttgacgttcacagtgctatgaattcagctatcacaggttaatcattttcttaaccagctttggtttaatcctaagactttttttctcatattgcttcccttttttgtatgtgttcatgatcaacaaatgactgagatatctcaagatgcctaaattgttggttttcagagtttggaataaaattttctgaaacaagaagcttgtacttgcaaaaaaaaaaaaaaaaaaaaaaagggcggcgcttttttttt

SEQ ID NO: 8915 - DNA, 917 bp, Gossypium hirsutum
  Clone ID: GOSHI-09MAY01-C763_4
gaaaatctttggtttgtgcttgtggtgcgtcgctctgcttatgcatccaaaaaaacgggtcaacccaattcaaccaacccaatttcctgttctccctccgatctctttcgcaccaattcagagcgattataaggtcataaacttggatcaatggatgggctttttttgattctgcaatgaggttagaagggagaaaatcagcccacgcgtccggtatctgcaagatttatatcagggtgtaacaaaatcacaggcaaagttggtatgcttgatgaaatcatcaattatgttcaatctcttcaatggcaagtagaggtaaaaaaataatggagaaagaacatatggatttgtgtatgaacacaaaaattctttttcatttctagtaattacttaactgctttaagattttgtcctccatgtgaggacatatttatttgttgttattttcttagctaataacaagatgagaacaatatgagaaagaaaaatagaaactactttgatacaattcaaacacataaatagagtagaaaaagaagggtctggccgactttacccaaaagcttggctcggctacaactgatctggagaaaagtgaagcccaaataggtgttgacgttcacagtgctatgagttctgctatcacaggttaattattttcttaatcagctttggttcaatcctaagacttttttttctcatattgcttcccttttttgtatgtgttcatgatcaacaaatgactgagatatctcaagctgcctaaattgttggttttcagagtttggaataaaattttctgaaacaagaagcttgtacttgctgagaaaaacaataattaaaacggtagaaaaaaaactcaaaaaaaaacagatggagaaaaagaaaaaaaggaccgaaaaaaacaccatgtcaac

SEQ ID NO: 8916 - DNA, 946 bp, Gossypium hirsutum
  Clone ID: GOSHI-09MAY01-C763_2
aagccagaaaaatcaaaatccaaataaacgctcagcgcatttccccaatctccaaacccccaaaaatccatcgccaccaagaggaaaaaagtaaaagaaccctaccgacgatgttccggcaagcgtcacgcctcttggctcgaactaccaccccatggaggagaagtcgagcattttcgtcagatctaccagccacacccgctcaagattcgaacttcatcgaatcatggtccaaagtcatacccaacatagaccctcccaagacaccatcttctttcatgacccctcgccccgccaccccttctgctatcccttctaaactcaccgttaactttgttcttccttatgcatctgagctctccgctaaagaggttgacatggtaatagttccagcaacaactggacagatgggtattttgcctggacatgtccctacaattgctgaactgaaacctgggatcttgtcggtgcatgaaggaaatgatgtcacaaaatatttccttagcagtggttttgctcttatccatgccaactctgttgcggatattattgctgtggaagcagtgccagtcgaccgccttgacccagccttggtccagaagggtctggctgactttactcaaaagcttgtctcggctacaactgatctggagaaagctgaagcccaaataggtgttgacgttcacagtgctatgaattcagctatcacaggttaatcattttcttaaccagctttggttcaatcctaagactttttttctcatattgcttcccttttttgtatgtgttcatgatcaacaaatgactgagatatctcaagatgcctaaattgttggttttcagagtttggaataaaattttctgaaacaagaagcttgtacttgctatatctttgctgtttattgttttatccatttcaagtttatttgaaaagtcgacgcggccg

SEQ ID NO: 8917 - DNA, 689 bp, Gossypium hirsutum
  Clone ID: GOSHI-09MAY01-C763_1
ttctttaagaaattccgctgattaaagtagttttattggattgtattttaaatgttggtgactatttgggagtaaattgctggcgcttgtatcgattgggaaggatgatggaattaaagggtactagaagggcaatcttcctcagggttcatgtcaactttgggcaaaagaagtttgcttttgatgtgaaggaatatgaagctcaagaaaggttgaagcagcagatgactattgaaaagatatctctaccacctaatattagttatgggcaacggtgataatactaattgcaatgccttgtgtaaaaaggcattgcagaactctgaaaaggttttgaagcaccagaagcagtatgagtagaagataaaatatttaacacttgaagataaagtgtcatactaaatctaaattaggttgtgaaactctcggagtgcgaaatttatagttataatcctcactctgatgcagatccctttctggagaaatgatcaatgttagaagggagaaaatcagtgaaagaatgaagtatctgcaagatttagtaccaggatgtaacaaaatcacagacaaagctggtatgctgaatgaaatcatcaattatgttcaatctcttcaacggcaagtagaggtaaaaaataatggagaaagaacatatggatttgtgtttaagggaaaaacagaaacttctt

SEQ ID NO: 8918 - DNA, 431 bp, Gossypium hirsutum
  Clone ID: LIB3145-026-Q1-K1-E6
gccaccaggaggaaaaaagcaaaagaaccctaccgacgatgttccggcaagcgtcacgcctcttggctcgaactaccaccccatggaggggaagtcgagcattttcgtcagatgtaccagccacacttgatttggatggatttgaggttgttcatgatgtgatttatttactttcggattgggctaaaggggttattccctttgatactaatactaaggttgatggagatcttggtctttttctcttcaaaattcccctcaaggcaaaagtgtcctgtgaggtgtacatggatagaaataatcagtcaattgttcgtcaagactgctatgctgagtaatgtggtggacagtgctccaatagatgtactagaagtgggaaacagattcggattctgctgtgatttggttcctctttgatgatactgtacatg

SEQ ID NO: 8919 - DNA, 823 bp, Gossypium hirsutum
  Clone ID: uC-gsronu33B016f07b1
ttaaattcccaaaaatccatcgccaccaagaggaaaaaagtaaaagaaccctaccgacgatgttccggcaagcgtcacgcctcttggctcgaactaccaccccatggaggagaagtcgagcattttcgtcagatctaccagccacacccgctcaagattcgaacttcatcgaatcatggtccaaagtcatacccaacatagaccctcccaagacaccatcttctttcatgacccctcgccccgccaccccttctgctatcccttctaaactcactgttaactttgttcttccttatgcatcttagctctccgctaaagaggttgacatggtaatagtatcagcaacaactggacagatggttgctttgccaggtcatgtccctacaatagctgaactgaaaccagggaacttgtcggagcatgaagggaaagatgttacaaaatttttagctaagtcattgttttgggcagaaacaagcctacaatgttgcggattttattagatgaggtagcaggagcagggctttttggggtttctgttttttttcctaaaggaatatccaaattttgggaggaatgccttgaattttcttggctagaaaaagtgttccaacattttttttttttttccgcccttttgttttttacccagctcttttttttggctcaaaccgcccccttttagaaattgaaaaattatttttttttattttaaagtgaaatatttttttattaaaatgggtctctttccctggaagggccaaaaaggcccttttatatttttaaaatgaacctttttctttttaaactcctcttttttttt

SEQ ID NO: 8920 - DNA, 371 bp, Gossypium hirsutum
  unsure (1)..(371): unsure at all n locations
  Clone ID: LIB3147-051-Q1-K1-G7
aaagaatgaagtatctgcaagatttatatcacggtgtaacaaaatcacaggcaaagttggtatgcttgatgaaatcatcaattatgttcaatctcttcaatggcaagtagaggtaaaaaaataatggagaaagaacatatggatttgtgtatgaacacaaaaattctttttcatttctagtaattacttaactgctttaagattttgtcctccatgtgaggacatatttatttgttgttattttcttagctaataacaagatgagaacaatatgagaaagaaaaatagaaactactttgatacaattnaacaacttcaatagcttataatacttgtgaggagtaaaaacaagggcactcttagaattgaac

SEQ ID NO: 8921 - DNA, 644 bp, Gossypium hirsutum
  Clone ID: LIB3582-047-P1-K1-E1
caagaagctggagctagcagcagctggcttccaaatatcccaagattatacaagcctacgctatctaacaaatctgcaaaagcttcatctcattgatttgcccaatttatcctcgcttccagacgagatgtgttgcctaaccaatttgcaaattttacaaatagcaagaattcctcagttcggggaaagatgtcggaaggacattggcgctgattggcataagattgctcacatccccaacattcggttgtaaacaggctattggaggcggtcaaattcacaatattcattgacgctgggcacccttttagctgtttggaatcagccaaattttgaatgaagttccaaacaagaaaaaaggaagttggttcagaatatttggaggttcattgttgcttttggaagagtcgttgttcaagcatgacaattgccagacatattgcatttggaaatgtattattccactttacatggagcttatgaatagcttgactgaacctgaaacttatatatagatgatttatttcatgggtgatgtgtgaatttaaaaaacacacatgttcatagtaggaaccattattgagtgccattgttatacaccatctaagcgttgaatgttgattttcacttgcatagctaaaatg

SEQ ID NO: 8922 - DNA, 549 bp, Gossypium hirsutum
  Clone ID: LIB3829-020-Q6-N6-G8
ctgcaaggctttgctcagagatgaatacactataaactttatagtacaaagaagtgatttaagctttacccctcaaacacttgatgcaacctcacctttatataattaacttttcttccaactcattttagctatgcaagtgaaaatcaacatccagatagtgtataacaatggcactcaataatagttcctattatgaacatgtgtgcttctttaaattcacacatcatccatgaaataaatcatctatatataagctccaggattggtcaaactcttcataagctccgtgtaaagtggaacaataaatttccaaatgcaatatctccgataattatcatgcttcaacaacgagactgttccaaaagcaacaatgaactgttgctaaacagaacttcatttatgtgcatgaatggccattttccatgcttttccagttcaagttcaacaaagggccaaacatagggcatcctcatttgtaatagtaacaaattcccattcccaaacatagagcatcaacctcatcgtcaccaccaaatattctgaagc

SEQ ID NO: 8923 - DNA, 367 bp, Gossypium hirsutum
  Clone ID: GOSHI-09MAY01-C723_3
caattataagttaaaagggcacatcacagaatggcatcttcaccccttcaattctccactccatttcgcactctcctctgcgcggcgccgtcgttacgaaaatcccctcgtcttcctttccatccttcattattctcgccgccccttactcagaagaccctcactttttcgattgggactagagccgtttcggggtccgggaagttttattggagagccaaggcgtcgatggccgggaccgccatggagaaagggaaagggaaagggaaagtcgaagttcttgattccgaggagaatctttcggtttcgctcgctatatacacccgccggtctcgccgcgttgctctccaaagagaaaggacagttt

SEQ ID NO: 8924 - DNA, 1078 bp, Gossypium hirsutum
  Clone ID: GOSHI-09MAY01-C723_2
cccacgcgtccggccgccccttactcagaagaccctcactttttcgattgggactagagccgtttcggggtccgggaagttttattggagagccaaggcgtcgatggccgggaccgccatggagaaagggaaagggaaagggaaagtcgaagtttttgattccgaggagaatctttcggtttcgctcgctaaatacaccgccgatctagccgctaagttctccaaagagaaaggcagtttcaccgtggttttgtctggcggctccctcatcaagtctctcaggaaactagtggaacccccatatgttgatgcgattgattggtcaacatggcatgttttctgggtggatgaaagggttgttcctaaggatcatgatgacagtaactataagctagcttttgatgggttcctatcgaaggtaccgattctccctggtaatgtatacgccatcaatgatgcactgtctgctgaaggtgcagccgatgattatgagacttgtctcaagcacttggtgaagagcaacgtgcttagtgtctcaacagctactgggtttcctaagtttgatctcatgcttctcggaatgggaccggatggacacgtggcttccctctttcctggccatcctctggtgaaggagaacgaaaagtgggttaccttcattaaggactcaccaaaacccgcccccggagagaatcacctttactttcccagttatcaactcatctgctcacattgcacttgtgatctgtggtgcttggtaaagctggtgcggtgcattccgcattgggaaatagtcaaaattccgatccactgcctgttcagatggtttcaccagaaggggatcttgtttggtttttggacaaagatgcagcttccaaactataagttttgaagcctatagcttatctgagttgttactcgagacttactttgagtgtgttaaattggagttaactggtctgagcagtgattgtgctaccggagttcgtctccgctatagttatcgactagcaaccattttcttctttttctcatgatgaaaacatgctatgttcaataaaacgtatttcatggttgc

SEQ ID NO: 8925 - DNA, 1318 bp, Gossypium hirsutum
  Clone ID: GOSHI-09MAY01-C723_1
cccacgcgtccggttaaaagtgcacatcacagaatggcatcttcaccctttcaattctccactccagttctcactctcctattatcatcgccgtcgttacgaaaatccccttgtcttcctttccatccttcattattctcgccgccccttacccagaagaccctcactttctcgactgggactagagccgtttcggggtccggaaaatcccctggtcttcctttccgtccttcattattctcgccgccccttactcagaagaccctcactttctcgactgggactagagccgtttcggggtccgggaagttctgttggagagccaaggcgtcgatgtccgggaccaccatggagaaagggaaagggaaagtcgaagttattgattccaaggagaatctttcggtttcgctcgctaaatacaccgccgatctagcagctaagttctccaaagagaaaggcagtttcaccgtggttttgtctggcggctccctcatcaagtctctcaggaaactagtggaacccccatatgttgatgcgattgattggtcaacatggcatgttttctgggtggatgaaagggttgttcctaaggatcatgatgacagtaactataagctagcttttgatgggttcctatcgaaggtacagattctccctggtaatgtatacgccaattaaagaacatagtgattccactttgttattttctcacagaaattatagttcgttctgggttatttgtgactaaattgatatgctaatgtggtggacatgagaaaggtcagggtctgagaagatagatcatagatgtttctactttgtgcaagttgggtaaaagtaccatgtaaatcagatagcattttgcctcctctactaagaagatggggaaattagtccagcaaactgttctttctattaaagttccattcatttctaccattaaaaatggtcttgttgaggtacatgtactgcatagcagaaagatcagtttgctctttaataacgaattcgattaatttgcttatttttttagtaaaggggtaaaatgcaatttgactcctactactttcaccctgctactttcaccctgcaaggtgctgatgctttgtgctttctttgtggcaggtttgcctgtttaattcattcgaatcatccaaaagatacaagaaagggtcttggtctttgaattgttaatatgaaattgttaaatttttatctccttttttcttaaccaagttctttgccaattctgattctaagatgatgttagtataccattttttcctaggtaacaggttaaaagttcttaaaacatgtt

SEQ ID NO: 8926 - DNA, 520 bp, Gossypium hirsutum
  Clone ID: LIB3582-047-P1-K1-A11
gcattggatagtccgaatggatttaagaagcttcactgggaagagcggtattatcatttgcagatgctgttgaaaaagttggaccagtccgatctagaggattatacccagatgcttcgatcactttctgcagttgaactcagtaaacatgctatagaactcgaaaaaagatcgattcagctctcactggaagaagcaaaagagttgcagcgtgtagccgttttaaatgtcctgggaaaaaccatgaagatagctaaagcaccctcgaatcaaccggatcaatcgtacaaataaaaagtatcacaaggtaaccaatgttgtaagttgtaatagaaaaaccggtgcacaaacgtgcgcacttgttctgatcttcgttctttgtagttgttctgcagttgctggctaatgcggtatttactgtagttttatcttgaaaattccgtgtattttcatagcgaaaaggtacggacagtacacttaaaactgtattgtcatatgtgttctgaaatgatcctttttt

SEQ ID NO: 8927 - DNA, 522 bp, Gossypium hirsutum
  Clone ID: LIB3582-047-P1-K1-A12
cccacgcgtccgaattttgttaaaaaaaatctaaactgtctttctctctctggtcaataaaaagggctttaagaagacgagccattttttttatctataattataatcataattttatgcaatcagaaatcagcggtcgacttgggaaactaactgaggaggaggaggaagaagctgattatgttttactaaatgaaggaaaataatatcatcgggtgagcgaattaaatgtccacataaagaccctgatgatagctatagcactctggaatcaaccggatcaatcgtacaaataaaaagtatcacaaggtaaccaatgttgtaagttgtaatataaaaaccggtgcacaaacgtgcgcacttgttctgatcttcgttctttgtagttgctctgcagttgctggctaatgcggtatttactgtagttttatcttgaaaattccgtgtattttcatagcgaaaaggtacggacagtacacttaaaactgtattgtcatatgtgttctgaaatgatcctttttt

SEQ ID NO: 8928 - DNA, 832 bp, Gossypium hirsutum
  Clone ID: GOSHI-09MAY01-C683_1
gtcatggtgaggaaaacactgaatcaaacacaagctggaaaacgtctgactagagtgatcaacgaaagtggagtctatcgaattagccatggattagcaaagaaaacaggcaccaggacctcaggcaactgataccatattagtaacccaaagaaagcaaaaatgtctcaaagactcaagcttatgattggattactctctggacttgcgggacttgcgggactcaagcaaaaatgtctcttttagttgttaaccgactaaaaagggtgaaaagtgaacctgcagttgctctagcatcttcatcaaccaacaaggatttgcttccacaggtgttctacaaaagtctcctcaaagctacggatggattttcttctggtaatttaattggtgtaggtagctttggctctgtttacagaggaattcttgatcaaagtgaaatcattgtcacagtaaaagtgctgtatttacatcgaacaggagctttaaagagcttcatggctgaatgtgaaactttaagcaatgtccggtaccgcaatcttgtaaagttaataactgcttgctcgagtgttgattttcaaggaaatgaattcaaagctccagtctgagttcatgcctaatgggaatttggagagctggttgcatccaggtccaaatgcaggaggtaatggatcggaatatgatctgcggattttaagcctcccccaaagactaaacattgccattgatgttgcctctgctctagaatatctccatcaccgttgccaaaaaccaatcgttcaccgtgatttaaagcctagtaacatccttcttgactacgatatgactgctcatg

SEQ ID NO: 8929 - DNA, 585 bp, Gossypium hirsutum
  Clone ID: GOSHI-09MAY01-C653_1
ctcaacatataattaagaaattcaatttatgatgacgctaggaggaggtaaagaagacttgaagtcgctggagattgaacttcccggcaacgtcgcggggaagttgaacgtcttgttgacggactccgacgacggaagcgagttctcctatgagggttctgtcgaagaagagaaactggaggagataatgcaagagctttacaaagagatagcatcaacatcaccgcaaccttctgtaacttttccgtcgctgtcatcgtcttcctcttcttcttcttcactgacgttctctcccatcagcgacgttaagatcagtgagagctgtggggcatcaatgtctgactcatcgtccacggtgatggccggcattgcattcgtgggacccaccggtaagttccccgacgtaaaacaagggtcaccggagaaggaattatggataaagggtatggagaggtgtgatgaagaagaaggggaggttggcgatgatccatggctagcaagagttctaggatggggtccattgcaactggtagaatggacttgaagtggaaaaaagccaaagaatggagatgatgatctgttgag

SEQ ID NO: 8930 - DNA, 1721 bp, Gossypium hirsutum
  Clone ID: GOSHI-09MAY01-C663_1
gaagcttgcttcagttgaagcacgcattctacctgcaccatggcttaaatatcatgatacgggtatagagaagaactgccttcctcaagttgggcaatggaatatgatgaataagaaaatggttaatggtgggactgtaaacaactggatctgcataaacttttctcggcaagtccaggatagtgtggcacggaggttttgttatgaccttccacaaatgtgctacatctctggcatggcctttactcctgaaccagtgcttcctccaattagtgctcgtcctgagtatgttgagagggttttgaaaacacggtatcatgatgccatgattaaactgcagccccagaacaaagagcttgacctgcttattgttattcttccagataataatggctctctttatggtgatttgaaaaggatttgtgagactgatcttggtattgtttcccagtgctgcttgactaaacatgtatttagaatgagcaaacaatatttggccaatgtggcattgaaaattaatgtcaaggttgggggaagaaatactgttcttgttgatgcaatatcacgaaggatacctcttgtcagtgaccgtccgactataatttttggcgctgatgttacccatcctcaccctggggaggattcaagcccttctattgcagctgttgttgcctctcaagattggccagaggttacaaagtatgctggcctggtttgtgctcaagctcatcgtcaggagctcatccaagatttattcaagacatggcaggatcccgtaagggggactgtttctggtggcatgattaaggagctcctaatatctttccgacgagccactggacagaagccacagcgcattatattctacagggatggtgtcagcgaaggccagttctatcaagttctgttatatgaacttgatgctattcgtaaggcatgtgcctcgttggagccaaattatcagcctcctgttacttttgttgtggtgcaaaaaaggcatcatacaaggttgtttgctaacaatcataatgatcgccgttctgtagacaggagtgggaatattttgcctggcactgtggtggactccaaaatttgtcacccaacggagtttgacttctacctatgcagccatgctgggattcagggtacaagccgtccagctcattaccatgtgctatgggatgagaacaagtttacagctgatgcattacaatctctcacaaataacctttgctatacatatgcaaggtgcacacgatcagtgtctattgttccccctgcgtactacgcacatcttgctgcattccgagctcggttttatatggaaccagaaacatcagacagtggatcaatgacaagtgccacagctgcagggcgtggaggtggagctgcagctgctggtgggcgtagcacaagaggacctggtgctagtgctgccgtcagacctctgcctgccctcaaggaaaatgtcaagcgtgttatgttctactgttaagggagtgcttgtattttgaacatctgttttgttgggctttgcttcttggaatttcgaacaatatctagtatgtttggggttgcatggattattaaactaaacctgttgaaccttggtgttaaaactatgttaattttatgattattcgcttggaacattaaataatgtcttgtattgtacttgctgttcctttgctactaaagtaactctaaaacccaagttgttt

SEQ ID NO: 8931 - DNA, 606 bp, Gossypium hirsutum
  Clone ID: LIB3584-008-P1-K1-A7
gcgttcgccccgcgtccggggtacaagccgtccagctcattaccatgtgctatgggatgagaacaagtttacagctgatgcattacaatctctcacaaataacctttgctatacgtatgttctttgcctcatctttttctttttgtgaggcagtaatatgatttggtatctgaacttattttaaccttttgcagatatgcaaggtgcacacgatcagtgtctattggtaagttctagtcatccaaatagaaattgagttctgtcttttagttttcgactccttgccccagtttaacaatctttaaactaacaaatgtgtgcagttccccctgcgtactacgcacatcttgctgcattccgagctcggttttatatggaaccagaaacatcagacagtggatcaatgacaagtgccacagctgcagggcgtggaggtggagctgcagctgctggtgggcgtagcacaagaggacctggtgctagtgctgccgtcagacctctgcctgccctcaaggaaaatgtcaagcgtgttatgttctactggtaagggagtgcttgttttttgaacctctgtgttggtggggctttgcttttttggaatttcgt

SEQ ID NO: 8932 - DNA, 554 bp, Gossypium hirsutum
  Clone ID: LIB3825-014-Q1-K6-H4
gcttaaactgcagccccataacaaagagatgacctgcttattgttattcttccagaaataatggctctctttatggtataaattttctggtctgaaatttgtttctttaaaaaagatcatgctgatctctgaatcattctatttcccttgcaggtgatttcgaaaaggatttgtgagactgatcttggtattgtttcccagtgctgcttgactaaacatgtatttagaatgagcaaacaatatttggccaatgtggcattgaaaattaatgtaaaggttgggggaagaaatactgttcttgttgatgcaatatcacgaaggatacctcttgtcagtgaccgtccaactataatttttggcgctgatgttacccatcctcaccctggggaggattcaagcccttctattgcagctgttgttgcctctcaagattggccagaggttacaaagtatgctggcctggtttgtgctcaagctcatcgtcaggagctcatccaagatttattcaagacatggcaggatcccgtaagggggactgtttctggtggcatgat

SEQ ID NO: 8933 - DNA, 171 bp, Gossypium hirsutum
  Clone ID: LIB3582-001-P1-K1-D2
gggagttgctgtgatatgacattaatgtctgtatctgagttttgttgttgaacaattttatgtgggaaggatttcagtggacatccacccttgatatttgtttcatttgtaggcttttactcctgaaccagtgcttcctccaattagtgctcgtccagagcaagtggagaa

SEQ ID NO: 8934 - DNA, 972 bp, Gossypium hirsutum
  Clone ID: GOSHI-09MAY01-C613_1
cccccgcgtccgctcgatctctctctgaaatataattacgatgaggatgagctgtaatggctgcagggtcctgcgtaagggctgcaccgaaaactgcaccattagaccttgtcttcaatggatcaagtcctctgattctcaagccaatgctactctcttccttgccaaattctatggccgagctggtctcctcaacctaattgaagccggccccgaaaaccttcgccctgctatttttaggtcacttttatacgaggcctgtgggcgtgtggtaaatccagtttatgggtcaattgggatgctttggtccgggaactggggtgagtgccaagcagccgttgatgctgtgctaaaaggctcccccataacccaaacttcatcatctttggaatcagttgaagaagagcaaccgatttcccctctcaagacatacgacatccgccatgtcttcaaggacaccaaaccagctgcagcagcagacatcgacaaggtcaagacccgcactcgtttcaagcgatccaggactcgctccaagcgacaggtggttgactcgtggatgagccaactcggaaatggtgacagcaaagaagatgagagcaccttctctgtggagaccgtggagggttcgctggtaaaccacgccaaaaggggtcctatcttgaagtttgaggatagtagtaatgttggcttagaactcactcttgctttgcttcctgaggcgacgcacttaggatgaaataatccacccttaaacaaaaaatgaatcctcctttttttgcttctttcattatagattgaagaaattttggcggctataaaactatcacctctagtttcaacctcatcgtatgatagaatattagaatgctgcaagtattttaaactttgtttcgtttctgtttgggtcaaaaacaaatgttgatgggttctttttattttaaagacagctatatgaagttgatagaattattg

SEQ ID NO: 8935 - DNA, 541 bp, Gossypium hirsutum
  unsure (1)..(541): unsure at all n locations
  Clone ID: LIB3583-042-Q6-K7-D1
tcccgggntcgccccgcgtccgccccgcgtccgctatttttaggtcacttttatacgaggcctgtgggcgtgtggtaaatccagtttatgggtcaattgggatgctttggtccgggaactggggtgagtgccaagcagtcgttgatgttgtgctaaaaggtttgttttttgttttgtggtggtggttttgattatggttggttggggaatttnggtttggatggatntttttattgggtttgggtggggttggttttttgattgttnttgaagtatggnatgtntntttntgnataggtttgtttgttggggttgtgtttttttttttttgtatgtggtggtggggggagngtnggggggnngnttggggtttgtttnggggttttgttttttttttggttgttttttttggttggngggggggtgtttttttgtggggggtgttggtgttttttttttttttttggggggtttttggtgtgggtgttggttttttttttttggttttttggttgggggtgttgttgtttttttttttttt

SEQ ID NO: 8936 - DNA, 1060 bp, Gossypium hirsutum
  Clone ID: GOSHI-09MAY01-C603_1
cccacgcgtccggtttttcttaatgtagaaattcatgttggtttttttttctttttaaaaatataattttcctccattttctagtcttcaaaatggttataggtaatacttgttcactttaaatttttctcttctctacacattgtgggtattttaaaaaaaaaaaaaagatgagaatgtgtctattaccattcaaagattgatttaaaactaattattttgctaaatcatgtttaaaattggaaggattacatttcagaggatcattagatagtaagtccaacagagcaattctctggaatcccctatgtcatgaccttgcttaactgtctcctctctgcctggtatggccttccctttgtgtctaaaaacaacatcttggtatcaacaatcaatgggactggtgcagcaattgagtccatttatgtattgatcttcatcatctatgccccaaaggaagagaaggcttatatatttgggcttttcacttttgttctcactgtttgcacggccgtggcactcatttccctcttttccctccatggaaatggcagaaagctcttttgtggcctagctgccaccattttctccatcattatgtaggcttctcccctttcaatcatgaggctggtgatcaagaccaaaagtgttgagttcatgccatttttcttgtcactatttgtgttcctctgtgggacttcatggtttatctatggtctccttggtcgtgatgcttttgttgctgtccccaatgggtttgggtgtgggctagggaccatgcaactcatcctttacttcatctaccgcaacaacaaggggtctcaggaaattaagaagccaagtggtaatggaacaagcattgagataggtgagaagaaaccccgccaagacaagcagcaacccaatggcaaagtccctcaagatgaacaagtttaaatcttttgtttcaaatttcagtttcctgcatcttaatttcttgtaatgaattgcaaaaaaacccaggttagggatggcaaaaattgtcaattccttgtaatgaaatgcagaatcattttggatt

SEQ ID NO: 8937 - DNA, 609 bp, Gossypium hirsutum
  Clone ID: LIB3825-010-Q1-K6-F8
ctgatatttgggttttggttaaggtttcaacaatggaggttttgcatttcgtgtttggtgtttttggaaatgccactgctttgttcctcttcttgtctccgacgattacatttaagaggatcattagaagtaagtccacagagcaattctctggaattccctatgtcatgaccttgcttaactgtctcctctctgcctggtatggccttccctttgtatctaaaaacaacatcttggtatcaacaatcaatgggactggtgcagcaattgagtccatttatgtattgatcttcatcatctatgccccaaagaaagagaaggctaaaatatttgggcttttcacttttgttctcactgttttcacggccgtggcactcatttccctcttttccctccatggaaatggcagaaagctcttttgtggcctagctgccaccattttctccatcattatgtatgcttctccactttcaatcatgaggctggtgatcaagaccaagagtgttgagttcatgccatttttcttgtcactatttgtgttcctctgtggtacttcatggtttatctatggtctccttggtcgtgatgcttttgttgctgtccccatgg

SEQ ID NO: 8938 - DNA, 490 bp, Gossypium hirsutum
  unsure (1)..(490): unsure at all n locations
  Clone ID: LIB3585-055-P1-K1-C10
cggacgcgtgggcggacgcgtgggcggacgcgtgggcctccatggaaatggcagaanagctgtgtttgtggccttgctgccaccattttctccatcattatgtatgcttctccactttcaatcatgaggctggtgatcaagagcaagagtgttgagttcatgccatttttcttgtcactatttgtgttcctctgtggtacttcatggtttatctatggtctccttggtcgtgatgcttttgttgctgtaagatatatgccaagttcttaaatctcatatattgtttgtgcatcaaaattgagaggcctgccattgtggtgttgtttttttcctaggtccccaatgggtttgggtgtgggctagggaccatgcaactcatcctttacttcatctaccgcaacaacaaggggtctcaggaaattaagaagccaagtggtaatggaacaagcattgagataggtgagaagaaacctcaccaagacaagcagca

SEQ ID NO: 8939 - DNA, 933 bp, Gossypium hirsutum
  Clone ID: GOSHI-09MAY01-C633_1
cggatcctccatctgattcgcttaaaagatatctcaaccatgttgtgcggtcaaactctagaaaggatcagcaagttgagttggtctttgatatcaataaagaagatagcttgaacaacagatttaaagaaattaaggatttgaagacggatgcggttttctcaattgatgatgatgttattttcccttgcacttctgtagaatttgctttcactgtttggcaaagtgcctcagatacaatggtgggatatgttcctcgtatgcattgggtagatcaaaagaaaggagagaataaatacaaatatggcggatggtggtcggtttggtggactggtacatacagcatggtactctcaaaggctgccttcttccacaagaagtatctcaaactttacactgatgagatgcctgcatcacttaaagaatacataaccaagaacaggaattgtgaagatattgcgatgtcatttcttgttgcaaatgccacagatgctcctcccatttgggtgaaagggaaaatatttgagatcggttcaactggcattagcagcctgggaggtcatagtgaaagaagaacagaatgtgtcaacaagtttgtggatgagtttggacgaatgcccttagttccgactgttatgaaggctgtggatagccgctacagttggttttggtgatgcctgagattgcaccattaacacggcttcacattttccacttatttattgctcaatccgcaggttgagatcattccaacactgtttcaattatcccgagtttgtataatatataaattttgttgtacgcttaatgtgttttgagaatagattcgtgccaacacggtttttcaccatttgggactttacaaagtagtacttaactctgatctcctgatttaggaacagattaatcattttagaatgtactgtttttttc

SEQ ID NO: 8940 - DNA, 609 bp, Gossypium hirsutum
  Clone ID: GOSHI-09MAY01-C193_2
atcaatccagttatatatatcaatcaaccatggcaaagctcgctctcctcgtagctactttcgctcttgctttcttcctcgtcaacgcctccatctaacgcaccagcatcacccctggcggcgacgaagaaacctggtcccgacacagtcggcagtcgtgtcaagaccagatatggcggcaaggctacctcccaaactgtcagaggtacatgaacgaagagaccggcagcagccaccaccgatacagcagccactacctcaactcctgctgcgacgagctcgagaacctgagggaggatggccggtgccaaggcttgaaacaggcgttaggacaacagctgaagctgcagggagtacggtgggagagtccagaggctgaagatatgtgtgaagcggcagagacggcactgaataggtgtggtttaggatctaggagatgtgatatgcatagtggaagatggctttagatataaatcctaagaccctaaaatgccaaacgcaaaataagtgtaatgcatgcaatgcatgttgtttggttgttcaccggatgaggtttttgtcgtatatcttacatgaataaagcacattatcgtgtgcattgcgtttagt

SEQ ID NO: 8941 - DNA, 702 bp, Gossypium hirsutum
  Clone ID: GOSHI-09MAY01-C193_1
cccacgcgtccgcccacgcgtccgaatcaatccagttatatatatcaaaaaacgtaccatggcaaagttcgctctcctcgtagccactttcgctctcgctttcttcctcgtcaacgcctccatctaccggaccacggacggcgacgaagaaaactggtaccgacacgatcggcgatcgtgtcaagaccagatatggcagcaaggctacctcccaaactgtcagtggtacatgaacgaacaggccggccgcagccacagcggatatggcacccactacctcaactcgtgctgctacgagctccagaacctaaggcaggattgccggtgccaaggcttgaaacaggcgttaggacaacagctgaagctgcagggagtacggtgggagagtcgagaggctgaagatatgtgtgaagcggcagagacggcactgaataggtgtcgtttagattctaggagatgtgatatgcatagttgaagacggctttagatataaaatctaagacccaaaaatgctaaacgcaaaataagtgtaatgcatgcaatgcatgttgtttagttgttcaccggttgaggtttttgtagtatatctgatatgaataaagcacattatcgtgtgcattgcgtttagtaaaaaaaaaaaaaatatcaagtttaataaatagggaaaaaaaagaaaaagaaaaaaagatataaaaaataaat

SEQ ID NO: 8942 - DNA, 273 bp, Gossypium hirsutum
  unsure (1)..(273): unsure at all n locations
  Clone ID: LIB3582-053-P1-K1-A9
atatatcatataaaacgtaccatggcagagttcgctctcctaaaacccactttcgctctcactttcttcctcatcaacgcctccatctaccggaccacggactgcgacataagaaaactggtaccgacacgatcggctatcatgtcaagaccagatatggcaacaaggctacctcccaaatggggggggtacatnaactaatcaagcccccccaaccacaacnnatatancacccactacctcaactcntcctactacnanctccanaaccta

SEQ ID NO: 8943 - DNA, 423 bp, Gossypium hirsutum
  Clone ID: GOSHI-09MAY01-C153_2
cccacgcgtccgcccacgcgtccgttcaaattcccaataaattgggatgtttgatttcatgctattagctctcaatacttgcaaattatttttgatttgttcaactttacccaatttcaattctatctaaagagcagaaaagaaaattgggttgccgtgagatgaagatcgaggatttggatgacgtggagaatgaagacggcgattacggcgcgaagcagttgcagatagtcagagtggacgacgccaaacgactcctagtcggagccggtgctcgtatcctcttttaccccacccttttgtataatgtcttcagaaacaaaatccaatccgaattcagatggtgggacgaagttgaccagtttcttttgctgggggcagttccatttcccaaggatgttcgacgattgaagcagttgggcg

SEQ ID NO: 8944 - DNA, 833 bp, Gossypium hirsutum
  Clone ID: GOSHI-09MAY01-C153_1
gcgtacattatgattattcgtatcaaagtgagatccacgccctctcgtatcctatcttttccgattgcctcgtaaatccttcagatcttttttaggtttctaattttccaattccatgcataatttctgaattcttcgaaactatcttcatttccatctgtggaagtaaaagaaaatccaattcttggttatcgtgagatgaagatcgaggagttggatgaagtggagaatgatcggcgaaacgacggcgttaagcagctacagatagttagagtcgacgacgcgaagagagttctagtcggagcaggtgctcggatcctgttttacccgacccttttatacaatgttttcagaaacaaaatccaatctgaattcagatggtgggacgaagttgaccagtttcttttgctgggggcggttccgtttcccaaggacgttcgacggttgaagcagttgggcgttggcggggtcatcactctcaatgagccctttgaaactctggtttccacttccttatatcgtgctcatggaattgatcaccttgtaattccaacaagagattatttgtttgctcctacagtttcagatattagtagagctgtggacttcattcataacaatgcatcttgcggtagaaccacctatgtacattgtaaagctggacgaggaaggagtagcaccattgtgctttgctacttagtagagcataagcagatgacacctgctggtgccctcgaatatgttcggtctcgaagacctcgagttttgcttgccccctcacagtggaaggcagctgtggagtacagcatgcaccaacaaccgctactatacac

SEQ ID NO: 8945 - DNA, 448 bp, Gossypium hirsutum
  Clone ID: GOSHI-09MAY01-C143_1
cttgaattttcttcaatgaaataagaaacaattaaactgtttctgtcattgaaatttgctgctattttcagttttctgggaaaagtagaggcaaattttccactttttcgttctgggttgtaaggcaaagaacaagaagagcttcaactgaaacaatggtgaccaaaacagtagatcttcgatcggatacggtaacgaaaccaactgaggcaatgagggctgcaatggcaactgctgaagttgatgatgatgtcttgggtgctgatccgaccgcggcccggttggaatccgaagtcgctaagatcatgggcaaggaagccggtttatttgttgcatcaggcaccatgggtaacctcattagtgttcttgttcattgtgatattaggggaagtgaagtcattcttggtgacaattgtcatatccatatttatgagaatggtgggatttc

SEQ ID NO: 8946 - DNA, 405 bp, Gossypium hirsutum
  Clone ID: LIB3493-001-P1-M1-H1
tgggttctaatatttttgcatttctctttatgcagaaataagaaacaattaaactgtttctgtcaaggaaatttgctgcaattttcagttttctgggaaaagtagaggcaaattttccactttttcgttctgggttgtaaggcaaagaacaagaagagcttcaactggtaaaatatggccgtctctctctatacacacacatgcatatatataatatgcattttttaaacgggtttgtagattttttttaatggatggatttcttgagttttcttgggattagttcaacatgttcttggtatggtataaaattccctcttggtggcagggaaaatttttaccagaagaagaaatgtaaaacaatggtgaccaaaacagtagatcttcgatcggatacggtaacga

SEQ ID NO: 8947 - DNA, 595 bp, Gossypium hirsutum
  Clone ID: GOSHI-09MAY01-C163_2
gatcccccatccctgtcaccgcctctatctcccttaggacaccagcaaagaacaccaaggtacggcggtgatcgtcttagtaaatttggaaccgaaatgacaagcagttacgatgatgttttgttgaaggaagtcatgagttgtttaggaaccatgaatttgtccgaagcatcttcaccaatggctactactgcaaatacgaacattccatggcttgatgtttcattcaaaggagctccttcaatggtaagtccttctggttctggtgaatatttcaatggtggtggtgatgatgagaaaaacaatggaaacggtgtcgttttggatcatgatcttgacctcgggtgggttaatgagctcttgatgtagaggaagaagatcatatgataaatatatatgatcttcaaagtgtatatattttatgtgtgattgggtttaaacaagattgctgatctgattattgttattaaatattttattattgcaaaccaagttgatttcagtttgtaagttctttgaagggatctaatatgatccttttacttgtgtacttttttaacttctgaatattgataaagtcaacctttttattcct

SEQ ID NO: 8948 - DNA, 1338 bp, Gossypium hirsutum
  Clone ID: GOSHI-09MAY01-C163_1
cccacgcgtccgcccacgcgtccgcccgccccgccgtcaacactttattcttctctctccattaatcttagttgaaagagaatcatctttgctttcgcccatgaccactgtttatgacccttcacaccatctcacctccaaaaaattgtgtttcaaggaccttgaaatccctccaagggaaaaagcaactccattgttgccacaacgccgccgccatggaacttccccaccacgaagctaggctccacaaataccttccttccaatgaagacgatgacggcaccgatgatccatacggcaccgaccatttccgcatgtacgagttcaaggtaagaaggtgtacaaggagccgtagccatgactggactgactgtccttttgctcatccaggtgaaaaagcccgccgtcgtgaccctactcggtaccaatactcctccaccatctgttctgacttccgccggggcggtggttgtcctcgcggcgatgactgtgagttcgctcatggagtgttcgaatgttggcttcaccctacacgttacagaaccgaagcgtgtaaagatggtaagaactgtaagcgtaaggtttgtttctttgctcattcgtcacgtgagcttcgtctcttgccggaatcacaaccgccatacaaaaactccgacaagaactataaccattgctgcttgttttgccggtcggttacatcgtcgtcgtcgttgtccccaacaagtactctcttgggtttatctcaattctcgagatccccatccctgtcaccgcctctatctcccttaaaacaccagcaacgaacaccaaggtacggcggtgatcgtattagtaaatttggaaccgaaatgacaaccagttacgatgatgttttgttgaaggaagtcatgagttgtttaggaaccatgactttgtccgaagtaccttcaccaatggctactactccaaatacaaacattccatggcttgatgtttcattcaaaggagctccttcaatggtaagtccttctggttctggtgaatatttcaatggtggtggtgatgatgagaaaaacaatggaaacggtgtcgttttggatcatgatcttgacctcgggtgggttaatgagctcttgatgtagaggaagaagatatatatatatatatgatcttcaaagtgtatatattttatgtgtgattgggtttaaaaagattgctgatctgattattgtttttaaatattttcatattgcaaaccaagttaatttcaatttgtaaggcttttttttaagagatctaatatgtcttccttttttcctcctttggaattttggtggaggccaaacttttgttctcctt

SEQ ID NO: 8949 - DNA, 1011 bp, Gossypium hirsutum
  Clone ID: GOSHI-09MAY01-C133_2
aaaccccccaaaatttctctcctttcttgaattgtttgaacactcttttgtaaaaaaaaaaaaaacacaagttgtgttctttgaaaaattaaggaaactgtgttttttattctagctggaaaaaaaaaaaacatgtatgccgacacagggctgttttttccttacatgcagaactttgctcaagattttcagcagtttgaaggttactgtaaaacccagaaaccgaatgcttcaatgaacaacatggttccgacctcgacgatatcggaatatgatttgggaggagatggtgatttgttcaaagctccggaaccgatcatcgaagaaccaattgtaagccttgatccgatgactgcagccatatcatcattaatctcgtgcggtgaagatgttattacttcacaagaacttaaagccgcacatatcgaatcgtttcaaaacgagcagcttttagaggttttgtatgagtgcgagaaggatatgatggcacaagcagcgattgaaacgccgttggcggcggaggtcattgatgtcaagattcccatggatgaaaactggaatcaagaaaatgaaatgtcgtgtgatgtgacgttctcgaaaagtttagctcaggcagtttaagctcaatggaatggatgcaacaggctgctatcaagcctaacttccttgattttaccggaatggatttcagttctgtttacggaatgaggagagcttttagcgaaggagatatgaagactctcggcaacggtaacgtgagcatcatccactctccggtcgagagaccatcaattgtcagctgctgttctaacgaagatagaaaggaaaagctctcgagataccgcaataagaagacaaagaggaactttggaaggaaaatcaagtatgcttgccggaaggctcttgccgatagtcaaccaaggatccgtggaagattcgcaaggaccgaagaatccgaccactccaagaggtaataaaacggttacagagtaaaacgggaaggaagtagct

SEQ ID NO: 8950 - DNA, 1133 bp, Gossypium hirsutum
  Clone ID: GOSHI-09MAY01-C133_1
ccaaaaccaaaatctctgaagaatcagaggaaagtgtgtgtgatattcgtggggttagaaatgtatgcagagacagggctatttatcccttacatgcagaactttgctcaagattttcagcagtttgaagattactacaaaacccagaaacccaatgcttcaatgaacgacctcgctgaaacctccacgatttctgaatataacctggaaggagaaggtgatctgttcagagctttagagcccatcattgaggaaccgattgtgggccttgattccatgaccgcagccatctcattaatctcgtgcggtgaagatgtcattacttcacaagaacttaaggatgcagatatcgaatcatttcaaaacgagcagcttctcgaggttctatatgagtgtgagaaggatctcatggcacgaggagcgataggaacagcaccggctgcagtcctggatattgatactcccgttgtgaagacggaatgaaagccaaaatcgtgatgcatcattcgaggaatgcgtgagctcggattgtttaagttcaatggaatgcatgcaagaagctgcagtcgagcctaattttctggatttcactggaatggattttgattctgtttacggaatgaggagagcatttagtgaaggcgatataaagacacttggcaacggtgatgtgagcgtcatccattcttccgtcaagtggccattaattgtcagaagctgttcttctgaagatcgaagggaaaagctttctagatacaggaacaagaagactaagaggaattttggtcggaaaatcaagtatgcttgcaggaaggcacttgccgatagtcaaccgaggatccacggaaggtttgcaaagaccgaagtttccgacaactccaagaggcaattatggtctactaattaaacacaatcaccaactttaacccgaacgaagctagtaagtcaaacgaggtaacagaaaactagtagcagtatcaacttggctgaaatcttaagacgggtagggtagtgccgaataagccataaactagctcctaagtcttaattttgttcactgtaataaaactccactttatggatgtatatagtgttttgttcaaataaaatggcacaaaacttgtactttgttc

SEQ ID NO: 8951 - DNA, 588 bp, Gossypium hirsutum
  unsure (1)..(588): unsure at all n locations
  Clone ID: LIB3584-011-P1-K1-E6
gcgtccggtatgtgttacttcgggggagggggaggggggctngtgttttatttattacnncagctgggaaaaaaaaaacatnngtatgccgacacnnagggctgttttttccttacatgcangaactttgnctcaagattttcagcagtttngaaggttactgttaaaacccagaaaccgaatgcttcaatgaacaggcaggggggccgactcttttcttatatcggaatatngatttgggaggagatggtgatttgttcaaagctccagaaccaatcatcgaagaaccaattgtaagccttgatccgatgactgcagccatatcatcgttagtctcgtgcggtgaagatgttattacttcgcaagaacttaaagctgcggatattgaatcgtttcaaaacgagcagcttttagaagttttgtatgagtgcgagaaggatatgatggcacaagcggcgattgaaacgccgttggcggcggaggtcattgatgtcaagattcccgtggatgaaaactggaatcaagaaaatgaaatgtcgtgtgatgtgccgttctcgaaagggttagctcaagtagtttaagctcgct

SEQ ID NO: 8952 - DNA, 276 bp, Gossypium hirsutum
  Clone ID: LIB3148-046-Q1-K1-A1
gtgaagaccaatgaaagcccaaatcgtgatgcatcatttgaggaatgcgcgagctcggattgtttaagctcaatggaatgcatgcaaggagctgcagtcgagcctaattttctggatttcactggaatggattttggttctgtttacggaatgaggagagcatttagtgaaggcgatataaaggtcagccttaaaattttttcggtggtttttgacatttttacttctgggaatgacgtggaagcatttttaggcatttatgtgggatattaattc

SEQ ID NO: 8953 - DNA, 625 bp, Gossypium hirsutum
  Clone ID: GOSHI-09MAY01-C353_1
ccccgcctccgccgcccgcccgcttcttgcatcactgtgcaggcattgagctttcatggcttcttctttccttcttttccttctcattttcctttccgtttcttctttcatccttttatctgaatctcaaaagacttcgaaaccgaacaggttcgttttgcagctgcaaaaagatccgaaaactaaactttatgtgactaacatatacaagagaactccttcacagaaagtcccatttgttgtggacttgaatggaaggttactatgggttacttgtgagaaaagttaccgttcgtccacctaccatgcccctaggtgccgctcgactcaatgctctagagctgacagtcactattgccacatatgctccaccagggacggaccagggtgccataacaacacatgtggggtcatgtcaatgaaccctgtgacaggccttaccgccatgagtgagcttgcacaagatgtgctatcaattcaatccactcaagggtctaacccttggtccaatggttagggtccctcagttcttggtcacttgtgcaccttcccttttactgcatagagggttaccacgtactgttcatggggtggctgtattggaacattgctccatttctctacc

SEQ ID NO: 8954 - DNA, 259 bp, Gossypium hirsutum
  Clone ID: LIB3196-033-P1-M1-C8
tcgcataaagatccgaaaactaaactttatgtgactaacatatacaatgagaacatcccttacagaaagtcccatctgatgtggacttgaatggaagggtactatgggttacttgtgagaaatgttaccgttggtacaatgggtagggtacataaatatttgttcactcgtgcaccttacttcatactgcatagagggctaccaagcactgtgcaaggtgtggctcgacagatgcatatgtctcatgtgctatacgcaa

SEQ ID NO: 8955 - DNA, 893 bp, Gossypium hirsutum
  Clone ID: GOSHI-09MAY01-C363_13
tcctgttgttccttcaagaaattgttttgaagggtttacattgccattgcgaaggggctgtgccgtaaagtccgtagatgtctcagtggtattttccccaggagttgaagaatgtaatggacggggggggggagagtcacaattttgttgtggtgaaaggggggagaaagcggatccctttgaaagttcttgaaagagttcaaaggaagagtcaccggaaagttgaacttctctcgccgatacctaagcctccggctccggaggaagagaaaacagaggataaagagaagtctaagcctgaagacaagaaagaagagcctccggcggcggttgtcacggtggtgttgaaggtttacatgcattgtgaagcttgtgcaatggaaatcaggaaacgtattcaaagaatgaaaggggtggaatcagcggaaccggatctaaagagctcagaggtgacagtgaaaggcccgcgcgtcccgccaaaactggtggagtacgtctacagaagaaccgggaagacggcggtgatagtgaaactagaggcggagacaccgaagacggaagaagaaaaagccaaagatgccaacaaggacgagaaaaaaagtgaagaaagtggcgaaaaagacaagaaagaagccggtggagaagagctagactcaccgagggatgctctttcaggaagaagggtgattgatctcatattttgctattttatgattcacaaaaacaaaagaaagtaatctttggatcaaatatgggaatcatatgagtaatctttttcatgtgtttcagttatgacatatgtttgaaagttatttttgtagtaagttggtacttgatgatggtattaatcaattattgattgctttgtagtggataaagttatttttttatgc

SEQ ID NO: 8956 - DNA, 738 bp, Gossypium hirsutum
  Clone ID: GOSHI-09MAY01-C363_9
aaattaaaaaagaaaaaaaagaaacaaaaagcaaaagcaaagtctctccagagagaaaacaccagagagtagccaagaaagcgaagttccttgataaaaagcttttatttctatcagaaccatcaaagtctttgtactttgaagtaaaaacccagactcagtaatctaatgggggaggaagagaaaaaaccagttgaagagaaaaaaatggaagagaaaaaggttgaagatgatggaaagaaaagtgaagaaaagaaagaaactaaagaagaaaccactccaccaccaccaccaccaccttcacaagagattgtattgaaagtttacatgcattgtgaaggctgtgctcgtaaagttcgtcgttgtctcaaagggtttcaaggagtggaagatgtaatgacggattgtaagagtaataaggtggtggtgaaaggtgaaaaagctgatcctttaaaagttctagagagagttcaaaggaaaagccataaacaagttgagcttctttcacctatccctaaaccaccggctacggcggagggtaaaaaaccagaggaaaactaaaagcctaaatctgatgaaaagaaagaagagcctcaagtaatcatggtggtgttaaaggttcacatgcattgtgaagcttgtgctcaaggaattaagaaacgtattcaaagaatgaaaggggtggaatcagctgaaccagatctgaagagctcagaggtgacagtgaaaggagtgttt

SEQ ID NO: 8957 - DNA, 1251 bp, Gossypium hirsutum
  Clone ID: GOSHI-09MAY01-C363_7
aaaaaaccgaagctaataatataaatctctattctttgaaacccagtttcactaatccaatgggggaggaagagatgaaaacagtatagaataaggaaatggaagagaaaaaggtggaggacgatctcaaccttagtgagaagggttaatttggaggaaaaggcagcaacagaggagacgaaagacgaaaagaaagctgtagaagcgaaagaagaatctcctgttgttccctcaagagattgttttgaaggtttacatgcattgcgaaggctgtgctcgtaaagtccgtagatgtctcagtggatttccaggggttgaagatgtaatgacggattgcaggactcacaaagtggtggtgaaaggggagaaagcggatcctttgaaagttcttgaaagggttcaaaggaagagtcaccggaaagttgaacttctctcgccgatacctaagcctccggctccggaggaagagaaaacagaggataaagagaagtctaagcctgaagacaagaaagaagagcctccggcggcggttgtcacggtagtgttgaaggtttacatgcattgtgaagcttgtgcaatggaaatcaggaaacgtattcaaagaatgaaaggggtggaatcagctgaaccggatctaaagagctcagaggtgacagtgaaaggagtgtttgaaccgccaaaactggtggagtacgtctacagaagaaccgggaagacggcggtgatagtgaaactagaggcggagacaccgaagacggaagaagaaaaagccaaagatgccaacaaggacgagaaaaaaagtgaagaatgtggcgaaaaagacaagaaagaagccggtggagaagaaaaagacgacggcaaagacaagaaacaagagggtaacaacaaagaagcccccgccgccgacgcagctccggcgactgaaggcgctacggaagagaccaaagtggcggtggagctgaagaaaaatgaatattattattacccgccaaggtatgccactgagttttacgcataccctccacaaatgttcagcgatgagaaccctaatgcttgcactggaatgtaaaaaactccaatggttaggggcattattggaattgaaagtattggatcttgctcttcatgtgcccccttgtagaatctccgaacctataatctgcagatggaactgtagaattttgcaaagctttttgtattttatttttgaagtatttataaaaagaatataaataataagacattaatttc

SEQ ID NO: 8958 - DNA, 573 bp, Gossypium hirsutum
  Clone ID: GOSHI-09MAY01-C363_6
caaaatttcgggggtttataagttgctgttgaagtaccccagccgccaaaccgaaatgggtctccaaaacgacatcgatttgctcaatcctccagcagaacttgagaagaagaagcacaaactcaagcgtctagtccagactcccaattccttcttcatggatgtgaaatgtcaaggctgcttcaacatagcaactgtgtttagccactctcaaactgtggtggtgtgtggcaattgccagactgttctttgccagcctacaggaggtaaagctagactcaccgagggatgctctttcaggaaaaaaggtgattgatatggtttttgtcaaagagagtttcacaatgggtcaatttggctcatccttttgttttgatcatcatatatagagatagatagatagatagatagatacaagtgagttttgttggtatgttttaaggatttgattcggatgttgttgcttgatggttttaaatcatcaagtatggatttttattgctgcaagtaatggttttgagttgcatttgttcttttctgaaaaagcggcgccgggtgcgcgcccggcggggg

SEQ ID NO: 8959 - DNA, 522 bp, Gossypium hirsutum
  Clone ID: GOSHI-09MAY01-C363_5
acgacccacgcgtccgaaaatcctctcatagcgccgctgtcgatctttaacctttcataccgcaaacaatggttctccaaaacgacatcgatttgttgaaccctccggccgagctcgagaagaagaagcacaagctcaagcgtcttgttcaatctcccaattccttcttcatggatgtcaaatgtcaaggctgcttcaacataacaaccgtatttagccactctcaaactgtggtggtgtgtggaaactgccagacggttctgtgccagccgaccggcggtagagctagactcaccgagggctgctctttcaggaaaaagggtgactaaatccgatccagcggcaacgattcgaggaagaggttttttttgtatgatcccactctggttatctttttgatgtggtaaaatttgtctcaaatcttcgaagtagaattaaggattttagaatgactattatgtgctattgttcttgatttagtgtggatggtttttggggtttttgttttttgttttgagttgc

SEQ ID NO: 8960 - DNA, 591 bp, Gossypium hirsutum
  Clone ID: GOSHI-09MAY01-C363_4
cccacgcgtacggccacgcggccgcctcccacaagctttgaggtttttttaggttgctcttggaacatttagcagccaaccaaaaatggttctccaaaacgatatcgatttgttgaatcctccagcagagcttgagaagaagaagcacaaactcaaacgtcttgtccagtctccaaattctttcttcatggatgtcaaatgccaaggctgtttcaacataacaacagtgtttagccactctcaaacagtggtggtatgtgggaattgtcagactgttctttgtcaaccaacaggaggaagagctagactcactgagggatgctctttcaggaagaagggtgattgatctcatattttgctattttatgattcacaaaaacaaaagaaagtaatctttggatcaaatatgggaatcatatgagtaatctttttcatgtgtttcagttatgacatatgtttgaagtttatttttgtagtaagtttgttcctaagctttgatacttgatgatggtattaatcaattatggattgtctttgtagtggatgaagtttatttttttatgatatgagtatttggagtaatttttaaaa

SEQ ID NO: 8961 - DNA, 1023 bp, Gossypium hirsutum
  Clone ID: GOSHI-09MAY01-C363_2
tttttatgaaaaaggcacctcagatataaataaggaaattaagcacatttcctacaaaccaaacacgtaaagtaactgagcataattcagggtttttatcttaaaacagactgaaactttagaaatttaactcaattgaattccttgacaagcttattacataaacatacatgcttttattatcgatctctctctacacccaatgaactctcttttttttttccgttttgcaatctttttttgaagggcccaatcagtttacccttacaggtttccttcttgtggcggtgccctttttcataatcgatcacacggaagtggtatgagatcatgcttctggaaatctaaagcctttatctcaaccggtagtagaaactgctttgatccaagtactgcagatcccataattcttcacaaaatacatattacatgggtcaatttcaggaaacaggttaatataaaaccgaaagccatcggggcttatatccctgcatagcaaacctttgatctctgcagttagaagatgctccttggccatggccggagcaatccctaatgtcattgcagcatcagttgggcttataccagttagaagcgcttcaggcttagtcacaagccttttatttctagcaaaaacctcctcatcactgtggaacttgttttggatcaccataactccgctatcaaacttcataagcatcactggaacatcaaatttctcccacaaagaacacgcttgcaacatatcatctggagagatcatttttgtgccacgagcgcgattgaagagacaataggcatctataaggttgatcattccacctgctctctccagtggaattctcacaaaatctgccagctgacgggacaattgttgatggtacagggcacctgcagactcttaagtgactggggatattatgccaacactcaacaaccaatcttgcatctcttcctttgaacccatatcctcatcatttgttccacttgtttaagaactcgttccgaccaaaagcttttgtc

SEQ ID NO: 8962 - DNA, 1215 bp, Gossypium hirsutum
  Clone ID: GOSHI-09MAY01-C363_1
acaccagaataataacttcattaatttgaatgtcctctttgcttacaaaaagcataaaaaaatcataataaagaaaaatcaatattacaggactcaaaagaacaggctttagccagttctagaaaggaatgtttagcgtcaaccacaagataagattgtgaggtcaaagaaatcttcacaattgagttatgcgtgcaacatgaacttagaacaacaaaaggaaggcttaattaagcaaagttgaaaatgctcgcagttattaaaagtatattgatggagatatgccacaatctgggactgatgatgaagaagaagaataagttaatggagataatacatcttctctttaccgcaacttcgaaagaataaacattgttggccgctggaaatccaaagtttcggtctgtgccacgagcacgattgaagagacaataggcatctataaggttgatcattccacctgctctctccagtggaattctcacaaaatctgccagctgacaggacaattgttgatggtacagggcacctgcagactctttagtgactggggatattatgccaacactcaacaaccaatcttgcatctcttcctttgaacccatatcctcatcatttgttccacttgtttgagaactcgttccggacaaaagcttttgtctcattttttctgctagcatcaccatctctttagctttactcatgagagcatttaagtcctgaaaagcatcctgcaaacttttatcagtactctcccacatttcttgctccttccttaaaatacccgccaccccaaccatcctcaccgacccatcactcgagtacaaccctccaccggttcctgtggctgcccctgaacccgaagccgaacctgagccggaacctgaagtctcacgagccccccggcctctcgcccgccaactgtcccaaaacttcaccaaaaacccatcacaatcccccttccctctaatcactgccgtgactacgactgatctcgagcccgaacctgaactggaaccagacccggatcttggatcgaagacccgaccatcggacgagacgaggacttggaagcggatcctaggggagtggaagaccgacttgagagatttttgggaagagaagatgtgggaaatggcagcaagagggatggctgaggcagaagtaggggtggaggcggaagaagaaggtagccagatgaggccggacgcgggg

SEQ ID NO: 8963 - DNA, 521 bp, Gossypium hirsutum
  Clone ID: LIB3829-008-Q6-N6-G4
gaaggatggattggaatgaatgaatgagatgatttcttttaatgggattttgtaggggttgaagatgtaatgatggattgcaagactcacaaataggtggtgaaaggggagaaagcggatcctttgaaagttcttgaaagagttcaaaggaagagtcaccggaaagttgagcttctctcgccgataccggtagtagaaactgccttgatccaagtactgcagatcccataatccttcacaaaatacatattacatgggtcgatttcaggaaacaggttaatataaaaccgaaagccatcggggcttatatctctgcatagcaaacctttgctctctgcagttagaagatgctccttggccatagccggagcaatccctaatgtcattgcagcatcagttgggcttataccagttcgaagcgcttcaggcttagtcacaaggcttttgattctagcaaaaacctcctcatcactatgggacttgttttggatcaccataactccgctatcaaactttctaag

SEQ ID NO: 8964 - DNA, 540 bp, Gossypium hirsutum
  unsure (1)..(540): unsure at all n locations
  Clone ID: LIB3825-030-Q6-K6-C12
ntcgcaaaaaaaaaaaggggtaaaaaaatagaatgaagaaaaaacaccaaaccgacaaaaacaaaaaagggtactacaaaacgacataaaatattgctcaaatcctccagcagaacttagagaagaagaagcacaaactcaagcgtctagtccagactcccaattccttcttcatggatgtgaaatgtcaaggctgcttcaacataacaactgtgtttagccactctcaaactgtggtggtgtgtggcaattgccagactgttctttgccagcctacaggaggtaaagctagactcaccgagggatgctctttcaggaaaaaggtgattgatatggtttttgtcaaagagagtttcacaatgggtcaatttggctcatccttttgttttgatcatcatatatagagatagatagatagatagatagatacaagtgagttttgttggtatgttttaaggatttgattcggatgttgttgcttgatggttttaaatcatcaagtatggatttttattgctgcaagtaatggttttgagttga

SEQ ID NO: 8965 - DNA, 352 bp, Gossypium hirsutum
  Clone ID: LIB3149-059-Q1-K1-B5
gccattttcctggatgcagggctaaacttttggtttttatgcttttaaaattaaaagaacgggtgcatttgtggtttgaaaatgagatacttgggaggcaaaatattttgtttagtgtgtcagaattgtgtttagtttttttccttcaagttgaaatgttttatttttggtgtttttaatcttgtcgtttatttgcttttaagatctagggacgtaccaagcttagctggactcaagctcaagcgtctcgttcagtcccccaattctttcttcatggatgtcaaatgccaaggctgcttcaacataacaactgtgtttagccactctcaaactgtggtggtatgtggtaact

SEQ ID NO: 8966 - DNA, 317 bp, Gossypium hirsutum
  Clone ID: LIB3189-018-P1-K1-E8
aggttgctcttggaacatctagctttcatccaaaaatggttctccaaaacgatatcgatgtgttgatatcctccagcggagcgggagaagaagaagcacaaactcaaacgtcttgtccagtctccaaattctttcttcatgtatgtcaaattccaaggctttttctacttatcttcagattttagccattcttatacactgatttcatgtttattatttaaattaatgaatttttttatttttttttattttcctctgtaatatttacttttttatttttacttatctattttttctatattatcattatatatcta

SEQ ID NO: 8967 - DNA, 414 bp, Gossypium hirsutum
  Clone ID: LIB3083-065-Q1-L1-E6
acgatatcgatttgttgaatcctccagcaggggttgaggggaagaagcacaagctcaagcgtctcgttcagtcccccaattctttcttcatggatgtcaaatgccaaggctgcttcaacataacaactgtgtttagccactctcaaactgtggtggtatgtggtaactgtcagactgtcctttgccagccgactggaggtcgagctagactcactgagggatgctctttcaggaagaagggtgattgatttgctacacaattgctttgaatatgggttcttttttttttttatctttgagatattggtctgaatttcatctttttttttctttttcttttttgtctttgtgcttcaagatgagttggtttttcttgtaagtttaaggatttgatgctaagcttgttacttaatg

SEQ ID NO: 8968 - DNA, 249 bp, Gossypium hirsutum
  Clone ID: uC-gsronu33B147a09b1
ttgactcgtggggtaaagtcaagtgtttcaaatcttgagcttgcccttggggttgaaaggagcctttcagctcacagaaatatgcccccatctttggatcaaatatgggaatcatatgagtaatctttttcatgtgtttcagttatgacatatgtttgaagtttatttttgtagtaagttggtacttgatgatggtattaatcaattatggattgtctttgtagtggataaagtttatttttttatgct

SEQ ID NO: 8969 - DNA, 764 bp, Gossypium hirsutum
  Clone ID: GOSHI-09MAY01-C333_1
cccacgcgtccgcccacgcgtccgcccacgcgtccgcggacgcgtgggagttggtgtgctgtagaatattttgaagatagtggtgccatattacggatgctccttcagcaccttccccttgagacacttcatcatggaagaaccctcctccaccatgcaattctttgttgcaatgcaggagcagtgaaagttctcttggactgtggtgcaaatgtagaatgtccagttaaaaccctgaaaaccgagttctgtccaattcacatggctgcccgtcttggcttgtcagcagcccttcaatccctcattgatgctggttgtgatctgaactccaagacagattctggtgacacagctttgatggtttgtgcaaaattcaagcatgaagaatgcgttgaagtgctgacaatggctggggctgactttggcttagttaacgtctctggtcagtcagctggttcaatcgctcgatcaaaccagtggtccctcagttttcagcaagcagagccttgatgcaatcaaggttggaaagatccccaagtcaagccacctttcagttttttctcctttaatggttgtcgctcaggcaggcgatgttcaggctctaaaagctctgataggaagtggagaagttaatattgattatcaggatggtaaaggtttttcggtagtaatggttgcagccttgaaaggtcacgttgaagcattccgtttgctagtctatgccggggctgatgttaagctgttaaacaaatctggtgagactg

SEQ ID NO: 8970 - DNA, 576 bp, Gossypium hirsutum
  Clone ID: GOSHI-09MAY01-C283_4
gcagcctctagttttggtcattcctagtttatatattgtggaacaaacagtgctttttcccacctttcaagctcagtacatcataatttgtttcatgacccgatctgtcaagtcatgtgtcagatttcgggattgtcttttttgtttgaaaaaaaaaaaataaaaaaaaaaaaaaaaataaccctttcagcgattgacctattagcttatgaaaggcaacttgccatgagcaaaatgggtggcgttcatgctctaatgcaccctcagggacagcatcctctgaagcaagcagcaatgggagtgggtgctgctggagcaagccaggctatatatgatggtttaatttgagttcttaagcataagatttaggagaggcttttttttagcagtgaaggtgcatcctgctttcatctatagcatatggttgcctattgtatccatctttacttatgttttgagattttattgagttttaaacccggctaggaaagctttcttaatgtattatataacccacgtttgatacggtacggactgtttcattggatatatataaagcatatttatagctttctt

SEQ ID NO: 8971 - DNA, 599 bp, Gossypium hirsutum
  Clone ID: GOSHI-09MAY01-C283_3
aagggtaagggtatcaagttatccatcattgaggaagcccacagcacctgggacaagttcaaacccccttcccccaccgccgccacacctttagccgggctttctgccactgaccttttagcttatgagcgacaactagccatgaacaaaatgggtggtgttcacgcactaatgcatcctcaaggacaacaccctctcaaacaagcggcaatgggagttggtgctgctggagcaagccaggccatatatgacggtggattccagaacgtggcggctgcccagcaactaatgtactatcagtgatcaaaactagagtttgtgtggtaattatatatatccttaatttcctggcatttgcaggttttatttgagttctaaagaaaaaagaacatttaggaggctttttaatgtgttcttcctttttttctcttttttttagcagcgagattgctttgcgccccgcttttatttatatatatatatatagcatgcatatgtgtttgcctgattgtatcaatctcacgtatttcttgacattactctgagctctaaacgcccaccaagcttttttttggtttttctcccaaaaaaaccactcg

SEQ ID NO: 8972 - DNA, 629 bp, Gossypium hirsutum
  Clone ID: GOSHI-09MAY01-C283_2
ctttggctattcagatggggaacactcagtcatttttatgtggcaagcaaattaagtgctcttggggcagcaagcctacaccaccggggacaagttcaaacccacttcccccacctgcagctgcacctttaccgggcctttcagcgattgacctattagcttatgaaaggcaacttgccatgagcaaaatgggtggcgttcatgctctaatgcaccctcagggacagcatcctctgaagcaagcagcaatgggagtgggtgctgctggagcaagccaggctatatatgatggtgggttccagaatgttgctgctgcccagcagctattgtactatcagtaataaagatagagtttgtgtgataatatccttatttcctgcatttgcaggttttatttgagttcttaagcataagatttaggagaggcttttttttagcagtgaagctgcatcctgctttcatctatagcatatggttgcctattgtatccatctttacttatgttttgagattttattgagttttaaacccggctaggaaagctttttaatgtattctctcctatatgtttgatacggtacggactgtttcattggatatatataaagcatatttatagctttctctgg

SEQ ID NO: 8973 - DNA, 1721 bp, Gossypium hirsutum
  Clone ID: GOSHI-09MAY01-C283_1
ggtcgaacccccccgtccgggccctcttctctttttccagttttcttcttcttttttctttttttttttccttttttttttcttctctcactttctcgaggcctccatttttgaaccctagctggagaaaaaaaacgtaattttcttggaaaccaaacacttcgattaatttatctccagtcaatcgccgagaaaaaaaatgcagcaccagaggctgaagcaacagcaacaagccttgatgcaacaagctcttcttcaacagcagtctctctatcatcccggcatattagctcctcctcagatagagccaattcccagtggaaatctgcctgctggttttgatccaagcacttgccgcagtgtgtatgtgggaaatatccatacacaagtgactgaaccactacttcaagaggtttttgcaagtactggccctgttgaaggttgcaagcttgtcagaaaggaaaagtcatcgtatggattcgtccactacttcgatcgcagatcagctgctcttgctatattgtctctaaatggaaggcatttgtttggacagcctatcaaggtcaattgggcatatgctagtggtcagagagaggatacatcaggtcactttaacatttttgttggggatctcagtcctgaggttactgatgcaatgctgtttgcatgcttttctgtctatcccagttgttcggatgcgagggttatgtgggatcagaaaactgggcgttcaagaggatttgggtttgtttcattccgcaaccagcaggatgcacaaagtgcaattaatgacttaagtggaaagtggcttggcagtcggcagattcgttgtaactgggcaacaaagggtgctagtagcaatgatgacaagcagagctctgatgccaaaagtgtggtggaacttaccaatggctcatcagaggatggtaaagagacaaccaataatgaggctcctgagagtaatcctcaatatactactgtttatgtgggcaatcttgctccagaggtcacccaactagaactccaccgtcacttccatgctcttggtgctggggtgattgaggaggttcgggtccagcgtgataaaggctttggctttgtgagatacagtactcatgctgaggcagctttggctattcagatggggaacgctcagtcatatctatgtggcaagcaaataaagtgttcttggggcagcaagcctacaccaccagggacaagctccaatccacttccccctcctgcagcaccattacccggtctttcagccactgaccttttagcttacgaacgacaacttgccatgagcaagatgggtggagttcatgctctaatgcacccacagggacagcatcctctgaagcaggcagcaatgggggtgggtgctgctggagcaagccaggctatatatgatggtggatacccgaatgttgctgctgcccagcagctaatgtactatcagtaacatataaagaaataagtggttgtgtggtaatatccttatttcctgcatttgcaggtttttaatttgagttctaaataggaggaggctttttaaatgtattttcccttggatagcagtgagcctgcatgccatcctgctttttatctttatatagcatatgtttgtcgattgtatcaatcttacgtatttccagattttatctgagttctaaaacgtgtaggaagcttcttaatgtactttctcctttatacatttc

SEQ ID NO: 8974 - DNA, 536 bp, Gossypium hirsutum
  unsure (1)..(536): unsure at all n locations
  Clone ID: LIB3585-013-P1-K1-E3
cggacgcgtgggttgaactccactgtcacttccacgcacttggtgctggggtgattgaggaggttcgggtccagcgtgacaaaagctttggctttgtgagatacagtactcatgctggggcagctttggctattcagatggggaacactcagtcatttttatgtggcaagcaaattaagtgctcttggggcagcaaacctacaccaccggggacaagttcaaacccacttcccccacctgcagctgcacctttaccgggcctttcagcgattgacctattagcttatgaaaggcaacttgccatgagcaaaatgggtggcgttcatgctctaatgcaccctcagggacagcatcctctgaagcaagcagcaattggagtgggtgctgctggagcaagccaggctatatatgatggtgggttccagaatgttgctgctgcccagcagctattgtactatcagtaataaagatagtttgtgtgataatgcaggttttatttgagtccttaagcataagatntaggaggctntttttta

SEQ ID NO: 8975 - DNA, 432 bp, Gossypium hirsutum
  Clone ID: LIB3166-004-P1-K1-C2
gtccgggccgacaaagggtgtaagtagcagtgatgacaagcagagctctgatgccaaaagcgtgggggaactaaccaatggctcatcaggtgtgtttattgaagctttaaaatcaaacattcacatttttattgtttcgctaaatttgtgccaaatgtgaaataaacttacatatattagcttgggatacagaggatggtaaagagatgaccaataatgaggctcctgagagtaatcctcaatatactacggtttatgtcggcaatcttgctccagaggcaagtaactataaagatcttcagaactctttctaataaagttttcaaccaatgatgatatgagcttgaaccagctgtccatatttggacctcaagaagtcccatgttctaataccgtttccagtgcttgcaagagttggtcttgtgttctgca

SEQ ID NO: 8976 - DNA, 452 bp, Gossypium hirsutum
  Clone ID: AI729757.1
cggccgcgtcgacggaaaaaaaaggtaattttctcggataccaaacaacccgattaattttccctggaaaatcgccttgtaaaagaaaattagacggaaaatgcagcaccagaggctgaagcaacagcaacaagccttgatgcaacaagctcttatccaacaacagtctctttatcacccaggcatcttagctcctcctcagatagagccaatcccaagtggaaatctgcctcctggttttgatccaagtacttgccgcagtgtgtatgttggaaacatccatacacaagtgactgaaccactactccaagaggtttttgcaagtaccggtcccgttgaaggctgcaagcttgtcagaaaggaaaagtcatcatatggatttatccactacttcgaccgcagatcagctgctcttgccatattatctctaaatggaaggcatttatttggac

SEQ ID NO: 8977 - DNA, 417 bp, Gossypium hirsutum
  unsure (1)..(417): unsure at all n locations
  Clone ID: LIB3583-059-P1-K1-G1
cttttattttatttttccttttctcggngtccccttacacttcgaaccctancanagaaganaggaataaattggggttatgtcctcgcataccaaacatacagatttgtttttccttgaaaatcgccgaggaaaaatgcaacacctgatgctgaagcaacagcaacaagccctgatgcaacaagctctcctccaacaacagtctctctatcaccctgtcatcttagctcctccacagatagagccaatcccaagtggaaatctgcctcctggctttgatccaagtacttgcctcaatgtgtatgttgaaaacatccattcacaagtgactgaaccactactccaagaggtttttgcaagtactggtcctgttgaagggtgcaagcttattataaagggaaaatcatcatactgatt

SEQ ID NO: 8978 - DNA, 315 bp, Gossypium hirsutum
  Clone ID: LIB3146-019-Q1-K1-A2
cggacgcgtgggcggacgcgtgggcggacgcgtgggcggacgcgtgggcggacgcgtgggttcgtccactacttcgatcgcagatcagctgctcttgctatattgtctctaaatggaaggcatttgtttggacagcctatcaaggtcaattgggcatatgctagtggtcagagagaggatacatcaggtcactttaacatttttgttggggatctcagtcctgaggttactgatgcaatgctgtttgcatgcttttcagtctatcccagttgttcggatgcaagggttatgtgggatcagaaaactgggcgttca

SEQ ID NO: 8979 - DNA, 1047 bp, Gossypium hirsutum
  Clone ID: GOSHI-09MAY01-C253_1
cggacgcgtgggtgttccttgactaatctgccttttccttaacaaatctgcaagttttctagcagatcgccacaaagggaattttgaaccttgtggggggttgtttttaatagaaaaggtgaaccatggggaccccggaaacgtcacgggagccatgccctgatcgaattctcgacgacattggtggtgcttttggcatgggtgctgttggaggtgcagccttccacttcttgaaaggcacatataactcccctagtggttctcggttgctcggaggaactcaagcagtgcgtatgaatgcccctcgtgtcggcggtagttttgccgtttggggcggtctgttttccacctttgattgcactatggtctacgtccgacagaaggaagatccttggaactccattatagccggtgctgcaacaggaggttttctttcaatgcgtcaaggatttggtgccgcttcccgatcagccgtgttcggtggcatcttgcttgctttgatcgaaggagctggtatcatgttgaataaagttctcagtcaaccgcagatgcctattatgatagatgagccagcacccaatgtagcaggaatgcctggatatccgatgggacaattgccaaaccaagcgcctgcatcaattgagagtttgagacgcgactcgccaccgccgcctccacaacagtcctcatctaactcttcctcttcatggtttggaggactttttggtggaaagaagcaggaaccggcaacaggtagtggaagtaaaactgaggttttggagagcttcgatgctcctccggtgccgtctttcgaatacaaataaggtggtggcttccccattttgtcacagttaagaacactaatcctgcctttttgtttcagcactttaaagtgtttcagcttactaagcttgcatttttatcattaaattgactcgatagttgttattgctttcttgttcttggatttccctattgcaagatacatgcctatagagctgtttctcatcagtcaaataaaaaacccaatgttgttggattcaaaaa

SEQ ID NO: 8980 - DNA, 602 bp, Gossypium hirsutum
  Clone ID: GOSHI-09MAY01-C243_1
cccacgcgtccgcactgatctctctaaaagagcaaccttctcctcgcatgcgcccttctcctcgctccctgcgcaccgcctgctccattattacgtgccccgcaggctactccaccggctgccctcacttctaaatcttatctaacgctttttctttactcaaaatgggtttagttcgaaaccccgacaataatactgctagtcctgaaacccgaactgcaactcacctctcgtcttctgcttcttacaatgatggcgactgcactgaaacgccgcgtctcagtgaagccttcgattcaacctgctcctctccctacgttagtgcaccatcgagccctggccgtggtcccacctcgggatacttctttagcgcgccggctagtcccatgcacttcattctgtcttcatctccttccccgacgtatcatcttaagtcagagtccttggcgatattgggacaatcagatgcttcgtctttcgagttcgagttctcgtctcgcttctctagcaatgggtctgtaaccgttggatcaatgagttcggcggacgagttgttcttgaacggccagatcaggcccatgaagctctcttctcacttgcaa

SEQ ID NO: 8981 - DNA, 464 bp, Gossypium hirsutum
  unsure (1)..(464): unsure at all n locations
  Clone ID: LIB3585-063-P1-K2-D2
cccacgcgtccgcccacgcgtccgcccacgcgtccgcccacgcgtccgctttagcgcgccggctagtgccatgcacttcattctgtcttcatctccttccccgacgtatcatcttaagtcagagtccttggcgatatcgggacaatcagatgcttcgtctttcgagttcgagttctcgtctcgcttctctagcaatgggtctgtaaccgttggatcaatgagttcggcggacgagttgttcttgaacggccagatcaggcccatgaagctctcttctcacttgcaaagacctcagaatctagctcctttattagatctatacgtcgaggaagacgacnacggtttaaacaagccggaagcatcacgaggaagggatcttaaactgcgaagcagatcttcttacagaaaggcgagatctttatcaccccttcgaaacccggagttccaatgggaagaagaggaag

SEQ ID NO: 8982 - DNA, 771 bp, Gossypium hirsutum
  Clone ID: GOSHI-09MAY01-C273_4
cggacgcgtgggcggacgcgtgggcggacgcgtgggttccactgctcgatctccttacagctaccgtgcgcgctctcacacccgtccactgaatgggtcgtgtcatccgagctcagcgtaagggtgcgggttccgtcttcaaggcccacacccaccaccgcaagggtcccgcccgggggcgcagcctcgacttcggtgaacgaaacggctacctcaagggcgtcgtcaccgatgtcatccacgaccctggccgcggcgcgcccttagcccgcgtcgtcttccgtcacccgttccgttacaagaagcagaaggaactgttcgtcgccgctgagggtatgtacaccggacagttcgtctactgtggtaagaaggccacccttgtggtcggaaacgtgttgcctcttagatctatccccgaaggagctgtcgtttgcaacgtcgagcaccacggcggggatcgtggggttttcgctagggcttctggtgattatgccattgttattagtcacaaccctgataacgacactaccaggtctctaatttcatactcttgttttaattttaattttaatttcgatttatttgctttaattatatgccttgtttatgacaaaggagctctatagaagtggtaaatgcctagaaatagtgacgttgctttaattatccatcgaaacacatgtattggttttagtttgacgaatagtgttcatttagcttctattggttactggcctttacatgtcacatttcattatccttttgtctttt

SEQ ID NO: 8983 - DNA, 1074 bp, Gossypium hirsutum
  Clone ID: GOSHI-09MAY01-C273_3
cctgggccctgtcgtggggtgcgtccgtccactacacacacattactgatgggtcgagtcatccgagctcaacgtaagggtgctggttccgtcttcaagcccacacccaccaccgcagggtcctgctcgtttccgcagcctcgacttcggtgaacggggggggcctcagggtgttgtcaccgatgtcatccacgaccctggtcgtggcgctcctttagcccgtgttgtcttccgtcaccctttccgttacaagaagcagaaggaacttttcgttgccgcagagggtatgtacactggacagttcgtctattgtggtaagaaggctactcttgtggtcggaaatgtattgcctcttagatctatccctgaaggagctgtcgtttgcaacgtcgagcatcatgtcggtgatcgtggggttttcgctagggcttctggtgattacgctattgttatcagtcacaaccctgataacgacaccaccaggatcaagcttccatctggttcgaagaagattgttccgagtgggtgtcgtgccatgattggccagattgcaggaggtggaaggaccgaaaacctcttcttaaggcgggcagtgcataccataagtacagggtgaagaggaactgctggcctaaggtgcgtggtgtggctatgaatccagttgagcatccccatggtggtggtaaccatcaacatattggtcatgctagtactgttaggcgtgatgctcctcctgggcagaaggttggtcttattgctgcgaggaggactggtaggctcaaaagacaagccgctgccaccgcagccaaggctgataaggcttaacgtagggtattacttattgttttagttcttttggcatttatatttaggttcattttgtttgaatttaataatgcttgtgttttcaatttggattgcttattcccaagttctttcatcacttgatgctaatttttccgatccttggttctctcatgtaaccttccataatgctgtttaccaaagcacttggatgttggggaactgtaaggcgaaaaggtggcctatggaacccgtatcataaaatatttc

SEQ ID NO: 8984 - DNA, 1178 bp, Gossypium hirsutum
  Clone ID: GOSHI-09MAY01-C273_2
atcacgccacgtctgtccgtcccacgcgtccgcaacccctcctatccctttttcactaagctctctctccccatcgtccgcctccaagagaagacagagaggtctcctcacaaccaccgtaatgggtcgtgtcattcgagctcaacgtaagggtgccggttcggtcttcaaggcccatacccaccaccggaagggtcccgcccgtttccgcagcctcgacttcggtgaacggaacggttacctcaaaggtgtcgtcaccgacgtcattcacgaccctggccgtggcgctccgttagcccgcgtcgttttccgccaccctttccgttacaagaaacagaaggaattgttcgtcgccgccgagggtatgtacaccggacagttcgtgtattgtggtaagaaagctacccttgtggttggaaatgtgttgccccttagatctatccctgaaggagctgtcgtttgcaacgttgagcaccatgttggtgaccgtggggttttcgctagagcttctggggattatgctattgttattagtcacaaccctgataatgataccaccaggatcaagcttccatctggttctaagaagattgttccaagtggctgtcgtgcgatgattggccaagttgcaggtggtggtaggactgagaaacctctcctcaaggctggtaatgcttatcacaagtttagagtgaagaggaactgctggcctaaggtgcgtggtgtagctatgaaccctgttgagcatccccatggaggtggtaaccatcaacacatcggtcatgctagtactgttaggcgtgatgctcctcctggacagaaagttggtcttattgctgctaggagaactggtaggctcagaggacaagctgctgctacagctgccaaagctgacaaggcttaggcttaggcttaggcttaggatattacttgctgtaattttagttcttttggtcttcagattttacattcaagagtgtttaagacctttatgcttgaaaatgtgtttgaattatcagatattggtactgttttgagttgtttgagcaatgattttgtttttgattcggatttttacccatgtttttggtatttgttggtttcggcttttaccccctgttttatggtcgagtttttttgaatcgagttattaggtatgaaatattttggatttttgt

SEQ ID NO: 8985 - DNA, 1104 bp, Gossypium hirsutum
  Clone ID: GOSHI-09MAY01-C273_1
tcgcccacgccctcccgctcaacctccattttgcccatttcactgctctcccctagatcgtctccaagagagagatctccttacagctaccgtacacattcacacacacattcactgaatgggtcgagtcatccgagctcaacgtaagggtgctggttccgtcttcaaggcccacacccaccaccgcaagggtcctgctcgtttccgcagcctcgacttcggtgaacgaaatggctacctcaagggtgttgtcaccgatgtcatccacgaccctggccgtggcgctcctttagcccgtgtcgtcttccgtcaccctttccgttacaagaagcagaaggaacttttcgttgccgccgagggtatgtacactggacagttcgtctattgtggtaagaaggctactcttgtggtcggaaatgtattgcctcttagatctatccctgaaggagctgtcgtttgcaacgtcgagcatcatgtcggtgatcgtggggttttcgctagggcttctggtgattacgctattgttattagtcacaaccctgataacgacaccaccaggatcaagcttccatctggttcgaagaagattgttccaagtggttgtcgtgccatgattgggcaggttgctggaggtggtaggactgagaaacctctgcttaaggctggtaatgctttccacaagtatagagtgaagaggaactgctggcctaaggttcgtggtgtggctatgaacccagttgagcatccccacggaggtggtaaccatcaacacattggtcatgctagtacagttagacgtgatgctccacctggacaaaaggttggtcttattgctgcaaggaggactggtaggctcagaggacaagctgctgccactgctgccaaggccgataaggcataataggatactactagttgttttggcgtttatattgacatcaatgactgttaaagcacacatttaagctagaaattttgtttgaaatttcagatatggtactgttttggagtttggatgacagttgtttatgttttcgagtttgggtttttatgtgaaagtgttttatgccagtgtttccaaaaaaaaaacaaaaaaaaaaaaaa

SEQ ID NO: 8986 - DNA, 383 bp, Gossypium hirsutum
  Clone ID: LIB3189-047-P1-K1-A6
ctccattttgcccatttcactgctctcccctagatcgtctccaagagagagatctccttacagctacgcgtacacattcacacacacattggctgaatgggtcgagtcatccgagctcaacgtaagggtgctggttccgtcttcaaggcccacacccaccaccgcaagggtcctgctcgtttccgcagcctcgacttcggtgaacgaaatggctacctcaagggtgttgattacgatgttatacacgactctggccgtcaagcttcttgtggcgctgcttaacaattccaacattgtgttgaccggttttgcaccaacggtcaatgctttcttcaggcttaattctgtcacattgtattcattcaccgatgataaaatagtgc

SEQ ID NO: 8987 - DNA, 541 bp, Gossypium hirsutum
  Clone ID: uC-gsronu33B046d05b1
gtttttagttacaaccccgataatgataccaccaggatcaagcttccatctggttctaagaagattgttccaagtggctgtcgtgcaatgattggccaagttgcaggtggtggtaggactgagaaacctctcctcaaggctggtaatgcttatcacaagtttagagtgaagaggaactgctggcctaaggtgcgtggtgtagctatgaaccctgttgagcatccccatggaggtggtaaccatcaacacatcggtcatgctagtactgttaggcgtgatgctcctcctggacagaaagttggtcttattgctgctaggagaactggtaggctcagaggacaagctgctgctactgctgccaaagctgacaaggcttaggcttaggatattacttgctgaaatttaggtctttgggctttatatttacatttcaaagttttaagacccttatgctgaaatgggttggattaccagaaattggactgttttagttggttgagcaatgatttgtttttattcggattttactcatggtttggat

SEQ ID NO: 8988 - DNA, 289 bp, Gossypium hirsutum
  Clone ID: uC-gsflnu33B089e05b1
tttactcttgggcggacgcgtgggtctatccccatcgtctgcctccaagagaagacagagaggtttcctcacaaccaccgtaatgggtcgtgtcattagagcttaacgtaagggtgccgattaggtcttgaaggcccatacccaccacctgaagggtaccctccaattctttagtctcaactaacgtgaacttgacgggttcctaaaaggtgagggtaccgcctttattaactacattggacatggggctgcgttggcgctcatgatttacccagacgcaatccgttac

SEQ ID NO: 8989 - DNA, 273 bp, Gossypium hirsutum
  Clone ID: uC-gsronu33B039f06b1
catcattttgcccatttcactgctctcccctagatcgtcttcaagagagagatctccttacagctaccgtacacattcacacacacattcactgaatgggtcgagtcatccgagctcaacgtaagggtgctggttccgtattcaaggcccacactcaccactctcaaggtttctgcttttttttttatgtctgacttatcttacctattttcttttcttttagcttttcctttcctacgtctctcctgttttttattatcttctcttctcttt

SEQ ID NO: 8990 - DNA, 843 bp, Gossypium hirsutum
  Clone ID: GOSHI-09MAY01-C263_3
tctagatcgcgagcggccgcccgcgatctagatcttcccacgcgtccgatggaaaaaagtgaaaagggtaatggtgttgctcctgctacaaggtctccaagggctttaatgcgctcatctagaaatgaaaaccaagaagtgaataccagcatgagaactgccgagaccatgctgcggttggtgcctatggctttaggggttgctgcacttgttgtcatgctcaaaaactcacagtccaatgactttggctccgtttcatactcagatcttggtgctttcaggtacttggtgcatgctaatggtatttgtgcaggctattcccttctttcagctattatagcagctgtgcctagtccttctactatgcctagagcttggactttcttcctactcgatcaggtcacctaattaaacttcctttttcattaacatcaagtcatcaaccatttataccagctaataacatcatagtaatttcagattctaacatacgtaatcttgggagctgctgctgtttcaaccgaggtgctttacttagcaaacaaaggagactcagccatcacttggagtgcagcttgtgggacatttgctggttgctgtcataaagccacaatagccgtggtcatcacgtttgttgcagtcatttgttacgcggtgctatcactggtctcttcttatagacttttcaccaagtttgatgccccagtgaactaccccagtaagaccattgaagctactgttttccatggttgatttatgttattactgaaattaatttaccttatattttcacattctgcttgtaataataacaaaaaaggttgcttgcagtgtgtttatgtt

SEQ ID NO: 8991 - DNA, 819 bp, Gossypium hirsutum
  Clone ID: GOSHI-09MAY01-C263_1
cgcgcgattttccacttaaaccagcaacaagaaccaaaaagggcaagagctggggctaatggaaaaaagtgaaaagggtaatggtgttgctcctgctacaaggtctccaatggctttaatggggtcatctagaaatgaaaaccaagaagtgaataccagcatgagaactgccgagaccatgctgcggttggtgcctatggctttaggggttgctgcacttgttgtcatgctcaaaaactcacagtccaatgactttggctccgtttcatactcagatcttggtgctttcaggtacttggtgcatgctaatggtatttgtgcaggctattcccttctttcagctattatagcagctgtgcctagtccttctactatgcctagagcttggactttcttcctactcgatcagattctaacatacgtaatcttgggagctgctgctgtttcaaccgaggtgctttacttagcaaacaaaggagactcagccatcacttggagtgcagcttgtgggacatttgctggtttctgtcataaagccacaatagccgtggtgatcacgtttgttgcagtcatttgttatgcggtgctatcactggtctcttcttatagacttttcaccaagtttgatgccccagtgaactaccccagtaagaccatagaaactactgttttccatggttgatttatgttattactgaaattaatttaccttatattttccatgttactggcttgtcaataaataatacaacaagaggtctgccttaccagttgtgttttatgttatatgattaaataagaggtgttgcctttggtgct

SEQ ID NO: 8992 - DNA, 500 bp, Gossypium hirsutum
  Clone ID: LIB3189-052-P1-K1-F7
acgcgtaacaacagagatacctgacccacgtttgaaaggctacattgcatacaaagagatgcagataatggcgtacctagcaaaggagtgcttggtggtggaccctgatgctcgaccgacaatcagtgaagttgttcaaatcctctcaactattgctccggataaatctaaaagaagaattgttcatgtcaactttctccagatgtcatctgcccataacatgaagaatgaaactcttgtagaaagacatcaaagtgtaattgaggctttatacgacacagatgagtacatgccaactgaatctacaaactcaaccgaaatctcactgccattacgcacagacggtattggaactgttggaaaacaaagggataccctttctgctgagtgcttagagagactggttcttttgagttccaatactaggaggttgggtgtccctgatgatgaagcagtggacttaactgaacctcgacttgaatccttcgatgtggcaaata

SEQ ID NO: 8993 - DNA, 496 bp, Gossypium hirsutum
  Clone ID: LIB3189-052-P1-K1-F2
gcgaaaaaagtgaaaagggtaatggtgttgctcctgctacaaggtctccaatggctttaatggggtcgggtagaaatgaaaaccaagaagggagtaccaccatgagaactgccgagaccatgctgcggttggtgcctatggctttaggggttgctgcacttgttgtcatgctcaaaaactcacagtccaatgactcagacttcatttgatactaacatgtagaatgtaacacttgcttgaagacatctaagtgtaattgaggctgtatacgacacagatgagttcatgccaactgtatctacaaactcaaccacaatctcactggcattacgcacagaccgtattggaactgttggaaaacaaagggataccctttctgctgagtgcttaaagagactggttcttttgagttccaatactaggagtttgggtgtccctgatgatgaatcagtggacttaactgaacctcgactcgaatcgttcgatgtggcaaata

SEQ ID NO: 8994 - DNA, 456 bp, Gossypium hirsutum
  Clone ID: GOSHI-09MAY01-C38960_1
acgttcacgtcttccgcccacgcgtccgcatcgttctaacagcgaaggttgtagaagcagctgtgtgagcgtcctaagctacctagggtttccttcattcgaaaatgatttacgacgtcaattctcctctcttccgttctttcctcagccagaagggaggctcctccgacaagagaaaaatggaggagcagaagcctaaggaacagagacccaaagcaaatgagaataagcctgtcatgacagagtaacagctgcttttgtttagtatgcatggcaagttggtggatggttgttcttagaactctgatatgttcaagattgaaaatgcttgttgatgtattcaaatactgtcataacggtttttctttgagatggaatgatattcaactttgtggatgataaataacatataaatttttggtatgatagggttttttttttttattatttaatttt

SEQ ID NO: 8995 - DNA, 365 bp, Gossypium hirsutum
  Clone ID: LIB3147-017-Q1-K1-G10
tatcgttctatcttttaacgttgtttaacacccgcgtgagcttcctaagctgcgcagggtttacatcatgtcgggggggatttacaacgtcaattctcctctcttccgctctttcctcagccagaagggaggctcctccgacaagagaaaaatggaggagcagaagcctaaggaacagagacccaaagcaaatgagaataagcctgtcatgacagagtaacagctgcttttgtttagtatgaatggcaagttggtggatggttgttcttaaaactctgatatgttcgagattggaaatgcttgttgatgtattcaaatactatcacaacgatttttcttctttgaaatggaatgatattcaactt

SEQ ID NO: 8996 - DNA, 738 bp, Gossypium hirsutum
  Clone ID: GOSHI-09MAY01-C38540_1
gtttggtgcatatatctgatttttaaccagattgttgataccaacattccaccatcccatccatcccttctctgtttttgactgtcactctctcaagcacacaagttagcagtgggtgtgctttctttgccttcccttttccagtgtttttctgaatatctctcccttcatgtggtctttaccttccttatttcttgcatcattttctgctattaaaaacccccaaatcctaaacagaaagatcactactttcaaatctgtctgtcattgaactcgttataatcccaaaaggagtcatttttataccttttttttttgggagggggagtgtgtacccttatgaagaaggatctgcgttcacattggagtttaaggaagatggtgactagaaatgggatgttatacccaattcttggatttgcatcatgtgtggcttttctttacatgtcttttggtgacttgaagcttagtgctaatttcaccaagggaccgaggtttagttttgtggaaaggaatgggactcaattctttttgaatggtaaacccttatacattaatggatggaattcttactggttaatggcccattctgtggacgaaagcagtagacctaaggtcagtgcaatgttgcaagctggtgcaaaaatgggtcttactgtttgtagaacttgggcctttaatgatggaggttataatgctctccagatttccccttgccaatttgatgagcgagttttc

SEQ ID NO: 8997 - DNA, 419 bp, Gossypium hirsutum
  Clone ID: GOSHI-09MAY01-C38460_1
ggcaggatgatagatctggtccacaaggtcatgtgctcgcattcagaggatgaattgaactcagagagtttgccaccaaaggtgatagaacaaggtggagagcctgacaattttgttcctgagaaacaggatttaggtgtgaaacctgaattccttggccagggtggatttcctgaagtaaaattttcatcaacatctagcccttgggaggatccagttggaatgccccccgagtggacaccacctaatgttagtgtacctttgctgaatctagttgataaggtgtttcagctgaagagaagaggctggctaagaagacaggtcttttggatatctaagcaaatattacagctggtgatggaggatgccattgatgactggcttttgaggcagatttattggcttcggagggaagacac

SEQ ID NO: 8998 - DNA, 446 bp, Gossypium hirsutum
  Clone ID: GOSHI-09MAY01-C38430_1
tttttgtggcgaggttctttgtcctgatgaggtatatttcttttcatggcgataagttggattcctagaagtgaccacaagcaacccatataagtattaacaaaagaatatctgcactggttcatactgataccttggttcgaaaaccgcggacatttcctgaaaatgtgatggcaatcttcttcccaataaccacaacgaggacaaacggcgtccgtcactattcttctatatcttagattggctagagtagagatgtaattccatgcaatacgccagattatgactgtaatcttagatggtagttgtagattctatagctttccaaaaaaacttcttattttcggtctgtaataaataattgctaggctccacattgcaaaaaacaataaaaaaaaaaaaaaaaaaaaaaaaaaaaaaaaaaaaaaaaaaaaaaaaagacaaaa

SEQ ID NO: 8999 - DNA, 732 bp, Gossypium hirsutum
  Clone ID: GOSHI-09MAY01-C38750_1
atttttcaagaaccctagtttccgaaattacctttccaaaatgccttcaattccagaagagccactgctggccgcgaacccagaccgattctgtatgtttccgatccaatacccagaagtatgggaaatgtacaagaaagccgaagcgtcgttttggaccgcagaggaagtcgatctgtcttccgatcttcgtcactgggaagctctcaccgctgacgagcaccacttcattagtcacgttctcgccttttttgccgcctccgatggcatagtccttgagaaccttgctgttcggttcatgaaagaggtccaaatctccgaggcgcgtgctttttatggtttccaaatcgctatcgaaaatatccactccgagatgtacagtctccttctcgagacttacataaaagattccgatgaaaagaaccgtcttttccgcgccatcgagacggtgccgtgtgtggctaaaaaagccgagtgggctatgaaatggatcgacggcggagaaactttcgccgaacggttaatcgcttttgcttgcgtagaggggatctttttctccggaagtttctgtgccatattttggttaaaaaagagggggttaatgcccggattaactttctcaaacgagttaatctcacgagatgaaggtctccactgtgatttcgcttgcttgctgtactctctcctccggtcaaagctgagtgaagaacgcctgagagggatagtaatggt

SEQ ID NO: 9000 - DNA, 949 bp, Gossypium hirsutum
  Clone ID: GOSHI-09MAY01-C38720_1
ggttaaatcactcaaacttgtgcagaagaatctcataaataagatttatactgattctgctgaagccaagatccctgcagttctagattatctaggaactattgttgaggcagactgcaaatttttaatatttgcacaccctcgcccccggattgaagcaatacatcagtttcttcttaaaaagaaagtaggttgtattcgaattgatggtactacccccgcatcctcaaggcaagctttggttaatgattttcaagagaaagatgctatcaaggcagcagtgctttctatcaaagctggaggtgtcggattaactttaacagctgcaagtacggttatctttgcagagttgtcatggactccaggtgacctgattcaagcagaagatcgtgctcataggattggacaggtctcttctgtgaatatatactatctgctggcaaatgacacggttgatgacatcatatgggatgttgttcagaacaagttggaaaatctgggtcagatgctagatggccatgagaattccttggaagtttcaagcagccaagaacacagaagtcccacaaagcagaaaactgtcgacctgattcaccaaggaagtccagggaagcagaaaactctggattctttcatgaagcgttgtatcaacatggatgatgctgaacatcaatctaagctcaaataccccaggaacatgtagagatcaggcaggtggagttgtaaattttgtactaatggaacacatcatcctcttggtctacactatccgatcatatgtatcatcatcacttagggttaattctgggaacgcaagattcctttgccattatcttgagaatggaatacatgcctggattttaaacgttactttttaagtttgtagttttgcgtttctaatagtgtaaagatattagaatttagaggctaatcttaataggtcttttcc

SEQ ID NO: 9001 - DNA, 432 bp, Gossypium hirsutum
  Clone ID: GOSHI-09MAY01-C38680_1
ttgatttccgagttcaggatgatcgaagtttagggggttgctcgtctcctttactaagaagagaacctccaaatcttaataatcgaaatggtaacctgaaagaagaaatgtctgacaattctgctttccaagaagagcatttttatgtcagaaacagtcatatggatcaagctgatggtgtaacaaggcgagacatgatggatgataaagataaatctattacacctagtggtttgaaagagattgatagagatgtgcagaacgttgaaacaagcgggtcagatacaagttccacaaagggtaaaaatgcagttgataaattagcagagtgtcacagagaaaatgcagatgttcgagaagatgaaaaagttgaaaccggtcaaactgaagaaaagcatagaaggaaaaggaagcgaactataatgaatgatg

SEQ ID NO: 9002 - DNA, 572 bp, Gossypium hirsutum
  Clone ID: GOSHI-09MAY01-C38170_1
cccagcgtccgattgctttttaaatatcatccatggcatataagcttcttaagtcattggaggtggtggcgatttcagtgctgtttgtaatattgcaaaactcggcaaatgcaaagccccaagtgccatgctatttcatttttggggactccttatccgataatggcaacaacaataaccttaacaccttggccaaagtcaactattcaccctatggcattgattttcccaaaggaccaacaggaaggttcagcaatggcaaaaacatgcaggattatattgctgagtatttggggttcacacgttctatgcctcctttcgccgaatcaaaaggggaaaacattttgaatggtgtgaactatgcgtctggtgctgccggcattcgtgacgaaactggaaaagatctgggtgatcgaatacccttggacaagcagatacaaaatcacaaaattataatattgagactttctaagttaatgcgaaataatatagagactatattgctcttaaaccgatgtatttattcaattcaaatcggaagcaacgactacatcaacaattatttcaagcca

SEQ ID NO: 9003 - DNA, 303 bp, Gossypium hirsutum
  Clone ID: LIB3145-051-Q1-K1-A11
tcgtcgcatggcgttcgctatacaaatgtttgtttgcagtactggggaacatttccgaggagtagggggtgctgatgagaacaagtggcaccagtgtcagaatagggcaccaagacatttgtgctcgttgtgaaagaaggattgggtacaaaaggtcccactctgactccttatccaaaattaagaagcagattctggatattactcgcttgttgcgacagaattggagtctcaaaaaagataactggtgttgagcgtacacgcctgaaagttattgcaaaaactttgcagtcgcaggggttt

SEQ ID NO: 9004 - DNA, 304 bp, Gossypium hirsutum
  Clone ID: LIB3145-051-Q1-K1-A10
cccacgcgtccgctttagaaatgtctaatagctgttctgtgtcacattcccaagatatagagggtgctgatgaaaacaagtggcaccatgttcgaaagggcaccaaaataattgtgcaagttgtgaaagaaggattgggtacaaaaggtcccactctgactccttatccaaaattaagaagcagattctggatattactcgcttgttgcgacagaattggagtctcaaaaaagataactggtgttgagcgtacacgcctgaaagtcatagcaaaaactttgcagccgcaggggtttggtctaac

SEQ ID NO: 9005 - DNA, 473 bp, Gossypium hirsutum
  Clone ID: GOSHI-09MAY01-C38080_1
cgggaagaaaacagcctctcttgcaagccaagctggtcctatatcagcttcaggggtttatgaggctttgcccagtttccgggatgtccctagctcagaaaagcagaatcttttccttaagaagctgagtctgtgttatgtggttttcgattttagtgatccctctaagaaccttagggaaaaggagataaaaaggcagacgttgttggagcttgttgattatatatcgtctgtttcatccaagttcaatgaggtcgcaatgcaagaggttacgagaatggtggctgctaatctatttcgaacattcccatctccgaatcatgatagcaagattttagaaatgtatgatatggaagatgaagaaccggccatggatcctgcttggccgcatcttcagattgtctatgaacttctacttagatttgggtctcaccagagactgatgctaagcttgctaagaagatcgtcgacca

SEQ ID NO: 9006 - DNA, 453 bp, Gossypium hirsutum
  Clone ID: GOSHI-09MAY01-C38070_1
cccacccgtccgcccacgcgtccgcccacccgtccgaacatattcacacttttaataatatttaaaatggagaaatcttcccgttcaatgtcatctttagtccttcttatgttggttcttctagcaacagagatgggatctatgacagtggaaggtagaacatgtgagaccaaaagtagtgaatacaaggggatatgcttatttgatgctaattgtgatagtatttgcaaagtagagccaggtttcgatggtgggcattgccatggcttctttcgcagatgctattgcactaaaccttgttagatgagcaatctattaagatttcattatacttaaaagattgcctcatttccgcttgttatgtgtgtgcttgagagttgagagaataagatcaacaacatattggtgtacattgaattatattactattaaatatatctataatttttatgg

SEQ ID NO: 9007 - DNA, 695 bp, Gossypium hirsutum
  Clone ID: GOSHI-09MAY01-C38060_1
atggataaaatgaagatcgaagaggttcaatcaacggctaaaaagcaaagaatcgcgactcacactcacatcaaaggccttggtctcgatgccactggaaatgcaattcctttaactgcaggttttgtggggcaagcagaggcaagagaagctgctggtcttgtagtggacatgataaggcagaagaagatggctggccgtgctcttctgttggctgggcctcctggtactggaaaaacagcgttggcacttggaatttcccaagagcttgggagcaaggttccgttctgtccaatggttggatctgaagtatactcatcagaagtaaagaaaaccgaggttttgatggaaaacttccgacgggctattggtctacgtataaaggaaaataaagaggtctatgaaggagaggttactgaactctctcttgaagaaacagagagcgtaacaggtggttatggtaagagcattagccacgtaattattggattgaaaactgttaaagggacaaaacaactgaagctagaccctacaatttatgatgccttgattaaggaaaaggtagctgttggagatgttatatatattgaagctaatagtggagcagttaaaagggtgggcagaaatgatacttttgccacagaatttgaccttgaaaccgaagaatttgtgccacttccccaaagagaggttct

SEQ ID NO: 9008 - DNA, 521 bp, Gossypium hirsutum
  Clone ID: GOSHI-09MAY01-C38380_1
cccacgcgtccggcttcgctttctcgaattttccttctccgtttatcccttttttctaaattttcttccgacagaaatcaattttgttttcccctttttcttcggggtaaaaagaacctttctcatataaatcattgattagctcgaatttcgatccattatggctgcgaagattcttgccaacttaattgtaatgggctcaggtatattggctcgggccgttgttcaggcataccgtcaagcactttcaaatgccgccaaatctggtgttacccatgagacactacaaaacgcagtccgtagaggtggcaaagtcatgaccgagcaagaggccaggctgattcttggtgtaagcgaggagactgcttgggaggagatattaaagaagtatgaaattttatttgagaagaatgccaagaatgggagcttctaccttcagtcaaaggttcatagggctaaggagtgcttagaatctgtctatcaaggcaaagcagagggcagtcctccgagttgagaactca

SEQ ID NO: 9009 - DNA, 748 bp, Gossypium hirsutum
  Clone ID: GOSHI-09MAY01-C38310_3
cccacgcgtccgcgttgaactcccactactccctctccccctttatcttcctcttcctcttcttcacttcatttctgctctgcttctcagtgggaaaaagaaaaaaagtcatagagcagagcaatggtgcccattttcgcttctttctctcttttactcatttctgctctcttcattgttgcagactgtggttctattggagtaaactacggaagaatcgccaacaaccttccttcagctaccaaagtagtggaactacttatatcccatgctttaaaccgtgtcaaagtctacgacactgacccggctgttctccatgcattatctggatccggaatcaaggtcaccgtcgacctcccaaacgagcaactcttcgccgctgctaaaagcacttcctttgctaactcttgggtccagcgaaacgtcgccgcttactaccctcacactgaaatagaagccattgccgtcggtaacgaagtcttcgtggacccccacaatacgactaagttcctcgtacccgccatgaaaaatatccaccaagctttggttaagtccaaccttcactcggatattaaaatctcttcccccattgcccttgccgctctccaaaactcttacccgtcttctgccggatctttccgacccgaactcattgaacccgtttttaaacccatgttgaatttcctccgccaaaccgggtctttccttatggtcaatgcttatcccttctttgcttatgagtcaaaca

SEQ ID NO: 9010 - DNA, 545 bp, Gossypium hirsutum
  Clone ID: GOSHI-09MAY01-C38310_2
ttgaagaattaccatgacaggcggtcgccggtggccgggaatcaacccgtcaacagaggaaaagggggtgtgtcgaagagtacgacggggaacacgtggtgcgttgcgaacggtgaagctggaaaagagaagctgcaggcagctctagatttcgcctgcggtgaaggaggtgcagattgccatccgatccaaccaggtgccacgtgttacgatcccaacaccctggaagcccacgcttcgttcgctttcaacagttattatcaaaagaacggacgccacatggggacgtgttattttggcggggcggcctacgtcgtcacccaaccacctaagtatggtgattgcgaatttccgacgggatactgaaagagataaggaagaaaggagtggcagaatgaaatcatgaatttttagggtggggagtattattgtgtattttagttggatttgttagcaagttactacctttgtgtataaatcaatggattctaaatatgttattctattcctactttacttttcaatctaatcatcaattcgttact

SEQ ID NO: 9011 - DNA, 1329 bp, Gossypium hirsutum
  Clone ID: GOSHI-09MAY01-C38310_1
ttcttttctggatccgaactaaaagcaaccggaggcgtggcaaaccggccttgtcatggcgggcgactcaaagcaagtactcatgagtacctattgacaccagaagaaccgtccctggtatgataatgtgtcatcaacatcaaggcggtcatccgggtcctccacctaccggatgaaccccacaacctgactatgcgcccagtacgctgcatgaagaatatgcaccatgcgctggttaagtccaaccttctctcggatattaaaagctcttcccccattgccctttccgctctccaaaactcttacccgtcttctgccggatctttccgacccgaactcattgaacccgtttttaaacccatgttgaatttcctccgccaaaccgggtctttccttatggtcaatgcttatcctttctttgcttatgagtcaaacacggacgtcatctccttggactacgctttgtttagggagaacccgggtgtggtggatgcgggtaacgggttgaggggggggggtcttttcgacgctcaaatcgatgccgttttcgcggcaatgtctgctttgaaatatgatgatattcgattggttgtgacggaaacgggttggccctcaaagggggatgagaatgagatcggtgctagtgccgaaaacgccgccgcttataacgggaatctggtccgtcggatcttgaccggcggtgggacccctttgagacccaaagcagatctcaccgtttatctgtttgccctttttaatgaaaacaacaaagtcgggcctacatccgaacgaaattacggcctcttttacccgaccgaggaaaaagtttacgatatccctttcactgtagaagggttgaagaattaccatgacaggcggtcgccggtggccgggaatcaacccgtcaacggaggaaaagggggtgtgtcgaagagtacgacggggaacacgtggtgcgttgcgaacggcgaagctggaaaagagaagctgcaggcagctctagatttcgcctgcggtgaaggaggtgctgattgccattcgatccaaccaggtgccacgtgttacgatcccaacaccctggaagcccacgcttcgttcgctttcaacagttattatcaaaagaacggacgccacatggggacgtgttattttggcggggcggcctacgtcgtcacccaaccccctaagtatggtgattgcgaatttccgacgggatactgaaagagtggtagaatgaaatcatgaatttttagggtggggagtattattgtgtattttagttggatttgttagcaacttacttcctttgtgtataaatcaatggattct

SEQ ID NO: 9012 - DNA, 788 bp, Gossypium hirsutum
  Clone ID: GOSHI-09MAY01-C39990_1
gctggggacgagggcagcattacttcagtcaagaaaggagtagtgcttgaaactgctacagaggcagaggggtcttatgttgcaggacctttgtatgatgacataacttacaatatcagggcttcgaagcctggatttcatctcaaacaagtagggccatattctttttcttgtcagaagcttagtcaaatatctgtgaaaatatattccaaggatgatgcgactgaacctatgccatctgttctgttgtcactgagtggggatgatgggtataggaataactctatgtcagggactggtggaatatttgtctttgagaacttgtttccaggaagcttctatcttcggcctctgctaaaggagtatgctttctcaccatcagcacaggcaatagaacttggctctggagaatctagagaagttgttttccatgctacacgtgttgcttacagtgcaatgggcatggtaactttgctgtctggccaacctaaagaaggtgtctcaattgacgcccgctcagagtcaaaaggctactatgaggtgacagtgactgattcatctgggacttatcgtctgcgaggactggttcctgatgcattgtattcaatcaaagttgtgaagaaggatggcttgggtagtgctaaaattgagtgagcatctcctgaatctggtcctgtaaaggttgggaataacgatatcaagggactccacttttttggtctttgaagaaccagagatgactatcttaagtgccatgttgaagcgaataggacaggggaattacattc

SEQ ID NO: 9013 - DNA, 442 bp, Gossypium hirsutum
  Clone ID: GOSHI-09MAY01-C39930_1
cttagtacaaggacctccatggtatttttaccaatgattttcataatgttgaaactgtggggttcctgaacattggcagaaaacattgagaagatcatacaaaaggaatagaaaaaaaaagtcctctagctagctgtatagccaaaaaaccatacccaaaaactgcagcaatatcatcatcatatgatcattatgatcatcatcatgatgaatacatactacttacaatgaattaaagatacatataaatgtataggtaaaggacagtaggttctttttctctgtgtatgttggaccatacagtaaaattagacccagtaataactctcttttttttattacctgatactgtaatattatttcaggttaccctttgctcgaaattgtaaacaaatcctattttcgtgggtttttagtagtatagaatatgaatatacttcat

SEQ ID NO: 9014 - DNA, 802 bp, Gossypium hirsutum
  Clone ID: GOSHI-09MAY01-C39920_1
cccacgcgttcggagatcgagaaacatatcagataaaagcgaaatgagaaaaactccttcactggtagacctttgtgttagaacagtgatagataatgtaaggtaccttggagatgttggtgagacagattcacatcttcttgaacgtattctaccgcattgtacagtcgatcaattattgcatgtggaaacaagtacaaagggaagggatctctgttcagtaactgataaactatggaagaatttctatgagctgcagtttggccgtgagagtatgaaaatagtaattgagaggatgaagctaaagaaagtaatcgttgagatggagacagttgtatgaggcaaaattgaaggatgttcaggaggccgagaacaaagcaattgaccggcttaaacaattatacatgataagaagatgctcgaaaacaaagtcggcgggttcagctttgcacaaaggttccaccttcaagcaaaagaagcttttttgctggaagtggacctggttacaatatgtccaatgtcaagagcaacataatgaagaaagcgaagatagatcttatgaagagccaggaagtgaaaaacctcgcagccatgaagaaaaaagcagtgcaaagtcatcatagtggtaccaccataacgaagtcgagtggattttgcggaaagaattcagcttcgacatcaaagcatagcaaaccattagagaggagattctagaagaagcagtttctaaaaatttaagaacaaagtcccgaaaaaggttctattgccttcctcctcttttttcactgtaatatttggaaag

SEQ ID NO: 9015 - DNA, 1390 bp, Gossypium hirsutum
  Clone ID: GOSHI-09MAY01-C39850_1
ttctatggatgctgcatcattttttcgtgacaaaagccttggtgcagattcccctctatctggagtgatatcattgttggcagcagttgatgccctttctcatgtagatggtttagacaaccttaataaacagcttgtctttcttgttttcactggtgaggcctggggttaccttggtagcagaagatttttacttgaacttgatcagcagtcagatgctgttcgtggtctcaatagctcactgattcagttggtcatggaaattggatccactggaaagggcttcagtcaagggaacaaaaccttctttgctcacacacaggtttcatctgacacaaatgaagctttggatgccttgaaacttgctcaagagtcccttaaatctgaaggtgttacagtttcaaatgccagctcttctaatcctggaattcctccatcatccttgatggcatttctgagaaagaactcttcaacttctgggattgtgttagaggattttgataccgtttttgccaacaagttctatcatagtcatcttgatgattcagcaaatataaactcttcagcaatagttgcagctgcttctcttgttgctcggactctctatgttcttgcgagtgataaaaaggattccaccagcccagccctaagttcaattaatgtgaatgcctctctagtagaagaactaattagttgcttgttggactgtgatcctggtctgtcatgtgagttggttagcagctatattacaagtgttgatacatgcccaagccattatgttggtgttgttcttggagaaccttcctcaacaccttctcccaatcaggtggatgacatttccaggttcgtgtggaactttctggcagatagaacatcaactccaaagggcactactactgtttgctcaaaggattgtagcaacaatggtggagtgtgcattagagcacaaaccgatgggaaaggcatttgtgttaactccacaaccaggtacgtcccggcatattcaactcgcttgaagttggactctggaacatggaaagtgctgcctccgaactcctcagatcctatggggatgctggaccctgtctggacggagagcaattggaatacgattggtctccgggtatacaccgtccaggaagctgcatatgaccgagtggttctgcttggaggtataagtgtcacagtcttggcttatttagcaatatgtactaataagagcctacataacaaaggccttgaagcaagattgacagatgaaattagaattcatgtcttacaattttttttgaaaaacatccagaaattgatagtaccaaatgtcaagtatgataattaaggatggcattgcataaattagttttactttgaacctatatcagaattgcat

SEQ ID NO: 9016 - DNA, 482 bp, Gossypium hirsutum
  Clone ID: LIB3584-011-P1-K1-D8
tccagcgtccgcccacacacttcgctcgctgtgtgtgatctgacacaaatcaagctctgggatgctcttgaaacttgctcaagagtgccttaaatctgacagtgtgacagattcaaatgccagctcttctaatcctggaatacctccataatacttgatggcatatctgagaaagaactctgtcaggtggggggagggtgtgagaggattctgatactggatttgccaacaagttctaccatagtcatcttgattattcatcaaatataaactcttcagcgatagttgcggctgcttatcttggtgctcggactctctatgttcttgcgagtgatagaatggattccaccagttcagccctaagtacaattaatgcgaatgcctctgtagttcaagagctatatacctgcttgttggactgtgatcctaggctggcatgtgagcaggttagcaactgtattataagtgtggatacatgccca

SEQ ID NO: 9017 - DNA, 353 bp, Gossypium hirsutum
  Clone ID: LIB3147-017-Q1-K1-G7
gcagaaaccgatgggaaacgccatttttaaaaactccacagcgcatttacaaaccggcatattcaactcgcttgaagttggactctggaacatggaaagtgctgcctccgaactcctcagatcctatggggatgctggaccctgtctggacggagagcaattggaatacgattggtctccgggtatacaccgtccaggaagctgcatatgaccgattggttctgcttggacgataagtgtcacaatcttggcttatttaacaatagtactaacaagaaccctcttaacaaaagcctttaaatcaaaattttacaaataaaaattataccttcaatgtctttaccaaaattttt

SEQ ID NO: 9018 - DNA, 646 bp, Gossypium hirsutum
  Clone ID: GOSHI-09MAY01-C39810_1
gcttcactcgttctcggtcgttttcctttactggttctatgttttctcaagcctacccctttgttcatcaatgtgatcgtttaaagctaagttgtagttactagtttagtttctgtgatctattgaaggaaattaaaatctctaaattttcatttaatttgttaaaaaaatttccctcccacctgagatggctactgtgcaaaaaccggcgagttcctccgaatccgacccaagatgcgccaacatcgacgagaagaaaaggaagaggatgctgtcgaaccgtgaatcagcgaggcgatcgcgtatgaagaaacaaaagctactcgaagatttagttaacgaagtgagtgcattgcagaaaaataacacccagatctgtgaaaagatcaagttcacaacccaacgcttcgtcaaaatggaagcttccaacagtgtcttaagagctcaagtaattgaattgaccgagagcttgcagtccttgaactcgatgctgcatatggtggaagacataagcgggtacgacgtcgatatcccggagatccccgatcctctgatgaagccatggcaacttccttgtgcgacgcagccgatatgctcgacttttgatggataaaaattaaaaaaaaaacaaaaaaaaaaacccttc

SEQ ID NO: 9019 - DNA, 1031 bp, Gossypium hirsutum
  Clone ID: GOSHI-09MAY01-C39570_1
gcttccgcccacgcgtccctctcattctggtagtttatttaaactaggggggcgttatctaaaatggcttaatgcaaacaaaaagaatggcctctactgtataagaactggttcctatctctggctgcttgcactgcaaaagcggaaagagggacgttgtcctcttgaacctggcgaagtggcagtgattcttcgcgcaatgggatatcccaaggaaacacagatttatgttgcttctggccaggtttatggtggtcagaaccgaatggcacccttacggaacatgttcccgaatctggttaccaaggaagagttagcaagtaacgaggagttggctggtttccggaaacatgtaacaagcttagctggactcgtcttcttggtctgcctgaaatctgatctgtgtgtaatgacccacggaggtaactttgctaaattgattattggtgctagaaggtacatgggtcatcgtcaaaaatcaataaaacctgacaaaggacttatgtctaaatcttttggggatccttatatgggatgggctacattcgtagaagatgtagtcgttacccaccaaacccgaaccagaagaaaccttccctaattacgacctttgggagaaccccttaactccttgcatgtgtaaagcttgatagccacttttttcttctcgttacttgtttatgcacgttgagcttcatcgaaatgaaactgtatttaacaaatgaagatgcttttagtatctgaaagctacaagggagaagaccaaccgattaaagttcttaacctttaaaaaggagtacggtagagggtattgtctgatggaagccaataccaggaccagccagcaatgctagcagaattgtctaaaagaaaaaaaaaaaaacaggtaaatgtaaccaaatactagtgcctttatttattaatctttggcatggttcatatgtcaaaagacatcgtcaatcatcagtacgacgtcgagtaaaaaattggttgaatgtagaaaaaaaatgaaaccgtttttctttaactcc

SEQ ID NO: 9020 - DNA, 283 bp, Gossypium hirsutum
  Clone ID: LIB3189-033-P1-K1-A12
cggacgcgtgggcggacgcgtgggattttgtgtgaagcaaggagaaccccttaactccttgcatgtgtaaagcttgatagccacttttttcttctcggtacttgtttatgcacgttgagcttcatcgaaatgaaactgtatttaacaaatgaagatgcttttagtatctgaaagctacaagggaaaagagcaaccgattaaagttcttaacctttaaaaaggagtacggtagagggtattgtctgatggaagccaaaaccaggaccagccagcaatgctagca

SEQ ID NO: 9021 - DNA, 663 bp, Gossypium hirsutum
  Clone ID: GOSHI-09MAY01-C39560_1
cccacgcgtccgggaacagagagaatggagctgcagttttggttcacctttgttccggagatcaacaacatttagcagaggcccaggaactaggagtgatgggtcctttggtggacttggcacaaaatggtacagataggggcaagcgcaaggctgctcagttgttagagcgcatgaacaggtttgttgagcagcaaaaattggcacaggtgcaagctgaggccgaagtacagcagcccgagtctcagtctcagacacaacagcgacgaccaccctctggggcggttcctggccagggctgaggtatattttgccatgatgtttgttggtttcgtcatcttgtttctctctatgtattgaagaaggcagctttgcttggaaagaggaggtcgaagatcacctgttgaacctgtaagttattcattttgttttgagtggaattaatttattattcactggatcattacgtttcaaaaaagaagggtgggggaagaaagggatgagttgtattttacatgtatgtgaatttgttaatcctcagtttttgttcgagatgtttcttttattgtactgaaattaaacctactagtgataggcaaaggcaaaaaagaaaaatgaaaaaagggtacgcaatatatctggagtttgaatttccgtttctcg

SEQ ID NO: 9022 - DNA, 621 bp, Gossypium hirsutum
  Clone ID: GOSHI-09MAY01-C39740_1
aatgaatcccattttttccctgatttttcctccaccagaatttggctattataccttccaacttgttacatagagacttaggaagcaaaaaaagcaaaaaacactacatggaataagttggaatggattgtaaaactaccttaataaaaatgacgtctcctccttgagaaaggtacttaacactccaattgtcaatgcttttctttaatctatccttcagactttagaaggcggctttcttgcctctccccaccaaattcggtaatcctaaatacctttctgggttatttgagctatgaacaccaagcaccctaacaattacccttttctcttcctcctgcgtattggtactgaaaaagattgtgggtttagagttagtttttcattgtttttgggaagtgtttttcaaaagtgttgttgagaagtgttttttagaagtgtttttgaaaaatttgagtgtttggcattgttgttaaaaaatatttttgaagaataaaatgtttattttagatatgagattataaagtaacaaatatgtatttaaataatgtttaaattagttaatattatgatattttatcaataatataaaaattaatttattataacttatagttaata

SEQ ID NO: 9023 - DNA, 804 bp, Gossypium hirsutum
  Clone ID: GOSHI-09MAY01-C39730_1
ccgaaacccataatagatatcgatatagctagagaacatctgagagaagctatatttaagatgtgggaaatggaagcagctgcaaaggctgcaacttcagatgggatgaatgaagaggttttcgacaattctgttggtattgaaacctccgcgatcccaaaagttatcctaaaggagaactcttcttgtccaacatattcatctaatgatcaaagggttccatcatttcaaaatggcaataatggttcattgcataggaagagagcaaaatgtgtggaagaagaaaggttgcctgctgataaaccgaataatcacaacaaagaagcagggacttcgagaggagaagaagacttatgctcgacagctgagtcttcagcatcgaagaggcaaactattagcagaatgtcattctctgttccccagtcttgttcttcgtccgatggcaggcctatgctggagtgtgaatcgtctgatatgaagcggtcatggcaagaaaagatcgatttggaacagacatcaagcaagaatggtaattaagaagctgcaaagtttgatataattgtggttcttgctggttatctgtctgatacatcagattaaggcagcctgcaaaagttaaaccttcgacttagagtccagggtgtcactgaatttgctcacagtagatagatatgtaagtcgaaatagtgtgttttaatgtagatgagcattacaaatcatgggatgatatattaatcagccattaccaacaacaatatgtagttttctgcaataaatgagcaaaacttagactatatttgtatg

SEQ ID NO: 9024 - DNA, 548 bp, Gossypium hirsutum
  Clone ID: GOSHI-09MAY01-C39660_1
cattccccagagcttcaacgcattctttcacgggataaactgaaattgagtcgaacggcgggattgaaggggaagaagaagggagttaccttcactatcgattgttcgaagccagtggaggataaaatcatggacattgcccctctggaaaagttccttcaagagagaatcaaggttggaggcaaggctggtgcacttggtgaaaccgtagccctcactcgcgagaagagcaaaattaccgtcacttccgatggcgacttctctaagaggtatctgaagtacttaacaaaaaaatacttgaagaaacacaatgtacgggattggctccgagtaattgcttccaacaaagatcaaactgtttacgagttaaggtacttcaacattgctgagaacgagggagaggaagaagattgatttcttgggtgaacaaccagttttaatgctagctgatttgccaccttttttttttgtttgattgttggggctttagacaaccaggtttataaaaacttttgttatttactgaaacatgagactttgcaatggct

SEQ ID NO: 9025 - DNA, 698 bp, Gossypium hirsutum
  Clone ID: GOSHI-09MAY01-C39630_1
gttttgaccaattttgataggaatctgggaattcgttttagcactgctttgaattatattgtccgggtcggctacattcttcatttggttctggttttccctgttattcacttttccctacggcaaactgtggataacttggtgtttgagggatcagctcctctcacggagagtaaaaaaaggtctttgacattaacagtagtattgttagtgctgatatatattggatctactatgatcccaaatatatggacagctttcagagttactggagcaacaacagctgtgtgccttaggttttacgttccctgctctaattgcattgaggataagtcagcaagaagagagcatgagcttgagcagagtagaaaaatctttgtcgtggttaatgttaatactggctatgatagttagcattgctgggataatcgggagtatttataccatcccaagtagttctgaatgattcctgttaaagagtttcagacctgttttcagaagagtattgttttgataatattgctcgaagcctcgaagacttttaatatattcttatgttgctttgcttgtttaatagacaatcagatgtttgagatgatcgctacagagatgcattttttttctgaggggccagctcactggaagtctgtgacgctttgatcatgcattaatgaattggcttattaatgctttacaga

SEQ ID NO: 9026 - DNA, 480 bp, Gossypium hirsutum
  Clone ID: GOSHI-09MAY01-C39180_1
ggaaaagaggaaaggttttggccatgaaaaaatcgtcaaggactgccactgagcgtcggcttgctctggctcaaactgggggcaaggctgctgtaattgaacttaattgcgagacggatttcgttgccaggaatgaaatttttgagtacttggctttggcattggcaaagaaagctttgtttgtccaaaactcttcccaacagattcctggggttttctcatttgggcctgagtgtttagaggacttaaaattaaatcttgaccatccaaaaattagtggggagacaaccattcaaaatgcagttacagaagtggctgcaatgatgggagagaatataaaactcaggaggggtgttgtgatgtcaacatcttcgcatggagttgtttctgcttacctccatagatgtcctcaaccaggtttgggtcgaattgctggaattttatctcttgaagttgagaatgagaattctcaatgggatg

SEQ ID NO: 9027 - DNA, 445 bp, Gossypium hirsutum
  unsure (1)..(445): unsure at all n locations
  Clone ID: LIB3147-056-Q1-K1-C9
agctgtaactgctgctggatctggatgcgtcgctgctttatctgttgaacgataccttgttcgaaatgatcttcttgtcgagtttcatcagcctcaaactgaagaggtcaagaaagaactgacggatagagatattcaagaaggttttgacattacactcacaaaacacaagggccagtatgctttgcgaaagttgtatcatgagagtccgaggcttatatgtgtattatatacttcaccaacttgtggtccatgtcggactttgaagccaattcttagcaaggtgattgatgaatttgatcagaatgtacattttatcgaaattgatattgaggaagatccggagatagctgaagctgctggaattatgggtaccccatgtgtgcagtttttcaaaaataaagagatgctcangactgtatcttgggtcaaaatgaaaagagaa

SEQ ID NO: 9028 - DNA, 360 bp, Gossypium hirsutum
  Clone ID: LIB3147-005-Q1-K1-H7
gcgcataaatactccttatagttagtgtaatattaaacgacttttcattttgcttagcttttactctgtctttttacaggtgatggatgaatttgatcagaatgtacattttatcgaaattgatattgaggaagatccggagatagctgaagctgctggaattatgggtaccgcatgtgtgcgaggtttcaaaattaaaaaaatgctaaggactgtttctggggccaaattgaaaaaggattccctggaattattggagccaataaaagaataatggggggggttcttgggcatcattaatttgaaaatcaaatttggttcttatgaaaaggtaattgaattataaagctttccattatt

SEQ ID NO: 9029 - DNA, 434 bp, Gossypium hirsutum
  Clone ID: GOSHI-09MAY01-C39160_1
tcggtcaaaccacgcatcggatgaagtgtatcttggacagcgaacacccatctgggccactgatgcaggtccgctacaagcttcggatgctttcaataggagacttgctgaaatcgacggggtgatcttaaagatgaacatcgacaagaaactgaagaaccggatcggtcccgttaatgttccttataatttgctccatcccaccggtgaaattggaatttctggtaagggaattccaaatagcatctcaatataatttaagtaaaagatgaataaggaataatttgcatgaaataaatgttggtgcagcacatcaaaagtattgttgtccatacttttgtgtaattttctcgaatgatagtgttattccaagtttgatgtaattgtgcgatgttattattatgaataatcaaaatatcatgatggggtgggtg

SEQ ID NO: 9030 - DNA, 655 bp, Gossypium hirsutum
  Clone ID: GOSHI-09MAY01-C39090_4
cgacaatgcagtccgccgtttttaaaaatatggtggagagcctttcagtgcccacatttcgagtggggtatcctgtgactacggacgcgcttgatgccttgtatgagaaggtgaaaccaaagggtgtgacaatgactgctttgttagccaaagctgccgcaatggcacttgcgcagcaccctgttgtgaattcaagctgtaaagatggcaagagttttacttacaatagtaacatcaacattgcagtagctgttgctatcaatggtggcttgattacccctgttcttcaagatgcagataagttggatttgtatctactgtctcaaaaatggaaagaattggtggagaaagcccgggcaaagcagcttcagcctcaagagtataattcggggacattcactctgtccaatctgggcatgtttggagtggacaggtttgatgccattcttcccccaggccagggagctatcatggctgttggagcatcaaagccaactgttgtagctgatgctgagggattcttcagcgtgaaaaacaaaatgctggtgaatgttactgctgaccaccgaattatctatggtgctgatttggctgccttccttcaaccttctcaaagattgttgagaacgctgaagcctcactttgtagatgattc

SEQ ID NO: 9031 - DNA, 520 bp, Gossypium hirsutum
  Clone ID: GOSHI-09MAY01-C39090_1
tccatttattggtgaataatgcatgctcttcatgtttggcaattaatatagaggagtcgttattttggacgggagacaaactaaattttcatcctggctaactatttcaagagaacaacttaactgagttaccatgagattcttccttttcaggtgaatgttactgctgacccccgaattatctatggtgctgatttggctgccttccttcagaccttctcaaagattgttgagaaccctgaaagcctcactttgtagatgattctcagatttatgcaatgaattcaccccgagtcttctaatttcacggcaaagcagagctgttgtctgtgtattcaaacagatggcctagctgaggaccttttctctgtatcagtacaatttgtatcgcgatacattttttcttttctttttaaagtatttcaggtgcaatctcagattgagttgaattagatattggaagaaacagaataactacggggtgtttttgatagaattaaatgaaaattgctttattaag

SEQ ID NO: 9032 - DNA, 520 bp, Gossypium hirsutum
  Clone ID: uC-gsflmaxxa076a06b1
catttagctatcatggctgttggagcatcaaagccaactgttgtagctgatgctgagggattcttcagcgtgaaaaacaaaatgctggtgagtcccgtttctattatggagccaattacaatcccttgtagataaagctttcgttcgaactttatagaaaatttatgagataggataaattattacaaatctatcatgaaccaatatactcatttattgttaatgctttaaggtatcatgtagtgactgaaagcagactacatttatgatttttactaatataacagtaaaaagatgccgggatctgaggctatctaaaaaaagtacaatttaggtacaagctatgttactcgaactcttcactatttttcaagtacctgttgtctggcacatgaatatagacgaactccaataatcccccaaatacatggaaaaacttagaaaagactaaccttacttgtgtcgagtacatacttgtatctaacactcatacctgagtccaagcacatagggcacaagt

SEQ ID NO: 9033 - DNA, 498 bp, Gossypium hirsutum
  Clone ID: uC-gsflmaxxa076a11b1
tccaaacgctcgctttaatctgcgatcaactatgtcatcaaccactcaagggtgtagaaaagggcggagaacaaggctatggaacaggatgtccaacacaatggaacagacatgggaacaggagtggttagggctgaagatgcagcagaagatgcaccacctggtatggttggtagcatcttggacagcgctataaagaccggtatggtgcatgaagtggcacatgaaggtgcctatgctgatgctgaaagcggactatattgagggctctacccaataaaacacggaaaagactacggcatctgaggcctttttaaaaaaaagttcatatttaaggacaagctatgttacttgaactttttactattttttcaagtaccctgtgtctggcacaagaatatagacgaactccaataatcccccaaatacatggaaaaaacttagaaaagactaaacttacttgtgtcgagtacatacttgaatctaacactcaatacc

SEQ ID NO: 9034 - DNA, 621 bp, Gossypium hirsutum
  Clone ID: GOSHI-09MAY01-C39040_1
gtgagagagagagagagagagagagaagtgaaagatggtaagaggaaaagcactaagctgcgtatagggctcttctaagagccacccgcgggtcatttgccggcgacaccttgatgttgaacgcctctgccgttgaggttcgtcagaaatttgaagccaatcgtcatgtcacctcggagcctgagatccagaaactcctcgaggaagcacgggaggcctcccatttcgtttccaccatgattgttcaagccaagctcaacgaacgcggcggctacgaggtgaagccgagtaaggagcatgcaggagctactttggagattccttccgaagagatcatcagaaaatctgcatcacagtctaaacaatgaacttgggcttttatcagatgcactactgctctgtttgtttgctatttttgctgtctgctagtggatacatttgacccttgagcttacttctgtttgcaaaacttggtagagatctatccaaagcaaaaaccattttaatgggttgctctaaaattttattcaatgtgaaacaattatgtggcaaattttgccttggtttatgagaggttcgtcttattaattaaaaaaaaaaacataccactgataatattag

SEQ ID NO: 9035 - DNA, 353 bp, Gossypium hirsutum
  Clone ID: GOSHI-09MAY01-C39310_1
ttgtggggtgattggccctgatcgctttaattgggatatcaaaccaatgtgtgacgaatatagcttgacagttgggggcaatagacctacatggcgtcaggcagcttcgatgacaaagtgccgaggaacaatttttggttgcccgcagctaagaatttaggtcccccacttttttttcttcttttaaagtagtctgctggtttttttgtgaaaagttaactccttattttgtcgaggcattgcaaatcttccttattggagatgagaaatgaatgtttctttctaatggtaccttggtttcgtaagccataatcttgtctgtgttaaaagttaatgatctgtttcatggctta

SEQ ID NO: 9036 - DNA, 563 bp, Gossypium hirsutum
  Clone ID: GOSHI-09MAY01-C39330_1
gtccgttgcaattgttaaaaatctaacctatattgaggaggaggatttggttaacaatggatctcaatccttcgcagtatttggaggtaaccaaagctggctgcaaagagaagagaattttaatttgaagccaagtatgaaggtgcactgtggatttctgaaaaatggaggtgctgacatgaatcccgtggatatcgaatatgtcaagagatgtaggtttttggttgcatctgggatttttgatggatatgatgtacctcatcagccatcgaatataaatattcgttctaagaagctcttctgttttctgatggttgttgatgaagtatctctcacatttattaaagaaaatgtgaccgtcaggaaggataaagataaggggatgtgggtaggcttatggcgtcttatcccattgaagcatcaaccttatgatgagcccagaaggaatgggaaggtttccaagattttaacccacaggttattcccccaagcacagtacagcatttggattgatggtaaaatggagctgatagttgatccattgcttatttcttgaaagatac

SEQ ID NO: 9037 - DNA, 414 bp, Gossypium hirsutum
  Clone ID: GOSHI-09MAY01-C39240_1
cggaaagaggaaatagaatgagaggagaggagaggaaagtggagttttaaaacttgagagaaaggggagagttaataatttccaaagacatggggaacagctgaagatgttgtttggctcgtgttcttccctgtggagctctagacttgatccgtatagtccatttgaatgggtacgttgaatagcttactggtcctatcacagctgctgagatcctcagagccaaccctaaccttgtcctaagcacaccaacctttcaaggtgttctacgtagaatcttgatcctctctcccgattcccagctcaaaagacgcaacatctactgtttgattccatccccaccgtcactgccgcagaagaaaaaaactggtgtgcaccacatgaaatcttccaccaaaatgcaaagcaacattt

SEQ ID NO: 9038 - DNA, 657 bp, Gossypium hirsutum
  Clone ID: GOSHI-09MAY01-C134938_1
gaaagtcagatcaccctccagccgtcggagaaactggagcagcagctcctcatcagaagatgaaaggagtagaaaacattctaggcgacatcgttatagaagcagtgattcaaataatgactcatccagcgatgatcgtgaacgctaccatcccaggtcaaaaggaaaacggaaaagatcctccagggaaaagagtagtagcagcagaaaacactcaaaacatcataagcacagaagcagggactctcccagcaggtcccatcatggttcggagagagaacattcagaatccaggaaagagaaaagaaaacgaaggaattgaaaataagctctatttgtttcccaatcccatctccatacaaagtttcctgttgtatagctcactggatccaacaccaaaatttgagggataatcagtttgtttgatgttctgggggaagggtctctccatgaaatgttgatggagatcctacactgagatggtgcttccggcgaggctttccttttgggtccagatgttgttgtgactaaggtacgatccatggagtatgtacgtttatgaagtgaacttttggaaatgatgatatgctttaatgaggcaacttctgggttctacttttgaggttaactttttcctccttaataatacatctatcc

SEQ ID NO: 9039 - DNA, 553 bp, Gossypium hirsutum
  Clone ID: GOSHI-09MAY01-C34850_1
ctggcatcagtctcttcttcagagaacctgcagcagacaaatgtaaatcaccagattcatggaacctctcgccagaatgaatcagcaactgcaggatcccaagcatccttttctgagttacgctccggttccgtccctgtaggtgtttatgcattgcagagagagaatgtattcccggagagacctggcgagcctgagtgccaattttacatgaagactggtgattgtaaatttggtgcagtttgtaagttccatcacccaagagagagagttcttcctgcccctgattgtgtgttgagtcctataggccttcctttacgcccgggtgaacctctatgcatattctattctcgatatggaatttgcaaatttggtccaagttgcaagtttaaccatcctatgggaattttcacatacagttactcaccatcatctccatctgatgccccagttcactgtttcttgggttcgtcgtcaggaactgctgggttaaacctgtcatcagagggacttgttgaagcagtccctacaaagccccaggcgactatcactg

SEQ ID NO: 9040 - DNA, 861 bp, Gossypium hirsutum
  Clone ID: GOSHI-09MAY01-C34840_1
cccacgcgtccggttcgacaactcagaaaggaggagcaagttagagagagtaagcatgtgcggtctggcttcatcttcaatccccacttctactttcccctcttttcaacaatctaaggttcaaaccaagccttgtatcaatccgtgcaactctcttgtgcttcctcctactaagctatgttcctcagatctctgtcttacaagttttagctttggtggccccagactgattcacagaagtcccggcgtccccagaagtagcactggacctggtggtgctcctggttcaggtgataatgaaagcaggaatgtgctggatgcttttttcttagggaaggctgtagccgaagcattgaatgagagaatcgagtccacaattggggaatttttgagtgttgttggaaggttgcaggctgagcaacaaaagcaagtgcaggatttccaggaagaggtattggaaagagcaaaaagagccaaagagcaagcggcacgcgaggcattggaggcacaggggctgattccaaagtctacttccctaagtacatcgatgggcagtggtgccactgcaaacaatggggctgcagctaaagcttcgccctcaactgccaataacggagtttctacaaccccatcctcctataatcccgccaaccctgctgctgctaatacagaccctgggccggacgctaaaaaggaatagtgccaaagtatctctatttgtatttcacacttttcatctgatacagtaccaaatatatataatatccagggtgtttaatcccccaaaacaaaaaaaaagaaacaaaaaaaaaaaaaaaaaaaaaaaaaaaaaaaaaaaaaaaaaaaaaaaaaaaaaaaaaa

SEQ ID NO: 9041 - DNA, 346 bp, Gossypium hirsutum
  Clone ID: LIB3135-052-Q1-K1-D1
acggtgcagggcagcaatggagcatcctctaatgatgatacattgtagctgtgtgttttttttcttcctttttatgtgaaactgagtgggatacttagtattgcaggtgataatggaagcaggaatgtgctggatgtttttttcttaaggaaggctgtagccgaagcattgaatgagagaatcgagtccacaattggggaatttttgagtgttgttggaaggttgcaggctgagcaacaaaagcaagtgcaggatttccaggaaaaggtattggaaagagcaaaaagagccaaagagcaagcggcacgcgaggcattggaggcacaaaggctgattccaaagtcta

SEQ ID NO: 9042 - DNA, 854 bp, Gossypium hirsutum
  Clone ID: GOSHI-09MAY01-C34860_1
ggaagaacccatttattaaaccccaaaacccccatttcggaaaaccataaaatttccaaccggggtttcagttccatctcccagtagtcaagtttgaaagcaaaccatggttccccccccccccaacaaggccatgatcttgtctataaccttaggctctcatcggttggaccaggttgtgtcaccggttcggacgtggttcatgacctaagcggcctggacttgaccatgaaactccattacctcaaagcggtctacttcttttccagccatgcagtggaagggctaactatcatgaacatgaaagaagccatgttttacttgcttaacgattactacatcacctgtgggcggatcaagcggtcggagtcttcgggtcgaccgtacataaagtgtaatgactgcggcataaggttcgtggaaggtgtttgcgatgaaactgtggatgaatggcttgaaactgacgacgattctaagaggaatttgcttgtttatcatcgagccatcggccctgagttgcccttttctcctttagtttacttgcaggttactctgttcaaatgtggtggaatttcactcgggctgagttgggctcatatccttggagatgcattttcagtctctaatttcatcaacaattggggccaacacatggctataggtcaatgtcaatagttccccagccctcgcaccaagatccctaaccaatactgcaaaacctgaggcacccagtgaaccactttctgcaaagcaagtgaaccatgtgggagacctttgggtgcttgccaataactgcaaaatggaaactttttctttcaacttgaccacacaacatttatcaaacttacaagcca

SEQ ID NO: 9043 - DNA, 444 bp, Gossypium hirsutum
  Clone ID: GOSHI-09MAY01-C34440_1
aaacaaccctaaagttttgagattccctcactctcccctccgctcttcgccgaaaggcctatgcgccagccctccatccgccccaaaagcccttgcgatcagcgaagcagggtcctccgacggtgtgagcacaatgcgcggtactgtgatgttgtagaggagtgcatgatcgtggggcgtggacgtgcgagctgggggtcgtgcgtgggcgtgtcgatgtacgtggtggagaggcgtataacgtgggggctacagcgcagggagaaagaagggtttgttgtttctgaaaaaaaaaattagggtaatggggcttgtgtagttgggtattaggccattgtaaaattttgggccttggatttattttgtatgttttgggtttgttgggcccgggcgaaaattaagccctacaaattatatttagtttgttggcctctaaaatctaaa

SEQ ID NO: 9044 - DNA, 373 bp, Gossypium hirsutum
  Clone ID: LIB3135-021-Q1-K1-D4
aaaaaatggaaaaagaagaaacaaaatctagctgcagtagataatcacctttgaaaatattctttggttgttttctattgatttttgtgtgtattttgtatacaatccgtaacctatttctctgacaaaaaagaagaaaaccatcccccttttacaatgaaagattgaaggctttatagccaaatacaatacagtttctacctatttctttgctcaaattgcaggtactgtgatgttgtagaggagtgcatgatcgtggggcgtggacgtgcgatctatgggtcgtgcgtgggcgtgtctatgtacgtggtggagaggcgtataacgtgggggctacagcgcaaggagaaagaaaggtttgttcgttctgact

SEQ ID NO: 9045 - DNA, 402 bp, Gossypium hirsutum
  Clone ID: GOSHI-09MAY01-C34460_1
cccacgcgtccgcaatctccaagtataagctgcctccacacttggaagtgcattggagcattccaagcctcttgcaattcaatcttcagaattatcgagtaccagccatccattagccgctgtaatgaagtgtggaatcctctccagcacttcatttactggaagccttcccactaagatttctcaagatggggggcaaacttctcagccttcagccccaaatcggcctcctgctgttttaacaacctcacgtttgatgcttgatcgtgcaattgcatctggttctgctacccatgattcaatatcagctacaccaaatagttcccgggaaaaagttgaacagctgccactgtctgctggaccaccaccttcatctcttgttagtaatgccccatcaccaac

SEQ ID NO: 9046 - DNA, 314 bp, Gossypium hirsutum
  Clone ID: LIB3135-021-Q1-K1-G5
tcggctttcttttactagcgagagcgcttatggcagcactcattggaatgcctattttatgtcttcttatttctcaatgagcaatatcctgatttcaacacagctgatgtaatgaagtgtggaatcctctccagcacttcatttactggaagccttccaactaagatttctcaagatggggggcaaatttctgggggcgtcagtctcaaatatccctgctgatgttcgaacaacctgacgttttatgcttgatattgcgacaccatatggatctgcatgccatgattttataaccgctacacctgataaaaccc

SEQ ID NO: 9047 - DNA, 554 bp, Gossypium hirsutum
  Clone ID: GOSHI-09MAY01-C34420_2
ttttttttttgttaagccaggaagctctccacaaagcttctatcgaaaatgccaaagcaaattcatgagatcaaggacttccttctcactgccagaaagaaaggtgcatgctctgtaaaaatcaagaagagcagagacgttgtaaagttcaaagttcgctgttcaaagtacttgtatacactttgtgtgtctgatgctgagaaggctgataagttgaagcagtctctccctccaggtttgagtgtccaggacctgtgaaaatagggccgctttgaattcatcatccaattactaggtgatgaaagctagattttgactttggttttatcatatttcatgcctttcaaactcaaaatttactgaaatggaggtcgagttactttttaatggttaatgaatgtgttttgcttttggttgtcctatgctcttaggttttctcgccttctggaaaactgaaagatctttcacctggtctgcaagtttatgttgttttgacttgtggctatcaggatttgaattggattttttttaatacgaaaaaactgacttttcct

SEQ ID NO: 9048 - DNA, 547 bp, Gossypium hirsutum
  Clone ID: GOSHI-09MAY01-C34420_1
tttataatttacaagggaaattttctagggttttgtcatgggcctatatattaattgaagataggagaaatgtgggcgggcgcctggcttcttgtttgtgttttacagaagtcaggaagctctccacaaagcttctaccgaaaatgccgaagcaaattcatgagatcaaggacttccttctcactgccagaaggaaagatgcacgctctgtaaaaatcaagaagagcaaagactttgtcaagttcaaagttcgctgctcaaagtacttgtatacacactgtgtgtccgatgctgagaaggctgataagttgaagcagtctcttcctccaggtttgagtgtccaggacctgtgaaaatagggccgcttcgagtttatcatccaattactaggtgaaagctagattttgactttgcttttatcatatttcatgcctttcaaactcaaaatttactgtaatggatttgtattctggttatttttatggatatgagtaaggtcgagttactttttaatggttaatgaatgtgttttgcttttggttgtcct

SEQ ID NO: 9049 - DNA, 423 bp, Gossypium hirsutum
  Clone ID: LIB3146-055-Q1-K1-H4
gagaaaataatgaaaactgagaggtttaaacctgacaaggcgtttgctggtacttctgagaagagtggtccaagagacaggccagttgagtttgaaaaggaagttgaagaagctgatccattcggtcttgaccagttcttgacagaggtcaagaagggcaagaaagccatggacaaagtgggtagtggagggacaatgaaagcaagtgcaggttcgtccatgcgagatggctatgaaggaggatctaatagatctcgcattaatttcgaaagaggacattaatatacatggttctgtagcttgtttatttgctcatctttgttacccagtgaaatcttaaaccctgaaatagcagtctggggtgagattttctctctcttcggtacgtggaatgttgttttattttcccttgtagacttttaa

SEQ ID NO: 9050 - DNA, 425 bp, Gossypium hirsutum
  Clone ID: LIB3145-006-Q1-K1-B3
gtgggatggctatgaaggaggatctaatagatctcgcattaatttcgaaagaggacattgatatacattgttctgtagcttgtttattttctcttgtagacttttaaataatcatatttctcttttattttatatttggtcgatttcttgtcccatgatcatctgtttgcatttcatgaaatagtataatctatagaggatagttgcttcttctcatttccctttctgttcgttgatagttaggccccgttctcctttgctttttagatggaattttgccaaaaaaaagtccgtttctcttaaaagtaatgaagaacagcatccactccagaaaaattttcatcatctgaaaagtcctttttggcatatggagaagttaaataatttaacttttcttcagccaaaagtgcttttggctaataatt

SEQ ID NO: 9051 - DNA, 748 bp, Gossypium hirsutum
  Clone ID: GOSHI-09MAY01-C134738_1
cgatgtcattggattcttgtcctcctcttcactggcttgtccttggttgtaaagtgcacatacttttctgctgtactcttcaaggttgatcaaggtgggtgggttcctcttgttattgctgcagcctttttgctcataatgtatgtttggcattatggtacactgaagcggtatgagtttgagatgcatagtaaggtttcaatggcatggattcttgggctcggccctagtttagggctcgttcgagttcctggaattggattagtatacactgaattagcaagtggtgtgcctcacattttctcccacttcataactaacctacctgcgatccattctgttgttgttttcgtctgtgtgaaataccttcctgtctacactgttccagaagaagaaagattccttgtaaaacggattggaccgaagaatttccacatgtttcgctgtgttgctaggtatggctacaaagaccttcacaagaaagatgatgagtctgagaaaaagctatttgatagcctcttcttatttgtgcggctcgagtcaatgatggaaaggtgttcggattcggatgaatatacttgtatgggcagcaaacggagcggtcaaaaaaaggtctgttgaacaacaatggcaatggcaacacaattacttcctatgcagaataccacaatttcatcagttggattcaattgtgcccccgaaaatctccaatgcatgggagcatgacggtgatattctcggagcactt

SEQ ID NO: 9052 - DNA, 786 bp, Gossypium hirsutum
  Clone ID: GOSHI-09MAY01-C34730_1
cccacgcgtccgagaagagaagctctgacctttttcgatgaaggttcagccgatcgacactgattcacgggcagggaaagaaactgctccggctcgagcagaaccggcaagcgcgtgctaaatctcttattaaaaggctcttcgaccgcagtttccgagcgttctgagagtatcagcagcggagaagtcgagtattgggaaactcagtttagcaacaaagatgggacgactgaattcgagccgagttcgatatgtgtggataaaatggctagaaacttcatcgaagatagccacaacgacaagcaaccgccaccgcagccgcctccagctaagtactggccgtaaccgctgtaattgctttaatggtaacagcaacgatagctcccatgacgagtttgatgagttcagtgagtcttccaacggatcaccgcctgatacttgcgaaactgtcaagagtctggtacaatgcgccactgtcgtcgagagaaacctcttagctgacacggcggtgatcgttggagagaataaaaactgtaaacggaaagatgatttgaggaagatcgtgaccgacggtttactgtcacttggctataactcttcaatttgcaaatcaaaatgggacaagtctccttctttccctgccggtgattatgagtatatagatgtggttatggaaggggagagaatgttgatcgacgttgatttcagatcggagtttgagatggcgcgatcaaccgggacttacaaagcgatcgtccaatcactgccgttcattttcgtcggaaa

SEQ ID NO: 9053 - DNA, 360 bp, Gossypium hirsutum
  Clone ID: uC-gsflnu33B056a12b1
ttccttgcgtccgggaaaagatggctatggcaaactccttcaatgctgccagactactgacacttggctataactcttcaatttgcaaatcaaaatgggacaagtctccttctttccctgccggtgattatgagtatatagatgtggttatggaaggggagagaatgttgatcgacgttgatttcagatcggagtttgagatggcgcgatcaaccgggacttacaaagcgatcgtccaatcactggcgatcattttcgtcggaaaaccggaccgtctcgaccggattgttacgatcgtatcggaagcggccgaacagagcttgaaaaacaaaggcatgcacctaccttcttggaaggaaa

SEQ ID NO: 9054 - DNA, 431 bp, Gossypium hirsutum
  Clone ID: GOSHI-09MAY01-C34640_1
cccacgcgtccgcgaaacccctgtttactctctgtctcctgtcaagagtctcgaaggattccctattcttgatccaatttttctctgattttttaaaatttgtttttcagggttcctttacattttctattggaggcttttgggggggtttttttattgaatttttccttcggtcgtcatcgcagacgaagaacaacaacgttaacataaccatcggcagagtcagcaacacaaggcggagaccctgaagttctcgcgagttcggatttctagttgtattttgtttttgggttttgtgcctgttttagggtttgagtaggtttccaatcggagcccctaattttggtggtgtaatctttcctttatagtcttattattaggaaaaagaaggattagctttttattctggaatttcagtttcaattttggct

SEQ ID NO: 9055 - DNA, 726 bp, Gossypium hirsutum
  Clone ID: GOSHI-09MAY01-C34160_1
tgtcagaccgacgcgtccggcgcacgggaacatactgattggatggggatatgaagaatcatatatgggtcgaccctacaaaagactaccataactatgctgtaaaagggaaccctagtgaaatcatatttttcgtagatgatgtgccgatcagaacgtacccaaggaagagcgacgccacattcccaacgagaccaatgtgggtgtacggatcaatatgggatgcgtcatcttgggctaccgagaatgggaggtacaaggctgattataactaccaaccctttgtaggccggttcacgaatttcaaagtaacccccggcaccgccaacagtcccgccccttgccgcccgccttctgcctctccgtacgggtccagcagccttagcccacagcaagctttggccatgaattgggtcaaaaacaactatttggtgtatgactattgccatgatcctaagagggatcacactcagatacccgagtgctaattaaatgtgagtcatttaaaactttacaaaaaggaaaatgtaacaattgttgatcaaaagggggtttcttgagatgggcccttgaagagtggttaagcgtccaaaaccctctaagatttgcatcttttatttctattgttttgttgcttttaagtgctctgctttgttgttttctttggaataatttattacaagagttattttttaataaaaaagggttaattgtatcaaatatctc

SEQ ID NO: 9056 - DNA, 347 bp, Gossypium hirsutum
  Clone ID: GOSHI-09MAY01-C34040_1
cctatactaaagtcaattacattactctactttcacttgttctagctttatcgcttgtatgtgatactttttcccttctcgtcctcctcggcctccttgccgcttggctcttcttatacttgttccgaccgtcggatcaacctctcgcaatcttcggccgtacattctccgatcgtgagacgcttggcatcttggcggtgctgacggtattcatcgtgttcttaaccagcattggctcgctcttgatctccgccatcttgtttggagttgccattgtttgtatacaccgtgcgtttagggttccggaggacttgtttttagacgatcaggatcctgcaaactctgga

SEQ ID NO: 9057 - DNA, 594 bp, Gossypium hirsutum
  Clone ID: GOSHI-09MAY01-C34350_1
gcgtccgctggaacatcaccaaagccgactttcagatcttggaacaactaggaacaagtttgggcaggcatggctaagcaccatcctgatttgatcatgtgccggaaacagccggggattgcaataggacgattatgtgagaagtgtgatggcaagtgtgtaatctgtgactcttatgtccgcccttgcacgcttgtgcgagtttgcgatgaatgcaactatgggtcgtttcaaggtaggtgtgttatctgtggaggggtggggatatccgatgcatattactgtaaggagtgtactcagcaagagaaagatcgcgatggttgtccaaaaattgttaatctcgggagtgctaaaacagacttattctatgaacgtaaaaaatatggttttaagaaaagatgattgatgtttacctgctgtgattaggtcttgctggtgcttatgtcgcagggaatgccggattttagaatatgttggtatcacagagagacattaggtctttagaattatgttattttaagaactatagttgattgtaccaggggcctaatttatttcaacagaatctggtatggaaatatctggttgcattct

SEQ ID NO: 9058 - DNA, 417 bp, Gossypium hirsutum
  unsure (1)..(417): unsure at all n locations
  Clone ID: LIB3135-020-Q1-K1-A4
cccacgcgtccgcccacgcgtccgcgacttctctggattgtccctcttttctcccttcacattgggaacgagtttgggtagccatggcaaagcaccatcctgatttgatcatgtgccggaaacagccggggattgcaataggacgattatgtgagaagtgtgatggcaagtgtgtaatctgtgactcttatgtccgtccttgcacgctcgtgcgagtttgcgatgaatgcaactatgggtcgtttcaaggtaggtgtgttatctgtggaggggtggggatatctgatgcatattactgtaaggagtgtactcagcaagagaaagatcgcgatggttgtccaaaaattgttaatctcggtagtgctaaaacggacttattctatgaaacgtaaaaatatggntttaagaaaagatgat

SEQ ID NO: 9059 - DNA, 652 bp, Gossypium hirsutum
  Clone ID: GOSHI-09MAY01-C34360_1
ttcactcgtccgaatccccaccaccagttctagtccttcatggacattatggaggttgcgtgggcgaccttccaagttacgatgcttttacacttgggggcccctattcggtgagaggttataacatgggtgagttaggtgctgctcgaaacattcttgagctcggagctgagatccggatacccgtgaggaatacacacgtgtatgcatttgcagagcatggtaacgatcttggaagttcaaaggatgtaaaggggaatccaacagaagtctacaggcgaatgggacatggttcgtcatacggtgttggcgtcaagctaggactagtaagagctgagtatgctgttgaccataacaacggaactggtgcagtcttcttccgatttggagaaagatattaaaatgtgatttcgggtctaattctgctaaggtgggccgttacaggttccggttatggttgagctgttcttgatcttagaaaatcctgttgagaagtatggaactaggcatgttcttgtgtcaaataaattttgtttcgattttgggctatataattttatcttgatctgtaaaaccaaggatttataagggaattgttggtgttggattacatacttttttatgttctcaaagaataaaaacagaaccgaat

SEQ ID NO: 9060 - DNA, 312 bp, Gossypium hirsutum
  Clone ID: LIB3147-033-Q1-K1-B6
cccacgcgtccgcccacgcgtccggctcatcctcgcgccaaggcttccgtcgatgccccgatctccgatcgcgacagagaggggcaccaactcggcgattccggcgaaaaaggtacgtgcttgtggggaaggtccgagattcgcgacggcgcgatgtgcgggattgacgcgcaaagtgcgggagcgaggggcgccgcattggcgaggccgttgcggcgctgaacttgctgctaacagcctagggtttctgcagtggtttctgctttgggctagtgggctagggttaggtgttgggccattctaggtttaatt

SEQ ID NO: 9061 - DNA, 285 bp, Gossypium hirsutum
  unsure (1)..(285): unsure at all n locations
  Clone ID: LIB3135-018-Q1-K1-B6
tcgcccacgcgtncggacccttttagggtttcctcaaccctcatatgccaccgctcagcctcgcgccaaggctttcgtcgatgccccgatctccgatcgcgacagagaggggcaccaactcggcgattccggcgaaaaaggtaggttttctcttcctttctttatattttaagcaaaaataaataaaaaaatagcgaaagtaaaaaaatcaaatatatatatgtacaaatgaagaaaaaaaatgaaagaacgataatcgacaaaaaaaagaaaacctttttattt

SEQ ID NO: 9062 - DNA, 379 bp, Gossypium hirsutum
  Clone ID: GOSHI-09MAY01-C35980_2
aagcttttatctttaaaaaaaccctaaaatttttgagatgttctctcaacctccagcctaatgtctaatgtccaggcctccaattgcccgcttgtaaccggcgaagcatggccctccaacggtgcgggctcgatgcccggtaagcctcttctcctctctccaatccttcgtatgtgttgtggatccaaatggaaaaaggaaaaaaaaaggaaaaatagaacaaaattacaataaataatcaccttagaaatattcttggttgcctctcttctgatttttgtgtgtattttcttttattattttgcccaaaaaaaacccctttacagtgaaaaaatcgaaggcttttatagccaaaagacaagcaggttttgcctatttc

SEQ ID NO: 9063 - DNA, 419 bp, Gossypium hirsutum
  Clone ID: LIB3145-021-Q1-K1-C6
cccacgcgtccgcttttatctttaaaaaaaccctaaaatttttgagatgttctctcaacctccagcctaatgtctaatgtccaggcctccaattgcccgcttgtaaccggcgaagcaaggccctccaacggtgcgggcacgatgcccgtgaaaaaatcgaaggctttatagccaaaagacaagcagtttttgcctatttctttgctcaaatcgcaggtgctgtgaggtcgtggagggggagtgcacgatcgtgggacgtggatgcgcgagctgggggcgtgccgacgtgcgtggtggagtggcgctgaacgtgggggttgcaacgtgggtggctaggagtaacttatggttttttttatttgggccactgtagagttttgggctttagaatttgcgtcaaaaattttatgtaattgggc

SEQ ID NO: 9064 - DNA, 702 bp, Gossypium hirsutum
  Clone ID: GOSHI-09MAY01-C135998_1
ggttatacaagatcaaattccttatgttgaatctggtacttatgttgcctacaacaacgagaatagtggggttgttgagtgtttaaagaaagatggtatcgttgatctggactctgaattccaatctgccccggattgggtatcgatacaagctatgattaactcttggttagctgatgcattgacgtacgaactatgggtgggtaccgatggaagatcagcctacaagatttattattctgacctttcatggccaataggaaaagttcttttcctaaagcaagtgtatagtgttaaacaacgtcttggaattactaaagacaatgccgaacacagagaagatgagatttacaggagagcaaaattgcttatggtgctctatctactaagttaggagaacagaacttcctctttgatgataggccatcaagcttggatgcaacttttctcggacatgttcttgtcacccttcatgcactacctgacacgtcagtgctccgaagcaaactcttggagcatgacaatattgtcagatatgccgaaaaacttaaaacggagttgatagagtctggttcatcatcttctggtccacaatttcgctcagtcccttcatcgtcaactccgagaaaaggtccctcaaattggagttcaaagccgaagagcaagccaaaaagggagaaaacagaggaggagaaaactttt

SEQ ID NO: 9065 - DNA, 907 bp, Gossypium hirsutum
  Clone ID: GOSHI-09MAY01-C35900_1
agcagccaatagggccgtccgcgcgtccggggaaataaaaaacctatagcaccggggtctagtgcagcagaaccatctctatctatgccgctcgatctcccagggtttgatgtcattaaccctgtactgcatgatgaaaccaaaagtaattctgatcaaaagaatcaggtaaaattgcaaaatgcaatgcagctcaaaccattgcctccacctcccccccctgcacaatggcgggtttcaaaaccctgcttcaacgaggcagaagaaagacaacatgctttatcagagtcactgagacatgagcttgatctgaaacttcttagttctttcgtctctcagaagcctgagccacctttagttaatcaacaggaaataaatgataaggcaaatgcattgaaaccagagaagaaggtggacgaagagaaaaataatggacaggaaggggtaagcctgctcagtggtggcggagggatggatgaaaaggaagatttcttgcatcagatcagaactaaatctttcaacctaagacccacagccactgcaagaccaactgttatttctggtcccactgcaaatgtccaggtcactgcaattttgcagaaagcaaatgcaattcgccaggctgttgggagtgatgacgatgataactggagtgataattaattattgtggaatacgaatgcaaaagacaatcagaagttctcccagtcttgggttttcaaatttgggtgaggctgtttgaaatgtgtataatccttgtttcttcttgtaattagttacttgggctcatcttgtatcgtatagtgattatttgcatttgtttcttgaatagttaatgttttgaacaggtatttaggtggatcatgatgcataatgcatgagaatatgatagtctattaagttgtgt

SEQ ID NO: 9066 - DNA, 581 bp, Gossypium hirsutum
  Clone ID: LIB3825-032-Q6-N6-D9
tcgcgatctagggccgcccttttttttttttttttgatcaattaaaaacatatactgccagtaccataagtcacattaaacaaaatcagaaaaaaactcaatattctaatcatttaccttttgaattgaaacactctcgaaactgtttaattagattaaatatttgaatgcaaaacacaagaaaaacaaagtagtgatgattcaaaaccaagttagtggctactgtgcacgcaattacccggcactgctaatccctgtttttgctgccgctgaaaattacacttttaagcaagacggagaaacgggcaattgtaatcattctttatttgctgcacaaattggcaacatccatgttctaacgacgacacaacatccagctttccttatattcaacggccaaactgaaatgttttcttacacacaattcatccatatcaagttgcattataatttctgactcctagttgtcgtgccaaaatagtaaagcaattttcggtagcaataacctcgcgtcctcagtcccaaatttgaaaacccaagactgggagaacttctgattgtcttttgcattcgtattccac

SEQ ID NO: 9067 - DNA, 942 bp, Gossypium hirsutum
  Clone ID: GOSHI-09MAY01-C35500_1
atagaactgatgaacctgctgctattagtctgacaacaccacttaccgatggtaccttaaaatatacttccgatataatggctgagactgtcaatcttccagaatctgctgctgtttcttcctcttgcattccagcacctgaagaaagcaatcttgaaattgactctcaaaatatatattcggaggagaaagctgatgacagcattgttaaacagaaccttgattctgagcatgctggatctgtcaaacactctgataatatcgaacatgctgacaatgaagtggcagttcctgtacaagcgtcaaaggatgctggtaaggatgttcttactaatggctttgatggtacagttcagatgtctgaggatgtaaatgacatcaagcatcatggaaattctaaattagagatggtagaatgtgtttctgattttgtcaagacagtcgttcagtctgaagaagcaaaaattttttactttgttaagtcgatctttcagtctgaggaagaaaaaaattgccatgctattggcaaagatgcgaccaaccaaacttctccatcaactagccaaggtgctcaacatgctcccaatggtcattacgatgttgcatccaacgacagtgaaagtggcccttccagacagggagtcaagatggaagcttctggagaagtgtcatctacaatcgatgtaaatttcattacttacgaggtttgcagtgatacttccaaaagagaaaatgtgcagcagcgcatgtgcaagcctgcagaggttgtctcagctggttctgaggtttgccatgactaacatgcatgatcagagacacatcaaccgcaacagtgtcggatatctgaaaaggtaatatagttactaatatggctcagctgaatgccaaatcttctgagcacatcatattgagttgaccgctattctggatcttaactcattc

SEQ ID NO: 9068 - DNA, 652 bp, Gossypium hirsutum
  Clone ID: GOSHI-09MAY01-C35400_1
gaaagaatggcgactaaatccctaattagaaacggagctatgctgatgaatcgagtgttagtgaagcaagctctcaactcgaacccgatttctaagaatcgagtcttgaatcaaggcattcaaatcactcctcagctgttcccatctctctcgaagtcaaaacttgaaattccccatttgcctcgaaacgacgtcgattctctctctgaagtctcctctacggggtttctttatccatttggtctcccttctctccgtttcttccttcccgacggagattcatcaagtgagccaatgctattattccccaaaagaacatatcagcctagtaccatcaggcgcaagagaaatcatggatttttcgcccgcaaggcaacgaagggcggtagaagagtcattgctcgaagaatagcaaagggtcgttcaagaattaccgcttagaatctggattttcagtgatgcgttcatcagaatcaaaatccggaagctgccttaaatagggtacaactaaacaaaattcgtatcaacttttttggttaattcaataagctctggctattctaaagacactctttggaggaatttttttctttcttcaaatagaattatgttcacttttagatttctttttgatacataaaacttgcaagaa

SEQ ID NO: 9069 - DNA, 608 bp, Gossypium hirsutum
  Clone ID: GOSHI-09MAY01-C35750_1
attcggaggaaggagcgaaggaagaggcatagagagagagagagagagagagagagagagagagcggggaaaataacagtcgaggataggctgcacttgaaaagggaggggaaagggaagaaaaatggaattgttattttattctcaataattggtttaatttcgaaaaaaaaaaacaattaaatggagttaggcgagctgtgggcgatcttcggtcccggcgtcgcgggcgccgtgttcggtgccggctggtggttttgggtcgacgccgtcgtttgcagctccgtccatgtctctttcgtccactatttacctggaatatttgcttctatcgcggctttgatgttcaattgcgttaggaaagaggatattgattactctccttatgatgaaggcgagtggaggttgaagctctggcttttctttgcttatgttgtatcctttgtctcactagctgcttcagttggcctcttgatacaagactcactagtgaaatctggtccttcattgtggactggtactgcaggcatcttacagtgtgtgtttgtctcaatcagggggctgatatattggacttgtcactctcgatatcacatatatatccaacc

SEQ ID NO: 9070 - DNA, 418 bp, Gossypium hirsutum
  Clone ID: LIB3145-022-Q1-K1-D5
cccacgcgtccggtcgataagagtggaaaataatgttcagaatattagctgtacaggttgctctctttcctttgtgttcctcgtcaattattactcaattaattagatcggagaacaatcaatcaaatggagttaggggaactgtgggcgatcttctgtcccggcgtcgctggcgcagtgttcggtgctggctggtggctttggatcgacgccgtcgtatgcagctccgtcaatgtctctttcatccactatttacctggtacatcgtgtttcaccttttttttcttgcattaatttatcagctgcctttctaatctcttattatcaatgtttatatggctcatcattattattatctatttatttaggaatatttgcttctatcgcggctttgatgttaaattgcgttaggaaagag

SEQ ID NO: 9071 - DNA, 407 bp, Gossypium hirsutum
  Clone ID: GOSHI-09MAY01-C35710_2
cggacgcgtgggcggacgcgtgggcggacgcctgggcttgctcgatacttttggtggggccagctctttcctagtctctggaatgactgcacgaacagctgttattttcttctgttttgctgtgattaaaactgtggatgatcattgtgggctatggttgcccggtgatattttccatatatttttctggaataactctgcttatcatgacatccatcatcaactccaaggcacaaagtattactactctcagccgttcttcgcccactgggataagctacttggaactcatatggcttatgatcttttgaagcgacccgaggggggttttgtggtaaggctaaagaaagactagtcacattctgttgatttgtcttgtgtagttagaggctctcgcttcacactgt

SEQ ID NO: 9072 - DNA, 692 bp, Gossypium hirsutum
  Clone ID: GOSHI-09MAY01-C35710_1
gggggggccctattccttccctgttctttgggaagaacgccacggaccagccgaattatttttcggtctggccgggattaaaaccggggatgatccttgtgggctatggttgcctggtaatattttccctatatttttcgggaataactctgcttttcatgacattccttcttcaactccaggccacaaggtttaattactctcacccgttcttcgccaactgggataagctacttggaactcatatggcttatgatcttttgaagcgaccggaggggggttttgaggtaaggctaaagaaagactagtcacattctgttgatttgtcttgtgtagttagaggctctcgcttcacactgtaacagttttttccttgaggttgtgccattcttgagaagttgaatttgttttgtttgaggctttaagttctagggatccggcatgtcattgggttatttatttatttatagttgcttgaccatgttctgtattgcaattgtttcaccaactaatatttgctttatgttacccggtatttaaatcttcatgttgtgtaatttgtattggactagctgatgagctgttcaagagggctagaattggtgtataagattatttttaagtactgatttcaggttgctcttagaccttttgtttaaaaaaaaaaaaaaaaaaaaaaattctgcgccgcg

SEQ ID NO: 9073 - DNA, 414 bp, Gossypium hirsutum
  Clone ID: GOSHI-09MAY01-C35660_3
cgcgcacgcgtacgctcccacgcccccgcccgttgacacccatagacggcaagacctcatgctccaccgttggcggcggtttggccatgaacaaccctacccccgcggcggtcacgcatgttctccataacacgagagatttcccgtcggttaacggcgtggaggacctgctggttttgtctataggcaacggtccctcgtgcggaaggtcacaggtccataacaacggtgaatgttcaacttcttccgtcgtcgacattgcgcttgacagtgtctccgagacggtggaccagatgttggcgaactctttctgttggaaccgcacagactacgttagaattcaggcatgcggcgtggacactgcatattcgcccggttcactcctatcgatgctctgtttggttccttagaaaa

SEQ ID NO: 9074 - DNA, 1042 bp, Gossypium hirsutum
  Clone ID: GOSHI-09MAY01-C35660_2
ctcggctcttttaatcaatagggggggggggggggggttcaccatcaaaaaaaaatctccggtaagagcatggataaggtgctgaaggaaatgtttaggagagaagacggaacggttttgacactgaaggacacgtgtaagcctctcctggttccttgctttgacctcaacagtgtggggggggggggggtgtctctccgccaccttccgatcacctagcttcaacttcagctttggaaagtgtgccgcgccacgtcagccactccaagcctcttcaaacctttccaattgtcatccatcgacggcaagacatcgtgctatgccgtggacggcggtctggtcatgaacaaccctaccgccgccgcggtaacgcacgtgctccataacaagagagatttcccttccgtcccccgcgtccgcggtcgcgtgggtttgtctttaggcaacggtccgtcgtgcggaaggtcgaaggtcggtagtaacggcgaatgctccacttcttccgtcgttgacattgtgcttgacggtgtctcggagacggtggaccagatgttggggaacgctttctgttggaaccgtactgactatgttcgaattcaggcaaacggactggggagtggaaggatgagaatggaggaggtactgaaggaaagaggggtcgagtcgttaccgtttggcgggaagaggttactgacagagactaacggaaatagaattgaaagctttgtgcaacgccttgttgcttccggaaaaaccagcctccccccaagcccctgcaaggaatcagccgtcagcccactagcaaacggccgttagctactcattttaaatatttgttctcctctgttttcttctttttacccactccttttggttttcctcttttaaccctccttttgtaagttgtaatatggaacaaacctcctcaagatctactttttaactgccctactttggagaaaaaaatagctgctacttagccaaatgtactgaagtattgagttaatgatgatttaaatgaatgacacgtcactatattacc

SEQ ID NO: 9075 - DNA, 652 bp, Gossypium hirsutum
  Clone ID: GOSHI-09MAY01-C35660_1
cccgtttacatctatagatggcaagacctcatgctccaccgttgacggtggtttggtcatgaacaaccctaccgccgcggcggtcacgcatgttctccataacaagagagatttcccgtcggttaacggcgtggaggatctgctggttttatctttaggccccgcgccgccgcccgcgcggccgaaggtccgtatcaacggtgaatgttcaacttcttccggcggcgacattgcgcttgacggtgtctcggagacggtggaccagatgttggcgaactctttctgttggaaccgtacagactacgttagaattcaggcaaacggagtggagactgaaaatacggtggggccgaaaacggaggcgatactgaaggaaagaggggttgaatcgttaccgtttggcgggaaacggttactaacggagactaacggagagagaatcgagtgctttgtgcaacgccttgttgctaccggcaaatccagccttcctccaagtccttgcaaggaatcaaccgttagcccacttgccaacggccgttagttactcttttcttcaaaattacttttttgtcctttatttaactcttttaaccgcttgtaataaacctcctcaacctttttttttttttactctttaactgttccctacttt

SEQ ID NO: 9076 - DNA, 683 bp, Gossypium hirsutum
  Clone ID: GOSHI-09MAY01-C135618_1
agtctgaaactggagattgatcctgatgctgatacatcagaagacagtggcttacaggaagttcttccaggcatttctgatcacagtatgattaagtgggaaaataaacttcttcttcttggtgggcattctaagaaatcttccgatgcaatgatagtgcattttatcaatctggagacgcatgtctgtggtgtcatggagacctcaggaaaaattccggtagcacgtgggggtcattctgtcacactggtgggttctaaactaatagtgtttggtggagaagacaggagcaggaaattgctgaatgatgtacatgttcttgatttacagacaatgacttggagtgtagtccaggcaacgcagacacctccagctccaagatttgatcactcagctgcagtgcactcagagcgttaccttttgatttttggcggttgttcacattcagtattcttcaatgatcttcatgtgttggacttgtacactatggagtggtcccaaccaccagttcagggtgatttggtgagtcctacgggctggtcatgccggtatttccattgatgaaatgtggtattttgtcggtggtggagataacaacaatggttgcccagagaatcctgccttaaatatgtccaatttagtttggtccactcggaccactttgaagataagcttcccctgcc

SEQ ID NO: 9077 - DNA, 463 bp, Gossypium hirsutum
  Clone ID: GOSHI-09MAY01-C35620_1
cccacgcgtccgatcgcaggggctcagcgcttagttgaaagacactgtgcctcaaaagagatctgagcccagccctagaaggaggattgcttctatcaccagtaggcgaacagagctttcaggcatcgggatcatagtgtaacctatgactaagctccgtgactagctccattgtcatcatctaagttcttcttcatcacaggccaaccaaaccgctcgaccatagggaaatgaggaacccatagcactggactgaagtgcctgccccctcttcatcttccgagtcatgcccggaatgagtactttgcccttgagatctatccaaagcaaaagaaagaggaaaagagttcagctgcttgccgagctgtctaaaatgactaatagaagctcaatcgaacagaccttgcctaatagaccggaatgggggtagcccggaccacgcgaaaaagaccaggagctggag

SEQ ID NO: 9078 - DNA, 513 bp, Gossypium hirsutum
  Clone ID: LIB3582-015-P1-K1-H9
cccacgcgtccgaaaaaaaaaaaaagcctattgctcccattcggccgaccccaggatccgcgcagtccaaccgccaccactgcgaacggtggagaaccacatgcgtgcccctcgcctagaacctcggcttaaagaccaccgatttcagccccagaaatcccaccccaagcttcgatttcggcgaagtggagagggatttcgatggcccattcgcacaggcgtaaatgtgtaagccttcgtaaaaaaaatacaatcggtacggagcagaggacatgcgctggcccttggcgcgaggcgtacggggctgtgctggcgcgggtacgggggctgtactggagggtacggaggtagctggcgtgggggctggggcttggctgcctggttgcggtgcaaaagtggggaagaaaccttagggtttctgtcctccaaacaatgggcttatcgggcttgtggtttgggtctatgtttagttattgggcttgtttgggacttgggttatgtagttgggtttgg

SEQ ID NO: 9079 - DNA, 434 bp, Gossypium hirsutum
  Clone ID: LIB3145-011-Q1-K1-B5
aaaaaaatacaatcggtgccttcttggctttatagccgaaactaaaatagaaaaatacaatatttccttgctttgctgctgttgtgtttgtcttgttcacaggtacggagcagaggacatgcgctggcccttggcgtgaggcatacggggctgtgctggcgcgggtatgggggctgttctggagggtacagaggtagctggcgtgggggctagggtcgctgttgcggcgcaagcaggagccactagggtttctgctttggttcttggtttgggcattgggcttgttgggccatccgggttttaggttagggttttaagtttggttttttgtttttgtgttgtaacgggccgggcaaattttgggccttacaaagactaaaggccaaacacacgcacgccactgtctcgccagcccgtatctgtgttaacacatg

SEQ ID NO: 9080 - DNA, 377 bp, Gossypium hirsutum
  unsure (1)..(377): unsure at all n locations
  Clone ID: LIB3196-052-P1-M1-G7
gaaaaccaaagtaaacaaacggaaaaataaaacaaaagcctattgctcccattcggccgaccccaggatccgcgcagtccaaccgccaccactgcgaacggtggagaaccacatgcgcgccctcacctagaacctcggcttaaagaccaccgatttcagccccagaaatcccaccccaagcttcgatttcggcgaagtggaaagggatttcgatggcccattcgcacaggtacggagcagaggacatgcgctggcccttggcgcgaggcgtacagggctgtgctggcgcgggtacgggggctgtgttggagggtatggaggtagctggcgtgggggctggggcttggctgnctggttgtggcgcaaaagtggggaag

SEQ ID NO: 9081 - DNA, 561 bp, Gossypium hirsutum
  Clone ID: GOSHI-09MAY01-C35100_1
cgcccacgccgtccgggttcgcaaggattggtatctacacttagggaggaggtcccagaaaatgaagcgcgggatcattgagttcaaaggggtgaggaccaattcatttccacacggaggcgtagatggaaaggaaatgatgtgtccatcagcatctagtgcagagaattgttagcttttctgttaagaggcataaggagtggtatgctatagtgacattgcaaatggttagaacatggatcggtttgagttgaaaagtgacagtttatcagatgtagatgatggcaggaatagtatagtcaaattttgcacttgttgtgaaggtaatagtgtacgatgtccactatatataacataaattatgtaaaatccgaatcaatcagggtgtccttttgtcgcgtgtacggaggtagtcataccttcgtattgtgatatgtgaatgtaagttaaatacataatcaaatgtttcaattaagcaatatcgttggtaaaaaaaaaaaaaaaaaaaaaaaaaaaaaaaaaaaaaaaaaaaaaaaaaaaaaaaaaaaagggcggacgaat

SEQ ID NO: 9082 - DNA, 747 bp, Gossypium hirsutum
  Clone ID: GOSHI-09MAY01-C35120_1
gtccaatataacatactttttgtcgttgcttaagctctcttttctgttggatattgatatctgcataaaaaacgctcggcttgagaagtgattgctttgtttagtcgaacctctctactaccctggttgcgattgttttgctaagtggatttgaagtggcatcaacaaaccctttttagtttaaacttggggaaggagtggactaaatattgtttcgttgaagtggatagaaaattttctaacttgtaccactctagatctgagaaacagagagggttggactttgatgctgttagatttagaggtaagttttgaacttgatatgcaggcgggcggtggtgtttatcagttgttttgcgggctatgtgtctataaggattctttgaatgcccggcttcatatataaggttactgaatttaggatgattgaaattcttttcgtttatttccttaatgaattgagcaaacctctaggttatattttaggatctgttgacaagtggcttggcttttatatgaagaagattgtttgaactgttctgtgagttctatctctctcatggactggaatgccaaaaccccgttgcaatgggagtgggagaacctaatgatgttaaatgcgacaccaactgaaattccaaggaagctaagatcggcagagtgggatattgagggcgaggaagagctggactcttgggctctctattcttctggtgctgctgctggaggtagtggtggttctggatc

SEQ ID NO: 9083 - DNA, 544 bp, Gossypium hirsutum
  Clone ID: LIB3582-052-P1-K1-G8
cccacgcgtccgcccagcgtccgatggtgctgggggcatagatccttttccctcaacatacacgatggattcttgtagaaacgaactgtcggagttcttaaatgccatttcctccgacccatttcatcctcatctcagagaccttctgtcttttccatctgtcgcttctactctaaggagcgcgtcctcaatccagatcctcggcgatgaccattgttttccctcctccgccattgtatgtgctatttagttcaccgatcaacccacaaagctacaatcaaggagtccccctccaccaccagcctccagaatctcagttctttagctaccgtcatcgcttgtaagcaggctctcacctcagccgtagttgcatcggccacaaagttattccaataagtacaggctgccaaagtatacctctcattgtctctaaaaattattcccgtcactgaaccaagcaattggctctaaaaattattccaggcactgaactaagcaaacacatgttaaaagccgcatcaaaattacatttaactacctttat

SEQ ID NO: 9084 - DNA, 452 bp, Gossypium hirsutum
  unsure (1)..(452): unsure at all n locations
  Clone ID: LIB3145-009-Q1-K1-A4
cccacgcgnacgctagcaggctgaaacagcatcactactatcatcatctttctttatagatccttttccctcaacctgcacgatttattcttgtagaaacgaactctcagnagttcttaaatgccatttcctccgacccatttcatcctcatctcatagaccttctgtcttttccatctgtcgcttctactctaaaaggcgcctcctcaatccatatcctccgcgatgaccattgttttccctcctccgccattgtatgtgctatttagttcaccgatcaacccacaaagctacaatcaaggagtccccctccaccaccagccttcagaatctcagttctttagctaccgtcatcgcttgtaagcaagctctcacctcagccgtatttgcatcggccacaaagttatttcaataagtacaggctgccaaagtatacctcttattgtctctaa

SEQ ID NO: 9085 - DNA, 781 bp, Gossypium hirsutum
  Clone ID: GOSHI-09MAY01-C35300_1
ctgaacaaggaatgcagcacgagcaacttaagagggacaaggctcaaattgaaaaatcactaatgctggaaagtcagaagtcaccactgtgtcacacagatttaaatgatatcctcaactttgaggagtttgtgaaacatttaacaaatgaagagcagcagcagttgttgcagtacctacctccagtcgacattgccaaacttcctgatagcctccaaagcatgtttgaaagctctcaattcaaggagaacctatgttactttcagcaactgcttgcagaaggggtttttaatatctctggcccaggggttgaaagctgaagaattgtaaggactttgaaaagaactttgcattatttaattttgactaaatcccaatggggggtaaaccgccgtccatgtactttaaagagatgtcaagattagtatttggagcgcctgtgagttgctagaggaaaccaaccgccactacatcgaacaatttagtgattcatgatgagatcatgtgacagccaagtcaaaattttcagaagcaaagaccataagtgccccaaaaaggtgtcatgaggctactgcgaaaaccaagagtctagcccatggatgtctgcgttatcgagagctattcgcttggcctccgaggactctttggcggaatctccctttggaagagagtccacaaattgtgtttaggccccagggtgtttcgaggcgactgtatccttatttatgcgaagtaccttattatacctccatgatctcttaacgggggataaaaaaaaccc

SEQ ID NO: 9086 - DNA, 676 bp, Gossypium hirsutum
  Clone ID: GOSHI-09MAY01-C35280_1
gtcactcttgggacccttataccgataaggccaaaatgatccaccatgatggtccgatgcttaccaagaacgttaaactagccttaatatggtacggagattgtggaaaagacataaagaatacgatgaggaatttcataaaatcgttggtgttgccaggcaaagaccaccttcaacctcaagtcacccgttggtgggaggtggtggaaagttatcaagccatgatgccaggcgcaaagcctgggaaaagccccaaaatcaaggtggaagtggtgaaacaatcgactaataaatcatagtccccccgcgcggccgtgactttgcaagcacatatcccaattcttatcgaggaactcactaagggcgatactagtgtccttcccgtcatcgttgctgcaagagatgtctccattcaaggactttgcaatggaaagtgtgccgatcatctacttactgaggatcccaagccgcgcccatacatcatcgtcgggaacccggaaactgagtgccctgaagaatgtggatggcctttcgttcccgctgaacctggctcaaaaggaccagtccttaaaccaccaagtggcaatatggcagctgatgctatggtcattgccttcgccagcactttggctgatgcggtcacaaaccctatggagaacggcatctaccatgagaa

SEQ ID NO: 9087 - DNA, 470 bp, Gossypium hirsutum
  Clone ID: GOSHI-09MAY01-C35250_1
gtgttcccaccgcagattaccttatgtgcttatttaagcccccccgcgcgtccggacaatttactcaccggccagattcctcaacaattaggctttctatcacggttgtcagcttttgatgtttcttacaacaagctttcggggccaataccagcctctttagggaacagaagtgggaaccggccgagtttcaatgtcacttcttttgaaggcaataaggatctttatggataccctttaccacccatgaaaagcaaagggttgtcagttttggccattgttgggatcgggttaggaagtgggcttgctagtttggtgcttagttttacaggagtttgtatctggttgaagattagagatgaaaagatggctgccgaagaagggaagatgagtcaccctatgcctgattattaaaagcttgaatctaagattaattactgatctaaaatggggaaaagaaaagaccggaa

SEQ ID NO: 9088 - DNA, 432 bp, Gossypium hirsutum
  Clone ID: LIB3148-053-Q1-K1-B8
cccacgcgtccgattcctcaagaattaggcctattagcacggttgtcagcttttgatgtttcaagcaacaagctgtcaggtccaataccagcatcattaggtaataggagtgggaatttaccaaggtttaatgccacatcttttggtggaaataaggatctttatggataccctttaccacctatgaaaagtaaagggctatcagttttggccattgttgggattggattaggaagtggactcgcgagtttggttattagtttcactggggtttgtatttggttgaaaattacagaagaaaaaatggctgctgctgaagaaggaaagattggtcagttcatgcctgattattaaaaaaaaaaagaagaagaacaaatatcattgaagatcattgagcttaaattcaaaaaagaaagaaaatcccaggtatgt

SEQ ID NO: 9089 - DNA, 521 bp, Gossypium hirsutum
  Clone ID: GOSHI-09MAY01-C35260_1
attctgcaaaggtttttagtgtgttgtcatggagctggtcttctaagtcccttcagcttgcaagagatgcttttcagtgtcgatatagcgaaccatgcaatcctggagctcattgcattactcttgataagctatatgttgcagagcagaagctttacaaggaagtaaaggaggaagaagttaccaaattggagcttgaaaagaaattgatgttgctccaaaagcaagatgaaaaccatgactggaccaagactcagaaaatcaaatcaagtgttgagaatctggagaatgacatgacacgcttgcaacattcaataagtacagcctgttcatctatattggagctcattgatgaggagctttacccacaactggttgcattaacttcaggtctgatggggatgtggaagatgatgtacaaatctcatcaatttcagaaccatatttcaaagcagttgaatcatctcactgatcatttaagcatggatctgactactgaatcccgtcttcaggctacagct

SEQ ID NO: 9090 - DNA, 742 bp, Gossypium hirsutum
  Clone ID: GOSHI-09MAY01-C36860_1
cagacgggtctaatcttcttcttttgctgcaaatgctccactctgccccggcttgcagagaaggggcacttcatgttctctatgctttggcaagcacgcctgaacttgcttgggcagctgccaagcatggtggtattgtttacattcttgcacttctcttgcctttacaagaagaaatacccttgcagcaaagagcggcggcagcctctttattgggtaagcttgttgcgcagccaatgcatggacctagagttgccataacattagcaaggttttttccggatggcctagtatcaatcataagggatgggcctggtgaagctgttgtgtctgcccttgagcggaatacagaaacaccagaactcgtatggacacctgcaatggcagcttctttgtctgcacaaattgctactatggtatcaaatctataccatgaacaaacaaaaggccgtgtcattgactgggatgtacctgagcaaccttcttcgcagcaggagatgagagatgaaccacaggttggtgggatctatgtcaggttattccttaaagatcccaaattccctcttagaaatcccaagagattcctggaagggcttctggaccagtacttgtcttctattgctgccacgcattatgagtcacaatctgtggactctgggcttcctttgcttctttctgctgctttggtttcattattgcgagtgcaccctgcacttgcagaccatgttggttatcttgggta

SEQ ID NO: 9091 - DNA, 687 bp, Gossypium hirsutum
  Clone ID: GOSHI-09MAY01-C36810_2
ttttcgcgtccgcgctcgcgcgctccctcgcgcccgctctacctgtgctttctttctgctttctctctctttttaacctttgtttctggcggatgagccggggtctttgcagatccacccgaaaaaaatcccaacttctgtgcaactcagttagtaatgttaattaggacaaaatgatgggatgttcttggtttttcccgtctgatctatatttctgagcataagacctccttcggggaagcagggattagatgggggagaatattgatttcagacgctgggatgaattgataccggatgccttagggatgattttcaagaatcttccgctccaggaaatacttactgttgttccgagggtctgcaagtcgtggcggaaagcggttgctggaccgtactgctggcaggacattgacattgaacaatggagccaacaatgccggcctgaaacccttgatcgaatgcttcaaatgctgataactagaagctcaggttcactccgaaagctttgtgttactggtctcgctaatgaccagagcttttcactcattgcagataagttgctgggaggctttttttcggtgactttcttggatgttagttactgcaagaacatcggggctccagcccttggagcaattggtaagaactgtaagttactaatggggttgaggagaacaatgcacc

SEQ ID NO: 9092 - DNA, 971 bp, Gossypium hirsutum
  Clone ID: GOSHI-09MAY01-C36810_1
aaaatgatgtggatgttcttggtttttcctctctgatctatatttctgagcttaagacctcctcccacgcgcccgcttagttatgctttagctggaaaggaagcagggattagatgggggagaatgttgatttcagacgctgggatgaattgataccggatgccttagggctgattttcaagaatcttccgctccaggaaatacttactgttgttccgggggtgtgcaagtcgtggcggaaagcggttgctggaccgtactgctggcaggacattgacattgaacaatggagccaacaatgccggcctgaaacccttgatcgaatgcttcaaatgctgataactagaagctcaggttcactccgaaagctttgtgttactggtctcgctaatgaccagagcttttcactcattgcagataatgccaaatcccttcagactttacggctgccaagaagtgaaataagtgattcgatagtggaacaggttgctgggaggcttttttcggtgactttcttggatgttagttactgcaggaacatcggggctccagcccttgaagcaattggtaagaactgtaagttactaatggggttgaggagaacaatgcacccattaaaggtaattgacaagctgtctcaacacgatgaggcctttgccattgctacaacaatgccgaagctcaagcaacttgaggtggcgtacctacttattagcaccgaagccgtgcttaagatactcgaaaactgccctgagcttgaattattggatgtgcgacgatgttggaacgtgtagctggatgaaaattgtgtcacgaaattcacacgactgagagtggtcggaccacatgttgtgtattaatttgggatgaaaggtgtcgatgactgtgcacatttatcacgtgtctctcgtttacttggctcgggacttcgttgccgggaaatgtctgttctgattatttacaataaatac

SEQ ID NO: 9093 - DNA, 456 bp, Gossypium hirsutum
  Clone ID: GOSHI-09MAY01-C36590_1
ggcgatttgttaatgctagagcagatgctgttttgtcttcccagaggtctaacgcagagaaaagcctctataatgcattgacaactacctcaaaactgcgagaatctgttagagccaaaagaactgagttacagttgctgaggcaaaacttgaagctgatttccatcctcaaggggcaaatgttatttttggacgaatgggctcttcttggaccatgattatttcagttcactatctggggctactgaagctctgaaggctagcacgttccgccttccggttgtttctgggccgagggctgttgccaaaaattgaaggatgctatttgttcaacagttgatgtaatgcacgctatggcatcctcaatactctctgttatataaaaggtggcaaaacaatctctcctctctctgcacttgaaaataacactgcacacgagttttctacactaaacca

SEQ ID NO: 9094 - DNA, 399 bp, Gossypium hirsutum
  Clone ID: GOSHI-09MAY01-C36460_2
ccttttgttttccaaggaaaaaacaaaacaccctctcccccttttgtctttccaacgatcgggctccctcaccgcccaccgtaccaccaccgttttcagtggccggtgacgcgcaacaataggtatttcaaccccgtttttgggaccctttgaaggccgagttttcagccaaacaatgcggaattgaaagggtctctccctctctaaacgacgcgaccccgacgaccgaggagggatctccggcgacgaagccccgaccgattcccgtgtcagacgcgtggaaggccggtggttggtgccccaagcggtggtggtggcgcgcgtgatggccaagggcagaggggggagtggcggctgtactttggtggctagggttacggtcgctgctgtaagatagtg

SEQ ID NO: 9095 - DNA, 468 bp, Gossypium hirsutum
  Clone ID: GOSHI-09MAY01-C36460_1
cttttgttttccaaggaaaaaacaaaacaccctctcccccttttgtctttccaacgatcgggctccctcaccgcccaccgtaccaccaccgttttcggtggccggtgacgcgcaacaataggtatttcaaccccgtttttgggaccctttgaaggccgagttttcagccaaacaatgcggaaatgaaagggtctctccctctctaaacgacgcgaccccgacgacggaggagggatctcccgcgacgaagccccgaccgattccggggaggccctctactccctccctttatttattttcgtgcccactttatttaatagatttgcaagtaaggataaaaagaaactaaaagagattagcattgaaatgaaaacaaagagaatagatcggaaatcacccttttttttatctggtttgctcttgatttttatggctaaatgtcgtgtccaaaaaaactacaatggatgt

SEQ ID NO: 9096 - DNA, 390 bp, Gossypium hirsutum
  Clone ID: GOSHI-09MAY01-C36770_1
acggttttgtataatggattgtggtaaattaccagatcctaagaccatacaaaggctgattttatttgttggatgagatgataggtgaggtgaagatgttgtacgtacagccacaaggcttgaatgaatattgctactgctaaaattttgggatggaagtgaggaagtggaaagacagtgttggcagagaagatgtaagctatctgagaatgaatagaaattaagggcatgggtaatgtgctttgtattgtatgtttcactttaatttgattccttgagtattttagagaagttattatggtttgtgttagtttcattatctatcattgtaaagttgatgaaacagcctgtagcattgattatagtataccatgttgtaccattacctgt

SEQ ID NO: 9097 - DNA, 286 bp, Gossypium hirsutum
  Clone ID: LIB3147-036-Q1-K1-G9
cccacgcgtccgaccacgcgttcgcccacgcgttcgtaaaattttgggatgggagtgagaaagtggaaagtgttggcagacaagatgtaagcagtctgagaataaatagaaattaagttcattagtaatgtgctttgtattgtatgtttcactttaatttgattccttgagtattttacagaagttattatggttcgtattagttttcattatctatccttgtaaagttgatgaaacagcctgtaggattgattatagtataccatgttgtaccattacctgattc

SEQ ID NO: 9098 - DNA, 323 bp, Gossypium hirsutum
  Clone ID: LIB3146-032-Q1-K1-B4
gaaagacatgctagtttaattgatcaatttggttaattcttctatagcttttggccatatcagttgcagccagttgctgttcaaattaattgttctacgcgaggacttgttatcttgagacaaattgtttcttcctctaagctttttatacaagtttgtattcgaaagaaattcaaaaaattatggcgtgtaatatctgctcaaaatcacttaaatgcgtggatgtttctgcagatggaagtctatgtatcgtggcgatttcatgtttcatggcattgggagatgaaaattgtttcatcggtgttctggtatcgagttcattg

SEQ ID NO: 9099 - DNA, 200 bp, Gossypium hirsutum
  Clone ID: LIB3145-030-Q1-K1-G5
tagcttttggccatatcagttgcagccagttgctgtacaaattaattgttctacgcgaggacttgttatcttgagacaaattgtatcttactataggctttgtattcaaatggaagactatgttcgttggtgattacatgtttcatggccttgagagatgaaaatgtgatatccggtgttatggtatccagttcattgct

SEQ ID NO: 9100 - DNA, 646 bp, Gossypium hirsutum
  Clone ID: GOSHI-09MAY01-C36610_1
gttcatttatcgttaatcaaattttattgaacaataaatggcacgacaaatttttgttttagttttggtcttaattgccattgtcaagatggtttccgctgacatcatggcgaccgccgcacccggctatactgatgccattggaaaaaatgttggtgcacccaataatggtgaaggtggtcaggatatcgttgaaggccgtcttgacaatgcggttaatgctatcagtggtgctgcaactggtctgccgcctagcagtagcagtgcaaccataattgggttatccgctatcgccaaagctgttgccattgccggttatttcctcttctaagtttgagatttgcgggtagaatgctagttgaatttgtttatgaataaattaaatgtcacatatttctaatttgcttttaatttgatcatgtcatatgtaataaccattttagtttttttattttcccaaagctaaaataggaaaatcatagtgtgtcacttaataataatcataatacaatatggtttcaactacatttcgtgttgggttaattaattttttgggttaaattatacaatgaaaatttgaaagttgaaatatgatgcaagtccacatgttttttgtatatttgaaattcagtgcacatttattttt

SEQ ID NO: 9101 - DNA, 540 bp, Gossypium hirsutum
  Clone ID: GOSHI-09MAY01-C36630_1
ggaaaaacggaacgacccacgcgtacgcccacgcgttcaacagtattgttcataccatttagatgaacaacttgatagataccgatggacatgtacagaatgattgtgatgagttggaatgtcttaggaagaatcatagaatctataccttgttggctcgagcgtttaaccctttcgtaagaaaagattgtatatcagaggccgttattgcatcgagcacagataattacccagaggaaagcatccataatactttggagccgtttgatagaatagacaccagagcatcgtattggtcgagtgaagggcaaaacaatccttgccgtctccgagactttactttataagttgatgaccaagatgtgtatcgttacagaaatccatgttcagccattccaagcttattttcagtacggcttcccaatatactcgtctaaggctgtcagatttagaatgggtcataaattgcagagcgaaatgacggatagtttgacttctagtaataaattggcagatgacgagttcatttggacatatact

SEQ ID NO: 9102 - DNA, 330 bp, Gossypium hirsutum
  Clone ID: GOSHI-09MAY01-C36090_1
aaaagggtaaaactgatcaagctctatctatgcaggctgagcaactagaccctgagaactctgaggcttttcaaggtcagcattcatcatctaaagcacctacttcatcatcgtcggactgtgaagagagaggagatgcaaaagtgaatactggagtgaacgctaccgatgatgagacggctgctcgagtaattgagcctcaggatgcaaataagacatagaacaaaaaacaagttgaccggtcctcatgtggctccgacactccttcaagcggtgaggtagagacagatgcgttagaaaaacatgaaaaagacaaggaagattcaaaag

SEQ ID NO: 9103 - DNA, 654 bp, Gossypium hirsutum
  Clone ID: GOSHI-09MAY01-C36050_1
caataaacaaaacagattacagagacaaaaatctcataaaccatgaacaataacgtcctcaaattccaacatcaccaaccttcttatctccgaatttcccaaactacccttccccgccaccctacttcccttcttcacctctttcccaaattatccttccgaccatcttcattttccttgtccaaaacctcccggtccttcaaattttcgagcctttccaatgtcgaacagccggtttattttgacgatgaagaagagagaggaggacccagcaatgagtcggttgtggaattcgaagacttggtacaaaacggcgtcgtttacagggagacgctgagattggtggagtgttccatgtttgctgcagtattgaaatgcgactgtttaatttagacttctttctgtaacttgaaacaaaattttgctccatggaccataatgagacttatttccgtaacttgaaaccaagtttcgctctttggaccatgtatttgctgtttccaacttctaaattcaagtcactttcttgccttgttttcggttctttgaagtaaaacctcttggattcttctcgttaatagcttaataaattggtagtgtattacttttcaaaaaaaaaaaaaaaacattctgcggccgcccacgcggtggaac

SEQ ID NO: 9104 - DNA, 337 bp, Gossypium hirsutum
  Clone ID: LIB3145-022-Q1-K1-A7
cccacgcgtacgcttcattttccttgtccaaaacctcccggtccttcaaattttggagcctttccaatgtcgaacagccggtttattttgacgatgaagaagagagaggaggacccagcagtgagtccgttgtggaattcgaagacttggtacaaaacggcgtcgtttacagggagacgctgagattggtggagtgttccatgtttgctgctgttactggacttgtttactttctgagcaattctcttgcagtcgagaactacttcgggtgtttcttttcattgccggtcgtgatctcctctatgcgatggggtgttgcatgtgggaggaaacaagt

SEQ ID NO: 9105 - DNA, 431 bp, Gossypium hirsutum
  Clone ID: GOSHI-09MAY01-C36040_1
caaaaccaaaataccagccgaaacattttctcccttcttggtgagaggacgattatttagatgaaagaacagagaaatccaaagttttaagtcctaccatggagattcaaaagaaccgtctccaaaaacaaagcataatacaacaaattttagggcctttgaagctgatccgccctatctttttcaactatcatcaaaaccgagccaagaaccccttcaacccagataccagaaaactgtcttctccttccttccatcgccaaagtgtgggccgctccatttatccagcgaggaacaaacaggcatcggaaacccattcactgagcaaaaagtaaagtcctttcacatgccctaccttcagcacgagcgcgtcaactacgtccgaaaacagattaagttctgctcctactattctcttcagaatctctagc

SEQ ID NO: 9106 - DNA, 460 bp, Gossypium hirsutum
  Clone ID: GOSHI-09MAY01-C36240_1
ttcgcctcacgcgtccgatttcgaatagcctcgaatattcccgaaattacctaatttccatttaagaaccttctcccttgactctcatcaatctactcttttgattcccaggaggtatctcaggaatggcgagtggttttggtgaatcaacaagcatgcctccaccaagtccatcttgctcgagcagtaataatgctaacgatgctggtgattttgaatgcaatatttgctttgaattggctcaagatccaatcgtcacactttgtggtcatctcttctgctggccatgtctctatagatggttgcaccatcactcgcattctcaagaatgtccggtttgcaaggccccgattcaagaggaaaaacttgttcccctttatggcaggggcaaaaacaagactgacccgcgctctaaatcgtatacgggcatggaaatcccaaaaccgccagctgggcaaag

SEQ ID NO: 9107 - DNA, 588 bp, Gossypium hirsutum
  Clone ID: GOSHI-09MAY01-C36210_1
catacatctctttctctcaatagaataatataaaagaaaaacagtttcttcctaaaagctagaggttgcagtttgctaaggcttatttaaaacaagacctgtctgtcatctgctccatgtcttgcaatggaatggctttcttcccagcagatttcatgctccaaacgcctcatcatgatcacgaagatcatcaacgctccactaactctatcaatcaaatcctcccttcttgcacggcgccccaggagtttcatggtgttgcatcatttctggggaagagatcaatgtcttcatattcaggtatagatcatgtgtgtgaagaagcaaatggagaggatgatatatcggacgatgggtcacaggcaggtgaaaagaagaggaggcttaacatggaacaggtaaagacactagagaagaactttgagttaggcaacaagctggaacccgagcgaaaaatgcagctggctcgagctcttggactgcaaccaagacagattgctatttggtttcaaaacagacgagctagatggaaaaccaagcaacttgagaagactatgatctcctcaagagacagtacgagctcatcaa

SEQ ID NO: 9108 - DNA, 534 bp, Gossypium hirsutum
  Clone ID: GOSHI-09MAY01-C37870_1
tttgagcgcctcaagatttttccacctttaccatcaactccagcccatgctatctggaagtcgaaagaaaaagttgttactgcagcgccaaataagcgcaaggcgagcacagagcctatggaacacgaaccagccttgaagaaaatagcaactgatggccccaccacggtttcagccaactcctcaccatctcccatgcaagttgaaacggtgacaacacttgcttcaccaggtcaatacgaagcaggccagccgtcatcatctgaaaagatgcccaatagagttggaaaagacggtaaagtattgaagaaatcagccatccttaatcaaatttggaaggatgacttgaattctggacgtacattggtaacggtgttcgaactgtttggtgaaagcattctctccttcattccgtctcctgagatgtctttgtttatataacatgttgtagaatagcttgtttcttatcgttatcggcgttagaaaatatcaaactgcgttcatctgaatcattaaaccttttcaaagcaattt

SEQ ID NO: 9109 - DNA, 398 bp, Gossypium hirsutum
  Clone ID: GOSHI-09MAY01-C37860_1
cgatgcaatacaaacggatggttcggagtcgagttggtcggagcacgtgccgtcaccggaaatcacgtgggagaaagaagtgaaaagtgaagggagatggaatgagcttgatttcgggttggatttcatagatgaagacccgtttgccagtcaagttgattaccaaatggagcagctgtcaccgttgcaagacatgttcatgtatctacccaagacattttaagccaacgtagaccaaaaatcctacaattgtggggtccaatccaaattaaaaacatttttaatttagatccatgcacacacacattgccaaacgaacaatgggtcaaattcaaattcaatatgagggggtgggtgacaaacaattggatcgctcgtgggtgtaatataatatgagc

SEQ ID NO: 9110 - DNA, 546 bp, Gossypium hirsutum
  Clone ID: GOSHI-09MAY01-C37530_1
gcttgctccctcacaatggaaagcagttatggagtatagcaggcaccgacagccaacacactccccaacagcagatgcagttatgattacaaaagaggggcttgaaggctatcataatacttttgataatattaccggcgcggagcttgtggttatgcccagaatggtgagagccaggcccatgatagctagactatccaaactatcatgcctttttgcatcgttgaaagtttccggtgtttctggacctgtgaatgggacgctaagtgaaacacgtgcttgctgagtttgctgctccttcaacagccattgtggatgttgcttgtatagaaaatgcaaataagtataggttgtaaaggtcttataaaaatctcttttccagtaagtgtgtatggaagaaacagaagggaaactatataaacaaagaaagctataagagtttctcttcaatgataatagatgtgtataagatgagtatcctttatactatcacctgtactatttcatatatccatgatgctttctttgactcaatgtgaactaaaa

SEQ ID NO: 9111 - DNA, 655 bp, Gossypium hirsutum
  Clone ID: GOSHI-09MAY01-C37740_1
tccggaacaggggggcagtgcagaaggtattcttcaggtccgtgctgaccgcatacagtcagatcttgaggagctaatgaaggccctgactgaacgatgcaagaaacatggatatgatgttaagtcagctgcagtaattgagcttcccacgggttggcaaccaggagtttcagagggagcagcactctgggacgaagagtgggataagtttgaagatgaaggatttggcaatgagctcactattgatgtgaaaaaaggggccgtctctcagagaggaaaagcttctccagatggtagcttgacccctgattccacttcctatgctgatgaaaaaactgcgaatctcttcagtgctagtgatcgtgccatcgagagcgagtctgcatatacacacagtgaagatgaatctgccagaagtcctcgtggtagtcctactgatagaaactctctagaaagcccatctaaaccattttctgatgacccttttggaaagagcactgaagcagaggcagaaagacaccaaagttttgatgaatcaggatgggggacctttgataatgatgatatggactctgtgtggggtttaattctcttaataccaaggactcggacaaggccagagactttttggatcaagtgattttgatgtacacac

SEQ ID NO: 9112 - DNA, 883 bp, Gossypium hirsutum
  Clone ID: GOSHI-09MAY01-C37680_1
ggcgaccacgcgggcgatctccataaaaatgactgactgccatcccctatcaactcttatttacactgctctccaacaagctatggcttcagcagcaaatgcagaggtaatgtctctttgtatctttgaataggataacaaaactcttccttcggcatctctggccacaatacctgaggctgaacaatactgactctcattatatgctccattgaaatttatctttataaactcacgatgtgggtgctgccatctctttttttctatgatttttgccgattttcttttttcaaagttagctagctcagtaatgtaattgctggtgaaatttgcaatctcttttccattactgactttttcttcgtgtattctcctgtttcgatctccccatatggctcacaaagcgtagcagaataaacggctttgacaagggttgagttgttctaatacccaggacactttcgaaaaagatggtccattgtttcagctcgtgcttcacatcggggacagcttgtgcttttttatagctttttgtgctgcatattcacctttgtaggcaaaaagttccatgatagtctccatattgtaattgttatttttgttggtagattcaggctccaaagttttttgtaaaattttctatagataatttgtaacgcataagcgctagggtttccattcgagctctgtaatagtttataggcacttcggacggtgaattcacccgacaactcacctccccagatgatgaaatcctcatgaggcgttcgtgccagagggattcgaagaattcttgcagcgtcttctcctgtggatgtactatttatcagctccctcttccaaagcctcttattactatcaattaactcattaactttgagat

SEQ ID NO: 9113 - DNA, 435 bp, Gossypium hirsutum
  unsure (1)..(435): unsure at all n locations
  Clone ID: LIB3145-045-Q1-K1-B12
tccatcaaaaatgactgactgccatcccctatcaactcttatttacactgctctccaacaagctattgcttcagcagcaaatgcagagcgtagcagaataaacggctttgacaagggttgagttgttctaatacccaggacactttcgaaaaagatggtccattgtttcagctcgtgcttcacatcggggacagcttgtgctattttatagctttttgtgctgcatattcacttttgtaggcaaaaagttccatgatagtctccatattgtaattgttatttttgttggtagattcaggctccaaagttttttgtaaaattttctatagataatttgtaacgcataagcgctagggtttccattcgagctctgtaatagtttataggcacttcggacggtgaattcacccgacaactcacctncccagatgatga

SEQ ID NO: 9114 - DNA, 507 bp, Gossypium hirsutum
  Clone ID: GOSHI-09MAY01-C37140_1
gaccggccggaacccggggcgacacgcgtccgtgctgccatctgggatgaaggatttgtttatcttgtttcgttggagagtgatgttgttattcctacgtgtgagggagacatggctaaggttgttgaaggccatcgcagatttctggggtacaagcagacaatattattggaccgaaggcttttggttgatctgatagaccagtacaatagtggatccctaagttggaatgagttctcaaatgccgggaaggaatctcacaaatatcgcaaggggcaaccaacacaaagatcggtgttccccgaccggcctaaagaagaggattacttctatgccaacccagaagaatgcttgaaaccatcatcatatggtcaagtgagtagcacgtgatctttctatctggggattgtcacgattattggtgtttttctttttctagcgtgctaggcatcatacctaaaaccttaagtagtttccctgcacaagtatgactacaatgaaggtttt

SEQ ID NO: 9115 - DNA, 415 bp, Gossypium hirsutum
  Clone ID: GOSHI-09MAY01-C37170_1
cccacgcgtccgcaattgtaggatgggttgctgttcttctcggggttttctcgaggcttccttttgtggtcatggggtttgtgtcgattccaaaattaaagcctgcaagatggcttgtggtaaacatgcatcatgtggattggaatttatatttgaacacgctcttttggaatctaaactattgggactctataagtactcttgctggagaggtagagaacccaaaaaaaactctcccaaaagcattgttttacgctttgatcttagtggtggttgggtatttctttccgcttttagttggcacgggggctcttccccttgatcgtgagctgtggactgatggttatttctcggacatagctaaattgctgggtggagtttggttgagatggtggatccaagcagctgcagcaat

SEQ ID NO: 9116 - DNA, 682 bp, Gossypium hirsutum
  Clone ID: GOSHI-09MAY01-C37160_1
aactaatcctactcctgcactggaacccactaggaatacatgcattcccccctctctctttgtgtatatatatatggggtgtagaacaagagcttttcactccaaagcttagttaacaaggtttaatcagtattatagattgttcatccagagatctaagcttattagcttaagctataaaaatggtgaaaagatcgttgggctttttctttcttctcctcattgtcttagcctcccaatggggggtgcagccaactgaggcaagggtttgccagtcacaaagccataagttccacggtgcatgtgtgagtagccacaactgtgcgatggtgtgcagggacgaaggtttctccggcggcagatgtcgaggattccgtcgccgctgcttctgcactaagctttgctaatgcaagcttgcccttagctcatattttaaggatttttcttgagtaaaagacctttatgtttttcgtgcatgcatgtcaatgtttcaataaggtatctcctaattacttctgttttgggagatcattttcgtctctttttcatgcctttaagggggttctctttgtgttctttgctgtactcgaactgcatttgcagctactttttcatctatgagctccaccaaaatctgtttatcattgcttctttattttttattattatctgatttttacag

SEQ ID NO: 9117 - DNA, 1821 bp, Gossypium hirsutum
  Clone ID: GOSHI-09MAY01-C37060_1
gattaggaaaatggtttgagaaaaaggcatcagaagttcagatactaatgaatcgggctctgacggagtacctcgaagagtctctaatatcatccccaacatccatgataattacaataagttactggagcttgctgcatccttccgctcatctcctggtagcccagcaacacaaactatgagtgttgccagacgcgtcagaggtgctcttagacaggctgataagcccagatttgtatctgcattttgccagacaaattgtggtgatgttagtcccaatgtactcggagcattttgcaccgacaccggtcttccttgtgacttcaatcatagtacctgtggtggaaagaatgagctgtgctatggccgaggaccaggctatcttgatgagtttgaaagtactcgtattatcggagagaggcaattcagaaaagccgtggacttgtttgagaaagcatctgaacagttaaaaggagaggttgattatcgtcacacttacatagacttttcccagcttgaggtaacacttactaaagtgggaggaggttctgaggtagttaaaacttgtcccgctgcaatgggatttgcgtttgctgcgggaacaactgatggacctggagcttttgattttcagcaaggagatgaccagggaaatcctttttggaggcttgtccgcgacgtacttaaaactccagataagaaacaagttgattgtcagcatccaaagcccatcttgctagatactggtgaaatgaagcaaccatatgattgggcgccttcagtacttccaatccagatccttcggatagggcagtttgtcattctcagtgtaccaggagaatttacaacaatgtctgggaggcgtctccggaatgctgtgaagacagtgcttacaaggagtggtaatggggaatttggtagtaacactcatgttgttatagctggcttgactaatacgtattcgcagtatgttgctaccttagaagagtaccaagtgcagagatacgagggtgcctccacactctatggtccacacacactcagtgcctacattcaggagttccagaagcttgccactgctcttatcaaaggtcaacctgttgaagccgggatgccgcctccagatcttctacagaagcaaataagcttactcactccagttataatggactcaacccctgctggtaaaaacttcggggatgtcagctccgatgttccagctaactcaaccttcaagagaggcagcaccgtgaccgttgttttctggtcatcttgccccaggaatgatctcttgacagaaggtactttcgcccttgttgagatgctccaagggaaggatacatggaccccaatgtacgatgacgatgatttctgccttcgctttaaatggtcaagaccttcaaagctaagcccccggagtaaggcaacaatcgaatggataatcccatcatcttcctcaccgggagtatacagaataagacatttcggtgcttcaaaagggcttatgggatcaattcggcatttcactggttcatcaagtgcttttgtagtggcatgagaaaattaaagctcaaagccatttatacatgatatggcacagcgtcttcaaagtttaattatttttatgctatttatgtattgaattgcctttaggttataagttcaaacacggtcgaatccaacaatgttcctataatgctgcctcaactcattagctcaatgtattcaaattgtattttgtgtggaaagaacagtacatgaatctgttgcctttataatataagaaataaagaaaaataataaagatattgcatccctatc

SEQ ID NO: 9118 - DNA, 463 bp, Gossypium hirsutum
  Clone ID: LIB3828-008-Q1-N6-G9
cttatattataaaggcaacaggattcatgtactgttctttccacacaaaatacaaaatgaatacattgaatcattgataacatgtgatttgaaggaaatttcactttttatgcactggaaatcaattgagctaatgagatgaggcagcattataggaacattgttggattcgaccgtgtttgaacttataacctaaagacaattcattacataaatagcataaaaataattaaactttgaagacgctgtgccatatcatgtataaatggctttgacctttaattttctcatgccactacaaaagcacttgatgaaccagtgaaatgccgaattgatcccataagcccttttgaagcaccgaaatgtcttattctgtatactcccggtgaggaagatgatgggattatccattcgattgttgccttactccgggggcttagctttgaaggtcttgaccatttaa

SEQ ID NO: 9119 - DNA, 595 bp, Gossypium hirsutum
  Clone ID: GOSHI-09MAY01-C37000_1
ccgggtcgacccagcgtttcgcttatctgaggtgattatgttgggggggggggggggggggagagaaatctcaagatcgtggtctcatatttgagaagtgaaagacaaatatcacgtataggtctctggggacgatcaatgggtgctgtcaccagccttctttatggagcagaagatccttcaatagcaggaatggggggggacagtgccttctcaaacttatttgatcttatgatggaactggttgacgtgtataaaatccggcttcctaaattcacggttaagatggctgtgcagtacatgagacgtgtaattcagaagaaggcgaagtttgacattatggatctaaactgtctgaaggttgcaccttaaacatccattccagctctattgggacatgcccgtgtggacaaaggcatgtcaacctcatcactctgacctcatatttaaatcatttgcgggagataaaaacgttataaaatttgatggtgatcacaactcctccaggccacagttttattatgattcagtctccattttcttcttcaacgtgcttcgtcctcctcaattttcttctgcatgtacaagtaagctt

SEQ ID NO: 9120 - DNA, 484 bp, Gossypium hirsutum
  Clone ID: GOSHI-09MAY01-C37390_1
tctttgcgcgtccgaaaagaatggcaagcgaggaagagagcgcggtgaaggagcctttggatttgataaggctcagcctcgacgagcgtatttacgtcaagctccgctctgaccgtgagctccgtggcaagctccatgcttatgatcagcatttgaatatgattctaggtgatgttgaagaggttgttacaacggttgaaatagatgatgaaacctatgaagagattgttcggactacaaagcgcacggttccatttctctttgttaggggagatggagttatattggtttctccacctctacggactgcttgattatgagatccaagtttctagtcactttttatgggaatgaatcacacgatgaatcctttcatgaaatatcctacactatgctgatgatgctcgagtatcattgatcctctaaaagatttttactacatattgatggaacagttgcacatttttagatcattgaaggaata

SEQ ID NO: 9121 - DNA, 411 bp, Gossypium hirsutum
  Clone ID: LIB3493-055-P1-M1-F10
gttgaagaggttgttacaacgggtgaaatagatgatgaaacctatgaagagattgttcgggtaggttatcttattacttgtccctttcaatatgattgttatttgttctgatagctaatgtttgaaccagaggtaataggcaagtttagtagtaagttttggctgtaatagtcacaagtaatttactccctttatttgccatgaagaacacatgcatttttttttattaggtgttagcattttcagagttgttttaacttatcatttgaagttagaagaatgactgcttattcacgactcaaaccacaatcatactggcttgttataattggtttttagctatgatttcttactaatacaaccttaaaggtgtttgtttagtgaccaacaaaatgagctcattttatcttg

SEQ ID NO: 9122 - DNA, 444 bp, Gossypium hirsutum
  Clone ID: uC-gsflnu33B022g02b1
tactctttgtgtacaaaaagggcgaacgggaatggccaccgaggaagacagcacggtgaaggagcccttggatctgataaggcttagcctcgacgagcgtatttacgtcaagctccgttccgaccgtgagcttcgtggcaagctccatgcatatgatcagcatttgaatatgattctgggggatgttgaagagattgttacaacagttgaaatagatgatgaaacctatgaagagattgttcggactacgaggcgtacagttccattcctctttgttagaggagatggagtcatactggtttctccacctttacgcactgcttgattgggaggacggagtttcaagcacacgaaggaattaccttgtgctaaatttactactaagctattgctcgtttataattgaccctatagctacgtattaagggaacagtggagtatttg

SEQ ID NO: 9123 - DNA, 218 bp, Gossypium hirsutum
  Clone ID: uC-gsflnu33B068c05b1
gtacggactacgaggcgtacagttccattcctctttgttagaggagatggagtcatactggtttctccacctctacgcactgcttgattgggaggacggagtttcaagcacacgaaggaaactttgaggaaggcagaagagatttttgggacagataacaaagatctgttcctatcattctcagggactgctaaatcgatacattcactagatttcaa

SEQ ID NO: 9124 - DNA, 807 bp, Gossypium hirsutum
  Clone ID: GOSHI-09MAY01-C37350_1
gcggacgcgtggggtttggcttcctccatcatcttcttcttcttctttcaacctttcttctgcatatatatatataaaaaaatcccaagaaagagaaaggtaaaagatcaagaaatagataatgggtgcttgtgctactaaaccaaaggttttgaaagatgaaaactcaccggccaccgtccccgcaccagaaccggtcaaggaagaatccgttcagccggttgaaacaaaagacgaaccggtggtcgtgatggaagctgatgaaaccaagccgaattctcttggttcattgcttgataatgaagaaaagagcaatgaaactaaggtggaggcaataactgttgaagaaccaaagattaaagaagaagccgccattgttgaggcgccaaagaaagtggaagaagccattgttgaggctccaaaggaggccccaaagaaagcagatgtcattgttgaggcaaaaacaatggttgaagctgaaaagcaaaagaaaaaggaagaagaagaagaaggagatgaggttattgttttggctgaaaagaaaagtgaagaaactaagaaagaagaacccattgtaaaagaagtgaaaactgaggcacccattgtttgatcatagggaaatgtaagggaaagtttatatatatatatatgtatgtgagaactaaggataaagaagaaaaacaggaggaggaagaagcaaaggaaactagcaacatatgtaatcataaactcacaatattttatgttgtttgattttatgtttatttgggaaatggagggaaaatgtgtttattttttgaaaaaaaa

SEQ ID NO: 9125 - DNA, 892 bp, Gossypium hirsutum
  Clone ID: GOSHI-09MAY01-C37280_1
gtggaaccaaatatgattcgaaaagtacagatttgtgagttactagagccgacagtaacaaccatagcgcacgagtagaggagtatttgctcatgtattaaaggattggtcgcagcagtggtggtcaatagcttggcttacgagcttaaccactccatcgaatcatctcaattttaaggaatggatggtgtggaacttagctccaaaagcctggcatcttgttcacaaagtgccatggaaagtctttttctcctttattatttggcaaatcttgcttgccttaaaatgcaagaatcttcaaaaaccacaatgaccacagtcgagtggtccagccaactccgagcaaggctgtggaatttttgccatgtctggacccatgttaacatttaatcctataccctcgtacataatatttttgttattgttgttctcataaggggtctttacatcctttcagaaagattattatgtatgagaagtggatgtctacattcattcactttgaaaacttctaaacttgtcctaccaatatcttaaaacttattgaatttgtttgtattttcagtaaacttttatgtttttatcctggaaaatatcattcccaaatattttatcatattaatgttttgaaccttacataattttagatggaccctgagttggttctttgtgctaatgatgcagtaacttacggaagcacaaacttcaaatatcatgtgaattcgtatattaccaaatctcgtgtaattggcatgataatgctccattgtaattcttttttttgaccacgtatatttggcgtacaatttcttggcatgcgattttaattggttgcggtttgaagattgttgaacatgtccaaatttaatgttctaagttggaggagctaatt

SEQ ID NO: 9126 - DNA, 579 bp, Gossypium hirsutum
  unsure (1)..(579): unsure at all n locations
  Clone ID: LIB3828-002-Q1-K6-H8
tttttgcgtccggnccatgacaatggcaaagctatagagagcttgcatgacagagttgcttttcntgaaaagattaacaggtgatatacatgatgaagtggagagtcataatcgtatgcttgaccggatgggcaatggcatggatgctacaaggggcataatgtctggcaccatggatcggtggaagaaggtgttcgagaagaagtccaacaggaaaatgtgtacactggtgatggccttcgtggtttccttcttaataatatactatctctttaggatgcttcgatatgtccgtggttgaagaaaccacaacattcttggaagtttggtccgtatacgagaaccgaatgtctgtcaaaggcaccaaaaaaatcccatttcttttcttgagaatctggtactgctcgcagtttgctagcacggtagttcattataagaagaaattcgaatcgcagttcaactgggttaaggcaggcagccccccccccccccaacatttgaatgttgtaatgttgatttcagcagacaattgtttttttaccaaaggagtnaaaaaccgaaaaaatgaggattgaaatt

SEQ ID NO: 9127 - DNA, 451 bp, Gossypium hirsutum
  Clone ID: uC-gsflmaxxa054h06b1
gttattgtgatttttgaaattcgctgcttcaacgggggcgtcatttcagttaacaggtgatatacatgatgaagtggagagtcataatcgtatgcttgaccggatgggcaatggcatggatgctacaaggggcataatgtctggcaccatggatcggttcaagaaggtgttcgagaagaagtccaacaggaaaataatggggcaggagtatttgctcatgtattaaaggattgctcgcagcagtggtggtcaacagcttggccgacgaacttaaccactccatccaatcatctcaattttaaggaatggatggcgtggaacttagctccaaaagcctggcatcatgttcacaaagtgccatggaaagtctttttctcctttattatttggcaaatcttgcttgccttaaaatgcaagaatctttaaaaaccacaatgaccacagtcgagtg

SEQ ID NO: 9128 - DNA, 486 bp, Gossypium hirsutum
  Clone ID: GOSHI-09MAY01-C37260_1
cttcaactctgagataaaactgtttatttgctttgatatgtctctgcttggtgtggttttcctttcatatattaacttgttacggtttgtctagattaaccacaaccaacagcagaagagccgacattgctcctttgtaccttgactaaacacccaaggcactgtcgaaaaatgtggctgatgttctccccacttggctgacacctccaacatagatcttcaacagcaactcttttcagcttgagattcaaaaaattgggaataaaatccccaataaaatctttcacattgttaatttttatttttcgatggcaatgttcattggtccatagttttttgtaaaaagctgtagtatcggcctgtatatgattactaggattaagagtagactcctgtaataatttataggcactcctcactgagaagttacctgatggttctcccctccaaacttgaaaatcgtcgttgggtggattttgccaaggg

SEQ ID NO: 9129 - DNA, 653 bp, Gossypium hirsutum
  Clone ID: GOSHI-09MAY01-C37230_1
cgaggatctgcggtgggattcaaattggatagcctccttaaattatctgatacgcgtgcaggaaacaacaaaatgactttaatgcattatctatgcaagcttctatcggagaaaatgccagagttgctggattttgataaagatcttgttcatttagaagctgcttctaagattcaattgaaaaatcttgctgaagaaatgcaagctgtgagtaagggccttgaaaaggttgagcaagaactctccgcttcagataatgatggtgatatctctttgggctttcagaagctgaagctgaagtgaggtcacttatctccttgtattctgaagtgggtagaagtgcggattcattatcccaatacttcggagaggatcctggacgatgtccttttgaacaagtgactcacatattggttgttttcgttaagatgtttaaaaagtcgcgagaggagaacgagaagctggctgatgctgagaaaaagaaattggagaaggaagccatcaaagaacgagcagcagcaaatgtaactgttaagaaggatgggaccgatacaaatgagccgaatcttacttctcatatcctgaattctcaccttctgaaacacgctccctaatagtaatgaagcttttgcaatcaagcaacaatggaagct

SEQ ID NO: 9130 - DNA, 623 bp, Gossypium hirsutum
  Clone ID: GOSHI-09MAY01-C30500_1
agcattcccatttaaaaaaaatatatttctctattttatcattttctttggtgcactgttatctctctcgtctcgttaatagcaaaagataaaccttcgtctatccctctctcattttatttgcacggctccagaggtaggccattgagagaaaagtataggtcgaaaactctcaaaacccctatcccaaacggtgaatctgggaaaacccactcagctcatttagatccctatcaaatctgcaaaaaacataccatgatttgatcccaaaaccccaccccaaacaaatgggttttggtttttcttcaaaacccttcttccttttcctctcatttcttgttttctttaccaatcttgaactttaccctcttgttgaatcagcccctgattacataactttggtctacaaaggttgtgctaagcagtctttcacagatccagctgggatatactcccaggccttgtctgccttggttcagaccttgctttcacaggccatgaagggaaaggtttacaagacaaacaccgggtactggccaaaccacaatcactggtctttttcaatgtaggggagatctcagtaacagtgattgttacagctgtgccagcaggcttccaacttt

SEQ ID NO: 9131 - DNA, 561 bp, Gossypium hirsutum
  Clone ID: GOSHI-09MAY01-C30520_1
gttccaggtatattggtaccagaggccttattgttaggaaactgggtaaaagctcaagaatgggcagcaattccagggggccgagccacttacttagggaacccagtcccatggggtacccttcccaccatcttggtcattgaattcctatccatcgccttcgttgagcaccaacgaagcatggagaaggacaccgagaagaacaagtaccccggcggcgctttcgaccccttgcgattctccaaggaccccaaaaagttcgaagaatacaacgtcaaagagatcaagaacggccgtctagcattgttggcattttgtgggatcctgtgttcaacaatcatgcttacccaggcactggaccattggagaatttggctacacatttggctgatccatggcacaacaacattggagatgttatcattcctagatcactttacccttagatgatgatagattgatggaatattttaaatgtaatgtccgttcttgcattgcgtaaaacatatgtaatgaaatctaatttgaaggctttcgtaatgggaattataatttttttta

SEQ ID NO: 9132 - DNA, 708 bp, Gossypium hirsutum
  Clone ID: GOSHI-09MAY01-C30480_1
ggtaaatgtattttctttgttggaatgggaagcaatgattatctcaacaactaccttatgcccaatttcccaactcgaaatcagtacgacggccaacaatatgctgacctcttggtccaaaaatacaatcaacaactaaggacactttacaatcttggagcacgtaagtttgtactagcagggctaggaagaatggggtgtatcccaagcattttagctcaaagcactgcggggcgctgctcggaggaagtgaaccagctggttctacctttcaatgccaatgtgaaaaccatgatgaatagccttaatgctaaccttccgggtgcaagatttatctacgtcgacattgctcacctttttgaagatatcgttgctaatgctagaacatacggatttagtgtggtaaaccgagggtgttgtgggattgggaggaacagagggcaaatcacatgtcttccattccaaacaccatgtgaaaatagagatgaatatgtgttttgggatgcattccatccaactgagaaagtgaatatcataatggcaaggaaggccttcaatggtgatccttccattggttatcccatcaacattcagcagcttgccaatctttgatctttgtattagtaccataaataagccattatctggcttattttctttgtgtacttcattttctggttgattgtaaaggaagagcactttggttca

SEQ ID NO: 9133 - DNA, 556 bp, Gossypium hirsutum
  Clone ID: GOSHI-09MAY01-C30410_1
cttgacgcaaaaaccattaaaaatcacccaaaaaagaaacccactaatggccgaaacgacgggtggtgttactactactacatgttgtacgcaatctccgaatcccatgatgatggacccttcacaaccgtcatcgtcggcgatgcctgcacctgcaccgccgcctcccacggcggtgactacgacttcaagaacgttagcgcctgcaccttcaacgaattcctcaattcttcctcaaaacaacaacaatccttctccttctccttccattgacccttcttcactgcaaaatcaacagcagcagcagcagcaaatctacgcaaattttgtctccacctcttgcccaacaacaacatctaacagctgcggcagcaacagcaaacacagccaaatgttgcagctttatcaaatttcccaatccagcaatcccttcaaagatctccatctatttcacgccttaaccaactccaacaacaccaacaacagagccagcagcagcaacaacaacaacatcagtctcaatacaataatgttttaaggcaagggttatatgggc

SEQ ID NO: 9134 - DNA, 507 bp, Gossypium hirsutum
  Clone ID: GOSHI-09MAY01-C30640_1
ctttttattgcttacctttgaagccaaattcaccttcttcttcctcttcaatccccctaacgtccaagttttcatccagtccttttcccccttccatttcacgttttcatccttctcagatccaaaaacccaacccatatatccctttcttttctttataaacaccataggtcccccccccccaaaaaaaaagaaacccataaagttttccccctttttatttggttgttgatgagaagatgtgttgtgggagagtatgcatgctgtgcacttgtttgattctagtcgtggttgcgattgggctgctgttcggctttggggttttcaagaatgggtttcacaagctcaaagatacattccatgaagattattgtgatcctaaattgtcttcttcttgtggaagacctttcttgggttatgcagctcctcctcctttctaatttcattgttgggatatttctctactataattccattcttatttggttgtttatatgattatcttat

SEQ ID NO: 9135 - DNA, 323 bp, Gossypium hirsutum
  Clone ID: LIB3120-009-Q1-K1-D9
acggccacgcgtacgggcacgcgtccgcggacgcgtggcaagatgtgttgtgggagagtatgcatgctgggcacttgcttgattctagccgtggttgcgattgggctggtgttcggctttggggctttcaagaatgggttttacaagctcaaagatacattccatgaagattactgtgatcctaaattgtcttcttcttgtagaagaccttgcttgggttatgcatctacgcctcctttctaatatgcttcgtgggatcctatctactacaattccattcttattcggtcgagtatatgatcatgctattgacgctagatgta

SEQ ID NO: 9136 - DNA, 539 bp, Gossypium hirsutum
  Clone ID: GOSHI-09MAY01-C30090_1
ctaaaaaccaatggccagatttgttctgcgactgcccaccggcaacttgagaagcttctcggttcatgcttcgtcaaacggggctcctccgggtagtggctcacaaaatggggggccaatgatcttggagcttccacttgataagattaggagacccctaatgcgcaccagatcaaatgatcctaacaaagtccaggaactcatggacagcattcgacaattggacttcaagtgcctatcgatgtgcttgaagttgatggagtttactatggtttctctggttgtcatcggtatgaagctcaccagcgccttggactcccaacaatccgttgcaaagttcgacgaggaaccaaagaaactctcaggcatcatcttcgttgaatggaagtatatgctcatacagtgcatttcacaactttgattatgcacttctcagctggttggaagttgtgtattctcaacctataatcaagtttgtatgttaatgttacaaacaacttcacagcaagaaataatcgatagtcatttatagcgtgtgt

SEQ ID NO: 9137 - DNA, 643 bp, Gossypium hirsutum
  Clone ID: GOSHI-09MAY01-C30240_1
aagctctccccataaacatcaataccccaactgcacctcgataacacccatcatctacatggccatggcaactcaagcaggtctgttcacccccacaatgaccaccccaaaatctttggccccatggaaaccagcctcatcattttcctttgctacctgttccaagtccctcaacttctccgtggctcaaagaaccattagagctgcagctgctgatgaggaagcatcatctgctgccgccacaaaggaagctccggttggtttcacccctccagaattggaccccaacaccccatcacccatcttcggaggaagcactggaggactgcttagaaaggctcaagtcgaagaattctacgtcatcacatgggattcacccaaagaacaaatctttgagatgccgactggtggggcggccatcatgaggcaaggacctaacttgctcaagttggcgaggaaagagcagtgtttggctttgggtaccaggctgaggtctaagtacaagattaagtaccagttttacagggtttttcctaatggtgaagtccaataccttcaccccaaagatggagtttatcctgagatagtgaacccaggtcgccaaggatttggccagaacttcagatcaattgggaagaatgtc

SEQ ID NO: 9138 - DNA, 294 bp, Gossypium hirsutum
  Clone ID: LIB3120-043-P1-K1-G4
cacctcgataacacccataatcagcatacccatggcaactcaagcaggtcttttcactcccactatcaccacttcaaagtctctggctccatggaacccatcttcaccattttcattagctacccccaagtccatcaacttctccatggctaaaaaaactagcgttagggctgcagctgcaaatgaagctgttgctgccgttgccacaaaggaagctccggtgggtttcacccctccagatttggacccaaacaccccatcacccatcttcggaggaagcactggtggactgct

SEQ ID NO: 9139 - DNA, 424 bp, Gossypium hirsutum
  unsure (1)..(424): unsure at all n locations
  Clone ID: LIB3120-025-Q1-K1-G1
gcgcccacgcgtncgcgcacttnagacaatggctactttccattttcttcaatcttccgctcgcttcgtttctaaacccacttgtctcgctctccccaatccatccctttcccttcatttcccccttaaacgcctgggttccttccccaaacgcccggaactcaaacgcttacatgaggcagcagtggccactggctcagctcaaccagcagttgacctccaaaacgtccccgtacaggatacccagaagcaagaacaatctggcaaacttgttctttcaactaacgactcatccgatgagctccttagaattagacacacgtgtgcacatgtaatggcaatggcagttcaaaaactatacccagacgcgaaagtgacgattggaccctggatagacaatgggttttactatgattttgatatg

SEQ ID NO: 9140 - DNA, 324 bp, Gossypium hirsutum
  Clone ID: LIB3165-049-Q1-K1-D3
ctttcttaaacagcacctttttctttccttcttccttctcccttttccctttcccaaatccattccttttcccttcaatttcccccttaaacgcctggtttccttccccaaacgcccggaactcaaacgcttacatgaggcagcagtggccactggctcagctcaaccagcaagtgaccctccaaaacgttcccgtacaggatacccataagcaagaacaatctggcaaacttgttctttcaactaacgactcatccgatgagctccttagaattagacacacctgtgcacatgtaatggcaatggcagttaaaaaactatacc

SEQ ID NO: 9141 - DNA, 497 bp, Gossypium hirsutum
  Clone ID: GOSHI-09MAY01-C31890_1
cgggaatatccaggaacctagctccatgtcccaaacaaagaaatttctatggtaaacttgtccttgttcttctaaacgacgtatcttttctttccctctttccctgtcaacttagggtttccttttttccttttttttttaaagatttcctataccttctacacattagtcttcatcattgattttaaccccccaatctttttatacctaacagtttcaattcgtgcctaattggctaattcctgaaacttgcaatgccgccatttttatcgacctcaaaggcggtcgggtcggtaatatcccgtagaaatgtgattaaccagttcgctgggcacgcaaagaacggagggcggaccgggaacttcggtcaaatccgatgggttactagtatttccggtatccaaatgccgtcggttcaccccgtacttggttctcgcaaggtggattccattgttccattaaactatcttttcaatcattatactttccaaaggaga

SEQ ID NO: 9142 - DNA, 734 bp, Gossypium hirsutum
  Clone ID: GOSHI-09MAY01-C31880_2
aaaaatccgggcggcccacgcgtacgcccacgcgtacggttgagcagctgtttttacatgcacgtagactccaggtatcggggtagacttcagattggtgtgggtgagaaagggtatgagaaagatcctgcaattgtagcaaaggaagcaattcatgaggccactcgtaatggttctgatgttgttctcgtcgatacagctggtcggatgcaggataatgaaccgctgatgagagccctctcgaagcttatatacctcaacaatccagaccttgtcttatttgtgggagaggcacttgtgtgggaatgatgctgttgaccagttttcaaaactcaatcacatattggctgacctctccacttcttctactcctagatcgattgttgggatttcgctcaccaagtttgacactattgatgataaggtcggagcagcattgtcaatggtttacatatcgggagcaccggttatgttcgttgggtgtgggcagtcatatacagacctgaagaaacttaacgtcaaatcaatcgtcaagacactgctgaaatgagtgaatgctttatcaaaaaaccaccccacattttatttgcaatgctcaaccaactcttttgttaatgactttggcctgtgattgcatgtttactttaatggaggtgcattggtcccttgtaactgttaagtttgttttatgtgagatcttaaaattattcctagtttggttactttggtatcct

SEQ ID NO: 9143 - DNA, 1778 bp, Gossypium hirsutum
  Clone ID: GOSHI-09MAY01-C31880_1
cccacgcgtccgcttcttgcgatgatgagacgtgagttttcggagatttatgatccaaaaaggacggtctataatgacttcgatgaaacttttaggcagcttaggagggaggcagaagctagggctgaggagttaaagaaatcaaaacagacggataagcctgtcaataataaaaagaagcaagggcaggtgcagaaagctggttctgataaaggaagtaagaagagtgagggttgcttggctactgatgtgcggggatggtgatactgcgataggtcgtaaattggagaatggacactccaatggtaatcatgttgagatggaagaacctagggcaggtgttgttaatggtaaagaaaatactagctccatattagtgcttttgatgtaagtaagcttcagaaaagaactaaaggtgtaaagaaaactgttactgttgtcaacaagggttccaagccggaccctaacaaaaaggctacaaagtagaatagactttgggatgatgcacctccggaggaaaaactggactttactgatccaccggatggaaatggaagtgggaatgacaatttacacgttgttgcagcaaatcatggcgaaagtatgatggacatagaacagattatcagcagtgattagtgaaggtgaagtagatgacaacgtgcagaaggatagcaagcctgaagctaagaaaaagggttggttttcttctatgttccagagtattgctggtaaaggctaatttggtagaaggaagacctagaaccagctttgaaggctctcaaagatgggcttatgaccaagaatgtggctgaagagatagctgacaagctttggtgaatcagtagcctgctagtcttgaagggaaaaagctggcctcattcacaagggtctcttcgacagttcgggctgccatggaagatgcccttgttcgtattttaactcccaggcgctccattgacatactgagggatgtacatgctgccaaggaacagaggaagccatatgttgttgtctttgttggcgttaacggagttgggaaatcaactaatctcgccaaggttgcttactggcttctgcagcacaatgttagtgttatgatggctgcttgtgatacattccgttctggtgctgttgagcagttgagaacacatgcacgtagactccagattcctatttttgagaaagggtatgagaaagatcctgcaattgtagcaaaggaagcaattcaggaggccactcgtaatggatctgatgttgttctcgtcgatactgctggtcggatgcaggataatgaaccactaatgagagccctctcaaagcttatatacctcaacaatccagatctagtcttatttgtgggagaggcactagttggaaatgatgctgttgaccagttatcaaaattcaatcagaaattggctgacctctctacttctcctactcctagattgatagatgggattctgctcaccaaatttgacactattgatgataaggttggagcggcgttgtcaatggtgtacatatcgggagcaccggtgatgtttgtcgggtgtggccagtcatatacagacctgaagaaccttaacgtcaaatcaatagtcaagacactgctgaaatgagtgaatgcacggtgtgggataaaagaacgaaaaagaaaaactcataaatgcattttcaatgctccactcttttatgactttgttttctttgattgcgagtttgagtgttatttcaatggaggtgcttcaatcccttattaaattacacgtttt

SEQ ID NO: 9144 - DNA, 343 bp, Gossypium hirsutum
  Clone ID: uC-gsronu33B167a02b1
tacttcttctactcctagattgatagatgggattctgctcaccaaatttgacactattgatgataaggttggagcggcgttgtcaatggtgtacatatcgggagcaccggtgatgtttgtcgggtgtggccagtcatatacagacctgaagaagcttaacgtcaaatcaatagtcaagacactgctgaaatgagtgaatgcacggtgtgggataaaagaacgaaaaagaaaaactcataaatgcattttcaatgctccactcttttaaaaaaaaaaaaaaaaaaaaaaaaaaaataaaaaaaaaaaaaaaaaaaaaataaaaaaaaaaaataaacaaataaaa

SEQ ID NO: 9145 - DNA, 432 bp, Gossypium hirsutum
  Clone ID: GOSHI-09MAY01-C31570_1
cccacgcgtccgcccacgcgtccgaccacgcgtacgcccacgcgttcgcccacgcgtacgcccacgcgtccgattttttttcttttctgttttttcatttctgggaataggaatagagaaaagacaacaacaaagacaatgttgaatgtgaatagcatggcttctctatcaaactcaaagcggccggggcaatatttccattattataataagcattccagcacgtgttgtaaggtattaacacccaggaaatcagagctgcgactgcgaattgtaagggctccttcttcagctgctgctcctgatgttgatctcaacaccctcgaatgtgccatttccaagaaagacagtgaagcagtgaaagaagcacttaatcagctgagtgaaagtgggtgggcaaagaaatggagttcacagccgtatgtgtcacgt

SEQ ID NO: 9146 - DNA, 618 bp, Gossypium hirsutum
  Clone ID: GOSHI-09MAY01-C31560_1
gcaaaggatttttcttcctgcaacatcaacgttgatgagaggttgctcctttgctacatatgaggttattccaaaaggacaaggaagagaagcacactgtgaccacgttgtgaaggatcaatgtaataaccaagtcgcgaatctctatcccaagccaaatgttggaggtcaacagaagctccaaattgggcagaatgtctcaagaaaggacaaaattaagtttcttgtcaccacacttcttgatcttaaagacagtaaagaagctgtctacagtgctcttgatgcgtgggttgcttgggagcagaattttcctattggacctcttaaaaatgtaatccttgctcttgagaaggagcatcagtggcatagagttgttcaggttggtaaatggatgctaagcaaggggcagggaaacacaatgggaacatatggacaactattacgagctttagatatggataatagagcagatgaagctcatcaattttgggtgaagaaagttagtgctgatctacattcagtgccttggcagttatgcggcctcatgatatcagtatactatcgaaacaacatgctggagaatcttgtgaagcttttcaaagcttggagcttttggtc

SEQ ID NO: 9147 - DNA, 632 bp, Gossypium hirsutum
  Clone ID: GOSHI-09MAY01-C31760_1
ctcagggcaaaattcagtctttagtctcaacattaacaaagattaaaatgaaatccctgcttcagagctcgatcggttgacccccaaaaccatcaatatataaaagaaaaaactttggttatggctttgtatttcatggctacttcacttaatccaaaaccctgttcaaattctaatgttattgttgttcctccattgctttactcaaaacccaaacaccctttcaagctcatctcttcttcttcttcttcttcttgcgggaaagcttttgctcaatctgaaggaaaagatgggggagttaaagaggaagaccctcccgctttctctggttcattgtcttccacacgcacacagctcgatcttttggaccagcttagttcaacgagcttcactggccaccgggtttaaaagtaacggtgggtttgggaactcacgattcgtgacaatttctgccgtaatcggggaaagaaccaagatttactattcattggcaaaacttgaaaatgtaatccaagttttaaccttttacaaatagaaatataggagaagcctattgaatgagtttctcaaaaatgattcggttttttgacctatggagcattctctggtccgccgttataatataggattgc

SEQ ID NO: 9148 - DNA, 360 bp, Gossypium hirsutum
  Clone ID: GOSHI-09MAY01-C31700_1
atttctgtggggggacaatagacaagctgagaagagaatcagcatattgtaatttggaagggcaacaaaattttttaatggattggcagggagtcatgggcagagaatggaagcaactatataaaagacaatgctgatctgaatgtaatatttttggatgaaaaagataaataatcttttgtagtgtaatatttgttaacctacgtctgcagtgttttgtgaattttgtcatccccttgatctaaccacgagtgaattctattactttagtctcatcttggagaagtgtgtaatctagcttttcatcgactgctgtaaatttatcggacatataaaaatagaactgtttgcattcaaggc

SEQ ID NO: 9149 - DNA, 436 bp, Gossypium hirsutum
  Clone ID: GOSHI-09MAY01-C31660_1
gaaaaatccactcaacctttaagatttcaaacatggctgcaacttcctcttacgtggcctgcacaaaattctccatgttgggttggagtggagggaaaagagacttgagaatgaaaagggttctttcggtttcggctcagcagcaagctgaagttggtgaaacacaagaagctaaagtgcaggaagagcaagaaaaggttaagcatcatcaacctacacaaccaaggccagtggaaaaacaactgaatgtaaagagcaaaaacatgggcaaagattatggaggacagtggcttagcagtgttacgaggcacgtcaggatctatgctgcctacattgatcctgaaacctctgagttcgatcaaactcagatggataaactcacccttatacttgaccctactgatgagtttgtttggactcctgaaacttgcaataa

SEQ ID NO: 9150 - DNA, 989 bp, Gossypium hirsutum
  Clone ID: GOSHI-09MAY01-C31180_1
cggcgcgtgggttctatttcaagccactgcattcatttaaactgggctaacactccaaaaaccaggggaagaagaagaagaagaagtaggaaatgcccaccttgaatttatacaccaacgtacctgtggacgccgtcaccacctctgacatccttaaggacgccaccaaagctgttgccaaaatcattggcaaacctgaatcttacgtgatgattttggttaatggcggagttcccatggcatttgctgggacggaggcccctgctgcttatggagaattgatttctattgggggccttggaccttctgttaatgccaaattgagttcaactgtcgctgatattcttcaaaccaagctctcaattgatagctcccgcttctacatcaaattctatgatgttcagcggtcattctttggattcaatggttcgactttttgatgaatggctgaaaaagcatccggggtccaagtcagaatcatatatgtgctggaatgatttgtttttatcaattgaagacttctctctctctctctccatctctctctctctcaagactttcctcccttaagaaattgttcaactttctgagtaactcatcaaatgtagaattgccactatggaaagcgttgcaagttgaatcaggtgcgttctagatagtaatatttcttttatctgtaatgttgcctgattgacatttccatgttcatgttatgatgattagttaaaaaccatggaagtgaacctcaagtataagtaattcttatgattataacaccaaattccaaacacatttcatcatattttttattgtaatagaaatatatgtgtaggtgtgattgttggatacaattatgtatctgacatgggtatggtaagttttttttattgaatatatttaacaaaatagatctgttgtacaaattttgttgtttcaattttaattacaatatgcataatgatgccataaaaattattcatttattttgt

SEQ ID NO: 9151 - DNA, 440 bp, Gossypium hirsutum
  unsure (1)..(440): unsure at all n locations
  Clone ID: LIB3120-017-Q1-K1-F10
cccagcgtncggcggnagatagtaagcaaagaagataatttctatttcaaaccactcatgcgttttaaccgctaaaacaccaaaaaccaggggaagaagaagtaggaaatgcccaccttgaatttatacaccaacgtacctgtggacgccgtgaccacctctgacattcttaaggacgccaccaaagctgttgtcaaaatcatcggcaaacctgaatcttacgtgatgattttggttaatggcggagttcccatggcatttgctgggacggaggcccctgctgcttatggagaattgatttctattgggggccttggaccttctgttaatgccaaattgagttcaactgtcgctgatattcttcataccaagctctcaattgatagctcccgcttctacatcaaattctatgatgttcagcggccattctttggatttaa

SEQ ID NO: 9152 - DNA, 803 bp, Gossypium hirsutum
  Clone ID: GOSHI-09MAY01-C131198_1
accagtagctggagcagtggctatttgctccccatgggaccttttgattggtgataggtttatatgccgcaggctacttcagaagttatatgatagagcccttacaattggccttcaaggttatgcaaaattgcatgagcctcgctattctcggttggctaattgggaaggaataaaaaagtcacgttcaattcgagattttgacaacttcgctacttgccttgttggaaaatttgagactgtggatacatactataggcgttctaccagcactccttatgtgttaaatgtgtcagtgccattgctctgtatcagtgctctagatgatccggtctgtacgagagaagctattccttgggatgaatgcagggcaaataaaaatattgtgttggccaccataaaacatggaggacatctcgcatttttggagggattacctggatctaaactatggtgggtgagggccactgacgaatttcttggtggtcctacactctagttcacatatgcgcgaaaagaagactgacattacgagcagaagcgtcaattgaatatcaatgatcagggccttatgtaacgtcagagaagatggatggtggtgcagtcggtacgccatgcggaaataatcattgacactttacggggttggatatcaaaataactgtttatcacggacaacacagacatacgaaacaagtcaatttgcaggcaggtggaattctgaaatgttaactgctcggtcaatgtttggatctgttcaaatagtggttattttccaaaacggaaatgtggtgaataattcc

SEQ ID NO: 9153 - DNA, 428 bp, Gossypium hirsutum
  Clone ID: GOSHI-09MAY01-C31100_1
cccacgcgtccgtgtttacaggatgttcatttcctcctgcaagaggctgagaatcatgaaaggaggagaagctagagggttgggctgtgtatgagccaccaaattatttaacaagaaagaaagttttctttggctttggataatccaaattctgcaaggaagatcaatttggtcttcctggaaagtgagggggctatttgctagagcaaaatttctcaaagatttgacgacatggctggcctttttagcctcctctatgcatgtcaaatatctatacttgttttatagcacaaaaccaaaaaggcacgatattaaagaatagttaagatccaatccaattgtacaaaacgacagtacactattgctttatcattttttccagtatacgaagaagattaaataaaaaggcaatagaatacagtttatgc

SEQ ID NO: 9154 - DNA, 616 bp, Gossypium hirsutum
  Clone ID: GOSHI-09MAY01-C31390_3
gtcatcgttcatctttacccattcctcaaagggttgatggggaaacaagacaggcttcccaccatcattgtggtttggtcaatacttttagcttcaattctctctcttttatgggctcgagtcaacccctttgtttcaaaaggagatattgttttagaagtctgcggtttggactgtgactaaaatacaggaaaagaaaagaaaaaaaaaaagggggtcgtagttcatgaagaaaggttgtatgaaaattgcataaaatcaggcagccctttcggtggaaaatgaagacatgctgggatgcgacattgttgccctcagcatgtaataaggtaaagcaaaagggaaaaacatgttggcatgattgtagatacatagaactgcgatccccatatttgttctgttgagtttttcattgattctttcgatacatgtcgattttgtgagttggaattcataaaaagtccttgtaatttgcagaggagagaagattgatgcctatggtatcatattcccttctcaataagggactttgacatatatgccatgaattgtaaaaacttggattggaatttgtttctgcattttattttaagattgtctgcattgtgttgctaat

SEQ ID NO: 9155 - DNA, 1291 bp, Gossypium hirsutum
  Clone ID: GOSHI-09MAY01-C31390_2
ggtatccgcagcacagaaggttcccgaggatggttggacaatgcaggatggaactccatggcctggaaactgtgttcgtgaccatcctggcatgattcaggttttcctaggtcatagtggtgtgcgcgatgtggaaggaaatgagttacctcatctagtttatgtttctcgtgagaagaggccagggtttgaacaccataaaaaggcgggggccatgaatgctttgatacgagtctcagcagtcctctcaaatgctccttatcttctgaacgttgattgcgatcattatattaataatagcaaagcactctgagaggccatgtgcttcattgatggaccccacttcagggaagaaagtctgttatgtgcagtttcctcaaagatttgatggaattgatcggcatgatagatactcaaaccgaaatgttgtgttctttgatatcaacatgaaaggattagatggcatacaaggacctatttatgttggaacaggatgtgttttcagaaggcaagcactttatggttttgatgcacctattaccaagaagcctcctggcaagacctgcaattgtttgccaaaatggtgctgctgcctctgctgttgttctagaaagaacaagaaaacaaagcaaaagaaagacaagacgaagaagtctaagcaaagggaagcttcaaagcagatacacgctcttgaaaacatagaaggaatttcagagtcaaacactttgaagtcatctgaagcttcacaagttaaattggagaagaagtttggtcagtctcctgtgtttgtggcttccactcttctggaggatggtggaattcctcaaaatgcgagccctgcatcattacttagcgaagcaatccaagtcataagttgtggttatgaagatcccacgcgtccgggaaaggaagttggctggatttatggctctgtgactgaggatatcctgacaggattcaagatgcactgtcatggctggcgatctgtgtactgcatacctaaaagacctgcttttaagggttcagctcctattaacctctcagatcgtctgcaccaagttctacgttgggctcttggatctgttgaaattttcttgagcaggcattgtcccatttggtacggatacgggggtggattgaaatggttggaacggttttcctacataaactcagtcgtatatccatggacctccattcccttgcttgtttactgtacccttccagctttatgacttcttaccgggaagtttattgttcctgagatttacaactatgccagtctagtattcat

SEQ ID NO: 9156 - DNA, 1590 bp, Gossypium hirsutum
  Clone ID: GOSHI-09MAY01-C31390_1
gaaatcaaagtccaatgataagaaaaacaacaaagaggttacaaagcagatatatgctctagagaatattgaggaaggaattgaaggtattgacaatgagaagtcatcccttatgccgcaaatcaaatttgagaagaaatttggtcaatcaccggttttcattgcttcaacacttacccacgcggccggtgttccaaagggagcaaccactgcatcactcttgaaagaagccatccatgggatcagctgcggttatgaagatggaacagattgggggaaagaagttgggtggatatatggctcagttactgaggatatattaacaggcttcaagatgcactgtcatggttggcggtcagtgtactgcattccaaaaaggcctgcatttaaaggttcagctccaatcaacctctcagatcgtctgcaccaagttctacgttgggctctgggatctgttgaaattttcttgagcaggcattgcccaatatggtacggttatggttgtggattgaaatccttggagcgcttttcttatattgcttcagttgtgtaccctttgacatcagttccactgctcgtttattgtacgctgccagctatatgtctccttactggaaagtttattgtccctgagattagtaattatgctagtctccttttcatgtctctcttcatagtcatagctgtgactagtatcctagaaatgcagtggggaggtgttggaatacatgactggtggagaaatgagcagttctgggtgatcggtggtgtctcgtctcacctgtttgcactcttccagggcttgctcaaggttttagctggtgtaaacacaaacttcaccgttacctcaaaaggaggagatgatggagaattttccgaactgtacctattcaagtggacatctttattgattccccccatgacattgttgatcatcaacataatccgagtcatagtcgggatttcagacgccatctctaatggatacgactcatggggccctctattcggtagactgttctttgcattctgggtcattgttcatctttaccccttcctcaaggggttgatggggaaacaagacaggcttcccaccattattgtggtttggtcaatacttttagcatcgattttctctcttttgtgggctcgagtcaacccctttatatcgaaaggaggcattgttttagaggtgtgcgggttgaactgtgactaaaaataaattgtagaagaaaaaacaaaggagtagaattagatgttcagtgttcaaagcaagcaaggctgtctgaaaattgcataaatcggctacgattttggtcaaagatgaagacatctcccgattcaacatggttgccctcaaggtgaggaaaagaggagaacgtgttggaaggtgtttgtagatacatatatatacaaaactgtgatccaatatttgtcagtgttgagttttcctccgttttgattctttttatacttttgtgggttttgtgggttagaaggtattgatttcataaagtcttttgtataatctcttaagagaagagacttgaaaaaagtgtagttttttcatccatggataatgtatattta

SEQ ID NO: 9157 - DNA, 609 bp, Gossypium hirsutum
  unsure (1)..(609): unsure at all n locations
  Clone ID: LIB3825-016-Q1-K6-F7
cggccgcgtgggcagaagcaaaanaaggagaagacaaanaagtctaagcaaagggaagcctcaaagcagatacatgctcttgaaaacattgaaggggcaatttcagagtcaaactctcagtcatcagtgacatctgaaatgaaattggagaagaaatttggtcagtctcctgtttttgtggcttcgactcttctggaggatggaggagttcctcaaaatgctagccctgcttcattactgagagaagcaatccaagtcataagttgtggttacgaagataaaacagaatggggaaaggaagttggctggatatatggctctgtgactgaggatatattaacaggattcaagatgcactgtcatggctggcgatctgtgtactgcatacctaaaagacctgcttttaagggttcagctcctattaacctctcagatcgtctgcaccaagttctacgttgggctcttggatctgttgaaattttcttgagcaggcattgtcccatttggtacggttacgggggtggattgaaatggttggaacggttttcctacataaactcagtcgtatatccatggacctccattcccttgcttgtttactgtaccctt

SEQ ID NO: 9158 - DNA, 434 bp, Gossypium hirsutum
  Clone ID: uC-gsflnu33B140c07b1
tcccacgcgtccgcccacgcgtacggtcaggattgctttaacacttattggggacagagggattccaaagggcgcaaccactgaatcactctagaaagaagccatacatgttgtcagctgcggatatgaagataaaacagattgtaggaaggaagatggggggatatatggctcagttactgaggatatattaacaggcttcaagatgcactgtcatggttggcggacagtgtactgcattccaaaaaggcctgcatttaaaggttcagatgcaatttacctctgagatcgtgtgcaccaagttctacgttgggctctgggatccgttgaaatcttcttgagcaggcattgcccaatatggtacggctatggttgtggatagaaattcttggaacgcttttcatatatcgcctcagctgagtaccctttgccat

SEQ ID NO: 9159 - DNA, 527 bp, Gossypium hirsutum
  Clone ID: GOSHI-09MAY01-C31380_1
cgtgcgttccttagagagatggcagccgccatgaaagttgtatgcatgatgtttcttgttgccatatttcataaacaccatgcccatggcgcaatatcagcagatacacaaaaacttatcgatgaagccaacatgaatggaccttacttaggcttgctcattccaaaccttttcgaaatgaaccctcttcttcaacatccaaactatacttccaccaacttcaccattgatattgctggaaggagatttcggttcgggaaaattgttgagaaaaatgttatattagtcatgacgggactgagcatgataaatgcaggaataacgagtcagctattgttaactctattcaaaatcgaaggagttgtccattatggaatagctggaaatgccaacccctccttacacattggctttgtcactattcctcaatattggtcacactctgccctttggagttggcagagatatggatatggaccctctgacgagctcccccttgacccaaatggagactatacaagaaacat

SEQ ID NO: 9160 - DNA, 409 bp, Gossypium hirsutum
  Clone ID: GOSHI-09MAY01-C31220_1
cgatacatgtatgggtgtagtgcccctgtcgcattattgatgggactaggaatgtggaggctcccaccatcaccacgttggttaattctcagagcggttcaaggtaaagggtctttacaagaactcaaagagaaggccatccttgccctaagcaaacttcggggtcgggctccgggtgatgcagcatctgagaaacaaatagaagataccctaatctcagtgaagtctgcctatatggaacaggaatctgaaggaaatatcttggaggtatttcagggaccaagtttgaaagccttcataattggtggaggtttagtcctttttcaacagataactggccaacccagtgttctgtattatgctggtccaattctacagagtgctggattctctgcagctgctgatgcta

SEQ ID NO: 9161 - DNA, 342 bp, Gossypium hirsutum
  Clone ID: GOSHI-09MAY01-C32970_1
gccacagctaccaaaatttcccaaactaacttttaaagcaaacaaattttacctttactaaatggcccccaaagctgagaaaaagccagccgaaaagaaaccggcggaggagaaaaagaccaccgttgccgagaaatccccggcggagaagaaaccgaaggccggcaagaagcttccaaaagaaggcggtgccgccgctgacaagaagaagaagaaggccaagaagagtgtggagacttacaagatctacatcttcaaggttcttaaacaagttcaccctgatatcgggatctcaagcaacgctacgggggtactgaacagtttcattaacgatatctttga

SEQ ID NO: 9162 - DNA, 661 bp, Gossypium hirsutum
  Clone ID: GOSHI-09MAY01-C32870_1
ggaaagtcgatcgggcgagaagaaatagagtttatgaaaaacaatggatgcagccctaatttattcaactactctgctttgatgaatggcttatgcaaggagggaagttgggaagaagccaaacaactttttgttgagatgaagagcacagagaaagtaggttccatgaggcgcttcagatgctcgagaagctgccatatgaaggtgtttacttgaacaaagcaagttacagaattgtattgaatgcattatggcagaaagatgaaatggaaaaggcagcgaagctgttgggtctgatgttggataggggggtttttccacattatgcaacatcgaatgaggtgttgattcagctttgtaaagctggaatgttagatgatgcagttacagcattgtttggattggctgaaacggggtttaaaccagaaccacattgttgggagtttctgattgaaatgaattgcaaagataggaaattgctgcctgtttttgaactacttgatgagttagtaataaaagaatgtactcataatcttcatgttggtgctacttttgcttagcctcctatgcatgtaaaactatcattgttgagcatttgatttagtgatacgtccatgtttttccccgtgatacttgaatattaccgaattatatttttttt

SEQ ID NO: 9163 - DNA, 461 bp, Gossypium hirsutum
  Clone ID: LIB3120-045-P1-K1-G5
gatgaaatggaaaaggcagcgaagctgttgggtctgatgttggataggggggtttttccacgattatgcaacatcgaatgaggtgttgattcagctttgtaaagctggaatgttagatgatgcagttacagcattgtttggattggctgaaacggggtttaaaccagaaccacattgttgggagtttctgattgaaatgaattgcaaagataggaaattgctgcctgtttttgaactacttgatgagttagtaataaaagattgtccttataatcttcatgttggtgctactttttgtttagcctcctattgcttgtaaaaattttcattgttgaggcatttggttttatttgtataccttccatgtcattttttttggtggattactttgaatatttacccgatataataaatttttcttttatttttttggctaaatatttatagttccatttattttt

SEQ ID NO: 9164 - DNA, 932 bp, Gossypium hirsutum
  Clone ID: GOSHI-09MAY01-C132578_1
ggaattaccgtcgaaatgccgtctctgtgtgtctcttaagcttcagagacttcagcatcgacactccggccaagctcttcaggacatgctttgaattgaatacacgaaacaatgtggagtgtaaaatgctgtttaaatcctagtttcataatcatagttgttgcagctgttctttcacaagcacttaccgttacatcagttgttgtccctaaatccccttgctacgcgtttgataattctagccatcttcttgatttcagtgattggatcggtagtccttttgtgtacgaggggaaggatactgacgtggttttccgcttttgcaaagatgtggagagtagatcacaagcgggatatgtagattttggtcgatatgataagtttaactactttgttgctggttcaggccatgttgaccttgttcaagagttttacaatggcgacctgctgaattgtgagcacacctttgacaaaatgggacgcaccgcacaggtaaatattatatgcggaaagtgtttaaatgggcaatgttaaggccgacatggatgcatatgcaatgtctcttatgaatccccttgcagaaccattgttgaactggccattccatgtgagaatcctggcccacgggtattcgaaggcgtcactgttggatttcatccgccatcatgggaaattgttcacaatggtctgactcacttgggttttgaaaaatctcaccccgattttagtttcccccctgaacaccctcctgttaccccttatttgactgctattgcatccccatcccccctccttaaaaaacctcctgtccaagtccttcccgaaaaacgactgggagtcgtcttttcccggactgctgcccctgggagacccccctccaactttttccccctccaacttgctttttgatatggaaaattttgtatgggcct

SEQ ID NO: 9165 - DNA, 383 bp, Gossypium hirsutum
  Clone ID: GOSHI-09MAY01-C32440_1
atttattttattcccttcacattcacactcattccatctatttcctcccagtgtttcacaacgtaattctatactttctgttttctttctgctaacccatcatatcttctttctaatttacggaaaaggaatgtttggaaatgaggctaggagagcagtagcatggatgaatgggtgcgaaggagaccccaaactccctgtaggcagcatagagacgcgcacattaactgtcgttccatctccatcaaaggcgatggagaggttgagtgtagccattagagagttgaaatgcagccctcctcctcttacctctggcattcttcgacttcaggtaccgatcgaggagcaaatcgaagcaatcgagtggctccatgctcaacatg

SEQ ID NO: 9166 - DNA, 476 bp, Gossypium hirsutum
  Clone ID: GOSHI-09MAY01-C32430_1
cccacgcgtccggtggggagcttgctccaacagtcatggcttggccatcagcttaaactcgagggcatagcggatatttgacattcgcaaggaagtttttcttgattctttgttatgacacattcctgagtattcactttacagattttcatcctatttttggcctggtttaaaattactgttgtgagtttaacattgtcgaagttcaggtcggaccaggcctacaggtatcatagtgtcttttgataattaaatgatacattaaacagcttctgacgtctctctaaatccttgatgagagatccttctttctcctgtaaattgtgtctcctctgtctccctttattctgattttttctttctttttcttttctttttagtattgtttttttattttctcttcctccctttctttactacacagattctatctgggtatctttccattttttttcctgatttccggaaacaatagg

SEQ ID NO: 9167 - DNA, 610 bp, Gossypium hirsutum
  Clone ID: GOSHI-09MAY01-C132638_1
ggcattaaaaaggttggtggcaaggtctccttcacttaagaagcttaggctaaatcgatatgtttcaattgggcagttataccgtcttatggttcaagctccgcagctcacacatcttgggacagggtcctttagcccatcagaggttgcagggcaaggtgatcaaaaaccagattatgtaaccgcatttgctgcctgcaaatccttagtttgtctctctgggttcagggaaataattccggattatctgcctgcaatttaccctatttgtgcgaatctaacgtctttgaatttcagctacgccaacattactgccgaacagcttaagccaattataagcaactgccacaagcttcaggttttctgggtccttgattcaatatgcgatgaaggacttcaagcagtggctgcaacatgtaaggaattgcgtgagcttcgggttttccctgttgatgctcgtgaggatagtgatggtcctgtttctgaagtaggcttccaagctatttctgagggttgtcggaaattgcaatctattctttatttctgccagaggatgactaatgcagctgtaatagcaatgtccaaaaactgtccaaattagttgttttcc

SEQ ID NO: 9168 - DNA, 618 bp, Gossypium hirsutum
  Clone ID: GOSHI-09MAY01-C32090_1
cggccgcgtgggttcttctccaaaaaattagaaaaaaaaaagcacccaaatcccaaatattttgatcttgttgctatcccacccgtcatccacccaaattcggtcattttcaattttgttcatatataaattcttttatggctgctctttactcaacttcctcttgcttttgtggtagtttgggttcttacccagttcataaatcagtaaaattgggtcatggcaaggttagagattctgggttttattttcctcatcgttttcagtgcgctactcctaaattacacgtccaagcaaaagccctttctgttgatgggttacctgaaatgatggattcttcacttgtggtttgtttcggggaaatgctgatagattttgtcccgacgatcagtggtctttcgttggcggaagcccctgcatttaagaaggcccctgggggtgctcctgctaatgttgctgtccgcatagctcgtcttggtggttcatctgcttttatcgggaaggttggtgaagatgaattcgggtacatgcttgctgacatattaaaggaaaataatgtcaacaatgaagggatgcgttttgatcctggtgcacgaactgctttagcattcgtaacat

SEQ ID NO: 9169 - DNA, 694 bp, Gossypium hirsutum
  Clone ID: GOSHI-09MAY01-C32060_1
aaaaaaaccaaatcacaaaatctaattgcccctttcagcactcaatctccaagaacagttttgtttttagaatcatgttcttccattttagtttttatgtaagcctttttatgggtttttatcaagatcttcccaaaaaagcaagagaaaaaaaataaaaatttgaagaattgacaccattgctttttatgattctaccttttccactcaaaaacttgatcagggttttgattcctttccaaatctcttcacttttcttcaagaaagcatctttgttgttgttgctattaataatcttgttcctcgccgttcttctcctttgatttcagttcttcaaatctttgtaaaaaaaaccagaaggaacccaaatatttaataccctcaaagagcaccatgaggatccatccgttgccgaagaaaagaaacatcaccgtccaatacgagatgaacccaaggaccacaaggtctcaagctgagaccttgttgaccggcgggtccaacaagaagctccggaggttaccccacatcttcagccgcgtcctcgagctgccttttaggtcggatgcagacgtggcggtggaggaaagccctgactgtttcaagttcgtggcggagacggatgggatgatcggcgatgtcgtgagggctcattacagttgaaatccatcctgtggttactaagattgtgattagg

SEQ ID NO: 9170 - DNA, 751 bp, Gossypium hirsutum
  Clone ID: GOSHI-09MAY01-C132308_1
atacctggattatttggttacgccattgttcaatcacaagttcgtttcttccaatcccagagcttggttcttcctatgatgtttagttctcttgcaacattgtgttcccatataattgtttgttgggttttggtattcaaatttgggtttggaagcaaaggaggggcattggctatcagtttctcgaattggtttaatgttatattgcttgggttttacatgagatactcaccttcatgtgagaaaacccgaaccctccatttgaaagatgttttcttgagtgtcaaggagttctttcattttgccataccttctgcagtaatggcttgcctcgaatggtggtcgttcgagattcttgtattaatgtctggacttctgccaaattccaagcttgaaacatcggttctttctatatgcctttcaagcgattctttgcattatactatatcgtttgggattagtgtagccgccagtacacgaatttcgaatgaattaggagctggaaatccacaagcggctcagatagcaaccctagtttcaatgcttattgcactcgtggaaacactcattgcaagtacaatccttctctgttgtcgccatgttttcgggtatgcttacagtagtgaaaacgacgtcgtaatcaaagtaacacgaacggttccattgatctgtctctcatttattaccgacggtttacatggagtacttgcgggatcgtgagaggtattgggtggcagcatgttggagcttc

SEQ ID NO: 9171 - DNA, 490 bp, Gossypium hirsutum
  Clone ID: GOSHI-09MAY01-C32240_1
acgcccacgcgtccgcccactcgtccgcccacgcgtcctcccacgcgtccgcgggatgctaagtgcctgatggatgaattgaagagacaagtggaatcccaggagcttgatttccctgaatcagatttggttcagtttatcacctttctgttgctaacgttggagagagatgccttgcccctttttaacatgttgagagatgaattacaagtctagcatagacagagaaccggcattcaatgagttgctagatgaaattgcagaaaagttctatggtgtacagcgtagaaatccgcttcaagggatgtttggcgacttattcaagatgatgtgatgaggaaaaacatggcagcaacctgaatttgttggaatttgtcagtgtcttggcggacctgaactgctgattttcattatgtcttcggcttgatggcaaattcctttttatgccaaaattgtttaatatacttttgtaatatgctttcccatttga

SEQ ID NO: 9172 - DNA, 989 bp, Gossypium hirsutum
  Clone ID: GOSHI-09MAY01-C32210_1
cccacgcgtccgaattaactcacacccagtttcatagattttctatgctaccccaacattactctctccagatctaatcggtgaaaaccatcgatttgtaatacagcccttctgctcagattaggtgctgcatcgtttaccttccctgttttaccctcccaattagcttccccattccgtcgcctcttccttcgttctaccttcgcctcccgattggcttccccattccttcgcctcttcctctgtctctcaaccttttcttttctttttctttacaaccagtcactctttcgatttgccttctcaaccagtcgacctttttcttttctttttctctgtgtcactccttcgattgctctcaattggtgttactgctactgaaagaatttgcccttgagttccaaaggaatagcatcaatggccatgaatgtcagcagtgcctgtttctcagttttgagttgcaagaaacccaaccgaataagagcggatgcttccgaggattttgccactaccgctgctctcaaaacagatacagaagacaaattgaggttaggaggatcggagctcaaagtgacaaggctcggaatcggagcttggtcttggggtgacaccagttactggaacaactttcaatgggatgatcaaaaattgaaggctgctaaggctgctttcaatggaagtcttgattgcggaattacgttcttcgatacagctgaactttatggctctccgctcgccttacgtgctgaaaattctgaaactctactgggaagatttataaaggaaagagaaaatgataatcccggtgaagaggttgttgttgcaacgaagtttgcagctttgccttggaggtttggtcgtcaaagtgtcatcagtgcactcaaggattcccttaatcggcttggcctttcatcggtagacctttatcaactccattggcctggtatatggggaaatgaagggtatattgatggtcttggcgatgctgt

SEQ ID NO: 9173 - DNA, 1006 bp, Gossypium hirsutum
  Clone ID: GOSHI-09MAY01-C33880_1
cgcagccataaagaaaggggaagatcttatcttgacggaattagattaaataagaagaatagctagaagggaggaatgagggttcaagcttgactttcttctttctatagggcggaacaagcactcgttcccactgcacttgttacagctgatagactcaaaagtaagggaacgtaaaagctgtcttaaacaaaaccttcacccgctctgaaatttttccagcgtagatgaatcacccattccctctgtatgttcaagcgccatccacttgtgaatactacaacctgcccaccgtaatcaagtaattaaacattcactaagcttcctttcaattatcccatattataatataataaggaagacatagtgcttgttgatggccacgattccaatatggccctctgacctttctttttccccgtgaatagctcggtttatgtgcgtcttaatcatggccactaatcgaccggtcacgctggtcagcggcattcattcagttgtcctgctcagatggatgagacagttcccacttgaagcatgcttcaagtctagctttgagacatcgattactgcgaccggaaccttcattccttattgttgcaattccatgctagcgagtttcatgtcgacttgcggaacaatcacatcaattttcacgaaaatcgaagaactggaacttgataacgaaccaggaaagagaacctggccaaaggatttttttttacaatgtatatgtctgggttgacaaagctgtttacgtaatacgctgctggctagaaacataggaattgggaatgttgagatgactggtacgtttatcgaaacactcgagtagatgctttcaacacgccccactcacagatagctaatgagctagctcttttaaaaaggaaccagcaatactggatgcgatgtttggaacataaagaccaccaaaggttccccgaaatgttcgcaaatgacttgtcatatggccgtacagaagaacacgcagacatggacaatt

SEQ ID NO: 9174 - DNA, 396 bp, Gossypium hirsutum
  Clone ID: GOSHI-09MAY01-C33540_1
gtaatcctcaagtctactactacaggaatcggttgaagcagagaatggagggaagaagggtcattgggtgggctgccagagatgtatcagcacatctttcaccttattcattcactctcaggaaaacaggtccagaagatgtggtgttgaaggtattgcattgtggagtacatcacactgatctacaccagatgaggggtgagcttatgcccatcaactacccattggttccagggcatgaagtggtgggcgacgtcgtggaagtgggttcagaagtaaacaaattcaagcttggagacaaggttggagctgggtgcctggtaagctcttgtgggaaatgctcgtcttgcatctccaataatgaacagtactgcaaccatagggtctttacatatg

SEQ ID NO: 9175 - DNA, 442 bp, Gossypium hirsutum
  Clone ID: GOSHI-09MAY01-C33450_2
agactatttattagaaacctagtaatttctttgcttacacttgttagcataggatttctaggagcggaaaaaatcgcctatgaatggatctttcttatagtcattctattaataagtgtcattattttgtatcgggaaataaataaaaaaaagaattggattcttttgttgctaatccatcttttgttagtgattttggcttttatcttaaccctctttcctatcccagatgatttccactttgcttggagtttctttggttttttgcttttcttcggactccagtgggggtggacatcttcctctttccagtcccggcccttccgctccagcaagctccaataattctgatgctgattctttcggcatcaatggtatattggagaatttgccaacaaccgaaagcgaaagacagtcgtcagccttaacaaaaaccggcacc

SEQ ID NO: 9176 - DNA, 884 bp, Gossypium hirsutum
  Clone ID: GOSHI-09MAY01-C33450_1
cccactcttcctagactccttgtttttgatacatagaaaagcaccttaaataggtagaaatcaaaatggaaaaaattctgtcgcaacgtccgacgcggcctcgacatagtaaagagaggtgagcacttacactatttattagaaacctagtaatttctttgcttacacttgttagcataggatttctaggagcagaaaaaatcgcctatgaatggatctttcttatagtcattctattaataagtttcattattttatatcgggaaataaataaaaaaaagaattggattcttttgttgctaatccattttttgttagtgattttggcttttatcttacgctctttcctatccgagatgatttcgactttgctaggagtttctttggttttttgcttttcttcggactcgagtgggggtggacacagtcttcccgctttagaatcctcttcgagttccgaatctctaaatacgttccggcccacgcgtcccgcggattatgagaggactatattcgaaagaataagaagtctggaaagtgcgtcaatattacaatcttccaccacaaacgccggccgggggagtatgaaaccatcgtaagagcgcattttgatcaagcgctaagtgtcgatcatctccggtccgctatggacatggagtatcgagagatacttattttagagaaaaaggcgctcttacaagaaaggcttttttctaatttaatctcggaggataatctagagcgtattatggaactctctccatataataacatacgcaaggaggcgtatgaatttgtggagggggaagtagacactttagatcttcgatccgaagaacaaagaagagcgatggatgaacgacttcctcttttttgaggacaat

SEQ ID NO: 9177 - DNA, 373 bp, Gossypium hirsutum
  Clone ID: LIB3135-045-Q1-K1-D12
cccactctccgcggacgcgtgtgtcgggttacatggtaaaagcacggtaaatagatagagatcaaaatggaaaaaattctgtgacaaaataaaaaaatgatgcgacaaagtaaagagaggagagcacttagactatttattagaaacctagtaatttctttgcttacacttgttagcataggatttctaggagcagaaaaaatcgcctatgaatggatctttcttatagtcattctattaataagtttcattattttatatcggaaaatcttaatattctttttttttatttttatttattttggggtgtgtttgttttttatatttcatttttttatttcactctttgtttttatatttttatttactttct

SEQ ID NO: 9178 - DNA, 980 bp, Gossypium hirsutum
  Clone ID: GOSHI-09MAY01-C33440_1
gggtgttggcgggtgagtttgaagcgaaggagacatggatggagtatgctgataatgaggaaagagaagggtggtataagggagaagggtatgaaaagatgcatttgcaagggaggagatggggtggttggataaaggctaagtttaatgctgccaaggggattgattacaaaggctcaatttatgatgctgctcctacctttgtatcttatggagttgctcatggatcttctgagttgatgaaggctgtatccagtaagacccacatgtaaatttctagcagatatggtttgggttcatgaagaacatgatgtctgtattgagacacaggaaggagttaagcattgtaaattaattgctgttcatgctggtttagagagaggcaaaaatgtccgagagcagttggaatttttgaaagccaaggatgctcgtgtgcccaaggtcacagatctcagtggttgaaaggatgtttgggacatccccaaagagctaactgaaacaattttggtgagtggtcaccatgggaaacttcacatataaggtcttagattgatcattgacgaatgcggaggattggatggtaatccggtggctgcaattgtgcttccttcaatgaagatagtccgcgacactgataatttttcttagtttcaccctcgcgtcctcaattagctctgctttctgaatttaagaaagcatataatcccttgttttgggggcataaagtatggtcaagctcataggagtaaatgtggatttggaggtacttatttggtaattttgggtgtgataagtttgttataaacgtccattaacagattatctgggaaccaaatactggggtttaatttttactgggttcttctgctttccaaaccaaagtaggtgtaaattactattatagtgtttctagaaattacatgatttgtaggttatttaaaaaatcttctttctgttaaaacctttgatcttttttaaat

SEQ ID NO: 9179 - DNA, 429 bp, Gossypium hirsutum
  Clone ID: GOSHI-09MAY01-C33460_3
caacattgtcatgaaggatcgactttgcttctatgatcctacctttctcattcttaacaataagacctgatgcagatctgtggttctgtgagtcaaaagccgcgtcaaaaaagatggacttatttgcccttcgtacccgctgtctgggccttgcgctgacttctaagattccccacagctctcaacaaaatcccaagcactgttcattcgtccctacgctgaagatccaggaaagccaactccataaatcaaaatggttattgttaagtacccaggggaaatttaactaactccaaatttctttcactataaggcatctttggaaaacgtggaagctgtcttctacttcctgaccgcatctcggacaacggtcttcagtcataactcttttcagcttaagagtaattccatagtgtaattttaattttt

SEQ ID NO: 9180 - DNA, 781 bp, Gossypium hirsutum
  Clone ID: GOSHI-09MAY01-C33460_1
atcatcttatcccctttccttctactttgaatagccaaggcgatttggctttggttcatcacagatcgatcgtgaagtctctcccaccaggtgcttccgctgcaaacagatatgcaacattgtcatgaaggatcgattttgcttcaacgattctaccctcctcattcttaacaataagacccgatgcagatctctggttctgtgagtcaaaagccgcatcgaaaaagatggacttatttgccccttgtaccctctgtctgggccttgcgctgacttccaagcgattccccacaacccgcagcaaaatcccatgcactgttcattcgtccctacgctgaagatccagggcacctttggaagacgtggaaattgtcttcttcttcctgaccgcatctcggacaagggtcttccgtcataactcttttcagcttaagattagaaaaagtaggaatgtaattccacgctattttccatactgtaattttaatttttgaaggcatatgcagattccatagtttcttgtaaaagtttttagaatcggcctgtaaataatcattaggatccagtgtaaactcttgtaatagtttataggcgcttcttactgaaaatcccagttgcctctcctctccgtacttggatatcttcgtgaatagtcattgaaagcgggatctgcagtatcttccttgcaatatccctattaaagtcactcccggcacccatcgatcattccatattgagatatggtctcctacccctaccctccagcacaatccatccatcc

SEQ ID NO: 9181 - DNA, 629 bp, Gossypium hirsutum
  Clone ID: AI728555.1
ccctttccttctactttgaatagccaaggcgatttggctttggttcatcacagatcgatcgtgaagtctctcccaccagatatgcaacattgtcatgaaggatcgattttgcttcaacgattctaccctcctcattcttaacaataagacctgatgcagatctgtggttctgtgagtcaaaagctgcatcgaaaaagatggacttatttgccccttgtacactctgtctaggccttgcgctgacttccaagggcacctctgaaagatgtggaagctatcttcttcttcctgaccgcatctcgaacaacggtcttccgtcattactcttttcaacttaagattagaaaaagtaggaatgtaattccacgctattttccacactgtaattttaatttttgaaggcatatgtagattccacagtttcctgtaaaagtgtttagaatcggcctgtaaataatcattaggatctattgtagactcctgtaatagtttataggcgcttcttactgaaaaaatcccagttgcctctcctctccatacttggatgtcttcgtgaatagtctttgaaagcgggatctgcagtatcttccttgcaatatccgtattaaaggtactgataatcaaatttt

SEQ ID NO: 9182 - DNA, 389 bp, Gossypium hirsutum
  Clone ID: LIB3585-044-P1-K1-E8
atacaatgaagttgtccacgatgatgtctctccatcaacgatatatggtgctgagcatggactacgcctctttgttaagtttcctgagttattggcatatgtgaacattgaagaggaaacacttattcgcttgcaacagaagttaatggattttctcaagtttctgcaaaagaaccagagcaccttttttctttctgcatatgatggacctaagggagtttcagaaggtagggggaaaggaaaagatgactaaagcagctgttgaactatgctaccattgccatcttcacaattgtaattccaagaacaaatatgaatttagtggcagaattaggacagtgctagatatcgcgacgtttgatttgatacaggctgcataaaattgttgt

SEQ ID NO: 9183 - DNA, 331 bp, Gossypium hirsutum
  Clone ID: LIB3135-003-Q1-K1-D2
tgttactctaccttcaaggtattcaaatttcatcagattataaaaatgaaaatataaatatgatggtcctaagggagtttcagaaggtaaggggaaaggaaaagatgatgactaaagcagctgttgaactatgctaccattgccatcttcacaattttaattccaagaaaaaatatgaaatcagtggcagaattaggtaatcggttgatatgccgacgtttgatttgatacagacagcatagaattgttgtaacaatagaatttgttattctttgttttacaccatttccccctttcgagcttctaggtgaattaatcggatatatttcgt

SEQ ID NO: 9184 - DNA, 611 bp, Gossypium hirsutum
  Clone ID: GOSHI-09MAY01-C33420_2
cccacgcgtccgctaaaaaagaacgttgccaggcctcaccattggagacacagtgcccaaccttgaacttgcaaccacccacgggacatgcaaccttcatgactacttcaacaatgggtggaccatcattttctctcatccttctgatttcacgcctgtgtgtacgacggaactggggaagatggcggcttacctgccggagtttgaaaaacgaggggttaagcttctaggtttctcttgcgatgatgtgcagtcacacaaggagtggatcaaagatgttgaagcctacacgcctgggtgcaaggtggcatacccaatcgtggcagatcccaagagagggatcattaagcaacttaacatggtggacccaaatgaaaaagactcttcagggaacgagctcccatctagagctctgcatatcgtgggctctgataacaagataaagctgagcattctgtatccagcaaccacagggcgaaacatggatgaagtgatgcgggcagtggactcactgcagaagacatcgcagtacaaagtggcgacaccggcgaactggaaacaaggggagccggtagtgatttcgccatcggtgcccaacgaggaagccaaaa

SEQ ID NO: 9185 - DNA, 842 bp, Gossypium hirsutum
  Clone ID: GOSHI-09MAY01-C33420_1
gttgcagcactcttcattttgtctaaaaaagaaaaatgccaggcctcaccattggagacacagtgcccaaccttgaagttgaaaccacccacgggacattcaagcttcatgactacttcaacaatgggtggaccatcattttctctcatccttctgatttcacgcctgtgtgtacgacggaactggggaagatggcggcttacctgccggagtttgaaaaacgaggggttaagcttctaggtttctcttgcgacgatgtgcagtcacacaaggagtggatcaaagatgttgaagcctacacgcctgggtgcaaggtggcatacccaatcgtggcagatcccaggagagagatcattaagcaacttaacatggtggacccaaatgaaagagactcttcagggagcgagctcccatccagagctctgcatatcgtgggctctgataacaagcaaccacagggcgaaacatggatgaagtgatgcgggcagtggactcactgcagaagacatcgcagtacaaagtggcgacaccggcgaactggaaacaaggggagccggtagtgatttcgccatcggtgcccaacgaggaagccaaaaaaatgttccctccaggttttgagaccaaaaaccttccatcagggaaggattacctgcgcttcactaacgtctgaattacatatgtcatggttaagaacttttgcactccaactcttgtctttcaagttttaccatgtaagcaccgcttgcaatttcggttaaataataataaaaaagttgtacttggatgaaaaaaaattaaactaaccaacctttgctttctctttcattgcatgttaaaatttt

SEQ ID NO: 9186 - DNA, 1457 bp, Gossypium hirsutum
  Clone ID: GOSHI-09MAY01-C33020_1
ggtcgacgacgcgtacgtccgcggacgcgtgggggcaagggcaagggcaagggcaaaattttcgacctttataattcgttatgtgcaggcaatacgaatttttgggagcttttgaagaaggcaatggcttctctgttcaaggacccagctaagctttcagcgtaccgagacagaagattcaatggttcgcaagaggaattcgagcaagcgctcctcaattcgacaaccgtctacatcggaaacatgtctttttacactactgaagaacaagtttatgagcttttctctagagccggggaaatcaagaaaattattatgggccttgacaagaactctaaaacgccttgcggcttttgctttgtcttgtactattctagggaagatgctgaggatgccgttaaatacattagtgggacaatccttgatgaccgcccgattcgtgtagattttgactggggatttgttgaaggaaggcaatggggccgtggtcgaagcggtggccaagtgcgagatgaatatcgaactgattacgatcctggcagaggtggttatggaaaattagttcaaaaagagttggaagcacaaagacagcttgtagattatggtgctgggtcactgggctcattcccaccggttatggcccctcattatggtaggcatggtgggggccgtggtcatggtggttcttatcgtcatgggagagattaccatcggaagcgacaccgagatgatgaccactatgcacgtgagtcctcaaagagaaactcggatcatgaatccaggagagcctctgaccatgacgctagaccggagaagaatccacgtttccgagagagcggtgattctgatgaagaagaagatgatgatcgtaaacgacgatcttaatagatacattattaagtgtaatatgtgaagtaagtttttggtgtttttatgcatttgttaagaggggctcgagacgcagaacaatgaggagttttcttggtacaattggtaggacaccaaatgctgctttagcgcttcagttgttatgtagggcagtatgctgcagctgtcttttagattagatgttggttttgggcatttgttgcatgtttaaaggtgaagcattgtattttttttttaaatattttttttttgacaactaatctgattaaaaaaaaaaaaaaaaaaaaaaaaaaaaaaaaaaaaaaaaaaaaaaaaaaaaaaaaaaaaaaaaaaaaaaaaaaaaaaaaaaaaaaaaaaaaaaaaaaaaaaaaaaaaaaaaaaaaaaaaaggggggggccccccctttttttttttttttttaaaaagggtttttttttttaaaaaaaaaaattttttaaaaaaaaaaaagggtttttttttttttttttgccccaaaaaacacccttttgggaaaataaaaaagaaaaacacccccccttttttttaaaaaaaaattgcgaaaatttttt

SEQ ID NO: 9187 - DNA, 685 bp, Gossypium hirsutum
  Clone ID: GOSHI-09MAY01-C33360_1
tctttaccttaatcaaagctttgactactaatcctattataaatttacactcaccgctctcaggatctaccagaaaatcgactaatctcccaaccatggcggtcgtgaaattgttcggagcttggtttagtccgtacggttacagagtaatttgggctctgaaactcaaaggcataccttacgaatacatcgaagaagatctccgcaacaagagtcctttgcttcttcaatataatccaattcataagcaagtcccggtgctcgttcatgacggaaaaccgatctgtgaatccaccgtcatccttcaatatatcgatgaaatttggccgcagaatcccttgctgccggctgatccctatgacagagctgttgctctgttttggatcaaatttgcagatgacaagggtcctttaatgtcaaagctttatcgagccaatggcgaagaacaacaggcggcagtgaaggagtggttggaaatgttggaagtcatggaagaacatgcgctgataggagtgaaaaagttcttcggcggagacgagataaacatggtggacattgcattttcctttgttgctcactggcttgggattctcgaagacgtactagggcttgaaatctttaagccacacaagttccctcgagtgagctcgtggatccaaaatttcaaatcaagtcctataatcaa

SEQ ID NO: 9188 - DNA, 938 bp, Gossypium hirsutum
  Clone ID: GOSHI-09MAY01-C28860_1
ctgactccttccttaacactatggggtcatcatcaggatacacggaagatgattttagcacctctgccttcgatccttcaacatttagcgtccaggaacttgttaaattagcagcaccggatttctcaatcccacaaccatttgttcgtataaaccaacaacctccttccttgtctgtcaccactcctttgccaccaaccatcgacatgtctcgtttgcttttggaagatgacctccagaaccttgagctccacaagttgcactctacttgccaagactggggcatctttcagttggtgaaccatgggcttagctcatcactgctggagaaactgaagcacgaagtggaggaattttataggctgccattggaagagaaactgaaatacaaaataggggaaagagggtgggcccgcgcggccgcccacgcgtccgcagatggcaaatatgattgggttgacactttgaatattatcactaacccactccatatgcgcagccctcatgtcttcccacaactccctcctcctttaagaagtacgatggagtgttacttatcggagctccaaaagcttgccacaaaacttattggtttcatgggaaaagcattgaaaattaaagaaaaggagatgatggagttgtttgatgatgggttgcaagcggtgaagatggcatattatcctccatgcccacatccagagtcggtgatgggtcttattccacactctgatatgactctcctcactatcctacaccaactaaatggtgtggatggccttgagattaaaaaaaatggcctttggttccctttcaacgtcaacccagatgcttttgtggtcaatgttggagacattttcgagatatttagcacggggtttatacagcgttgacacaggttacttgcaataagagagagaaagataacagttaccttcaac

SEQ ID NO: 9189 - DNA, 751 bp, Gossypium hirsutum
  Clone ID: GOSHI-09MAY01-C28560_1
aaccatctaaaaaagcttccttcctttatttgtcctgcgaaaattttgttttgaccatctaacttgaatctcttttccatggctttcaatttgaaaaatccaagaaacattatcaacaaccttaaatcaaaggtcggattatggagtttaatgaagcagagtcatagtacttgttgttacagctcttgtctgaataccattcatcttcaccgtttcctcccattaactactctaccacaattcacaaacccagagtctatttcccataaaaaaggacattttccccattttcagcgttttcaatccaccacaactgagaaacagattgattctgtcccaaatgatgaacacaatcaggtattggattttccaggaggaaaagttgttttttctcctgagatgcggtttttatccgaatctcctagtgtgtattcccagtgctaccgagttcttgatgatgctggtcagctaattagtcacagcaactttgtaccggtcagtgaggaagttgctgttaaaatgtatagcaacatggtcacccttcaaactttggataccgtattctacgaagctcaaaggcaaggaagaatttccttctacgtgacctcatgggagaagaggctatcaacattgcatcggcagcagcacttacatcagatgacattgtttccccagtacagggagccagagtctattatggcggggttcacccttgcagaattgcaaccagtgtttgaaacaagctgttatg

SEQ ID NO: 9190 - DNA, 715 bp, Gossypium hirsutum
  Clone ID: GOSHI-09MAY01-C28510_1
gcactttggacttctactgggtcagagaaaggtactgttttactactgcttgaccctcattgtgcatataaggcaagcatagctgtttctgtaacctctgcggctagcagatttcggcttctatatttaccacagatagctggcttctgtgttgctgctgtattttctgctctgatgcgacaagcacatgcaaggccgattccttctatactgaaagctgcggagtccaatttaagaatgccattcccggctttgccttttggtgctgtccccatcttgctttcacttgttctttgcctttctagtatctcaaccatttcctccattctctagcttcaccattgtgtcgataatttgctacctattggcgaatgggattgttattctactgatattggtatcccaattggtcttctacgtggctgcgtatttacatgttttcataaaaacaaggtggcaactatgggaaggaaactttggctttttgtttcttcactggtttatgaatctttcttcgaggttcttttcattgaaggttgtaaggattctaagagccaatccgttatttgttccaatatctgcggcaattgttttgtctatgttcgtacatcccgcacttggcctattcatactgctcttatctcatgctttgtgttgtcatagttcgctgcgcaagtctttgacagcctcattgcgcagccatgcacgaaaaaaa

SEQ ID NO: 9191 - DNA, 1645 bp, Gossypium hirsutum
  Clone ID: GOSHI-09MAY01-C28790_1
caccgagccagtgtccgttttccacgattggcttattgcttagctttgcttagcttctttgagagcaaaactccacttgagacaccattttaatgagttaaaaatctttaccggaaatgggcaaactcgttcccgatcgctcgtttttccttttatttttcctttttcttcactttctcctcttcgatttcgctctctctgagattttcttcgaagaacgcttcgaagatgggtggaagagccgatgggtgctgtcagattggaaaaggagtgagggaaaagccggcacctttaagcacaccgccggcaagtggtctggcgatcctgatgataagggtattcagacttataatgatgccaaacattatgccatctctgctaagataccagagtttagcaacaaaaacagaactctagtggtccagtattctattaaacttgaacaagacattgaatgtggtggtggttacatcaagcttctctccggttacgtaaaccagaagaaatttggtggcgacactccttacagtttgatgtttggaccagatatttgtggcacacagaccaaaaagctccatgttatactatcctaccagggacaaaattatcctattagaaaggatctacaatgtgaaacggacaagctaactcacttttacacatttattctaaggcctgatgcctcttatagcgtcttaattgataacagagagagagaaacaggcagcatgtatactgattgggatatccttcctccacgaaaaataaaggatgttaaagccaaaaagcctgcagattgggatgatagagaatacattgaggatcctaatgatgtcaaaccggagggatatgataaaattccagctcagattccagatccaaaggcgaaagagcctgatgactgggatgatgaagaggatggtatttggaaaccacctaagatcccaaacccagcatacaaaggaccatggaagcgtaagaaaatcaagaaccccaactacaagggaaagtggaagactccatggattgataacccagagttcgaagatgatcccgacctctatgtgctgagaccaataaaatatgtgggtattgaagtctggcaggtaaaggctggttcggtttttgacaacatattgatttgtgatgacccacaatatgcaagagaagttgtagaagatatatgggccaggaatagggaggccgaaaaggaagcctttgaagaagcagagaaagaacgaagagcccgggaagaggaggaagccaaaagagctagagaggaaggtgaaaagcggagaagagagagggaccaccgacatagagacaggaggcaccgtagaaggcacgatcctcgtgattatctggacgattaccatgatgaactatgaggttgtccaccacaatttcgcgagttttaggatcccatttcgattacgaaaaagagaaaaatcgaagcaaggttccacgctgagagagttggggttactgtgtactggttgttctcattgttgtcgtcgttgttgtgacatcgttgttgtaatatgaacatttaagctgaaaactgctaacattccatgatccacctcatgtttggatgctaattttgttgaataaattggaactttcaattattgttgttttgctt

SEQ ID NO: 9192 - DNA, 313 bp, Gossypium hirsutum
  Clone ID: LIB3048-039-Q1-L1-B5
tgactatccaagctactcttcgcatttatatttagttctgatggatttatgcagttgctatccatgcctgtcttcaatacaggctgaatatgtactgtcctcttttttcattgtttcttctgatatgttgcataaactctaattaatttgtgaattttccattgtcttcattttcctgtcctccagagttcgaagatgatccggacctctatgtgctgagaccaataaaatatgtgggtattgaagtctggcaggtaaaggctggttcggtttttgacaacatattgatttgtgatgacccacaatatgcaag

SEQ ID NO: 9193 - DNA, 730 bp, Gossypium hirsutum
  Clone ID: GOSHI-09MAY01-C128098_1
attattctgacagacatgcttatgttcgtttcaagcgacataattgctcgatgtatggcttagtcacaaaaatgaagaagaagatgggtgcagcatgtttggggagttagcaaaaaggttgttgattctcttcaactagttcctgtattggcgatatgttttcttacttgaggtgggttgatgtgcttactggatatattccaagtatgaaagcagtctctacggaattggatgcattccttgatcaagtaattgaggagcataaagctattgaaagtaatgaccaagttttcaataaaaaggactttgtatctatcattatgcaactccaaaaggatggcatgtacgagatggacctcactcatgacaacatcaaagctatcttactggacatgtttgtaggaggaactgatacctctacaacaacaaaagagtggatgatggcagagcttttaaagcatccaaatgcaatgaaaaaggtccaagaagaggtgagaaatgtggtgggaaacaagttaagggtggatgccgaagatgttagtaaaatggaatacttaaaatgtgtactcaaagaaactttaagactacatccggccggtcctcttatggtccctcgagaaacaactgcaagtgttaaattgggaggttatgacattccttccaataccacagtcctggtcaatgtatgggccattcagagagatcccaaatggtgggaaaacccaaaaga

SEQ ID NO: 9194 - DNA, 531 bp, Gossypium hirsutum
  Clone ID: GOSHI-09MAY01-C28280_1
gcatagcccatagctgttaataaacacagcaaaaatctcagctagctagcttttcccctccattaaaatccatggcttgcaccattagcatgaagatgaccttggctatccttgctctctcattattctcctcttgcttacaagccacactaggggaaattatatgtgaacaccttgaccaagacacctgtgcttacgcggtggcgtccacaggcaagcgctgtgtgctcgagaagcacgtcaagaggagcggtgaagaagaatacacttgccgtacctccgagatcgaagccgataagataaacaactggatcgaaaccgatcagtgcgttaaatcgtgcggcctcgaccggaaatcattcggtatctcctccgattccctcctcgagtctcgcttcaccgaaatgctttgctctcctcaatgttacaatggttgccccaacgtcatcgatctttacttcaacctcgccgccggagaaggtatttttcttcccaattatgtgaagcacaaaaaggaaacatacgtagagg

SEQ ID NO: 9195 - DNA, 674 bp, Gossypium hirsutum
  Clone ID: AW187340.1
cggcacgaggggaagatggcaagttcatcttcattttttaggcagctaagtggcaaacaaggttggaaatctaaatccttgcgttggggagtgaacaacaagaacaatatttgtggtgggtgtgatacaagcttaaaagctcatcaaatggaaggtcttgacatgtacggcaatggtggtgctggtagtggtgatgatgggttggttttaaggaagagagtgatggttttagtggacaaaagctcacattctaggcatgcaatgatgtgggcactcactcatgtagctaacaagggtgatttgcttactttgcttcatgttatccctccaacccccaactgttcacactccccttcttcttttacttatcttgctaactctcttggctcactctgcaaagcttgtaaacccgaagtacctcaaactattctcacttcttgggctgttttgcttcatttcttttctttttagaaaaggggttgcatccctcttctcttctcttctcgttaagggagacaatagggtcgcaatgaaatgaagcaagtggatattactaaatttaccattttcccacagtggatatactttgtatcgccatactttgctcaaccataggtatatccatccttaaaaaccactatcaacaacgcatccatctttatttcgctccactc

SEQ ID NO: 9196 - DNA, 622 bp, Gossypium hirsutum
  unsure (1)..(622): unsure at all n locations
  Clone ID: AW187030.1
gttatttgtaatcactagtcattgccacccaatttaaggtgtttgaagtgagaggaagatggcaagttcatcttcattttttaggcagctagctggcaaacaaggttggaaatctaaatccttgcgttggggagtgaacaacaagaacaatatttgtggtgggtgtgatacaagcttaaaagctcatcaaatggaaggtcttgacatgtacggcaatggtggtgctggtagtggtgatgatgggttggttttaaggaagagagtgatggttttagtggacaaaagctcacattctaggcatgcaatgatgtgggcactcactcatgtagctaacaagggtgatttgcttactttgcttcatgttatccctccaacccccaactgttcacactccccttcttcttttacttatcttgctaactctcttggctcactctgcaaagcttgtaaaccccaagttaaaattnaaattatgaataatccaagggccaaaactgtggacagtgaaaagccaattgaanaagctaggggtttcagtgttggtantgggtcaaaaaagcaatctccattgttaaccttgtgtctangtgggagcangcaaaatgatgagtttgttgaacat

SEQ ID NO: 9197 - DNA, 723 bp, Gossypium hirsutum
  Clone ID: GOSHI-09MAY01-C29410_1
tagtggtttaaggtttcatacatttcatatttcagtaggcatcttattatcaaacagaacctttggcagaatgggagtcagcaatatattcaaccctgcttcactttgcttgctcaaatccaacgttcgtcaaactcaaaggcccattcgctcttttgaaggaaatcaaaaggggctcatcatggctactttctcttcatcgccttccacggtttcggttgagcatgtcaatcagaagttgagtggtgactcttttattcgaccccatttgagaaaattgtctccttatcagcccattttaccttgtgaggttttgtcagcaaaactgggaagaaagcctgaggatatcatcaaattagatgcgaatgaaaatccttatggcccacctccggagattgtttgtaaggttcttgaagctttggggtcactgaaattcccatacatctaccctgatcctggatctcgtcaattgcgtgctgcccttgctgaagattcggggattgaatctgattatattcttgtaggttgtggctgtgatgaacttattgatctgatattgcgatgcgtgcttgatcctggggaacaggtgtggtctcgctcaacctcacatgtatgaattgatctggtgtaaggagccaattatatattcctggagcaacttcgcttgatatgacatattttagttttagagttagtaagggttatgtctagtcatagactaaa

SEQ ID NO: 9198 - DNA, 662 bp, Gossypium hirsutum
  Clone ID: AI728979.1
cagcaatatattcaaccctgcttcactttgcttgctcaaatccaacgttcgtcaaactcaaaggcccattcgctcttttgaaggaaatcaaaaggggctcatcatggctactttctcttcatcgccttccacggtttcggttgagcatgtcaatcaaaagttgagtggtgactcttttattcgaccccatttgagaaaattgtctccttatcagcccattttaccttttgaggttttgtcagcaaaactgggaagaaagcctgaggatatcatcaaattaaatgcgaatgaaaatccttatggcccacctccggaggttcttgaagctttggggtcactgaaattcccatacatctaccctgatcctgaatctcgtcaattgcgtgctgcccttgctgaagattcggggattgaatctgattaaattcttgttagttgtggctgttaagaacttattgatctgataattccaagcgttcctgaatctgggggacaaaattttggactgttcttccacccttcacatgtatgaattttgatgccggttgtaaatggggcacaattattcaaattccaaaggaagcaaaactcaactttaaatataaaaaccattgcttaagctgttgaaccttaaaaaccaaaattgctatttcttaactctt

SEQ ID NO: 9199 - DNA, 383 bp, Gossypium hirsutum
  Clone ID: LIB3048-050-Q1-L1-H2
attcgaccccatttgataaaattgtctccttatcagcccattctacctgtggaggttttgtcagcatagctgggaacaaaccctgatgatatcatcaaattagatgccaatgaaaatccttatggtccacctccagaggttcttgaagctatggggtcactgaaatacccatacatctaccctgatcctgaatctctcaaaacagcgtgctggcctcggtgaagattcggggattgaatctgattatattctcgtaggctgacctgtgatgaacttattgatctgataatgcgatccgtgctcgatcccctggacacgattggcagcacgtactacaaccttgacaatgtatgaatgtgatgctggtgctaatggggcacaag

SEQ ID NO: 9200 - DNA, 635 bp, Gossypium hirsutum
  Clone ID: GOSHI-09MAY01-C129738_1
tttgttttgcggattgacaacaaagaggacgacaaggcattgaattgaattgaagggattgaatctgttaattttagtaatatggggtcatcatccgtaataaccccagaagatgtgttggagtcattgatgaatgatggaaccattgatgctctcaggttgaagattataaatcaactaaaagccaatgaggatctgaagaacacaacgatcaaaatggcagaacagagtaaggtcctaaacacgtctggtgcggagaaacagaccaaaagagaattgtttgatgcacttaggcaggaacttgaaaccccagtgctcaagagggcctcaaaagcagtttgggagttgattctggacagcaatgggctagggaaggaaataagtgaaacagttgaaagagtcttttgtaaattaagtggcagggaacctccactgtttccttattcaaacaatattgttcttcagcctgaaaaagcagtcggaaacgagaaaaaaaaagggaaagaaaaagagtatgaaaatgaaagggagaactctaaatccaaatcaaagaaacgaagtttcaacgacatgaatgccgaaggaaatgccactgacatcactggaaactctaacgatactccagctgcactgct

SEQ ID NO: 9201 - DNA, 530 bp, Gossypium hirsutum
  Clone ID: GOSHI-09MAY01-C29170_1
tcgcccacgcgtccgttttgccttttctttgctttgggtttatttggacatgtcaatcccacatgggttactttgcttgatttcaataagctaagctagcttcgagtttggggactttgagagatttcatataagttaaaacatatatacaaacttgagctagctggttgaggagggtcttttttttttctttgtcgagagtttttaagttttaagcatggaaggtcaaaggtttgttgtcaatggagggatcaaaacgcccattggttacaggttccgtcctacagatgaagagcttgtggttcattacttgaagagaaaggctttgaaccttcctttacctgcttctgtcattcctgagtttgatgtttttcagactgatccttggagtctaccaggtgatgtggaagaaaaaaggtgtttctttagcaacagatatggtaatgagagtaacaacaagaaacgtaagagagtagtagctggttctggtactggaagccaattggtaagagaaacaattttagcttttg

SEQ ID NO: 9202 - DNA, 727 bp, Gossypium hirsutum
  Clone ID: GOSHI-09MAY01-C24940_1
aggaaaacccacagatgaagaaagagcttggagaaccctcaactttatctcgaacaaatgcatactaaatacaaagaactgtacgagaaggttgaacagcggtaaaagactaaagacaaatggcggacatactaatggtagtagttctgggggcgtagggcgtggggaaagattgaatgctgctcagagggaaagaatgcgccttttaactactgccgcctttgatcgagggaaaggcgaggatacttttggtgccaaagatgaagattggcaactttacaaactaatgggaaaagataatgatgacgatgatgatggagctgatgaagatgaggcagagctggcccgtgttagttctaggctccaggagatagacccaacatttgttcctaaacctgaaccgacagcttcacagccagctaccactgaggtaccccatgttcgtccgctcactaaggaagatttccaaattgtgctcggggttgaaaggtttcggtgtcctgaaatattattccacccgaacttggttggtatagatcaagtgggtttagacgaaatgacgggggtctcgatcagaaggttgccatccaaggacaaggcacttgcgaacaggttgaccagttcggtctttatgacccgggggtgcagtctctttcctggcataaatgaacgtttggaagctggaattcggatgcttcgaccatgtggatcggcaattaagggggca

SEQ ID NO: 9203 - DNA, 484 bp, Gossypium hirsutum
  Clone ID: GOSHI-09MAY01-C24880_1
gtgagtttcgcagagtgtaacagagatggctttgagcttgaaaccttattgtctggttgttttgtttttgttttggataagtttgaatgcattggtcagtgatgtaggtgcagcaggagagtgtggaaggacccgaatcaggtcggctgcagcaagcttaagcccatgcctgggagcggctcggaatgcaagggctaaagttcctccagcttgctgcgccaaggtgggtgccttactcatgacctctccaaggtgcctttgtgctattttgttatcaccattggcaaagcaggccgggatcatgcctgggattgctattgccattcccaaaaaatgcaatattaggaacaggcaagctggcaaaaaatgtggaaggtacaccggcccatttgaaagaaaccatgtaggagaaaaattatgagtaatctcagttatttactaataggagagagagcttattaataaagttttgatgctgatttac

SEQ ID NO: 9204 - DNA, 622 bp, Gossypium hirsutum
  Clone ID: GOSHI-09MAY01-C24580_1
ttcttcgcgtccgctcagtccaattttgtcccttcccctaatccatacgacaacgaaatacgctgaagaaaatgcagagtccctctcttcctcgacttctacttttatccttcactctaataagtgtgttcaacctagtactgggtgatgaaggattctgttccgctccttccatattggaccaaactgatagttcctctaaacctttgtactggaaagtcactagcccaactctgtctccttcgcatctccaagacttacctggtttcactcgtagtgtttacagaagggaccatgcgttaataacgccagaaagtcatgttttcagtcctttgcctgattggacaaatacactgggagcatatttaataactcccgcaattggttcacatttcgtgatgtatctggcaaaaatgcaagaaaactcgaggtcagggcttccccctaatgatgtggagaggctcatatttgtgactcagggtgctggcactctcaccaattcatctggcattagcaacaaattggtggtggattcatatgcttatcttcctcctaattttgatcattctctgaagtgtgatggctctgctactcttgtagtatttgaacgaaaatatgccta

SEQ ID NO: 9205 - DNA, 445 bp, Gossypium hirsutum
  Clone ID: LIB3493-052-P1-M1-G1
ggcgctttgcatattccatacgccagcgtaatgccctgaagagaatgcaaaatgggtctctggcgaggctgctactattatacttcactctaataagaggttcaacctagtactgggtggatgaaggatatctgtacgcagtgcttgcatatgggaccaagctgatagctcctctaaacctctgtactggacagtcactagcccaactctgtctgcttcgcatctccaagacttacctggtttcactcgcagcgtttacagaagggaccatgcgttaataacgccagaaagtcatgttttcagtcctttgcctgattggacaaatacactgggagcatatttaataactcccgcaattggttcacatttcgttatgtatctggcaaaaatgcaagaaaactcgaggtcagggcttccccctaatgatgtggagaggctcatattt

SEQ ID NO: 9206 - DNA, 510 bp, Gossypium hirsutum
  Clone ID: GOSHI-09MAY01-C24570_1
gaccacgcgtccgggctgttaagcctgtgttaagcaaggagcatgatgagcctgggatcaacttgggcctaatgctcgggatcattggaggcgttgttgccattgcaagacctattgctttgttgatgtttgtgattattcgaagatcacgaacaactgaagacgcaaattatgatgaaaggtccattgtagacaaaatgtctgttcgtagctctcccaaaccacccattgattcaaggcgtgttccacagacaatgagatcagctgcaattgggcttccacgatatcgcgttttcagcttggaagaaattgaagatgcaaccaacaactttaacccatcaaattttatgggggagggatctcaagggcagctctataaaggttgccttgtagatgggccaggggtggtggtaaaatgtttgaaactacagcagaagcatgcacctcaaaatctgatgcaacacatggaagttttgttcaagctaaagcatcgtcatttgggtagcgttc

SEQ ID NO: 9207 - DNA, 597 bp, Gossypium hirsutum
  Clone ID: GOSHI-09MAY01-C24510_1
atccaaccaaacatgcaacagggtaccggaggatctgagacggaggttacttgggaggatcaacagaatattaacaagtttggaagattaaacaatcgatttcatgagcttgacgatgaaatcaaggttgccaaggaagcaattgataacctggaggatgctagtaatgagttgattttaactgacgaggaagtagtacggttccaaatcggagaagtctttgctcatgtccccaaggaggaagtggagaccaggatagaagagatgaaggaattgaatagcaagaacttggaaaaactcgaggaggagaaagagtcggtagtggcacaaatggctgagttgaagaagattctgtatgggaagttcaaggactccatcaatcttgaagaggattaatccccttggtttgcttttctttaccttttaagttggattactacttgcttgtgattgatatcagagctttggtcatctttctatttcgatttttagggtttgtcaccctaaacttcctggatatcctctttgacatgaacctatagacagatcaatgaatgaaatggtgttatgaaaagacatagattataaaaaaacagg

SEQ ID NO: 9208 - DNA, 564 bp, Gossypium hirsutum
  Clone ID: AA659970.1
aaatgaagaacactgggaagagtagcaaaggcaacggaaaatcgtcgtcctcgtcggcggatgaggaaagacaggaaatccggtaccggaatgagtggatcgcctaagaaaggaggtcacggtggcaaatacacttgggcgggagatgggctttcgccggccgagatcgggtttggaaagaggttattgatgttaaggatcctaactttgaagatgccgatgagatcgtgaccgtttgatggggatcatcatcgacgatcatcgttgcctttgagttttttttatgatgatgatgatcggatgtgtaaattatagttttatccctgaaaatgataaattgttgtaaacgcgatttcgtttgtcgtgctccttgtttgtttggtgtgttgaatttaaccaaaaacttagcatcaatagaaacggtgaagaacgtcgacggtaattgcagactaataaaagggagaaccatctggtaccagctttgtatttgccagggaatccaattggaccatttccggtggaaaaaaccggcgggaaagcctccgctgtcacaggattccgttt

SEQ ID NO: 9209 - DNA, 285 bp, Gossypium hirsutum
  Clone ID: uC-gsflnu33B141a05b1
gtaaatacacttgggcgggagatgggcttgggccgttctagatcgggtttgataatgaggttattgatgttaaggatcctaactttgaagatgccgatgagatcgtgaccgtttgatggtgatcatcatcgacgatcatcgttgcctttgagttttttttatgatgatgatgatcggatgtgtaaatttatagttttatccctgaaaatgaataaatttgatgctaacgcgagttttgttgaagcaaattttcactatgtagaagctgcaaagataactgagagc

SEQ ID NO: 9210 - DNA, 432 bp, Gossypium hirsutum
  Clone ID: GOSHI-09MAY01-C24450_1
cagtactacatcgtagtgatttgttatatttactttacccgtgttgtggtttatgccttggagacgattacttcctataagtatctttggaccgctgtgagtggctggggagttggccacacgttgcattttatgtgtttacagggttcaaattcaagccagaggctcataacccatactttgtgatcgatgatgaggaggaagaagctgcagcagagcagctgaagcttgaagatgagtttgaattgtgatagtattcattgaggaaaagaaatggagaatgattgaagaaggttcaggttgtcaaactggggcaattgaggtagaagccttatcatcttaatgggtaccatcgaaaaaaaaattgggatatttgatgcttgtttgtacttatttgtgccccttttgatcctactttcccttttttttata

SEQ ID NO: 9211 - DNA, 782 bp, Gossypium hirsutum
  Clone ID: GOSHI-09MAY01-C24400_1
tcgagtttttttttttttttttttttatttacaaattgaaagcgacattatccaataccaaaaaattcttacagacaagtacaatttcgactttagcttgtagttagttagtcaagtaaaagtgttacatgtagtcaaagttgtatggaaatttgccaaaaagccctcttcttttaaaaaagtttcatccccccagataaaatggtgtcatgagcttttatctagtttaccaactttgggtcggtatggagcagtagccaaactagtttttagggttggaccctgagagaattcacaggcttcatccattgaagccaatcttatttcatcaggaggtatgaagcactccgctgacagacctggaacattgaatgccacttcttcgattgcccacgcttcttccatcctggtccgagtgtggctcattgcagtatctccaaaccggaaaagggtcaccacggagcgtcccgagtgagcaaccattattccttcaacaagtctgtaatcctcgagagatgaatcgattgtagtctcccagtacacagcatctcccccgttgttttgaattcgggttaaatgtgagtcttccaagtgcacaagaaggcctgttttctggctgaagtagccgaataaaacatgtctaacgatctcagcaggtccttcgctcctggccttcaatgttgcgggatcggcacaaagcttgagtataaaacaatcctccccattgatctgcttctcaccactacatctcgcatttgtaaacatgcttgcggacgcgtggg

SEQ ID NO: 9212 - DNA, 819 bp, Gossypium hirsutum
  Clone ID: GOSHI-09MAY01-C24780_1
gcgtccgctttgaataagaaatggcccgacttctcccccctcagcttttctttctactgaccttggtggtcatcatccatccctcatacggacttaagcatttgaaaggtacagccctcgtcgacgaggtttgccgccacacatcccacaatgaatattgcgtcaataccatagtcccaaagccgccattatccggggaaaggatcgccagtaccactttgggttgggcacagataaaagctctggaagccggaaccatcatagctagtctacttaatgattcttcttccatcttaccagtagcaaagaaccctctacaggccaaagagcttctccaaatatgttgggattctaacatgaacaccatggaggacctttggattgctagcagtttgctttacaataagatcatcaatcccatgattgctcgtctgtatcatgctgcaaataccactagagtttgccaagatggcgtaaaaggaaccggttttacagccttagctgctaagatcgaggatataattaagctctgtgaaatttgtgtcgtctccaccaacttctttgtgaacggtgctcattaaaagcttttacccatgaattatgtgtgcatgtaatagataaataaagggttcccttttgagtattgcacaagatatttctaatggaatcccccgtaatattttacatcttcaaataccaaaatcaactatcagtctgtcatctcaagtctgcttgaaggcttaaaaaatttgcgatgaagaatattcacatatgacatacgttgcaacaaatatagaagatcattggatacccttcaca

SEQ ID NO: 9213 - DNA, 293 bp, Gossypium hirsutum
  unsure (1)..(293): unsure at all n locations
  Clone ID: LIB3145-039-Q1-K1-A1
aaaaaaaaaaaaaaagggaaagggaaaaaaaaagggggggnnnnnnaaatnaaaaaaaattattgggaaagaaaaaaaaaaaanaaaaggaaaaaaaaaatntnnanaagaaaaataaaaaaaaaaaaaaaaaaaaaattannanaaaaaaaaaaaaaaaaaagtttacaggccaaagagcttctccaaatatgttgggattctaacatgaacaccatggaagacctttggattgctagcaatttattttacaataagatcatcaatcccatgattgctcgcctgtatcatgc

SEQ ID NO: 9214 - DNA, 454 bp, Gossypium hirsutum
  Clone ID: GOSHI-09MAY01-C24750_1
gactagttctagcttgtacaaggtggtcatggtcatttggtgatgatgaagaaaaaggatggtgatgatgatgatgatgatgatgatggacctcgagaggcagatttggagggaagagttgagaaatacattggtgtgaaagtgaaggtttcctttaccgggcaaggtgagacacaatcaatgaagcaattatcaggaggacagaaaactgttgtagcccttacattaattttcgcgattcaacgatgtgatccggctccattttatctttttgatgagatagatgcagctctggatcctcagtaccggactgcagttggaaatatgattcgtcgactggcagacatggcaaatacacaattcataactaccacattttggccagagctcgtcaaagtttgctgatcatatatatggggtgacacataaaaacaaggtgagcccgtgtaatgtt

SEQ ID NO: 9215 - DNA, 522 bp, Gossypium hirsutum
  Clone ID: GOSHI-09MAY01-C24710_1
ggagtggagaccttcttcatcgagtctaaagccgggaaatacgtaatctacttaccaacagatcattgctgaacgtaaaactcaacaatggcactttgtttctgagtcaatctgtagattccatttcctcaaatgggttgctgtgtaagcaccaacacaggttcccttcgtgcgaaggaatcacatttgcaagtgggtgttgaatccaaagctccaccaccttcggctgaagaagaaactgtgaaggaagttttatctgaaaccccaaaaaccaaagctcccatctttaccccacaacaagaagagagcaagcaaacccagattgagaaaccggtctttgtcaagatccaagagaaggaaagccttaatttcaacgtcaagaccaaaccaaaatcacctgtccttgaagagtcagcttcggaagaggtttccgagatttgcagcgtgagtttaagtgaaagcctttccactgttactgataggagagatgaagaagatgaagtgaggcagctaaaggtgttc

SEQ ID NO: 9216 - DNA, 986 bp, Gossypium hirsutum
  Clone ID: GOSHI-09MAY01-C24700_1
ggacaagttggttgatctgactacaggaatgtgctgggaacttattgctcgaaaggttcagactgctatctggatcaaagaggaagatccatcatgccttaagcataatgcagagttgaaactcattgatatttgtgatgccgtagacgagactaaaccatcatggatgactcctctaatgaattgcatacagctagcaggtgcaacaacagcttccaagaagctccctcctaggcctgagcgtctgtcagtgtattcggagagcctcagtagaatcggcatcagcagagaagaatttagttcagactccaacttctggcaagaccaagttcactattactggaagctgatgaatgttagcaggacagagatacgaaatgtgatggacatgaatgccctttttggtggttttgctgcagctttgaatgaataccctgtttgggtaatgaatgtagtcccttcaagcatgcaaaataccttatctgcaatttatgaccggggtctaattggtgcttttcatgattggtgcgaaccattttcaacatatccacgtacttatgatggactgcatgccaaccatcttttctctcaatataaaaatagtggagaaggttgccagtttgaggatatcatgcttgagatggaccgcattttaagacctcagggatttgttattattagagatgaggattctattatatcaagaattcaagatcttgctccgaaattcctttgggagtttgaatcacatattctggaaaacaaggagaagcaaagagaaacattgctaatttgcagaaagaagttctgggctgttctttaaaacatgtttctacaaataacaggtgctaacgaagcagctgtatgtatttccaaccctctctataagcgttgtaacttatctaccttgagtctaggttcgtgcttttcgccttttttgtctacacccctgtactttatataaatattaaccttattagtgggag

SEQ ID NO: 9217 - DNA, 554 bp, Gossypium hirsutum
  Clone ID: GOSHI-09MAY01-C24730_1
agctaacgaggagctaaggtctatcttcaaaagggaggtgcatctcattcttcaggttagagttaaaacataagctccaagaaaatatagtcaaaatgtccagaactgcacacacatcccgggataccatctgaggtgtatataaaacgagtagccaatgtatttgtaccgtcatttccctagggtcttatctttgtaaggccaaaatgaagtcagctattagtggctacagatgattaattttattgggaggttcaagtgggggtaacacaaattatgaaaagatcccacttttgctctccttcaatgcgcctacgtgtgctaaatttttaggtgaattacttttaatttcttgtagtcccaagtgttgtattcatgtctcattacatgaaagctaaggttgaggacctattcagttaattcatttgtcattttattatttaaagtagagatcattccttactttttcacatatctattttagtaagttgtcaagagaggacaaaattgatgttgtatcctgtcacagcaattagtggatgtttaagttttat

SEQ ID NO: 9218 - DNA, 804 bp, Gossypium hirsutum
  Clone ID: GOSHI-09MAY01-C24680_1
ggagattgaactgctagcgtttgattactttttcctactctcacttgacagattcccccgatttacttgagttatctattactatgtcctttgaacttgaaaatacgtgcagctttatgtcagtcaggttacagttttaataaaataaaataccaaagtgccttaaaagggtttttttttaaaaaaaaaaaaaaaaactcgagaaaataccccttctcctactctctaacaaccaaactttctacccaatttctagtttttatataaatcactttatttcttcaaacactcaaaatccccatcttctctttttcttgtaaatcctggagcaaagccatgaagaaatccatggagatagctgattcagcctcttggtactgtgcccttgccttattgaccttaatactgatgggttgcatcaagacaagttccgtatcatcagatgaagctgcgagagggaagcagcttctgaagccaccctgtgacgaaatctatgtggtaggagaaggggagacacttcacaccatcagcgacaagtgcgacgatccttttatcgtggagcgcaaccctcacatccatgatcctgaccacgttttccccggccttgttatcaagatcatcccttctactgctgggaaactctagaggtagccatacgtcttctgaaaatatttgtgttaattcgtcccttatcaaggccccggttggtaaatttgggggggatggtggatccttagttctctcttatccaaattccatgcacacacatatgacatatatatggtgtaaaacgatgcttattga

SEQ ID NO: 9219 - DNA, 444 bp, Gossypium hirsutum
  Clone ID: GOSHI-09MAY01-C24600_1
agaatgtcgatggactctgattatcttgttgacaggcgtattgtgatcaaactacttgtgacctacttccagagaaaccagagcaaagaggttttggaacttatggttcggatgctgggtttctcagatgaagacaagcagcggataggtagtgctcaacaaggtactggcaaaggtgttgttcggggtgttttgggtctacctggtcgtttggttggtggcatcttgggtggaggttcggctgatgtacctgcaagtatagcccctgataatcagtcaattgcagatctttgggttgattttctactcaaggaaaccgaagaacgagaaaagagggcggaaggtgctagtaaatccaatggagaccttaatgggagaaatccaaatgctacaggacctactacatctgcgtcttgacaaacaacttgcggttctggtttctct

SEQ ID NO: 9220 - DNA, 534 bp, Gossypium hirsutum
  Clone ID: GOSHI-09MAY01-C24630_1
cccacgcgtccgcccacgcgtccgtccgaggttttcctccaccggcttggaataccggtgaagaaggttgtatcagttgaaatatcggaggtgaatagaaacatagtaaggggttggtgggagcaaacgaatcagcgggggactttgatcgatatagcagatgtgcaagaactgaatggtgatcgattggagcaattgatgagtagatttggtggatttgaccttgttgtgggtggcagcccatgtaacaaccttgcgggtagcaacagacatcatcgagatggactcgagggtaaagaatcttctctcttcttcgattattgtcgtatattagacttggttagatgcatgcaaaggaaccaatgatttgatgtaaagggggctgatttggggattcttgctccaaactggagttatcttgcatcttcattattgcctgagcataacattgaaataatgactgacattctttgcaacttatgacaacttcaaattcttagggaaatgaaaattgatggaaaagttgttggttta

SEQ ID NO: 9221 - DNA, 621 bp, Gossypium hirsutum
  Clone ID: GOSHI-09MAY01-C24140_1
gacgacccacgcgtgcgcccacgcgttcttaagtcagaatgtttctcatcctgtgagccagacttcggcccctgtaattcaggatgatgctccggagaactcatatctatcacttggacatgcattgccaaagaattctgctccatttattgtgagagctccgcctcccaaacctaaacctgtgcagcagtctcgcaaagctgcaatacctgaagaatctgctcctaaaagctacaatacctcagaaaagagcaatgaatcttcaggtaagaatacttcgatatttgttgcgaacttgcctatgagcgcaactgaggaaatgctgaaagaggttttccaaaaatttggaccaattaaacccaatggcatccaagtcagaagctttaaggacaacaaaaactgctttgggtttgtagagttcgagtctgctacttctgtgcaaagtgctgttatggcttctcctattaaaatcggcaacaggcaggccaatatcgaagaaaagcgaggacccagcagtggtgggaaaccagggtatggtggttatagagatgaaaatggctaccgaaatgacaacttcagaggccgtgggaacttcaatggcagccgtaactttagaagaaa

SEQ ID NO: 9222 - DNA, 588 bp, Gossypium hirsutum
  Clone ID: GOSHI-09MAY01-C24170_1
caggtatttaagtgacagtgatgatgatgacgatgagtcatcaactaaaaagggtcggatggacgattcgtatcattttgatgctgatgagcgacgtgaatggagagccaagatcagggaagttatcagtaagcatcctgaaattcaggaggagattgaccctgctgaaaagttgagcaagatgcaaaaactcctggctgattatccgctggttgtagatgatgatgatccaaattggcccgaagatgctgatggctggggtttcaacctgggtcaattttttgataaaatcactatcaagaatgccaagaaggaaaacgatgacgatgatgattatgatagtgagaaggaagtagtgtggcaagacgataactatattcgtccaatcaaatatattaagattgctcagtgggaagagactgtattcaaggacattagtcctttaatcattcttgtccataaccgctacaaaaggccaaaagaaaatgaaagagcttgggacgagctggagaaagctgtgcacatcatatggaattgcaggctgcctttaccaagatgtgtagcagttgatgctatagtcgaagatgc

SEQ ID NO: 9223 - DNA, 1130 bp, Gossypium hirsutum
  Clone ID: GOSHI-09MAY01-C24120_1
aagagatcttatcaacatcctggaggaggccattaggagcggatacccaattttgataattgctgaagacattgaacaggaagctttagcaactctggttgtgaacaaacttagaggtgctttgaagattgctgctctcaaagctcccggcttcggagaacgcaagagtcagtatctggatgacattgctatccttactggaggtactgttattagagatgaggttgggctttccttggacaaagctagcaaagaagtcttgggtcatgcctctaaagtggtgcttaccaaggatacaaccaccatcgtgggtgatggaagcacccaggaagcagtgaataaacgagttgtacagattaaaaatctcattgaggctgcagaacaggattatgagaaggaaaaacttaacgaaaggattgctaaattatctggtggtgtggcagtgatacaggttggagctcaaactgaaacagagcttaaagaaaagaaattgagagtagaagatgctcttaatgcaactaaggcagcagttgaggaaggtattgttgtcggtggtggatgtactttgctaagacttgcttctaaggtggatgctatcaaggattcactcgataatgatgaagaaaaggttggagcagatattgttaaacgagctttgagttaccctctaaaattgatagctaaaaatgctggtgtaaatggaagtgtggtgctctccaacgataaccctaggtatggattcaatgctgccactggaaattatgaggatcttatgtctgcaggaattatagatccaaccaaggtggtcagatgttgcttggagcatgctgcatcagtggccaagacattcttgatgtccgattgtgtggttgtggaaataaaggaacccgagaccgtgcctgctgggaaccccatggataattcaggatacggctactaaagcagatgttgaagggaaaccgaataaggtatcaaatctctatcgtagcaacgatgagcctgtttagagtagaatgcttaattattgaaaaatccttgagatcccggtgatatatatgatttgcattttgcagttcagtgtaacatttttttgaacatcatttttcagtggaaggaagaaagttggtatt

SEQ ID NO: 9224 - DNA, 361 bp, Gossypium hirsutum
  Clone ID: uC-gsflnu33B074d04b1
agctgagtccatgagtaaagttggttgaaagggtgtaaattacctttgatgcgggaaaccgaaatgaggtatcaaatctccatcgtagcaacgatgaacctgtttagagtagaatgcttattttcgctgttgattaattattgaaaaatccttaagatcctggtgatatataagatttgcatttgcagttcagtgtaacaaaatttgaacatcatttttcagtgaaacgaagaaagttgtatttactatttgctattttttacaagtagaaaatttattaactgaattttatttaaattgttgtaataaattgaatttaaacacattacttataagaaactaatttcatacgaaagaaacc

SEQ ID NO: 9225 - DNA, 382 bp, Gossypium hirsutum
  Clone ID: LIB3146-038-P1-K1-B5
ctttgaggtttttcaattgtatcctacaatcttgacaggttggctttttgtgatgaataaaggtgagctgagttgttcatttattactttgttttacttttaggcttttatatcgaaatcttattcagaatgagttttatccactgaattaactctgttttaccccttcttatgactagatttagatactgcgaaaggctctataacagtggagctcttcaaggacagttctcttgcagttgttgatcaattccttgatttatggtggtcagatgttgcttggagcatgcagcatcagtggccaagacattcttggtgtccgattgtgtggttgtggaaataaaggaacccgagcccgtgcctgctgggaaccccatggata

SEQ ID NO: 9226 - DNA, 482 bp, Gossypium hirsutum
  Clone ID: LIB3582-052-P1-K1-B11
taaatattaaaaaattaaattaaattggaagtgaggttaaccagatcaagtatgcatttcacaactacttaccaattgattttattcacataatatttacttttatccataatccttcaaatctttaaattaaaggaaaaaaaatgtttaaaggcgtttgaatcagtgttcattttggtgtgttgcaatgacttgaacttatttcaactaaatacaaaatcaaattaattattataataggtaaactatacccaaactgcatgattcgtgaaataccatataaaaccgcatgtttttgggctatttatcaggcagcagttgaggaaggtattgttgtcggtggtggatgtactttgctaagacttgcttctaaggtggatgctatcaaggattcacttgataatgaccaagaaaaggtggtcagatgttgcttggagcatgcaacatcagtggccaagacagtcttgatgtcccattgtgtg

SEQ ID NO: 9227 - DNA, 416 bp, Gossypium hirsutum
  Clone ID: uC-gsronu33B057g06b1
cttttagttgccattaggagcggatacccaactttgatgattgctgatgacattgaacaggaagctttagcaactctggttgtgaacaaacttagaggtgctttgaagattgctgctctcaaagctcctggcttcggagaacgcaagagtcagtattctggatgacattgctatccttactggaggtactggtattagagatgagggtgggctttccttggacaaagctagcatagaagtcttgggtcatgcctctaaagtggtgcttaccaaggatgcaaccaccatcgtgggcgatggaagcacccattgagcaaggcatcttcgggttggccagctctgagatctcattgaggctgcataacaggattatgagaaggaaaaacttcaacaaagggatggttaattatttggtg

SEQ ID NO: 9228 - DNA, 244 bp, Gossypium hirsutum
  unsure (1)..(244): unsure at all n locations
  Clone ID: LIB3583-048-P1-K1-G3
tcctttttttttttttttttatattttgcatgctaatatgttgggttcgttgattatgtcaggatacggctactaaagcagatgttgtaaggaaaccaaataaggtatcaaatctccaccgtagcaacgatggacctgtttagagtagaatgcttattttcgttgttgattaattattgaaaaatggcttgagatcccggtgntntataagatttgcattttgcagttctgagggaagnaaatn

SEQ ID NO: 9229 - DNA, 493 bp, Gossypium hirsutum
  Clone ID: GOSHI-09MAY01-C24070_1
atcctttaaaacggccgcccccttttttttttttttttttttttttttttttttttttttttttttttttttttttttttttttttttttttttttttttttttttttttttttcaacacaaacacagatatcttattgaaaaagaacacagataggacaatgtctcaaaatatcagaactgatataaataaacaaaggtgaatggtgaagtctatagctgaagccccccaaagtgagcttggctgattggttattgaagaaggttaaatgctgtgcaaagagaaaccaccctttccttgaaatgaaaccgtccatcctcttcactaccttctggaattaacacttgctttatttttcatcaattcttgtgatgtgtgtcggggaaccctgcgccggtgatggaatcaacaaaaccactcctgagaagtctctcaacatacttgccgaggatatccacctccaaattcaccttttgcccaatttccttcaaag

SEQ ID NO: 9230 - DNA, 871 bp, Gossypium hirsutum
  Clone ID: GOSHI-09MAY01-C24000_1
gaactggtattttggtaacaagaagtccatgttgatccccaattgtttgtttcgcgtcgggggttccgctgttttgctttcgaataagtctaaagataggaggcgggctaagtataagcttattcatgtggttcgaacacatcgtggagcagatgatacggcatttaggtgtgtgtatcaggaacaggacgatgcagggaagacaggtgtttcactgtctaaagatttgatggccattgccggaggtgcactgaagaccaatatcactactttgggtcctctcgtgctaccaatcagcgagcagcttttgtttttcacaaccttggtggtgaagaaattgttcaatgccggtattaagccttatattccagatttcaagttggcattcgatcatgtctgtatacatgctgcggggagagctgtgattgatgagctggagaaaaacctgcagctgctaccaatacacgtggaggcttctagaatgacactccatcgttttggaaatactccttcaagttccatttggtatgaattggcctacattgaggccaaggggaggatgccggagcgaaaccctgtttggcaaatcgcatttgggagtggcttcaaatgtaatagtgcagtttgggaagctcttcggaatgttaagtcatctagcaatggtccttgggaagattgcattgatatgtatcctgtgaaaataaacacctagctgagcaatattttgagttagattctacattcaaatagaggatttcattggtaggcagaaccgctgtgccttggtttttctatagttcttgatgtgtactgttgtgtcattcttattctcggcatgttgtcaaatgtgttttattttatctttttctct

SEQ ID NO: 9231 - DNA, 625 bp, Gossypium hirsutum
  Clone ID: GOSHI-09MAY01-C24020_1
tctttctttaattttaagctttgggggtctcttttgtctgttaaatgttttcaaccatggcatttgatggtggggtgggtttcaagttgttcatggacagccaagctgatttgtcattggagattaggaagaagaagcttagtggattgcaaaagagagaggcacttgaaaaagaggtttccatgcttcaaaatatgctaaatcaagaagaaaaaatgcatgagattcttacacaatttcagcttcaagaggatggctcttccatctctatcccagatttcctccctccgaaaatgaaggagctattaacagagctggctatggtagaaagtgagatagctcatttagaaacccaaataagccagcttaaacatggtctaaaccaagaacatgaagtcatcatcacaaaggaaaagacaccatccaaacaaaagaatcccattatgcaagatcaacaagaaaatgtggtttttgagaccaatgctttgcatttcatcagcaaagctattaaaggtgattatactcttactgacttcatgagcctaaatgagacaatggggaattcaagagcactattccaagagaagatcccgaagaaaatttgttacttcaagacaagggaaag

SEQ ID NO: 9232 - DNA, 356 bp, Gossypium hirsutum
  Clone ID: GOSHI-09MAY01-C24360_1
ggggggggggcgctctagaaactgagggtatccccggctcgtgcggaatttggacgagggaaatcgttgaatgagcttcaactttccattagtatggaaaccggggcgttcatgcggccaaaacaatctcgaaatgagcgagacgctggcgacatttcttgcgtcgacgccattgttggaggaagcatggagggtgtgcaatatagcaaacataagctccccaggggcttacctggtggaacggattggaagcgtggcttatattgcgttttccggcccgcaaatgacttctgggtctgaccagaaatgcatgtatctggtggctttgaccattgactaccgtatatcaaagggta

SEQ ID NO: 9233 - DNA, 704 bp, Gossypium hirsutum
  Clone ID: GOSHI-09MAY01-C24210_1
gagcggtgctacaaaatatgcaggggatgatcttcaacttaatgttgatccttatctatcatctgacaaggacaacattcttattttcaaatccaactcttctcttccatctagaggtgccatagattttgtaccaggtatcaggaaaatggtatgtcaagattctggagtatggaagtatgatagaaatggttctgccaattcgactgttgggtctagtagaagttctcatgggttggctaataccttcagtcttgcacctggaagaggggtttacgctaataggctgcagacacgtgttcattcagatcctgcttggcttgaaactggagatgcagtcgcaaatttataccctgaactgcgggaagacgctcaagaccatgcacgatctcgtaacgcatattttgaccaggcacgtcaaggatttctcactggcaataaggctttaacaaaggaacttagtgtgaaaggacaactgcaaaatatgcatatgaaggcaactcatggaaacactcaagaatctttatttcgccagaggaaccaagttcctcctgagattgttggagggcaggaacggatcatagacctgcatggattgcctgttagtgaagccattcatatgcttgaactatgaactatcagtgctcaggagaacagctcggctgcagatcagcgccttcaggtttacataagtgttggaactg

SEQ ID NO: 9234 - DNA, 554 bp, Gossypium hirsutum
  Clone ID: GOSHI-09MAY01-C24220_1
tccacctttgcatcacatggtgggagagatgaagacgagtctgagtatacagaggatgactcagactctgaatattatgaagatgatgaagatgaaactgtaaatactgaagaagtagaacatttggaacgagaaaatggcggaaggtccagaaagggtaggatggtattctccgaagaaaaggatagccggcctgtgaaattatcttttaggagaggaaaggttgttgacattcagaccgagaataatggtccaaggaggctcaagttcaggcgaggaagattacttggggtcaaccaaaatattaaggctgagcggagaacctttaggacaagagaagttgatggcgacatgaatgacaatgaaccttgtggggaaaaagttgttttgagacaccaggatttgcagggaaagaaagatgaaaagggtttgtttaacaatgtcattgaagaaactgctagtaaactcgttgaaacccggaaaagtaaggttaaggccttggttggtgcatttgaaactgtcatctccctccaagacggcaaaccttcatcaaa

SEQ ID NO: 9235 - DNA, 442 bp, Gossypium hirsutum
  Clone ID: GOSHI-09MAY01-C25940_1
atctaacttcttgtgatagctttggataagaacttataacatatgaattactacgtatagcttgctaggaagcctttacttgaccaggtacttgtggaacctttggaattagagtatagatatgcttcattgaaggtttttggtgcaatcaatggtttaactttattcaagatatcttctaatttggtctattgatttaagattgttttgtgattttttgatcctgtaaagtcctcatttctgggtttgacaaagttttctaggaagagatagatgtacttaagtttggttccaataagtgttactttatatagataattcatttctgttccctatgttaccatctaagacatacaaaattgattacgtacatgcttctcgggctaagaattgatacatgtgtgtatgcatgttagatatctagtttttaaatatggtgaag

SEQ ID NO: 9236 - DNA, 439 bp, Gossypium hirsutum
  Clone ID: GOSHI-09MAY01-C25970_1
ggataattctggagttcctcccttggccttcaccataacagggccgccagtaccatttgtattgtgccctgtgtacaacattccagcagaaacaggagctccagatgcatcaacaagccattttggttgggatgagggtttggataacaatgattcttgtcagaattttgaatcatctgcgggacttgatcaatctgaggtgttaagtacttctagttctacaagaaatgcttcatctctcgagccagtagagcgtaagtcagacattctcaatggtgacattgctagccattggcaaaacttgcaatatggacggttttgccaaaattcacaatatcctccacctctgatttatccttctcctgttgtggtgccacctttatatttacaaggtcattttccatgggatggtcctgggagacctctcatcaaatgtgaa

SEQ ID NO: 9237 - DNA, 887 bp, Gossypium hirsutum
  Clone ID: GOSHI-09MAY01-C25910_3
ctcaaaaaaacgaaactcatcgttgatggataacttattgggccttcttcggattcggattaaacggggcgttaacctcgccgttcgtgatgttcgaagcagcgatccttacgttgttgttaaattggataaacagaaattgaagactcgtgtaataaagaaggatgttaatcctgagtggaatgaggatttaactctttccataacagatcctagtactccaataaaactggtaagttttcaactactagttactatatcgatggagtgcataacagaaatgtgatttgataaaccaacactcggatcatataggagaacattctgtgcttagattctgaagctgcttcttttcctagataaccattcccaatgttctatagcttctagattttcattgtaaccaatttttttccgatgcataacgatgcttgttacctatatatattagaaaaacatttatggtttcaactagtaattaggaatttgcacaatgcgtgtatatgtatttcattttcccctattagatatgctaaacctttatctttatattgcaagatagctcatgttctgttgattttgattctattacttcattaaaatatgaaactcatttttggttcatctcagttgctgattctctattaatctttaatgtaagtttttgatcgactcattgtttatatgcttaaattgccgtttgctttcttaatgatgctaatgctatttcattattttttttccttgggtgggttaatgtctgttctttgcagagatgttattagtgaaaactgccaaaactgtaattaatggcaatatatgctgataccaaatttctttttctagttggttaaccatcgaggaactatacgagcattttgctgttt

SEQ ID NO: 9238 - DNA, 466 bp, Gossypium hirsutum
  Clone ID: GOSHI-09MAY01-C25910_2
ggctcagaaaaaacgaagagctcatcgttgatggataacttattgggccttcttcgggttcggggcaaacggggcgttaacctcgccgttcgtgatgttcgaagcagcgatccttacgttgttgttaaattggataaacagaaattgaagactcgtgtaataaagagggatgttaatcctgagtggaatgaggatttaactctttccataacagatcctagtactccaataagactgacagtttatgaccatgacacttttagcaaggatgacaaaatgggaaatgcagaggttgacattcaggccggacatagaagccttgaaagtggatgtggatggtatcccgattggaaccacgatagccagagtgcaaccttgcaggaccaacttgctgtccgaggagagtgccatcactttggtcgacgaaaatgttgagcaagacattttgttttcgattgagaaacgt

SEQ ID NO: 9239 - DNA, 488 bp, Gossypium hirsutum
  Clone ID: uC-gsronu33B048h05b1
gaataaacgaatagctcatcgttgatggataacttattgggccttcttcggattcggattaaacggggcgttaacctcgccgttcgtgatgttttaagcatctatccttacgtttgttgttattttttatttttgttttttttttgggggaggggggggggggggggggggggccctttttttttatttatctttttttttttttttatttttggggggtgtgttatatctattctttttttcttttacttttttatcttttttatttttttttcttttttttttttttttttttttttatgtctatttttgtttgtgagttgtgtttctttttcttctttttttttattattaattattatttattttttttttctaattgtatattttatataatatatctttttattattattttttatatatttatttattttctcatttcttctttttattcattttttattttttttttttatttttatttt

SEQ ID NO: 9240 - DNA, 424 bp, Gossypium hirsutum
  Clone ID: GOSHI-09MAY01-C25890_1
tgatgacctgacaaattcacggatacctgcaaaattggaagagacaggtcactttgaatccaacttctcttctcgtggtagacccgatgttcaattggcttgccaagatgttataaccaggaatgaagataccactggaaaaactagagtgcttaatgaagagaagttaaatttttctcagaacagccaagattcacgtagacgagcagttttgtctcacaagagaaaggcacttgctttgaagagagatggaaaactggaagaagctcgggaagaacttcgacaggcaaagctgttggagaagagtatggcagaagatgacactcctccaaaattcggttctaatgatgtgtcagcatctgcatccactgtttgttctggtgcagcaattgagcaaggtacactagctttcgctccgaaacca

SEQ ID NO: 9241 - DNA, 419 bp, Gossypium hirsutum
  Clone ID: GOSHI-09MAY01-C25850_1
gttagatcacaacaactctgctacgaaatgatttgggtctttcatcgttaatccttttatagataaatagaatatgcattttatgtgttcgctgtttcgcctgttccattagctgtttaatggtggagatttgcttccctcactatgatgtgtagtattaaagagatttgtgaagaactaagcatgttttatcgattcgaaacatattttagaagattccaagtagtgactagaacactgtgaatgaaatggcaaaaatctttcagcagcttaatttttagaaaattactaacattttatgaatttgtataaactatgaagctatctttctctgatccgacacatatctgggtatggatacgagggtatgatgttctaagagggctccaagtattcaatactgacacctgggtctgaat

SEQ ID NO: 9242 - DNA, 500 bp, Gossypium hirsutum
  Clone ID: GOSHI-09MAY01-C25840_2
ttgtttaccacattgttttattcttctttctgctgctttcttcttctgtccagattcaagctagggagagcaagttctttagcaagatcttccaccttggggccaaaatttctcctctagtggtacctacaccaacgccagcaccagcatcggcgccggtactagcaccgacagtggcacctgcaacggcaccggctaacattggtatccaagatccttattatggcctctatggtcatggctctggcatgtttccccctgcaaaagagggtgtcaccactagcaacactcccaccgcttttgaaaacgatcttttcgccgaggaacttgcggatgaaaaatacgaaagcggctacgagaaaaacaactactattacaacaacaacaacaacaacaatggctacactctcagcagctacaacaacaatggctacagcgggcactaccacaccaatggctacaatgacaactacaacaacaatgggtatgagacagaaaga

SEQ ID NO: 9243 - DNA, 853 bp, Gossypium hirsutum
  Clone ID: GOSHI-09MAY01-C25840_1
tggggccaaaatttctcctctagtggtacctacaccaacgccagcaccagcaccagcatcggcgccggcactagcaccgacagtggcacctgcagcggcaccggctaacattggtatccaagatccttattatggcctctatggtcatggctctggcatggttccccctgcaaaagagggtgtcaccactagcaacactccaaccgcttttgaaaacgatcttttcgccgaagaacttgcggatgaaaaatacgagagcggctacgagaaaaacaactacaattacaacaacaacaacaatggctacaccacaagtaagtacaacaacaatggctacactctcagcagcgacaacaacaatggctacagcgggaactacaacaccaatggctacaatgacaactacaacaacaatgggtatgagacagagagacaaggaatgagtgacaccagatttgtagaaggtggtaagtattattacaatatgaagaatgagaagtactaccctaatggatatgagttttcatcaagcaagggaactacttaaaatgaaggttactatgggaatacagagaactccaatgagttcaactccatggaagagtttcagaacaaggaagatcagtacatggagaggcaagaagagtatgtgccctagatatttgattatcatgattcaagaatgaaaaaggaaacaggagtttgacatatatagtggttcatatatttaaagatgaggaagattgaagtttatgaagtctttcctgtgttttattattttatagcattcacttgtgtttgcacaatagttcatgctttacaaatcaaaatggatccaagactatacagtttc

SEQ ID NO: 9244 - DNA, 219 bp, Gossypium hirsutum
  Clone ID: uC-gsflnu33B061c09b1
cccacgcgtccgggagaggcaagaagagtatgtgccctagatatttgattatcatgattcaagaatgaaaaaggaaacaggagtttgacatatatagtggttcatatatttaaagatgaggaagattgaagtttatgaagtctttcctgtgttttattaaaaaaaaaaagcaaaagatataaatataagacaccaaaaagaaaaaaaaaaaatacaatt

SEQ ID NO: 9245 - DNA, 420 bp, Gossypium hirsutum
  Clone ID: GOSHI-09MAY01-C25820_1
ttttatttgatttggaccaaacaaacattaatgtggagatcaaatttaattaatttaaagttttgaaaccagtcaataagcagcatgaaggctgaaggcagggactggcaaattttaaggagtcttaacaacatgaaacaagattttatgtctttaggaatggaggcttttgcttcttcagtgggtatgggctcaaacaaaagtagcaaataaagaacccatcctctacaaggactcaagctttggcgttcctagtgaagtcgatgcaagtttggcaactgcaatcggtgaacctacagatttcacacccaaagcacacacaggaagtacaacccttgcatgttggagaacgggtgcagcccctgtataccctgcgacttgctcgttcttcttcatcatcacaagttattctgtcatatg

SEQ ID NO: 9246 - DNA, 498 bp, Gossypium hirsutum
  Clone ID: GOSHI-09MAY01-C25570_1
gcaattttggagatctgacgaaaaagaaaggcggaaacttatcgaaggagcggaaataaaagatgattcaccggaaatggagtttgctaacaggcccagttgtcatcctcggcggcgttgtgggagccaccgtcgtcgctcactttctctttgttgacgatccatatcttaaaccaaaaggaagaatactgattcaccaccacaaaccaagtagaaagaagccgaccgtcgctgttggcatttgcagcaaagaaatgcctaggtcgctgtttagaaacatgagttgtttgttgaataatgtcaaatctgtttgtttttgtaatttgggttagcttctgttttctctttctgaaataacaactcaactacaaagttcttgaacacttgcattgaatctcggaacattgcttaaagttgcaccagacagactactttgcaactagactttgataacgcaggttccacctatcgctaacaaaaaatgaatatggaaatgac

SEQ ID NO: 9247 - DNA, 402 bp, Gossypium hirsutum
  Clone ID: LIB3493-024-P1-M1-G2
ctgacgaaaaagaaaggcggaaacttatcgaaggagcggaaataaaagatgattgagcggaaatggagtttgctaacaggcccagttgtcatcctcggcggcgttgtgggagccaccgtcgtcgctcactttctctttgttgacgatccatatcttaaaccaaagaagaatactgattcaccaccacaaaccaagtagaaagaagccgacgtcgctgttggcatttggagcaaagaaatgcctaggtcgctgtttaaaacatgagttgtttgttgaataatgtcaaatctgtatagtttgtaatgtgggttagcttctgttttctctttcttaaataacaactcaactacaaagttcttgttcaacaaattataggggcaagaacatgtttattgtttttgc

SEQ ID NO: 9248 - DNA, 1123 bp, Gossypium hirsutum
  Clone ID: GOSHI-09MAY01-C25530_1
atgacatcaaactccaaccattttcacttaagaaagagcagcagagtttcacgcctctaaggccagagattccaccatggctggctagccaaccgatgctcggggctggtcctggcccaccacaccctatcgacctttcctcctcttcatcatcaatattctcccagagattagatcatcaagatttaacacttcatggaacccccagcgctaaccctagtcttgtccccacactccctccataccatcacacagcactgccttcccctcacatgtcagccactgcattgctccagaaagcagctcatatgggtgcgaccatgagccgtaaatctgggtcatcatcagtaccgtccactgttgcagcagcagcatctgcctctttgatgagaccccaccaacaaactcacgtgtctgccgattctgctggcactaacaacaacacaacaacagctggttttggactcgacttgccttcacgtgaagaactagatgtgggtagcagcagtggcatgcgccccggcttggctcctttcgggaaccgtaaacctgctgccaatgcaggcgatgatgatgatgataataataatattgctggctcaggtgctactccttcccttcttcaagacatgattaactctttgtcttctgccactggatttgacgccactaattcctttgatgacattgcatttggtgggatttttaacgcaacaaagaagctatgtggcagttccatcaacgaatccttctcgaaaacaactacaccaacagtacccacgacgacaaacggcactagaaacgatcaccatggaagtactgccggtagtaccaccaccaccaccaccactcagggtggtgatcaaggcttgacaagagatttcttgggtcttcgagctttctctcataccgatattctcaacattgccggtcctggtcgtaattactgcatcgacacttcgcaagaacaacacaaccagtctcaaaaaccatggcaaggttaggtaatatagcaactcttttttgttcaaatgctatatcttaaattttataagcacctttttcggattttattcctgtttctttatctttaattaatttccttctaccttttgctacaatc

SEQ ID NO: 9249 - DNA, 1003 bp, Gossypium hirsutum
  Clone ID: GOSHI-09MAY01-C25480_1
agcaagttcacaaaaacgaaacccaaaaaacagagtcaacaaagatattcgaaccaagttcacgaaaaacagagccccttctctgcatagacgcgatggccactcgcttttacagttgttctctgattccagcaagacccacctccggatcagtcttaaacaagtacagtttgttgccaaatcctcgtatctcaatcacccgacgtcatactacccttgtttcttcttcttcttcttcttcatctttcacacttcgagcttcagtttcatcagctgctacttcaactgcagtcgatggaaccatctcctccaccaaaccttccaagtctttgcctttcagagtgggtcatggattcgaccttcatcgtttggagcctggctaccctttgatcattggtgggattgatattcctcatgatagaggctgtgaagctcattctgatggagatgtactgcttcattgtgttgtggatgcaatattgggaggtttagggctacctgatatagggcaaatatttccagactctgatcccaagtggaaaggagctccatcttcagttgtcattatagaagctgtgagactcatgcatgaggcaggttacgagattggatacctagatgccaccttatttcttcacagaccgaaactgagtccacacaagggagttatcagagccaatttgtctgagcttctaggcgccgacccatctgtcatcaatcttaaagccaagactcacgagaagggtgacagccttggtgagaatcgaagtattgcagcacacactgtggtcttactcatgaggaagtaaagtactggtatcgtatagcattggtgtttactgtcatagacaactccctgtattcagttggatccgaacttgagcaataattatatgtttcgaccggccacagtttccaaatcggtcattggtctatgaaagtttgtcaacgactcaacattacaaagataaatttattttaaaattccatgtgttcaattcct

SEQ ID NO: 9250 - DNA, 370 bp, Gossypium hirsutum
  Clone ID: GOSHI-09MAY01-C25780_1
caaaactcctcctcttagaaacaatgactaattcagactttggcttgcttttcattgtcgggattttagcaactcaggcaatgtctcgcactgtgtatgaatcagccattgcagaacatgagcaatggatggttaagcatggtcgacattacaagaacaaagctgagaacgataaacgctttaagatattcaaggagaacttggaatatattcagaactttaataatgcaggaaacagaacatacaagttgagtattaacaagtactcggacttgacacatgacgaattcgtcgcagctcgtaccggatacattaatccaggcaacacaatgacatctatggaaacatcgtttcgctacgccgagtttac

SEQ ID NO: 9251 - DNA, 410 bp, Gossypium hirsutum
  Clone ID: GOSHI-09MAY01-C25740_1
ggaacataaagttgcccttttttttctttttggtgtgaaacaagttccaatggcggagtaattgaagacattaaccaacagatagtcagataaaaacctccaataaaccaactagctagctgtgttctttcttctgctctcttctcatggtggagtccctccaaaggtatgctgttgtcaccggggcgaacaaggggattggactggccatatgtaagttgttggcctctaaaggggtcatggtggtcttaactgctagagacgagaaaaggggtctcgtcgctcttgaaaagctgaaaggaatccggtatctctggtcatctagtttttcaccggctcgatgtcgccgaccctgctaccatcacttgtctagcagactttgtcaaaaacaaatttgggaagcttgatat

SEQ ID NO: 9252 - DNA, 409 bp, Gossypium hirsutum
  Clone ID: GOSHI-09MAY01-C25770_2
cagtgggaggttttgggattgggatggtgtactacggcgtgccattaggccttggaaatctatccgtgaatctctatttgggcgtcacattaaacgccttatccgagttgccagcgtcactcattacattcttccttatagggaaaatgaaaaggaaagactcattgttgggtttcacaatattaagcggggtgtgcagcgtgttgtgtgtggttgtggggaaggtgtcgccaagtttacagatagcaatggagctgatatccttcttcagtgcctgctcggccttcaacatgtcactgatatacacattagagctgttccccacatgcgtgaggaactcggcaatatcaatggtgaggcaagcactggtgtttgggggggtgttcagcccactgctcgtggccgctgg

SEQ ID NO: 9253 - DNA, 976 bp, Gossypium hirsutum
  Clone ID: GOSHI-09MAY01-C25770_1
gtgccttgcaggcggacttgcacttgcttcgcttgctgactccactcttggccgcaaagacatgctcttattctcatgtctcatgatgtctttttcttcaatcttcaccgttttttcacccaatatttggatctattctgtcctgagattcattaacgggtttggccgccccactgttgggacttgtgccctcgtgttatcaaccgagctagtaggaaaacggtggcgcggccaggtcggcgttgttggtttcttttgttttactttagggtttctttcattgccggtaatggcatacgtaaatagaggttcttcatggagaacactgtatctgtggatttcggttccaacaattttgtactgtatattagttcatttcttagttcatgagtccccaagatggctgttcgtccgaggacgcaaagaagaagcagtgttaacactcaagagcatggctcaggctaatcaaagtcccataacaatgagcttctccaatgtcctaatcgagcaggaatcatggaatgtagatatttactcctcaatcaagatactgttgaacaagaggtgggcggcaaaaaggctagcggccgtgatggtgggaggttttgggattgggatgggtgtactacggcatgccattaggccttggaaatctatccgtcaatctctatttgggcgtcacattaaacgccttatccgagttgccagcgtcactcattacattcttccttatagggaaaatgaaaaggaaagactcattgttgggtttcacattattaagcggggtgtgcagcgtgttgtgtgtggtggtgggtaaaagggtcctaatttacagtatgcaatgggagctattaatcttctttaatggctgctcggcctttaaatggacctgatatccccattaatgtgttccgaccttgcttaagactcggatatcactgggagcaaaacctttttggggggtgtcctcctctcc

SEQ ID NO: 9254 - DNA, 263 bp, Gossypium hirsutum
  Clone ID: LIB3493-041-P1-M1-D12
cggacgcgtgggcggacgcgtgggcggacgcgtgggctgtcctgagattgattaacgggtttggccgcgcaactgttggaacttgtgccctcgtgttatcaaccgagctagtaggaacggtggcgccgccaggtcggcgtttttaggtaattttggttgactattagggttgtttaataggagggtatcggattcttttattgggggaagaaagggtctacatcattttctgagatttttccaatctatataaataatatttt

SEQ ID NO: 9255 - DNA, 391 bp, Gossypium hirsutum
  Clone ID: GOSHI-09MAY01-C25720_1
caaaggtctcctgaaagacgaagaccatcttactctaggcgtagatctcagtctcgttctccttatcggcgcgggtcacctacacctgtgcgccgtagatctcgttctccttatcggcgcaggtcacctacacctgtgcactgtagatctcgttcacccatccgacgttatagatcaccatcacctattacacgtcgtagatcaccattgtccattcgacgtcgcagatcaccatctcttgtacggcgtcgtaggtctccctcacctatgctccatggatctcgttcccctgtgcgtcgcagatctccttcacctatacgtcgtaaatccccattgcctgtgcgccgtaggtctccatcacctgttcgacgaagatcaccaccttccatgc

SEQ ID NO: 9256 - DNA, 461 bp, Gossypium hirsutum
  Clone ID: GOSHI-09MAY01-C25660_2
cccccggcttgaaggattccggcccaagggtggttcaagagaggataagaggaggagtaagcgaccttggtctaactcttgaagggttcctttttcttcatgctctttttatagaaaaagggcgtcttgagacaacttgggctgtcttgaggaagtttggatataatgacgagttaaagctcagggatgatattcttccagttccaaccaagcatgcccctgatcagactgtggagctgacaaatgaagctatcgactttttgcgtgggatcttccgattgtatgacagtgataatgatggatctttgcaaccttctgagtttgatgatatctttgtaactgcaccagaaagtgggccttgatgacaactctggatccttcatattgtttggctaacttgatttgcattggatatggatgtgatccaacttcagtcctttctgttactaggagaagatctg

SEQ ID NO: 9257 - DNA, 973 bp, Gossypium hirsutum
  Clone ID: GOSHI-09MAY01-C25660_1
gtttatgggcgtcttgagacaacttgggctgtcttgaggaagtttggatataatgacgagttaaagctcagggatgatattcttccagttccaaccaagcatgcccctgatcagactgtggagctgacaaatgaagctatcgactttttgcgtgggatcttccgattgtatgacagtgataatgatggatctttgcaaccttctgagtttgatgatatctttgtaactgcaccagaaagtccatggactgtggatccttatgtggacgctgcagagagaacacctcaaggaaatttaactattaatgggtttttgtctgagtgggcctccctgcctccgctggatccttcatattgtttggctaacttgatttgcattggattggggggtgatccaacttcagcccttccgggtactaggagaagatctgtagatcgtatgaagaagcagacagaaaaaatgttttccactgctttgtttttggtcctaaaaaatctgggaagtctgctttgttgaattcatttataggaaggcctttctcaagcaactacactccaacaaatgatgtacgtcatgtagctaatgctgttgaacagattgggggttctcagaagacccttattttgcaagagataccagaagatggagttaagaaattgctgtccaatagggaatgtttggctgcctgtgatgtagctgtgtttttgtatgacaggtaaagttaaatattttatttgtctgaagctgcaagatgagaatatgatggtgctatagcatacttatagagcagtggttatgaacccctgtaaattaatagtttagtggttttgaatgtcctttactaactaatcctaccttttccctttgtctgcttctatgttgtgctaaatctgctagcttgtgggtggaagttgaagaataaccaacacctcaaagggctgtagaaatctgttgatatgtctgtaaatagttt

SEQ ID NO: 9258 - DNA, 557 bp, Gossypium hirsutum
  Clone ID: GOSHI-09MAY01-C25030_3
tccacgcgttcgtccacgcgttcgtccacgcgtccctactttgagcttgttttgattagcaatgtaggtggggcaggatccatccaatccgtatccgttaaaggctctaaaactgggtggatgtcaatgtcaagaaactggggagctaactggcaatccaatgcctacctcaaccgtcaatcgttgtcgttcaaggtcaccactaccgatggtgttacccgactgttccctgatattgtgcctgcaagttgggggtttggccagactttctctagcaaagtacaattctaagctcactaaaagctttagttcccggcggaggcgtgctacattattttacaaaaaagctgcccgccatacatggtatttatcgatacatcacatggtcaataatatcaggctacttgtttttctggagaactggttgtttagatggaagtgaaatctttgtttttgatacaagtcgatgtttgaaattatttcatgatcataataaattgtcaataagaagtgcaagaaaaacatgcagcttcagaagatgtaaattttgtcatcac

SEQ ID NO: 9259 - DNA, 673 bp, Gossypium hirsutum
  Clone ID: GOSHI-09MAY01-C25030_2
atttccagtacttctccagcatttgttgtcttttaccctaccgagaaatggcaaaatccatttttgcattaccaattttgcttggattatgctatctggctactgatgtgagtgccttcacggcttctgggtggaccaaagcacatgctacattttatggaggcagtgatgcctcaggaactatggggggagcttgtggatatgggaacttgtattcaactgggtatggaaccaggactgctgctttaagcacagccttgttcaatgatggagcttcatgtggacaatgctacaagatcatgtgtgattaccaagctgaccctaaatggtgcataaaaggaacatccgtcaccatcacagccacaaacttttgccctcctaactttgctcttcccaacaatgccggagggttggtgcaaccctcctctccagcactttgatatggctcagcctgcctgggaaaagattggtatctacagaggtggcattgtgcctgttttggtccaaagggttccaccagccccatggcccccgccacaacaacggtcagaatctgaccaatcacttcaaaactgatagtgttgctcatgttggaactaatggctgctcttcttcttctcttgatgctgcctgtggtgatgatgatgatcaacttcaatggtctttttaattt

SEQ ID NO: 9260 - DNA, 1103 bp, Gossypium hirsutum
  Clone ID: GOSHI-09MAY01-C25030_1
agtgtaaatacattcattcccagtacttctccagcatttgttatcttttaccctaccgagaaatggcaaaatccatttttgcattaccaattttgcttggattatgctatctggctactgatgtaagtgccttcacggcttctgggtggaccaaagcacatgctacattttatggaggcagtgatgcctcaggaactatggggggagcttgtggatatgggaacttgtattcagctgggtatggaaccaggacggccgcgtggggtactgccttgttcaataatggagcttcatgcggacaatgctataagatcatgtgtgactatcagacagatcccagatggtgcataaaaggaacatccgtgaccattacagcaacaaacttttgtcctcctaactttgctctcccaaacaatgccggaggctggtgcaaccctcccctccagcacttcgacatggctcagcctgcctgggaaaagattggtatctacagaggcggaattgtgcccgttttgttccaaagggttccttgcaagaagcatggtggagtgaggttcacgatcaatggaagagactatttcgagcttgttatgattagcaatgttggtggcgcaggatctatccagtctgtgtccatcaagggctccaaaactgggtggatggcaatgtcaaggaactggggagctaactggcaatccaatgcctatctcaatggccaatcattgtcgttcagggtcaccactactgatggtgtgactcgtctatttcctgacatcgtgcctgcaaattggggttttggccagactttctctagcaaactacaattctaagattagtatttaaagttcagggtttggggtttagtttccggcagaggtgtgcttactattttacaaaagctgcccgccatatcgtatgagatgaagtgaatgaatccttgaactcttacattacctttttatgcttttcatatacgaaattggaaccaagtttaaaactattttaagtgatcgtaattaactgtcaataagaagcccaagcaaaacattgcagcttcaccattttgtaaattttgatttcacatagtaatgtgtttatgattc

SEQ ID NO: 9261 - DNA, 383 bp, Gossypium hirsutum
  Clone ID: LIB3149-063-Q1-K1-G10
ccgaaggctggttcaatccacccttcagttcttcgacatggctcaacctgcctggggaaagatcggtatatacagaggcggaattgtgcccgttttgttccaaaggtagcgtcctccataacatttccttgcccttattatttttcattactctttattaaacgtcttggccttcttacaatacagggttccttgcaagaagcatggtggagtgaggttcacgatcaatggaagagactatttctagcttggtatgattagcaatgttggtggcgcaagatctatccagtctgtgtccattaagggatccaaaactgtgttgatggcattgtcaaggaactggggagctaactggcaatccaaccccgatcttaatggccaat

SEQ ID NO: 9262 - DNA, 536 bp, Gossypium hirsutum
  Clone ID: GOSHI-09MAY01-C25380_1
aaaaaggaaacgaaaagaaaaagtgattggccaccatgtttcgctcaatcaactttatagccatgctggtgttccttaattttagtcgggatattacagaaactgcagcagcatcaccattgtgcgatgtggttatcttttacttaagcccctgcgagggcttcataaaaggcggagccgatccggcaccggaatgttgtgttggtgctaaacgtcttattaacgaactaaaggccaaagaagataggatagaactatgcctgtgcttgaaagcaatattgccactacttgggccatttgaccctaatcgagtgcctcttcttggccagaaatgtggtatcaagaatttctttcctcccatcacccccgctactgattgttccaagatatgaagagagagctgggaaatgtgaaaagcaagagtatggagaatgaataaaaaacccctaatgatggatttcataaaattatgtataaatcaaccccttgtaatttgattccactaaataaaatatcaacttatttttaactttcac

SEQ ID NO: 9263 - DNA, 853 bp, Gossypium hirsutum
  Clone ID: GOSHI-09MAY01-C25200_2
ggaggagttggactttcaggcactataaagtataaatctctctctctatctaatcattccccttttactgttttactctttacaaattttcctctcctttttcgtgtttttactcttaattttgctttttgttttggattgtctcttctgaatcagagaaaaccctacctttttttttctcttttatttctttgaattggaacgatcaaaagaaggaatgggttctgaaggatcgagggttgttgtgccaaggaatttcagattgcttgaagagcttgagagaggtgaaaagggaattggggatggaactgttagttatggaatggatgatgctgatgatatttacatgcagtcatggactgggactattattggcccgcctaacactgttcatgagggacgcatctaccagttgaaactattctgtggcctggattatccagataatccaccaagtgtgaggtttcaaacccggataaacatgacctgcgtcaatcaggaaactggagtggtcgaacctagccttttccccatgcttgctaattggcaaagggagtatacaatggaggatatattgactcagctgaagaaagacatgatgtctccccagaacaggaggctggctcagcctcctgaaggcaatgaggaggcagggctcgatcaaaagggcttaccactgaagtgttgcatcttttgaagtccaccagagttatatatgaacataatgtatataaaaaaaatatagtaattccggcaaccggcttagcaccaaattccaatggtggccaaataaatcgaaacttaaccgatgacattcaaaaactttatgagttatgctaaaatcgaatcttaa

SEQ ID NO: 9264 - DNA, 671 bp, Gossypium hirsutum
  Clone ID: GOSHI-09MAY01-C25200_1
ctttctcttttaacatttctccttctacatctttctttcttttctttttttgggtgggggtttggtactctcgtttgaatcaaagaaaccataactgtttgttctttttttctccctttgaattgaaacgattgaaagaagaaatgggttcagaaggatcatgtgttgttgtacccaggagtttcagattgctagaagagcttgagaggggtgaaaagggaattggagatggaactgttagctatgggatggacgatgctgatgatatatacatgcagtcatggactgggactattattggccctccaaacactgttcacgaaggatgcatatatcagttgaaactgttctgtggcaaggattatccagataatccacctagtgtgaggtttcaaacccggataaacatgacctgtgtcaatcaggaaactggagtggttgagcctagccttttccccatgctcgctaattggcagagggagtatacaatggaggatatattgactcagttgaagaaagaaatgatgtctccccaaaacaggaagcttgctcagcctcctgaaggtgtgtagatcctataatctctattattcatggagaaatgttggttgtattggattggtagattatggcgatttgcatatagatcaactaatgctattatttgtgat

SEQ ID NO: 9265 - DNA, 402 bp, Gossypium hirsutum
  Clone ID: LIB3148-033-Q1-K1-A9
cccacgcgtccgcagttgaaattgttctgtggcatggattatcccgataacccaccgagcgtgaggtttcaaacccggataaatatgacctgtgtcaatcccgaaaccaaagtggttgaaccaagccttttccccatgcttgctaattggcgaagggagtatacaatggaggatatattgactcagctgaagaaagaaatgatatctccacaaaaccggaaacttactcagcctcctgaaggcaatgatgaggcgaggattgatcaaaagggtttagtggtgaagtgttgcatcttttaaatcttaattgtatggaacataatgtacataatatatatatacacagataattcctacaactgccttagctcaatcatatatataatataatgcttgtgtatg

SEQ ID NO: 9266 - DNA, 340 bp, Gossypium hirsutum
  Clone ID: LIB3149-006-Q1-K1-A11
gctagaagagcttgagaggggtgaaatgggaattggagatggaactgttagctatgggatggacgatgctgatgatatatacatgcagtcatggactgggactattattggccctccaaacactgttcacgaaggatgcatatatcagttgaaactgttctgtggcaaggattatccagataatccacctagtgtgaggtttcaaacccggataaacatgacctgtgtcaatcaggaaactggagtggtaggtgatgttattcttaggaccttttatgccacaatatgtactgaaagccgctaaaattgtcaggttgaacctaacctttttcccatgctt

SEQ ID NO: 9267 - DNA, 406 bp, Gossypium hirsutum
  Clone ID: GOSHI-09MAY01-C26960_1
ctgataagccgttgatagaatggggagtgatagcaagaccaatggacgtggcggcggcgatggcggagtacagatgtcagcatcggtgaagaaagtggtgcagaaccttaaagagattgtcaataatagctgtacggactgggagatctacgccgtccttagagactgtaatatggaccctagcgacgccgttcaacgcctcctctcacaagatacctttcatgaggtaaaaagcaaacgggagagaagaaaagagatgaaagagacacaagaacaaaaaactcgagccaacagtcgtgcatctagtcatggtgttagagatggtagtgaacattcttttgggcggagcagatcaatgcttatctccaatgagcttggtaaagctgcatgcaagaaagagaatgtc

SEQ ID NO: 9268 - DNA, 1011 bp, Gossypium hirsutum
  Clone ID: GOSHI-09MAY01-C26920_1
actgtaaagaatataatatagatatgagtgatctacagtgcctgtctccaacacatgagccacgtgtttctgatcacatggagcagatcaaagatatgataactcagattataaacaaagactttggatatgttgttgacggcgatgtgtttttcgctgttgataaattcccaaattatggcaagttatctgggcagaagctggaaaacaatagagcgggtgaacgtgttgctgttgactcaaggaagcgtaatccttccgactttgcattatggaaggctgcaaagccaggtgagccatcttgggacagctcatggggacctggacgacctgggtggcacatagaatgtagtgcaatgagtgcgcattatttaagcttcaaatttgacattcatggtggtgggcttgatttgatttttcctcaccatgaaaatgaaattgctcaaagttgtgctgcatgcgaagagagtgacgtaagttattggatgcacaatgggcatgttactaataacaatgagaagatgtcaaaatctttgggtaactttttcacaattcgccagattactgagagatatcatccactggctttgcgatacttcttgataaatgcacactatcgttctcctctcaattactccgttgttcagttggaaggtgcatcagacgctgttttttacatatatcagactttgaaagattgtcaagatgctctattgcaactacaagaagaaatgcccaacgatggcaaaccagcacggattactccggacgccaaggaatgcattagcaagctccgcaatgagttccaggtgaaaatgtcagatgacttgagcacttcacttatactgactggagcctttctagaagcattgaagttggtaaacaatttgttgaccatgctaaagaagaagcagcaaaagcaacaaagattattggtaattcaatcccttaaagagattcagaacgaagttacaaaagttttggatgttctgggattgcagccaccttgct

SEQ ID NO: 9269 - DNA, 1675 bp, Gossypium hirsutum
  Clone ID: GOSHI-09MAY01-C26860_1
cgcaaatggacgagtttgccattgttcccaatacagcgacctttaatttcgttttaaaggctatgaagcaagctaaggaaactgaagctgctgagaagctgcttgaacggatgctgcaaggtggaacagaatctctgtctgacgatgagacttatgatttggttattggaatgctatttgagtcacaacagtttgaagcagccttgaatcatattgatatggccttaaaatctggatataagttgtccatgcgagtttttacagaatgtgtggcatgctgtgttaaacaaggccggcttgatgaattggccactgtcattgagatgtgcaagacaacagatcagaatagagctctttatccaaattggactttgtgcaactatcttgcagaagttgcaatgcaagcggataacagcaagctagcattttatgccttggaatttatggccaaatggattgctcggggtgaaaatgcaaggccgcctttcttgctttctgtagatcaaggattaattgtctcagcacttgcaactgcgggtaggacatacagttcaaaactgttggatgtgtcctgggcaatcctacggcgttcattgcgtcaaaagaaggtgcccaatcctgaatctttccttgggaagatttatgcacatgcatcattggggaatctgcagaaagcttttggcacgttgcatgagtttgaggctgctcatggcaagtccactaacgaagcagaagacctgttctcacctttcacctctttatatcccttggttgtggcttgctccaagaatgggtttgagactttggattcagtatattttcaacttgagaacttaagtcgtgctgacccttcatacaagtctggtgccggtctgaattggataattttgggatgtgggaacatatgggatatcgagcgtgcctaccaaacatttgatgcaataagttcctcttttgggttgacccctgacattcattcatataatgctctaatctatgcatttggaaagctgaagaaaacttttgaagcttcaagggtgtttgagcacatgctgagcttgggtgtgaaacccaatgctaagtcatattcgttgcttattgatgctcatctcatcaatcgagatcaaaaagctgctctctctatgattgacaagatggtgacctctggatttgtaccatccaaagaaacactaaaaagggtcagaaggcgatgcatacgagagatggactacgagtgcgatgataaagttgaatctctggctaagaaattcaggatcaggatgggctctgaaaatcgcaggggcatcctttttgatcttgactatggcactgaatatgcatcataggcaagttatgcagtcttaaggtatcaatacttgtgcttgggactacatgatgcttgaaattatcaagagcgacaattggggttaaccaggttccgatgaagtaatcaacccatttgttattaaatttttgtcaattctgagcctttggaggataaatatcgtgttcttagcttgtgatttcccccctctaatatctcaattctctttttttcaccctttatatgctttctgaggaataggaacagaaaaaagttaggaaaaggtattcgcatgttgacaaataaatgtcttttcttttttgcaccttttaatcaaataatttcgcaatc

SEQ ID NO: 9270 - DNA, 491 bp, Gossypium hirsutum
  Clone ID: uC-gsflnu33B094g06b1
tagtttgggtgtgaaacccaatgctaagtcatatgcgttgcttattgatgctcatctcatcaatcgagatcaaaaagctgctctctctatgattgacaagatggtgacctctggatttgtaccatccaaagaaacactaaaaagggtcagaaggcgatgataaagttgaatctctggctaagaaattcaggatcaggatgggctctgaaaatcgcaggggcatcctttttgatcttgactatggcactgaatatgcatcataggcaagttatgcagtcttaaggcttgggactacatgatgcttgaaattatcaagagcgacaattggggttaaccaggttccgatgaagtaatcaacccattttgtatagattttttgtcaattctgagcctttggaggataaatatccgtgttcttagcttgtgatttcccccctctaatatctcaattcttttttttttcaccctttattatgctttctgaggaatag

SEQ ID NO: 9271 - DNA, 420 bp, Gossypium hirsutum
  Clone ID: GOSHI-09MAY01-C26810_1
cccacgcgtccggttgattttctgcagcataaaacaatgcaaatgatgtatgacataatttacaaggcattggtggaaactggacttgagaatagatatgagcctcatgattttttaaatttcttctgtcttggcaatcgagaagtaggagattctttggttgctagagatgccactgcatcaagcactcctcaggtaaatagaccgtttcagctctctttaatattccagtcttgctcatccatgagaaaatatgaaccaaatggtggtaacccaaggccctggctaagaagaaccggcgctttatgatttacatccactcttaagggatgatagtggatgatgagtatgtcataataggatccgcttacattaaccagcgctcaatggaaggcacttgagacactggaatagccatgg

SEQ ID NO: 9272 - DNA, 557 bp, Gossypium hirsutum
  Clone ID: GOSHI-09MAY01-C26590_1
cccacgcgtccgttttaatttaattttttactaaaattatatatttttaacataaaagagaaaaaagaaagaaaatccctattgtccaattgtttcacctccaagcaaagggaaggaaagactttagacttttcattaaagcgttataaagataagcgaaataacatttcagactccaagatcaaagcggtatttacgggaccttacattttggataaaaatgggtgatcatctggttttatgtgtggaccgtcttataacacctgaaagtttgcaatcaatgcaagaaactgaggctgcaggatcttccggtgaaagttcttctcaatcctctgacccaaatgcttgtgctattggtgttaaggaagtggaagaacatggttgctgtgatgaagaagaaccacttatacagacagctgaatgccgtatctgccaggaggaggactgcattaagaatttggagactccttgtgcttgtaatggtagcctgaagtttgctcacaggaaatgtgttcagcattggtgtaatgagaaaggtgatataactcgtgagatct

SEQ ID NO: 9273 - DNA, 407 bp, Gossypium hirsutum
  Clone ID: GOSHI-09MAY01-C26570_1
cttatcctgaggatctgagtctagagtgtgggaggagttccaagcaatctgtagtttatactgagtctgctgtaagccctgaaatgtttgatatggtgctactaaattgtcaaagtgtaaccgagcttcaaaaagttttgcaagatgaaacgagcaagaatgtgcaacagaacggacaattgaaaggatctaatggtggaaaggcacgtgggaagaaacatggtggtaaaaagaacatggtggatttgagaactctcttaaccctttgtgcacaagccgttgcagccgatgattggaggagtgctaatgagctaatcaagcaaatcaggcagcattcttcacctatgggtgatgggatgcagaggatagctcactatttcattgatggcctaaggcacgcttagctg

SEQ ID NO: 9274 - DNA, 425 bp, Gossypium hirsutum
  Clone ID: GOSHI-09MAY01-C26450_1
cggagacggagaaacatttgcgccatgagaaacattacaagtatattagctctcatgatgttgcttattgggctcggagttttgatcaggacctcgtgagagcttgtagggatcattatcacaagaggtattggagagttggacttggtttagcgtttaggcttgttgctttggagcctaacttcaggaagctcctaggggatactctcaactctgcctacaagataaccagtagccgattgatccttttggactacgatggcactatgatgcctccaacttcagtgaacaaggggcctagtcatgaggttatttcggttttgaatcgtttatgcgatgaccccaaaaacattgttttcattgtgagcggcagggaccgggataccctgagcaagtggttttcttcatggggagaaatgggtatt

SEQ ID NO: 9275 - DNA, 1405 bp, Gossypium hirsutum
  Clone ID: GOSHI-09MAY01-C26410_1
aaactggtaaacgtgaaactttaaacaggatgacttaatcatgaataaaagattacccacgcgtccgtgtttgtattgcagatttaaaggcaccatgggagcaggcggaaagacagaaaaagtgcaagcttttttgcttataaaaaatttgaaatagatctataaggccagttgttgaagaagaagcagatcaatggcgaaggagttggaaggattcaatttcgagcaaaggcatggaaaggcgagggtgagagtgggtagagtttggaggagcaaagatggatgccgccacttcatggtcgaatggaatgttaacatcagcttgctttccaattgcgttgccgcttatgtccgcgatgacaactctgacatcgtcgctactgacaccatgaaaaactctgtttatgtcaaagcaaaggaatgttcagaacaactttcggcagaggaatttgctattctacttggcaagcacttcacatcattttatccacaggtttttactgcaatagtaaagatagtggaaaagccatgggaacgcatttctgtcaatggccaaccacatgaacatggctttaaactgggatctgaaaagcatacaactgaagcgattgtacagaagtctggtgttttacagctgacttctggtgttgaaggcctgtctttgctgaagacaacccagtcaggatttgaaggattcatcagggacaaatacacagcacttcctgaaacacgagaaaggatgctggcaacagaggtcacagcttcttggaggtattcttatgaatctgtctctagcatccctcaaaagtcgctctacctcaatgagcaatacttgaatgtgaaaaaggctttggtcgatgctttctttggtcctcctgaacggggtgtatatagtgcatctgttcaaagcactcttttgcagatggcaaaggctgtacttggcaggtttggtgacatatcatcagttaaactaaaaatgccgaatatccatttcttacctgttaatatatcaagcaaggatcacggcagcattgtaaagttcaatgatgatgtatatcttccgacggacgaacctcacggatcgatcgaagctagcttgagccggttctggtcaaagatgtagtaggtacaagacaaacgtagtgtatggtggaagaagggtataataaatttctgcttcatgctttgttcattatctaataacgataatcagaaggccagtctggtttacgtatgttaaagaagtaatattagtgcaacatgttgatgtgtaacaacttcaaaacagttagcagttgttgggttaataaattgtgttccttgtttgggttgttcgttttaggcaaggctttattttttttggtttgcagcaaaaaggatttaacaggtatgcttcctttcgcct

SEQ ID NO: 9276 - DNA, 635 bp, Gossypium hirsutum
  Clone ID: LIB3825-021-Q1-K6-H12
cggccgcgtgggcattgaagcaatcattgttgctgacctttttttatctcattagctgcatcttgcaacaattttttttttttttggtatttgaggactctaagatccaatacttggttcagtggtattcttttcatttttatcccttaagctaaacatctttttttctttgctgatttttggaatatttgaatatgaacagtcgggatttgaaggattcatcagggacaaatacacagcacttcctgaaacacgagaaaggatgctggcaacagaggtcacagcttcttggaggtattcttatgaatctgtctctagcatccctcaaaagtcgctctacttcaatgagcaatacttgaatgtgaaaaaggctttggttgatactttctttggtcctcctgaacggggtgtatatagtgcatctgttcaaagcactcttttgcagatggcaaaggctgtacttggcaggtttggtgacatatcatcagttaaactaaaaatgccgaatatccatttcttacctgttaatatatcaagcaaggatcacggcagcattgtaaagttaatgatgatgtatatcttccgacggacgaacctcacggatcgattgaagctagcttgagccgattctggtc

SEQ ID NO: 9277 - DNA, 700 bp, Gossypium hirsutum
  unsure (1)..(700): unsure at all n locations
  Clone ID: AI055696.1
gaaaaacactgtttatatcaaagcaaaggaatgttcagaacaactttcagcagaggagtttgctattctacttggcaagcacttcacatcattntatccacaggtttttactgcaatagtaaagatagtggaaaagccatgggaacgcatttctgtcaaatgtcaaacccatgaacatggctttaaactgggaatccgaaaaccttcaacggaaaccaatggacaaaaatcttggggtttaccacttacttctggtgtttaaagcctgtcttttcttaaaacaacccaatccggatttgaaagaatcatcacggacacaatcacaggactttctgaaacacgagaaaggatgcttgcaacaaaggtcacagatttttggaggtattcttatgaatatggctctaacataccttaaaagtcgctctactttaatgagcaatacttgaatgtgaaaaaagcttttggtgatacttttttttgggctcctgaacaggggtgatataatgcctctttttatagcaccttttttcagatggcaaaggctgtactttgcagggttgttggcaaattattaattaactataaaaagcccaaatccctttttaaccggggaatatataacaaggttcccgcgcttttttaattcatgagaaggttattttccccgggaaacttcgggtcttaaaattctttgcccctg

SEQ ID NO: 9278 - DNA, 232 bp, Gossypium hirsutum
  Clone ID: LIB3148-019-Q1-K1-G3
cccacgcgtccgcccacgcgtccgtccacgcttccgttcacgcgtccgagtaggtacaagacaaacgtagtgtatggtggaagaagggtataataaatttctgcttcacgctttgttcattatctaataatgataatcagaaggacagtctggtttacgtatgttaaagaagtaatattagtgcaacatgttgatgcgtaacaacttcaaaacagttagcagttgttgggtt

SEQ ID NO: 9279 - DNA, 399 bp, Gossypium hirsutum
  Clone ID: GOSHI-09MAY01-C26790_1
cataaaatcatgggtttctcccatattgatgccttgcatggagggaggtgacgaagaaggggcaaaagcgaattacgcagccacgttttgcttttatgaccaagagtgaagccgatcatcttgaagatggctaccgatggccaaaatatggacaaaaagctgttaaaaatagtccatttcctaggagttactatcgctgcacaaacagcaaatgtacagtgaagaagacggtggaacgatcctctgaagatcccaccatcgtcattactacatatgatggtcaacactgtcatcatagtgtcggtctcccccgtggtggactcatcagccatgaagctgcctttgccggtcagtttactcctggagtctctcaattttattattcacaaggggtacagt

SEQ ID NO: 9280 - DNA, 423 bp, Gossypium hirsutum
  Clone ID: GOSHI-09MAY01-C26740_1
cccacgcgtccggcactgtccctcttttcggatcaattcatagttcagacactcaacgtaacattcctcgtctacctcttggccatcaccctgaccctttgtgctcttgcggtgctagaaatcaagtggtccggcattgaactggaagagtggtggaggaatgaacagttctggttgattggaggcaccagtgctcatcttgctgcagtgctccatgggctattaaaggtgattgccggtatcgaaatatcattcaccctgacatcaaaatccgctggtgatgatgtggatgatgattttgctgatctctacatcttcaaatggacatcgctcatgatacccccactcaccatcatatttgttaatttgattgccattgcgtacggagtcctgcgtacggtatacagtgatgtacctgaatgg

SEQ ID NO: 9281 - DNA, 390 bp, Gossypium hirsutum
  Clone ID: GOSHI-09MAY01-C26770_1
ggcgacttaaatttggatcaaagtgaggcatacagtaggcttgctacgcctgaatgaacaatgaggaagtatgctacgtcttggggcatcgacaaagtaccccggatacgtcttggggcatcgacaaagtaccccggatcccttaaacacatattgagctcaaaaaggtcatcaagaagtaggtacagagaagctcaagctgcgatatctggggcaccctagtttccattttggctcattttgaatattgttatctttgattgccttattcttttcaagatacatcccaataaatgtccttcttattgcatcgatatctttgattaacccattcatgttgagttaattgccttattggtgcatttgtaatctttgatcaacttatttgct

SEQ ID NO: 9282 - DNA, 430 bp, Gossypium hirsutum
  Clone ID: GOSHI-09MAY01-C26610_1
agaagacataaaagtgaaacaatgccctatgatggagcagattatcaaaggagcagaggaaactgaaatggatatactcttgttacccaagcttcgggagataagacttaagtcatgttcaaggttgacaagtttttgtatgggaagtattaccctggaatgtccatctttaaatgaaatcgcagtcaaagattgcccaaagatgtatgcaatggcatctacaagggagcaagaggatatagagatagttggcagagaaaagacaccctttttcaatcataaggttttgtgtgcccgcttgatgttcttgaacctatcatcaactaacataaaaaaattatggcctgataaaccagactgggctatatcctctaatgttcttaacttagaatacttatctgtgaagcgttgccacaatttggaatatcta

SEQ ID NO: 9283 - DNA, 710 bp, Gossypium hirsutum
  Clone ID: GOSHI-09MAY01-C26170_1
aatgggtgagatatttggagatatgaaaatgaagaaaatggaaagtgatgaattctcctttgaaaactccattaatgcttcaatagcttcttcatcagacttggttgatgatgctacatcttctgcatcatcatcgaatgggccactttatgagttatccgagatgatggctcaactacctatcaagagagggctatcaaagcattaccgtgggaaatcacagtcattcacatcgctagcaaacgtgaagagcattgaagacctaccaaagaaagtggttcgtgtaagagctaagatgatgaaatcatgcaagagctatggatggggattagatggtcatcatcaccataacaaggtgtattatagccctaaggctaccatatcaaagaagggttcaagttcaacaaggggtttgtttatgtcttcttctctagctacctagtgacccctataaggggttaatgtggaattattaacccctatttacctcttttgagacactccccttttggaggggtttttttttttagcatgtggctcctggataataatatggggaagttatattgaacctaaaattggtggggttctaagataccccatgtttcaaaatccaattttcgagtggtataatatttttatcctctactcacaataattttctctcatattccccctgggatttcttaataaaatctttatatcacgcg

SEQ ID NO: 9284 - DNA, 428 bp, Gossypium hirsutum
  Clone ID: GOSHI-09MAY01-C26100_1
catttgtgttgcttgatacccgagacaacagctacattgttgcacgagatgctattggggtcgcatccctctacattggctggggacttgacgggtcggtttggatatcttccgaaatgaaaggattaaatgatgactgtgaacactttgagtgctttcctcctggtcacttgtactccagcaaaacaggaggatttagaagatggtacaatccaccatggttctctgaggccattccatcagttccatatgatccccttgttctaagacgtgcttttgaaaatgctgtgatcaaaagactgatgaccgatgtaccttttggagttcttctatctggaggtctcgattcgtcgttggttgcttctatcacagctcgatactgggctggtaccaagactgctaaacattgggaagccagctccattctt

SEQ ID NO: 9285 - DNA, 1003 bp, Gossypium hirsutum
  Clone ID: GOSHI-09MAY01-C26080_1
gaaaatctctggacggctctcatttccaaacttgaatatcctcatgaccagtctctacaagagggatctgtataattttttgcccagttttcgcttgaaagattgaaatattatcccctctgcccactctccagcactacccttttttgagaagtccctttgctgcccaaatactcttccattttttagttcctgttttctcaaccgtacactgagggaaagcattgagtcaagaacaagagagaaacgatgggcgaggagcagcaaaatcagagcgatgtgattcctagagtgaaactgggaactcaagggcttgaggtttccaagttagggtttggatgtatgaggcttacaggaatatacaatgatcctgtccctgaagatgttgacatctccatcatcaagcaagcaatcgacataggaatcactttctttgatacatcagatatctatggacccaaaagaaatgaattattggttggcccgcccttgcggcttttaccacgagagaatgtacaattagccacagaatttgatattgtcaagtcggatcctgcgactgggattgcaataaatggtacctctgaacacgtccgcgcctcggtcgaggctagcctgaagcgccttgatgttgattacattgatctctactaccagcacagggtcgacactaaaacaccaatagaggatactatgggggaactgaagaagctggtagaagaggggaagataaagtacattggtttatctggagctagccctgaaactataagaagggcacatgttgttcatcccgtctctgccataaaaatgaagtggccgctttggactcgcgatagcaaggacgaaataatccccctctgcagggaacttgggattgggatagttccatatagcctgctcggtcgtggtttcttcggtgcaggactgttgcggaaactgtgcctgcaattagttttcggatggagaacttggctcaaaagtatggaggcacccctgcaca

SEQ ID NO: 9286 - DNA, 544 bp, Gossypium hirsutum
  Clone ID: GOSHI-09MAY01-C126048_1
ggaattaacttgctggatctacttcagcgcgtccgttcttttaggaaaataagtgcagttcctcaatgggaaggggaagtatatgatgatggagaaacacgtagatttagatgatgttgaagacgacagtgacgacgaaaagaacgacaaaaatggtagttggttaactacaactccttcgacaaaattgggatcatacgaatactttgagaaagttttaagaaaaccaaagcacattcttgcccctatggtcgatcaaagtgaattagcatttaggcttctatgtagaaagtacaacgtcaatttatgctatactcctatggttcacagtcgcctattggtagaacaaagaaaatacagaaagaaatacctcgtaacatgccctgaagaccgccctctcgtaactcagctttgtggaaacgacccagcaattgttttacaagctgcactcattgctcaagaaagaaccgacgctattgacatgaactttggatgtccacaacgtatcgcacgacgtggatactacggcgcctttcttatggac

SEQ ID NO: 9287 - DNA, 1177 bp, Gossypium hirsutum
  Clone ID: GOSHI-09MAY01-C26060_1
aaatatttgctacacaaattatagaatcctttcgacaatcctccgtgtctcagccaaaagctaccgccatgggcatcgttggaaatctctctccacagcagcgccaatctttcgactctcaaggttttcttgtgattgaatcatttgcgagccctgcagaaattgaagctatgaggaagagaatggacggaatgcttcaggcctttgaccctaccaccaccgcttctattttctccaccaaaaatcaagtaaaattgaccagtgaatacttctatgaaagtgctgaaaacatttcctttttctttgaagaaaaagcatttgatgataatggaaatttaaagcaaccgaaggaactttctattaataaagtcgggcatgcgttacatgagattgatccagttttcaaagaattctcttgctctgagaaggtttcgagtttgcttttctccttaggttacaagaagcccgtgatcattcaatcaatgtatatctttaagcaaccaggtataggaggtgaggtaactcctcaccaggacaactcgtttctttatactgaacctaaaacttgcactggtctgtggctagctctagaagatgctacagttgtaaacggctgcctttgggccattcctgaatctcaaaaaaatggtcttgttagaaggttcattaggggtgatgatggagtttactttgataggccgtccccatcgtatgaccagaaagattttgtgcctattgaagtaaaagctgggtctttggttgtaattcatggtgaccttattcatcaaagttttgaaaatcagtcttcaaattcacggcatgcatacagcttgcatgcggtagatactgatggctgcaagtgggcagaagataattggatccgaagaaaagttgaacctaagcccctttacgcttctggacagacttgagagttcgtccctggtaattgcatggagctttcatgtacgtgtctaagaaaaattattccctcttgttgaaagtaagattacaggatgatgatcaccgtttatgttaactcagatgcaagtgtgggatagtaatatgtgacccagatgggcgttttcatttctttctaagtttctatgattttgaagatttgtaatgccattcccatgccataataggagtctaataaagatgttcgacacgaacactt

SEQ ID NO: 9288 - DNA, 391 bp, Gossypium hirsutum
  Clone ID: GOSHI-09MAY01-C26010_1
agaaataagagagatttttgcaatgggtgaagaaactgagtgttgcagaacaaaaggaccaggatatgaaactccactgaaagccatgtctggtcctaaagaagctcttctttatgttacttgtgtttatactggaacaggaagagagaagcctgatttcttggcaacggttgatgtagatccgaactcaccaacttattctaaagtcatccacaggctatctatgccgtatgtaggtgatgaactacatcactctgggtggaatgcttgcagctcttgccatggtgatccgtcggccgatcgacgttttctgatccttccttcattggtatcgggtcgtgtctatgtgattgacacacaaaagtatcccaaggctccctcattgcataaa

SEQ ID NO: 9289 - DNA, 600 bp, Gossypium hirsutum
  Clone ID: GOSHI-09MAY01-C26000_1
ccgcccgctcagaaacaagaacaaaagcaaaactctccctaaatcttttgtttctttttcttcagcagtgataatggttgagcctgcaacagcaacccaagcagcagctccggtgatgcctcagctgaaagatgagcttgacattgtgataccaactataagaaacttggacttccttgagatgtggaggccattttttcagccctaccatctcatcattgttcaagatggcgatccttcaaaaaccatcaaggtccctcctggttttgactatgagctttataacaggaatgatatcaacaagattctgggtcccaaggcttcttgcatttccttcaaggactctgcttgcccgtgcttttggttacatggtgtctaagaagaaatacatttttaccattgatgatgactgctttgttgctaaggacccatcaggcaaagcagtcaatgcacttgaacaacacatcaagaacctgctatgtccatcaactcccttcttcttcaacaccttgtatgaccccttcagagagggtgctgatttcgtccgtggatatccattcagtctccgtgagggtgtcccaactgctgtttctcatggcc

SEQ ID NO: 9290 - DNA, 580 bp, Gossypium hirsutum
  unsure (1)..(580): unsure at all n locations
  Clone ID: AI054847.1
cagaaacaagaacaaaagcaaaactctccctaaatcttttgtttctttttcttcagcagtgataatggttgagcctgcaacagcaacccaagcagcagctccggtgatgcctcagctgaaagatgagcttgacattgtgataccaactataagaaacttggacttccttgagatgtggaggccattttttcagccctaccatctcatcattgttcaagaatggcgatccttcaaaaaccatcaaggtccctcctggttttgactatgagctttataacaggaatgatatcaacaagattctgggtcccaaggcttcttgcatttccttcaaggactctgttgcncgttgttnntggttacattggtgtctaagaagaaatacatttttaccattgatgatgactgtntgtaagttcttttattntcttttttcttatggatctttacatgctctgttggaaantagatctnntgatntcttggatgatcttntaggttatcttgtataatancaattctactatatggtcatatgatagaagggttggggctcttttaagatatagtaatacattctatn

SEQ ID NO: 9291 - DNA, 490 bp, Gossypium hirsutum
  unsure (1)..(490): unsure at all n locations
  Clone ID: LIB3584-020-P1-K1-E1
ggtccctcctggttttgactatgagctttataacaggaatgatatcaacaagattctgggtcccaaggcttcttgtgtttccttcaaggactctgcttgccgttgctttggttacatggtgtctaaaaagaaatacatttttaccattgatgatgactgctttgtaagttcttttgattttcttttttccttatggatctttacattgctctgtttggaaatttagatacttttgatttttctttgggtgtctctctntaagaatataggtaaattaccattcctactataccaaactatggatctttttatgattaggttgctaaggacccatcaggcaaagcagtcaatgcacttgaacaacacatcaagaacctgctatgtccatcaactcccttcttcttcaacaccttgtatgaccccttcagagagggtgctgatttcgtccgtggatatccattcagtcctcgtgagggtgttccaactgctg

SEQ ID NO: 9292 - DNA, 437 bp, Gossypium hirsutum
  Clone ID: GOSHI-09MAY01-C26030_1
gtcctgcccacctcaccaccatctatcagctgatatagttaaactgtaggccgagggttgacttgttgagcatactcgccgtccctccctccctcctccgcctatcttttatttgccacaaccgcaaaatcctatccaacaacaacattcatcgctgcatcacttcaactcttgcctttactcctcttttccttttcctaatctctgttgtctctttggctgcctgcaatagccaatttttactattccttttctcccttcaccttcgtccaattctacctacttggatacttggaaaatttgattccttttttgttttacttttatgattttttttttgtgaaatataactccaataatgaaggagaaggctgagccagtccaaaagctatatacaaggatgcggttatggggaatccctgatgaatatgtgatcg

SEQ ID NO: 9293 - DNA, 612 bp, Gossypium hirsutum
  Clone ID: GOSHI-09MAY01-C26360_1
aggaacaaccaactaagctagcccagtcaccccctccccaaaggaaaatatggcgccaaaatcgttctcatttccggggattttccctgcacttctcgcctcctcacttgctttactcctattaccgactccaatcatagccgtccacgactaccacgatgctctccgcaagagcattctctttttcgaaggccaaagatccggcaaactcccacccgaccaacgagtcaaatggcgccgcgactcggcattgcgcgacggctccactgctggcgtggacttaacgggaggttactacgacgccggggataacgtaaagtttgggttcccaatggcgtttaccacgactctattagcttggagtatcatagatttcgggaggaacatgaggccggagttaaagaacgccgttaaagcggtgaagtggtcgacggattatctgttgaaagcaacggcaaagcctggagtggtgtatgtacaagttggagatgcgtactcagatcatagctgttgggaaaggccggaggacatggacacgcttcgcacggtgtacaaaatcgacaatgcgcaccctggttctgatgtggcaagtgaaaccgccgctgcattggc

SEQ ID NO: 9294 - DNA, 438 bp, Gossypium hirsutum
  Clone ID: GOSHI-09MAY01-C26310_4
gcttccaacaaagattttcatgtcatctttgctactaattgctataagaaaatgtttccaaacagcttataaacctccatcagaaagcgacggtggtattgcgacagctgcagtggtcggtattgtgggcggagcaatgtttgctgctttgctgattttaggcatcctttggtggaagggctgtttaagacagaagagaactttggaacaaggtatttaggcagaatatcattgtactctgttgcatacactagtcgcgcaacgtctttattttacggttttccgttcttttttatattgatattcgtcacaattgatatgttatgcgactaaaaacacgtttgtgattgcaatttaaaccctgccatcccttataataggattaacatgttccacagatctaaaaggtatagagttgcagacaacttcctttacctt

SEQ ID NO: 9295 - DNA, 747 bp, Gossypium hirsutum
  Clone ID: GOSHI-09MAY01-C26310_3
gccttgcttttgcattatttgggccacaagaatctcagttgacattagactggccaacaagaatgaagatctgcattggtatagctagagggttagcttacctccatgaggaatcaaggttgaagattgtgcatagagacataaaggccactaatgtgttgcttgataagaatctaaaccctaaaatatccgacttcggtttggccaagcttgatgaagaagataatacccacattagtacccgagttgcaggaacttatggctatatggctcctgagtatgcattgcatggccatttgacagagaaagcggatgtttatagttttgggatcgtggctctcgaaattgttagcgggaggtgcaacactagaagccgcccaaagcaagaacctgtcattctccttgaatgggctcatgttttgaaggagaatgggagcttgttggaaattagttgatacagggattggctcagattgcaacacagatgaagtcatggcaatgatcaacattgcactattgtgcacaaatcccacttcttcagctaggcctttaatgtcttcggtagtgagcatgcttgaaggcaaggctgaagttcaggaatacctcacagattcaagcatttcttcaaatcgtcaaatgagtgcagagattatgaaaaagttgtatcggaaacttgaagaagatgatacaaatgttagccaaacaaggagtatgttagctgatgggccatggaccaattcttctaca

SEQ ID NO: 9296 - DNA, 743 bp, Gossypium hirsutum
  unsure (1)..(743): unsure at all n locations
  Clone ID: AI055189.1
acgattttcatgcttctaataagatcggagaaggtggttttggtcccgtttacaagggtactctagcagatggcacagtgattgctgtgaagcagctatcagctcgatcaaaacaaggaaaccgtgagtttgtgactgagattggcatgatttcagctctacaacaccctcatctggtaaagttgtccngctgttgcattgaaggaaatcaattgatgcttatatacgagtacttggaaaacaacagccttgctcgggcattatttgggacacaagagtctcagttgacattagactggccaacaagaatgaagatctgcattggtatagctagagggttagcttacctccatgaggaatcaaggttgaagaatgtgcatagagacataaaggccactaatgtgttgctttgatagaatctaaaccctaaaatatctgacttcggtatggccaacttgatgaagaagatatacccacttaatacccgaatgcatgacctatgctatatggctctgatatgcattgatggccattgacagaaaagcgatgttatagtttggatatgctctcaaatggtacgggagtcacactaaagcgccaagcagaacttcttctcctgatgctcatttgaagtatggactgttgatattgtccaggtgctaatgcacnattagcaggatgtacatgctttgccatccttatactggctagttcggtagcctaggagttattatacccgtctn

SEQ ID NO: 9297 - DNA, 623 bp, Gossypium hirsutum
  Clone ID: AI054665.1
gcggagcaatgtttgctgctttgctgattttaggcatcctttggtggaagggctgtttaagacagaagagaactttggaacaagatctaaaaggtatagagttgcagacaacttcctttaccttaaggcaaattaaagctgctacaaacgattttcatgcttctaataagatcggagaaggtggttttggtcccgtttacaagggtactctagcagacggcacagtgattgctgtgaagcagctatcagctcgatcgaaacagggaaaccgtgagtttgtgaccgagattggcatgatttcagctctacaacaccctcatcttgaaagttgctccgatgttgcattgaaggaaatcaattgatgcttatttacgagtacctggaaaacaacagccttgctcgggcattatttgggccacaagaatcttagttgacattaaactggccaacaagaatgaagatctgctttggatagctagaggggtagcttacctgcatgaggaatcatgtttgaagtatgtgcttgtagactataggccactaatgtgttggttggtaagaatctaactcctaataatccgcttctggttggccaactttttgaacacataataccacattag

SEQ ID NO: 9298 - DNA, 862 bp, Gossypium hirsutum
  Clone ID: GOSHI-09MAY01-C26330_1
gctcgagatcctattatgggtccattgcctctctgagtcccagtttccgatccgtaatcaggagcggagagatctacaagtcaaggaggcagaagggtgttactgaacattgggttcacttttcttgtgacctccttcaatgggaggcatttgatccaatccaatgcaagtggatgcatttgccaccgatgcctcccaatgggtgtttcatttttggggacaaggaatccttggccgtgggaactgagttgcttgtatttgggaaggaactgaattcccaagtgatatatagatatagtattttgacaaattcttggactttcgggactagtatgaattctcctaggtgcttgttcgggtcagctagtcttggagagattgcgattttagctggtggttgtgattctcagggtaacatcctgagcactgcagaaatgtacaattccgagactcagaagtgggagactctcccaagcatgaataccccaaggaagatgtgcagtggggtatttatggataagaaattctatgtaattgggggaactggtggagtgggaaatgatgcaagggttctcacttgtggggaggagtatgatttagagttaaaaaaatggactaaaattcctaacatgtctgtggcagctggtgaggctgagaaacctgtggcacctggggcacccccactggttgcagtagtaaacaatgaactgtatgctgctgaccatgccgacatggaggtaaagaagtatgataaggagaaaaaatcatggttgactatcggaagattgcccgaaagagctgtttccatgaacggttggggtcttgcattcagagcatgccgtgatcgccttatagtgatcgg

SEQ ID NO: 9299 - DNA, 380 bp, Gossypium hirsutum
  Clone ID: GOSHI-09MAY01-C26320_1
gaagaattgatagtcagagtactatgcccatttgacgggattgggcgtgtcattggaagggcagggagtactatcaaaagtataaggcaggcaagtggtgctcgtatcgacgttgatgatacaaaggctgatcgcgatgactgtattataactgtaatagctacagagtcacctgatgatttaaaatccatggctgttgaagctgttctattgctgcaagggaagattaatgatgaagattacgaaactgtaattatgaggctcctcgttccatctaaagttattgggtgtattattggaaaaggtgggttctattataaatgaaattcggaagagaactaaagctggtgtacgtatttcaaaaaaggataagcccaaat

SEQ ID NO: 9300 - DNA, 433 bp, Gossypium hirsutum
  Clone ID: GOSHI-09MAY01-C26210_1
gccgtatgtccggagagttgggtcgcggagactttcgttggaaagtaacgcaggtggtggcgctacccaagtatctaagaaggttgatttgtctcaggttttgtcagcaatgcttccttttgttgtcgctattaccgctgttgctgctcttgttcaaccttccactttcacctgggtatctaacgacttgtatgctcctgcacttggtgggatcatgttgtccattggaattagactttcatttgatgatttaacacttgcattcaaaagacctttaccgctatctgttggatttattgcacagtatttgctcaaaccggcacttgggtttttagttgcaaaggcattttgtttgtctccgacattctatgcaggctttatcctcacatcttgtgttgcaagggctcaactgtctagctatgctagctttttg

SEQ ID NO: 9301 - DNA, 778 bp, Gossypium hirsutum
  Clone ID: GOSHI-09MAY01-C27900_1
ggaaaaatggaaaaagaaccgactgaagatgcgatctttgatttgatcctgggagtgtggagaaatctaggccgttagcctttccaattttttattaattatcagacagtgaatacagaaagagaaatgaaaggaggcgatgaggaggtcgcagctccggctggcccgccacagccgttggattggaaattttctcaggtatttggtgagcgaaccgctggagaagaaattcaagaagttgatattatttccgcaattgaattcgataaaactggggatcatcttgcaactggtgaccgtgggggccgtgtggttctttttgagaggacagatgcaaaggatcatggtctatcaagaagggatctagaaagaacggattatccaattagtcggcaccctgagttgcgttacaagacagagttccagagccatgagcctgagtttgactacctcaaaagcttggaaatagaggaaaaaatcaacaaaatcagatggtgccaaacagccaacagtgcactgtttctcctctccgccaatgataaaaccatcaaattttggaaggtacaagaaaagaagatcaagaaaatttctaaaattattgctgacccttcgaaagctgttggaaatggaaatgttgctagttcaagtaattcaaatagcccaaaatcttttcttgcaaatggagtctcccccgacagatcctgcaaccatttgggcaatgacatctctttcccaccaggaggccttccatcgctatgtttacctgtggtaacaagtc

SEQ ID NO: 9302 - DNA, 416 bp, Gossypium hirsutum
  Clone ID: GOSHI-09MAY01-C27890_1
cttctctcatcttcacttgccttccctttaaagcttttgggaatttgggtaaattttacagggtaaataatgacaagctttatatcgactcactgttgtaattggtcggttggagtgtcggaacacgtttgcagcagcaggggaagatttcataagcctccaggactcagatgttgtggtccatattttcatctcggtgggtttagtttttcccggggtcaggctcaatgctttgctgctacttcctctcaaagtcgtgggagatgtggtcctatcttttccggcgccgtcgatgatggtggcgctgactcgggtgatgctgaggatggggatggacagaaagaatcttcacaaagcgaaaaccaaggaacaaacggcgatatacttcgggaaaaccttgaacgaatagttggcac

SEQ ID NO: 9303 - DNA, 438 bp, Gossypium hirsutum
  Clone ID: GOSHI-09MAY01-C27540_1
gacactttttgatatcagtggaaacctcatgtccggatcgatccccagatttaatcaaagtgtatgccccggcttttcctccttgagttacggacttctccaaacccgtgatccagtatttgtgtatttgtcattatttgcatataaaacgcggcatgcaatggtttttccattttctggttcgaaagctgtgttgattcacaattttggtggaaatagcttctctggttcactcccagggctgccaggtgtaccaacaagattggagaagcagattgattatgcatttttagctggcgggaacaagctcactggatcatttccgggaagcttgtttggaaactgtaataagcttcatgggttgattgctagaattggatagcaagaacaaattgtccggtcatattccatttggaatcagtgcaatttgcagatctc

SEQ ID NO: 9304 - DNA, 413 bp, Gossypium hirsutum
  Clone ID: GOSHI-09MAY01-C27710_1
gaaggtccttcaactttctgtgctttcattccttattgtgatattgtcattgaatggggcaactttagctcatccttatggagatttccttcattgcctttctcttcgtatatcaaactcttctactatttctaaagttatttacacccaaaataatccctcgtattcatcagttttgaatgcttctattcataatactaggttcgctacacccaccacccctaaaccctatgccattattacaccactcaaaacatcccatgtccaatcaacaatttattgttccaaaaaccatggcttccaacttaggattcgaagtggtggtcatgatgttgagggtgtttcttatgtttctcaagttccatttgtcgtccttgaatttttgggtcaactttcgagatgttaaagttgac

SEQ ID NO: 9305 - DNA, 392 bp, Gossypium hirsutum
  Clone ID: GOSHI-09MAY01-C27190_1
attgtgaggtagatgcctcaccattatttcttgatacaattgatcgatcagcaagacttgcttgtcattgaagctttgcattgcgtgacttaaaatcttttatcactgagtttagctcttgctttgaaattgcatttctgaaaagtaaaagtgatccgtttatcactattgaccagatcttagaaacatgtcaagctcaattagtttacttgtttatctcccctacttggaagttttactgtttaatctcagatgtgtgtttctgatcagctcaagaaggcacaccttcttgtctgtatggtagcccacaagccaaataatcggactgatgctcttgtgaaaatattggcattctttaattgcctatttgaaatgtgggaaatttgtttggg

SEQ ID NO: 9306 - DNA, 433 bp, Gossypium hirsutum
  Clone ID: GOSHI-09MAY01-C27170_1
gcaagctgggatcccccatgaggttctcaatgcaaaaccggagaatgtggagagagaagcagagattgtagcacagagtggtcgtctaggggcagtgactattgctaccaatatggctggccgtggaacagacatcatcctaggtggcaatgcagaatttatggccaggctgaagcttcgcgagatgctaatgccaagagttgtcaaaccagctggaggagtctttgtatcagtgaagaaacctcctccaatgaagccatggaaggttttatgctcattttcaatatgaaaatattttggtattggtagatgaatttaatttagattagggttgctattccaggtgaatgagaagttatttccgtgcaagctatctgacaagaacaccaagttagccgaagaagctgtagagttgtctgtcaacacttggggc

SEQ ID NO: 9307 - DNA, 641 bp, Gossypium hirsutum
  Clone ID: GOSHI-09MAY01-C27160_1
cccacgcgtcccgaaaaaaaaaaggggggagatccatggcgatttcctcagatccaagtaaacctttcctttccattcataaactctcttttaatccacttcacttctctagtcaaattcaaattctaaatccaacccattgattatatcttcaaataatcaaaacccaaatttccttgcacaaaatttgatccaaatttgtacctttttttttgaaagcagcatggaatccgaactcaaggatttgaattcgaaaccggctaagatccaacaacccgatacgacacatgacgacacttcctccaaagacgaccgccccttactcaaagccgactcctcatccaccgccgccgccgccgccaacatccacgagctcgagaagaaattcgctgcttacgttcgtaacgacgtgtacggtaccatgggacgtggagagctcccattgaaggagaaaatcatgcttgggatctccctcgttacgttgcttccccttcgaatcgtttttgggatgtcccttgtggttggatattatttgatttgtagaatttgtactatgttctctgccccgaaccagaggaggaagaagagggttatgctcacttgggtgggtggcggcgggccgtgattgtccggtcgggccg

SEQ ID NO: 9308 - DNA, 805 bp, Gossypium hirsutum
  Clone ID: GOSHI-09MAY01-C27050_1
gctctctttcattaacttaagaattttaaaagaaaaaaagtatcgtattgttgattaaacctgcttggttaatcccagattcagcttgggataatacgaattgcaattgctgaattgttgttggctagaaagggtgaaagaggcagagaagaaatcagacatgttgcagtgcatatttcttctatctgattctggagaggtgatgctagagaaacagctaactgggcatcgcgttgacagatcaatatgtgattggttttgggatcatgttatttctcaaggcgattccttcaagtcacagccagtgattgcttcacctactcattatcttttccaagtagttcgagaggggattacatttttagcttgcacccaagttgaaatgcctcctttaatgggcatcgagttcctctgcagagtttcggtcggccgctcggattatcttggtgggctgaatgaagatgtgataaaggataactttgtaattgtttatgagcttctggacgaaatgatagacaatggtttccctctcacaacagaagcaaacattctaagagagatgattgctccaccaaatattgtcagcaaagttctgagtgtggtgactggtaatagttccaatgtaagtgatacccttcctggggctacaaggtcttgcataccatggagagcagcagaaccaaaatatgcaaacaatgaagtttatgttgatcttgtcgaagaaatggatgcagttataaacagggatggggcgttggtcaaatgtgaagtttatggtgaagttcgagtaattcccatctatggt

SEQ ID NO: 9309 - DNA, 761 bp, Gossypium hirsutum
  Clone ID: GOSHI-09MAY01-C20990_1
cccacgcgtccgcccacgcgtccgcccacgcgtccgcccacgcgtccgcaaaattacaacaatggctatggctatggcaatggcagaggcgttatggcttctcttgtctcctttacttttcctctctgtttctgcccttactcaaaccaaactaaccgataacccagcggatgagttggtggctgtgcttaatgccaatagaacggcacacaagtcatcatccctcgcagacaacccaggcctggcctgcattgctttgcaatatataaaagcataccaaggtgattgtgaagctgtaggagggtctgatgccaagaagcctcccgactccgaatttgcacaaacttttgccccctactgcggagtcgacgcgtcgaccctctcaccaatcaccggccgttttcttggatgccaatccaaatatgtccagccttccgaagcgttctcaatgttgataaaaaatgaaaagagtttggaaatcctctacaacaagaaccagacagaaatcggggctgctgtgactggcactgatggtggagctccctatttctggtgtgtgctggtgagcaacgggtaagcacaacagttacctttgttctaaaagaacggcttggctgaatcacgaaaccggggtgcttccattgttccctgaataatgtccacgttcccaagtctcatccccccttgggtcacaaatggggtgttttgccgtttcagctcccatcggcggtgggaaagaccctcccgaaaattattatacc

SEQ ID NO: 9310 - DNA, 396 bp, Gossypium hirsutum
  Clone ID: LIB3083-055-Q1-L1-H2
cggagtcgacgcgtcgaccctctcaccaatcaccgggcgggttcttggatgccaatccaaatatgtccagccttccgaagcgttctcaatgttgataaaaaatgaaaagagtttggaaatcctctacaacaagaaccagacagaaatcggagctgctgtgactggcattgatggtggagctccctatttctggtgtgtgctgttgagcaacggtaagcacaacagttgctttgatctggaagacggtgtggctaaaatcagcagacctgggtgcttcagtcgtgccaatgatgattgcagcattactgatggcccatccccgattggtcataattgggtgtatgctattacagctttcattgctatgggatatgccttctgcttatgatcataacc

SEQ ID NO: 9311 - DNA, 313 bp, Gossypium hirsutum
  unsure (1)..(313): unsure at all n locations
  Clone ID: LIB3120-023-Q1-K1-B3
cggacattttactcaccattttccctcttatttcgactcttggtttcttctgtctctaatctcctcacttaactcaaaattacaacaatggcaatggctatggcaatggcagaagcggtatggcttctcttggctccctttcttttcctctctggttctgcccttactcaaaccaaactaaccgataacccaacggatgacttggtggctgtgcttaatgccaatagaacggcacataagtcatcatccctcgcagacaacccangcctgggctgcattgctttgcaatatataaaagcataccaaggtgatt

SEQ ID NO: 9312 - DNA, 466 bp, Gossypium hirsutum
  Clone ID: GOSHI-09MAY01-C20870_1
ctagtctcgagttttttttttttttttttggaactcaaaggcgggtagctgagatcgtctttctccggtttcctcattgtttttgtttttcgcagttaatacaagatggctgatggtgaggatattcaaccacttgtctgcgacaatggaactggaatggtcaaggcgggatttgctggtgatgatgctccaagggctgtgttccctagcatcgtggggcgtccacgtcacactggtgtgatggttggtatgggtcaaaaagatgcatatgttggggatgaggctcagtccaaacgtggtattttaactctgaagtatccgattgaacacggtattgttaacaactgggatgatatggaaaagatttggcatcataccttttacaatgaacttcgtgtggctcccgaagaacatccggttcttcttaccgaggcacctcttaaccctaaaagccatcgtgagaaaa

SEQ ID NO: 9313 - DNA, 804 bp, Gossypium hirsutum
  Clone ID: GOSHI-09MAY01-C20590_1
caaaagcgcatgtccttgtctgctgataagagttctccgtgagactccagctcatgatagtgcagcaagaactagcactgaacaattgcccaaagatcagaaaaatggaaaaatacgcaattctcttggttcaaaaagacctgagaacatagatgacgagccaagagatagtgacaacagtacttctcttccccatttcatgcaagccacggaatctgcaagagctaaggttaatgcaaagaactcaccaagatcaagtccagatgtgcaagacagagacatttacatcaagaagagacatcccttacctgctgctaatgggaggcagggttctccaagaatcacgcgatcagtggctaaagcccagcagggtgcaaaagaaaatggtagtaccaatcctattcatgagaaatggcaaaggtgacgggttactcggagcaacaatatgccatggaaccttttcaacctctctgatggagaacggctgattgttggtcttactatctagttttatgcctcagcattttcaccacttaagttgattcatgcatgccatctatggtttgcccgtgagagtagatctatatagaaaggagtaacatttgattgtatattactgatacccaaaccattgatattactattactcatatttgtttctaagctccccgtttgggaggtctgctcgtgtgttttgttacatggtgtttggtgtgattttattcggatttgcccgggcatgtttttgggatgttattcggagtttgagacaatgacattataaagcggagagctctgatccat

SEQ ID NO: 9314 - DNA, 379 bp, Gossypium hirsutum
  Clone ID: GOSHI-09MAY01-C20580_1
atattcaaccaaaggacgagatgataaaggggtatcagctagcactgtgggattataattatatcgttggtgattcacatttcatctacaagctggatatcttgcctcatgccattgtaataatgctataccatgccagtgtaaacagtcaaacaacaaatttgttttttcacaacatagctaagcatatgcacaactcttgacattacttgaatgtcaagaaactaaacataaaaatgcaaatgcctatgcagttccttgatccttaaggaacatgtattaacttgagatttacattgagatgctgtttgggattcccttgcctgtgagtccaccttcttttgagtaatctgaagtgttggggaaaagcaatgtgtat

SEQ ID NO: 9315 - DNA, 830 bp, Gossypium hirsutum
  Clone ID: GOSHI-09MAY01-C120568_1
tgattttccattttggaacttgtcagttccgttgatgatgaacaaatttgctatgatcatctggctttcaggacctttggggtaaatggttatgggattaactccttggcaagtctttttctggattatgggtatacccaaaaggaggaactaaggtttcctgctaaaaagttgaaggcattgtggttttctcctcccaatagttcttctcaagatggtggcagtggtgttaatgggcccttgccaagagtatttatttcagagcttcttgtggatcaacttaaccccagagcacaggaaattattagaaaatacgcccgaaaatctggtagtggaaataaatatgcagctcttgcaagtgctctgggatctttaacatgggagaagcctttgtattctgaatttcaacaattggcaggggaaagtgaatatgctgcctggacccttgtcaatgggtatgcactcaatcatgtcactatttccacacatcggctgaaatctaatttgagaaatatcaaaagcctcaatgagttcatcaaaaagaatgggttcaagttgaattctgatggtggagttttaaaagtgagtccagatggccttctgctgcaaagttcaactgtggcggattcaatgcctttcagtttttctgacggtgttgttgagtctgttccctgttcgtacattgagtttgctgaacgccttgtgctgcctcaatacaaaaatctgtctgagagtgagatcaaagagttccacaggcgagatggatctgaggttggaaacgctgatataatctttgagagcacatcgaaagagcagcttacatggagagg

SEQ ID NO: 9316 - DNA, 499 bp, Gossypium hirsutum
  Clone ID: GOSHI-09MAY01-C20520_1
tcctctcgtacggactactagaaccctaaccaaaaacaagcctcttcctgaaagaaacgcaggtcttgaatttgtttgcttggggcttgtaaagaaggagaagaaaaagatggcagatgatagcacagctacctgcgtagatatcctcttagccatcattttgcctcctctcggtgtcttcctcaagtttggttgccaggtggagttctggatatgtcttgtactcaccctgtttgggtacatccctggtattatttatgctatctatgccatcaccaagtagtcctctaatcccgtccttctcatctgtggagatttggagtaggattctggttttgtttgaatatgtgtcggttatagtattttatttcaattaatattttgtctgttaatttgatggtgatgtaaagcttgttgttatgttatgatgatgatttatattgtggggaggggggggggtgtcccagggtcatgttacgtttgtgtcgatctactgatc

SEQ ID NO: 9317 - DNA, 473 bp, Gossypium hirsutum
  unsure (1)..(473): unsure at all n locations
  Clone ID: uC-gsflnu33B113e05b1
ccgccgtcttcttctccgaaaccagctcccaagatctctccgaccaccgctcccaccgtttctccaacagcttctccgccttcaaccgcctctcctcctgctcctcccacctctcccactggttctcccggcgctacttctcctacaacctccataagtcagcctccggcttcgtctccaactgcgccaagtgcggcggccctgaaaacagtcactctcgccgggtctgcatttgcagtcgttttagcagccgccgctttgttgatctagatctgaatttgaggagaattttagatttgatgatttttaaatttttaggcccttttttaaattcttatttttagtatagtagtagtattttatttcttctttatttgatgtttagttaattttatttatttattggtaatttttatttacaagtgtccggcggtnnanaaaaaatnnaaaataaaaatatatatttaacaaac

SEQ ID NO: 9318 - DNA, 374 bp, Gossypium hirsutum
  unsure (1)..(374): unsure at all n locations
  Clone ID: uC-gsflnu33B080h02b1
ttaccggttcgacccacgcgcccgactanacttccgcacacgcgaccgcgcggagggagggccttttgaaggcttttttccattggccaaaccttccgcgcgctggcttctccttgccctcattgccggttgtgctctcggccaagctcccagctgcgctccaaccatgtcaccgccgtcttcttctccgaaaccagctcccaagatctctccgaccaccgatcccaccgttactccaacagctactccgactttaaccgccactcctccatgttcagcccctgaatcttctccaactttcctctcctgctgctcctcccaacctgtccactggttctcccggcgctacttctcctaccaacctccttaagtca

SEQ ID NO: 9319 - DNA, 476 bp, Gossypium hirsutum
  Clone ID: GOSHI-09MAY01-C20740_1
caccgggtggaatcattcttcatgggaagagagctacggaagaggccctgaagatgatgaaactcctcaaattcctgttataactggtgtccgatctagaccggtgagtggggaattcccaggagcaggtgctcttgcttatggcgagcatatgccaaatgcttctcttcataaacgagtgcacccatatcccatgtctgaaactgaaggagctgaaagatgggatgataagaaagagggaggatggaaagagaggatggatgattggaaaatgcaccaagggaatctcggtcccgaagctgatgatgcgtatgacgacatgtccatgcttgatgaagctaggcaaccactgtcaaggaaggtgccaatagcatctagcaagatcaacccttaccgtatggtgatcgtggctcgtttacttatcctggctttcttcctccgctatcgaattttgaacccggtgcatgatgctattg

SEQ ID NO: 9320 - DNA, 468 bp, Gossypium hirsutum
  Clone ID: GOSHI-09MAY01-C20770_1
gtccgcccacgcgtccgagaagaagaagagagatgaaaatggtttctattgagttatcaccggagttgattcccggtttacctgaggaaattggactcgattgtttgattcggtttcattattctacttacagagtcgcagctcgagtctgccgacgatggcaacagcatctccaaagcagggagttgcactatctcagaaagcaagccggatatacccgtaaagcggcttgcttagttcaattactcaataacacctccgattctgctgggtcaaagccggttggtccgcccacatacggccttacagtttttgatcctgtgagtggaatctgggatagaattgacccggttcccaagtacccttatggtcttcctttggtttgccagatagcaagctctgaaggaaagctagtggtgatgggtggatgggacccctcaagttatgacccagtgcgggatgtcttca

SEQ ID NO: 9321 - DNA, 694 bp, Gossypium hirsutum
  Clone ID: GOSHI-09MAY01-C20630_1
cccacgcgtccgaacttttgtctactcagcagctaccgtaaagcagatgttgcaggagaaaaagtccagttcatctagaccgttaaatgttgcagctgagaaggaccgactgagaagggacctagaaattgcacaaagcaagcatgatgatgcagaggttgagaggattaagaagagactgcagcaactagaggcctcccggcagtcacaggagaaagatgccaaggctgttaggttggctgagatgaaccgaaagaacagggttgagaatttcaaaaatgcatctggattgaaacctgtaaatactggtttaaaagcaggggaagctgggtatgatccattttcgaggaggtggactagatcaaggaactactataatgcaaaggctcctggaggagatgcggcagcggtagctaatggtgacacaaacggtgcaattggcagtggaaatggcaacgatgcaggggctgctgctgctgaggctggcagggcagccacagcagctgccttgcaagaagctgcaggtgcggggaaattggtggcacaaatgcccctgtcgatgaagggacagaatctaacatgctacatgactttgagcttccgatctcattggacgtgctttcggaagttcggtggtcacaaggggcccgcggggctggattcatggccaggaaacaaaggatagaagcaaccg

SEQ ID NO: 9322 - DNA, 427 bp, Gossypium hirsutum
  Clone ID: GOSHI-09MAY01-C20180_2
ccccccttcaagtttttttttcttaaaaaaaaattcaaatttttttttttcgaaaagtatgatcaaggttagatgagatcaggaaaagcatgttgttggtacattccacggaagaaaaatgagatgcaatgctaatcttacaagtatgtataatagagaaactatattatccaaattttgcggccatagaaactctgtaatagctcttctttattactggtacaaatatttagtaggcctctcgacccatcaagattttcatgcacttggaatgaaaaacacacgaaaaaacctcacaaagataatgcgtagggaaccttcaaccgccggcatgatagagcttcaatgtagaactagcagcaccatattacaagcctcaatatggtacaatcttccatatctggttatctcccttgttccattgcca

SEQ ID NO: 9323 - DNA, 611 bp, Gossypium hirsutum
  Clone ID: GOSHI-09MAY01-C20180_1
tcttacatttttgtaaaaaatcataatacgtacattatacatttttgaggaactttcatttgtacagcttatttgtagtgtttgtttggtggtgcatgcatactattttgcggtttcgaaaacaggcatgggtctccaaagaagtggaataagttattgaataatgaatttttcgagacgtatggtaatgcttagatgagtccaggaaatccccggaagtaaaaattgaaatgcaatgctaatcttacaagtatgtataatagagaaactattttatccaaattttgcagccatagaaactctgcaatagctcttctttactactggtataaatatttagtaggcctctcgacccatcaagaattttcatgacacttggtatgaaaaacactcgaaaaaaacctcacaaagataatgcgtagggaaccttcaaccgcaggaatgatagagcttcaatgtagaactagcagcaccatattacaagcctcaatatggtacaatcttccatatctggttatctcccatgttccaatgccacagcactatagtagaaccattttggattccaacaaatctctcatcgccgtggaaagcatcgcgtacgaaataaa

SEQ ID NO: 9324 - DNA, 1263 bp, Gossypium hirsutum
  Clone ID: GOSHI-09MAY01-C20150_1
cggattgtcccaagtattttcagcaatcagatcaaagcagttctaacacaatgggtaaaaacagtgacggctgtacaaaatataggaagataaggcaaaacacaaacggtgtaaggagtttaaagatcattctgataacagttttcagttttagtttttgagaggaaagccctacaagacatcaaatatcaatccatcattcttcccctcagcatggctgccgctttcctcacttgcctcacgggccctaagatgaataccttgtccggtgggcccttggcacccccaaaatgaatttccgcattgcaagactccttaattgacaagatggaaaccccttttcttccaatgacacgtcccatcttcccttgcggaacatccagaattgaaagtatttcttcttcaggagcatccccctccaccatcacgttatctggaataggaggaatagatggccaatcagcatagttattatcgttgatgcagaaacatcggcaatacagagctccacgaactgcaaggtgccacaaggatcgttcattcagtttcttcatcatcatgtggtagatgtatagaagaaagcggacatcatctgcagctgcacggaccatgagctcagataatggtctgtatttccaaaacttgggatcctgcctaaggaggagacgaacttcttccttctcctggtaagatattccgcaatagcgtggatctgcaaggaggccgacaaatgatatgttgtcatcaggcaatctcgtctgtccttcttgttcctctaaaagagaataagcaatctgtgtgtccatgacattgtttaacttgatgccaaattggaagtacaatgcctcactatctcgtttgcaatcgtgaataactttttggatgtaactagactcaagtgcaggcttacaggcatttataagcacttctccaccttcaatggcgtcaactaaatatatggcatcctgaaatgcaagctgcataatacaaagagtgccattgcgacaaaggtcaacgccctcacagtcaaaacctacaaccaactgcttctccggtgaagggttcaagaactccgccggcagctgagaagcattggtcactatatggatagggaccggagaagcttcatcgtcaaatggattgccacctgagtcagatgggagaggaacgtgagtgcgatgagaaggaggatgattaaaggaagccatgcgatcgaaccatccaagcagatcgttttattctttttttttttccccccgcgcg

SEQ ID NO: 9325 - DNA, 543 bp, Gossypium hirsutum
  Clone ID: LIB3829-018-Q6_N6-H12
aacaatgtgattagaccatataatgatattgggcaataagtcgctataaagttgaatagtgtgttgaaccatctctaatcttaatttttcttgagaagactagatttcaccaactctttggctaatggagccattcttccacagattcaaagtggcagttgaacatcacaattgtccatcacggatatgtcccaagtattttcagcaatcagatcaaagaagttctaactcaatgggtaaaaacagtgacggaagacatcaaatatcaatccatcattcttcccctcagcatggctgccgctttcctcacctgcctcacgggccctaagatgaataccttgtccggtgggcccttggcacccccaaaatgaatttccgcattgcaagactccttaattgacaagatggaaaccccttttcttccaatgacacgtcccatcttcccttgcggaacatccagaattgaaagtatttcttcttcaggagcatccccctccaccatcacgttatctggaataggaggaatagatggccaatcagcat

SEQ ID NO: 9326 - DNA, 339 bp, Gossypium hirsutum
  Clone ID: uC-gsflmaxxa093g11b1
ggatgatgttcgtctcctccttaggcaggatcccaagtgttggaaatacagaccattatctgagctcatggtccgtgcagctgcagatgatgtccgctttcttctatacatctaccacatgatgatgaagaaactgaatgaacgatccttgtggcaccttgcagttcgtggagctctgtattgccgatgtttctgcatcaacgataataactatgctgattggccatctattcctcctattccagataacgtgatggtggagcggggatgccattgtctatgaaatacgtttaggctcctatgatctcacctgtaagaatggtggctataactgctatt

SEQ ID NO: 9327 - DNA, 679 bp, Gossypium hirsutum
  Clone ID: GOSHI-09MAY01-C20170_1
aaatgttgttatcaaaaaaaatgaaatttccccaaaatttattgatatttagtctgcttttcaattaaaaagatgtcttgtagcggtaaccacttacatttatttgagattaattgaaggcaaacagggcgagtacattttccttttattttttactcttttttttttatttttttttttttttttttttttttttttttttttttttttttttttttttttttcaaaagaagttaatcaagaatgtccaagttaaacatacaaggttacaacatatcatgcaatgcatacaacagacaaggttagctactagggttaaaccacaacaaaatcaacacattgaacaacacccacaacagccacaaaccagtgattgtagctgattacaaagcaaacaaaaactaatgtgtattttcatcagctactactttaacaattgtatgacttccacaagtttattaaactggccatgactcgcggaagaaaccaggccagtcaccggtgacactgccaatgcagctatcagtccttcatgagccgacaatgtctttgtcttaccctccgtcatattccatagctccaaagactggtaacagccaatgaccagcaatgaaggacttgtaagatggaaaacacactagtgaaacttgttgccattacaactcaattcatgaacaca

SEQ ID NO: 9328 - DNA, 477 bp, Gossypium hirsutum
  Clone ID: uC-gsflnu33B091a02b1
tgtcttttcttgtgtctgttttgttctacatcgggtcagggtcttgagactgttgagatgagccattttatcacccctgaaaacattgaaagacttaagcaggcacaagaagctgacagagttcaagtatttttcttatacaaactatagtcttggtctgttcaaacttcaaactgtctatttcttttacgattttcgaaaatataacgtataaaaccatagaacatcagacctcaatactgcttgaaatatcttagtatggcatcgaaaaaaattcttctgcttgtttatccttgtgttggaaaatgtttccccagcattcaacttattcttgtccaaagtttgattttgaaccgatgcttcaagttttatgtctttggtctttgttttaatcttcagcttgattacactcaaccaattccaaaggaggtgccaaaagaagctgctgttgctgatggtgatagccagattggcact

SEQ ID NO: 9329 - DNA, 425 bp, Gossypium hirsutum
  Clone ID: uC-gsflnu33B005d03b1
tttcacgcgtccgatttgatggtgctgaggccttcgcaagggaacaaggtcttgagactgttgagatgagccattttatcacccctgaaaacattgaaagacttaagcaggcacaagaatctgacagagttcagcttgattacactcaaccaattccaaaggaggtgccaaaagaagctgcagttgctgatggtgatagccagattggcactgttggatgtgtggctgttgacagtgaaggaagtttggctactgcaacatcaactggtggaatagtgaacaaaatggtaggccggattggggacacaccaatcatcggtgcagggacttatgcgaaccatctctgtgccatttctgctacaggcagaggagaagcaataatccgtggtaccatcgcaagggatgttgctgctgttatggagttc

SEQ ID NO: 9330 - DNA, 495 bp, Gossypium hirsutum
  Clone ID: GOSHI-09MAY01-C120008_1
tgttttgagagcgtcaacagaagattgcgtcattagtggttatgagattccagaaggtaccaggctctttgtcaatgtgtgggctcttggtagggaccccaatcaatgcgagaacccccttgagttcataccagagcgatttcttagtgaagagtgcaggcaaggcaagaaccagtttttggatgtgaggggacaacacttcagcctgttgccatttgggagtggaagaagaagctgccctggagcttcgctggcactacaggttgtcccaacagtccttggcataatgatacaatgctttgattggaaggttagagatggagcacatggcactggtaatatggaggaaaaagctggaatgactcttcttagagctcatccattggtttgtcactccagtcacaaggctttctccatttccgccagcatgagtattccgatccagaccctagcttccttgcagacttccttggactctatttaatatctagtaaa

SEQ ID NO: 9331 - DNA, 363 bp, Gossypium hirsutum
  Clone ID: GOSHI-09MAY01-C20350_1
gaagtttgctcggagaagtgtgagtgatgctgatatccgaaagtaccaagcattcgcacaaacgttgcagcaatcgagggggtttggaagcgaattcaagtttgcagaaaccggttccagggctgcaacatctgatccttttgcaactacagcaggtggagctgatgaagatgatctttacagttaaaattgctttcatttgagggtttcttttttaaaagaattttaatttaatccattatggtaacaattattgaactaaaggagcctttgcttgtggcttacgcatcggagtccaaaataacagtttttgttgtttttggaactgagaattttacaattgtctatttttaaatcaatttc

SEQ ID NO: 9332 - DNA, 733 bp, Gossypium hirsutum
  Clone ID: GOSHI-09MAY01-C20360_1
attatttttattcttcagtctcttcggtctctgtcgccgctacccatcacttctaaaacccttaagctatttcccgcctcaccggccaccgctgccgttgctcctcacctgcgccttcataagtcaacgtcttttattgggaagatgatggcggaagaggaaggacagtcattgccgtacgtatcagagatagtattgaagaaaaggaaaataagagatgagttagcgattacgaggaggacccagttggagttgggtaaatacggagccaagaagagcaagaagcaatccgatgtttctgacatcaaaagacctgaacaattaattaaagagttcagagacaaggaattggacctgatcagaacgaaacaaagggcaaagaggccaaaatcaatgataccaacgataaaatcaaagttgcttttcattatccggatacaaggcaaaaatgacatgcatccaaaaactagaaagatcctatacaacctgagattgaggaaagttttcagtggagtgcttgtgaaggccactgacggtgttatacacatgctgcagaaggtggagccgtatgttacttatggataccctaaccttaacaatgtgaaggagctggcctacaagaagggctatgcactgattgacaagaaagcaaatcctcagaccgataataacatcattgaacaaacattgggaaagcattgcatcatatgcattgtagatatcatacatgaaa

SEQ ID NO: 9333 - DNA, 460 bp, Gossypium hirsutum
  Clone ID: uC-gsronu33B040b02b1
accatacaataaaatcaaatttgcttttcattatccgtatacaaggcaaaaatgacatgcatccaaaaactagaaagatcctatacaacctgagattgaggaaagttttcagtggatgttttgttatattattcttatttgtacttatcatccttttcttatttttttccttttcttttttggtctactctacattctttattcttttttttttttcttttattttacccttaattacatttttttattttttatttattttttttatattctttctcttcttcttttgtttttttaattttttttatattactattttcttttttattctcttattttttatttttttcaatcttattatttttctttctcttttattctctttttttttatatccttcatttttttcttttattttttttttttttttcttatttttttatattcttttttttttttt

SEQ ID NO: 9334 - DNA, 575 bp, Gossypium hirsutum
  Clone ID: GOSHI-09MAY01-C20300_1
gggaagctgaaaatcaactaatagccaaaagaaatcggacccaacattgaataaggatgaacagtagtgaagggaagttgaaatcatcgagttccgaattggatttggatcgacccaacatcgaagattatctcccttctggatcttccattcaagaaccacatggcaagcttcgcctgcgggatttgcttgatatttctcccgctttaactgaagctgctggtgctattgttgatgattcattcacacggtgttttaagtcgaatcccccggaaccgtggaactggaatgtgtatctgtttcctctctggtgttgtggtgtggtatttcggtacttgattttgttccctatgagggctttagttttgacaataggatggataatatttctgtcatgcttcattcctgtgcactttcttctcaaagggaacgataacttgcggaaaaagatggagagggcgttggtggagctaatctgtagcttctttgttgcgtcctggactggagttggtaagtaccatggaccacggcctacatgcggcccaagcaggtgtttgtggccaatcatacttcgc

SEQ ID NO: 9335 - DNA, 530 bp, Gossypium hirsutum
  Clone ID: GOSHI-09MAY01-C21960_1
cccacgcgtccgctttgctcttctttttggtgaatcaaattaaatggtgaaaagagaaaagttatataaacataaaagattttcagtggctgcaccttcgaagaaagaaagttggtcctttctcttgcattcttacaaagaagcaaaatgcagaagccgccgccacaatcagtagactttgccctaaagcagacctcacccaacatcggggccgggcagtcacccgtgataagctttcgtgcacctatgaccttgtggagcaaatgcaatacctgtacgttctagttgtgaaggctaaggatttacctggaaaagatgtcactggtagctgtgatccttatgtggaggttaaacttgggaactacaagggagtaactaagcatttcgagaagaagagcaatcctgaatggaaccaagtatttggattctcaaaagaaagaattcaagcttctattttggaagtgtttgtgaaggacaaggatgttgttgtagatgatttaattggcagggttgtgttcgatgtcaatgaa

SEQ ID NO: 9336 - DNA, 442 bp, Gossypium hirsutum
  Clone ID: GOSHI-09MAY01-C21850_1
gagagagagagagagagagagagagagagagagagagagagagagagagagagagagtttttttttttttttttttacagtacattcatgattatcattcaatgacaaaacttggtacaatccatacataaactacacaaaaattttcactctagttttattctttcatgtgcatctccattttgcttgttcatacaacatccaaacaaaagacttcataagagcaagaatttacatgtataatctagacaaccacgcatcaaagaaggaacgggaacacttttcttttcggagagggggttcagcagttgatgccacattgtgtggtgtctggaccctttgtttttaacacaaatttttcaatttttacctatatctattataatatttaactcagcattacttaccatttttcaaccatttttttctttctttttttttc

SEQ ID NO: 9337 - DNA, 473 bp, Gossypium hirsutum
  Clone ID: GOSHI-09MAY01-C21490_1
cttctttttagactctatacagagagaaatcgcgagagactctcattgtactttgatgtccttcgctcagctctataatgtctccaaagctcctcgggtcctctcctactctttcttctttctttgcaggtggcctttgcgtttcttgcgctcataggtgctagcagttgtgtgatctcttggggcatcctactcaggaagcttgatgggttccagattcccatctcatcaactcagcagtgggctttatgtgtcaggcaggaaagagcagcctaaagaaaggactcctaccatgagctcagtaccaatgccctatactggtggagatattaaaaaggcgtgaagaactggggaaaatgtgcgatatccctgtggatggttctaaggcaaggaaatctgggcctataagcagcgctccttcaaggactggctcttttggggttgctgcttcgcattctggaccgatcatacct

SEQ ID NO: 9338 - DNA, 550 bp, Gossypium hirsutum
  Clone ID: GOSHI-09MAY01-C21440_1
cccacgcgtccgtgcaaatggtggtggagcttcttctagaaggaccactatagcatctttgcctagcaataagccggcaaagtctggtcctggaaatacggctgctaagccctcttcatcatccgaatcagttgattcaaagccaatagcagctacaatgcagagcaaagaggacgatgatgcccattccactacttctgccacctctcgtagcactaggaggagtagtgggtcaggattcaccttcaggttggaggaacgtgctgaaaagaggaaggagtttctttcaaagctagaagagaagatccatgctaaggaagtcgaaaagaataacctgcaggcaaaatcaaaggagaaccaggaggcggaaatcaagcaattaaggaagagcttgacttttaaagctacaccgatgccgaatttctacaaggaacctcctccaaaagttgaacttaagaagataccaactacgcgtgcaatatccccaaagctcggaaggaacaagagtaatgttgctgcaacaaacaacccttcggaagttgatggttct

SEQ ID NO: 9339 - DNA, 666 bp, Gossypium hirsutum
  Clone ID: GOSHI-09MAY01-C21470_1
ggaggctcgtaaacgtgaagaggctgagaggcggaggaaggaagaagctgagcacaaagcaaaaatggatgagattgctgaaaagcaaagacaaagagagcgtgaattggaagagaaagagaggctgaggcgagaagctctcttgggaagggcactggaggggatctctaggccttctgaaattcctgctgggtcccactcaaccgagcctgtcgttgcggctccagctgctgctgctgctgctccagctcccgggaaatatgttcctaggttccggctaaggcctgaaagctctggtccagctccaccttctgaacctgatcgatggggcaagccagcaccgttggagcccgaccgatgggctgctggcagcagggctcctccatcgcaatctgatcgctggactagtggcagtagggctccacctcaggattctgatcgtttggcaggtggtggtagcagagctacacctccagattcgaatcgttttggtggtggcagtgggagcagcaaggcagaaccctggcgaccttcaagggccaggaacccacaacgcggttgaaccggctgctgggttggaatgaatgcagaaatttttgtacttgggaactatttatggttgtcaatgacaaatgacaaacagctttgaggcatattggtttttgg

SEQ ID NO: 9340 - DNA, 835 bp, Gossypium hirsutum
  Clone ID: GOSHI-09MAY01-C121428_1
ttacttaccaaaaaatgaattcccagtcctggctggaattcctcttgtttctctccctttcctccctattcctttccctttcctcctccactaacgacaccgacaccctcactctcttccgccgtcaagccgacactcacggcaacctcatctccaactggacaggccgcgacgcttgttcctccgcctggcacggcgtcgtttgttcctcaaccggtcgtgtcatttccctctcactaccttccctttcccttcgtggtcccattgctgctctttctcttctagaccaacttcgtatcctcgaccttcaaaacaatcgtttgaacggcaccgtctcaccgttaactaattgttctaaccttaaactagtttatctttccgataatgatttctccggagacatcccaccggaaatttcgcgtctcaaaagggtgctccgacttgatttatcaaacaacaacatacgaggcaatgttcctaaagaaatctctggtttgaaacggcttattactctcaggcttcaaaacaatgcattaaccggcgaaatcccagatttcttttcttcttttaaaagcttaaaagagcttaatttaaccaataatgagtttttcgggcggttacctggaagtttactgaaaaaattcagtgaaaaaagctttgtaggtaacgaaggtctttgtggatcaaacccatttccggtttgttcttttacaggttctcctccgttggatacgccgacccaaacagttccatcgaacccaagttcaatgccgagaacacctataattgaacagagagacccaaagcacataaagggttaacccctggtgctata

SEQ ID NO: 9341 - DNA, 622 bp, Gossypium hirsutum
  Clone ID: GOSHI-09MAY01-C21430_1
acgcatttttctcgagctctatgtacctgggctttattgggttgcttcaaaggggacccaagactatataatataggtcctaacagatttgcatatgaagagaaaatatctctcgttatactaatactaacattattactccataatactactgaatataatttaaatccaaaacatcaaccatatcgataatctttgatgtgcaaatagcataactacctcacttcatatatatagatctgctactagaactaaaattcaaagccgatttaaaatgaattatatagaaaaatgaaaatccgaaacactttctagagcatccatagccgtaaactcatggaaacgccgtaacaagatgcatcatactcagagcacgagagtggagccgaagagcagagccacggcggcggcgaaaacagagacgaatgagggagtgatagagccggttcctgaggtaggacttggagctggagcttcagcagccatggcagaagccattagagcaaaaacagagacgaaaacaagcaaaaaaaattccattgaggaagccattttttgatgaaaaattgaaattctctctttaagcgataaatcgaaaggaagaaaaatatttgaaattttt

SEQ ID NO: 9342 - DNA, 390 bp, Gossypium hirsutum
  Clone ID: GOSHI-09MAY01-C21670_4
ggctagtgaaaacagccttagccaagcagccccatggccctggttgtgtattggtacgatttcatttgttttggcgttgtagcggctgccttcatcgggtcattatgggtactatggaagaaagaagccgcgtctagatgcgatgaggaaagcgtgtacgagagcctattagaggctcgaccggacgctgacggctttatacgtgccacaccgagggctcatgttggttccaaccagttatggaccagttgttggatcagggtgcaccctggatggctagtgctcactcgtttcgtttcattcgcggtcatggcggggttcttggtgtgggatatagtcgaatgggatgcttccatctttgtgtactacaccgagtggacatttgtattg

SEQ ID NO: 9343 - DNA, 490 bp, Gossypium hirsutum
  Clone ID: GOSHI-09MAY01-C21670_2
gcgtcatcgtcccgtttttatcaaactcgcaccttggccttaacacgttaatgggccgcgcgcccgctttgaatgctatgttccttatcctagatacccttcttaatagccttccatttccttggttccggcttgcatatttcgttcaatggagctgtctgtatgttgttttccaatgggttcttcatgcctgcggttttacatggtggccatatcctttcctggagcttaatacgccatgggctcctttatggtactttgccctggccctggttcatatcccctgctatggaatgtatgcacttattgtaaaagcaaaaaaattcgatcctcccaagattgttccctcatgctttggttagatcatactagttttatttctttgtttcagatcaactggttttgtttatggtaaattctgttttggatgtatgctttctttctttttctggcatatgaagaaggggatatcattcctcagattcattcc

SEQ ID NO: 9344 - DNA, 889 bp, Gossypium hirsutum
  Clone ID: GOSHI-09MAY01-C21670_1
gtgaaaacagccttagccaagctgccccatggccctggttgtgtattggtacgatttcatttgttttggcgttgtagcggctgccttcatcgggtcgcgttcgccacgcgtccggaaaggaacagcgtctagatgcgacgaggaaagcgtgtacgagagcctgttagaggctcgaccggatgccgacgggtttatacgtgcaacaccgagggctcatgttggttccaaccagttatggaccagttgttggatcagggtgcaccctggatggctagtgctcactcgtgtggtttcattcgcggtcatggcggggttcttggtgtgggatatagtcgaatgggatgcttccatctttgtttactacaccgagtggacatttgtattggtaatggtctactttgcgctggggactgccatatctgcttatggatgttgggtgtgctttactacaccactacctgaaaatagtttaagggatgaatttgtaaaaacggatgtggaagagggtagaattgcaaattctgtaacttatcaagccaaaaatgtttggtgtaaaatcaagttgcaaagtcactatgctcaagaagagtttcaaagaagggcaggattttggggttatcttatgcgaattatatatcagacatgtggaggtgctgtcatcttggcagacattgtattctggcttgttattgttccatttttatcaaactcacaccttggcctgaacatgttaatgggttgcatgcacactgtgaatgctgtgcttctcatactggatactcttttcaatagccttgtaagtattttgcacctctttttattataagtaaactacacttaagctattaaactattaataagtttacgttttgatcactcaattttaaaa

SEQ ID NO: 9345 - DNA, 408 bp, Gossypium hirsutum
  Clone ID: LIB3493-018-P1-M1-E7
ggattttggggttatcttatgcaaattatatatcagacatgtggaggtgctgtcatcttgacagacattgtattctggcttgttattgttccatttttatcaaactcacaccttggcctgaacatgttaatgggttgcatgcacactgtgaatgctgtgcttctcatactggatactcttttcaatagccttccatttccttggttcaggcttgcatattttgttcagtggagctgtctatatgctattttccaatgggttcttcatgcctgtgggtttacatggtggccatatcctttcttagagcttaataccccatgggctcctttatggtacttctccaatggctgtggtacacatcccttgctatggaatatatgcactgattgtaaaagcaaaaaattcaat

SEQ ID NO: 9346 - DNA, 889 bp, Gossypium hirsutum
  Clone ID: GOSHI-09MAY01-C21140_2
ttccgttaaacttgatgacactaaaggtgaaccggcgaatttagttgctgttgactcccctcgagtagaacatgaaccatgcagattatccccagaagcctctcctaggagccatatgacggttccggaatcccaaggaacgccttctagtcaagtatctataaaaagtaaaaagaagaaaactgaaaagagtggtcaaaagcgcaagtctttttctactgctaagggttctccaactgcggatcgtaatagtggtgccaaaagtagtacggaacaaccatccaaagatcaaagaagcgggaagagacacaattcttttggttcaacaaaacctgataacatcgatgaggaaccaagagatagtaacagtagcaattctcttccccgtttcatgcaagccacggaatctgcaagagctaaagttaatgctaataactcaccgagatcaagtcccgacgtgcaaaatggagatctttatatcaaaaagagacattccttacccggtgctaatgggaagcagcattctccaagaatccaaccatcgtcgggtgcaaaaggaaatgatagaaaatggcaaaggtgaaggcttgtatgcgaagcaaccttattaacatgttatcatggtaatcgacatttcggatcacaaaccggtgcagattgttggtctttactatctagttttatatatatacacacacatatatatacatattatcatgtaaaactttctgcatggatagtatgcttgtatgtttggttcaacagtgtattgtgtgatattattgctttcctgcaccatgtttttggaatgtcttttatgagtattggtcataaagtctttgttactatcacgcgcaggccggatgttaataacgttcatgcagtaagt

SEQ ID NO: 9347 - DNA, 907 bp, Gossypium hirsutum
  Clone ID: GOSHI-09MAY01-C21140_1
ggggcggtcggcccctcgagtcgacgtacgaaagcttgaatcgattcggcacaagactgaaagagactcgctggatcaaacaattgaaacagaggctcattgtcttgatgttggagttgaatctttggatgccgtgttgtcaggggcagatacaataagcaggtcaaaggagccaagcatcacagaaaatccagtcctacatgatcggaagggtcaacacgatggctcggaatgtggcaccgaactttctgtcacttccaccctcgattcacccgatagatatgaagttggaaccgtagaatatgagaatggagtcaaagtttccgaacaagaaaattgtagttctaacggtgccaaggatttggatgtcaaagaaaatgctacaattgcaatcctggtgcctggttcttctctatccattgctaaccagcccaataaacttgatgacactaaaggtgaactggcgaatttagttgctgttgactcccctcgagtagaacatgaaccatgcagattatccccagaagcctctcctaggagccatatgacagttccggaatcccaaggaacgccttctagtcaagtatctataaaaagtaaaaagaagaaaactgaaaagagtggtcaaaagcgcaagtctttttctactgctaagggttctccaactgccgatcgtaatatggtgccaagtaatatcgaacaaccacccagatctaagaagcggaagagacccaatctttggttcacaaaactgaatactcgataagagcggagatattaccgtttcattctcttcccgtttcatgcaaccacggaatctccaaaacctaattatgccaataatccccaaatcagtcccacattcaaattgaaatttttttcaaaaaagaattcctttcccgtgctt

SEQ ID NO: 9348 - DNA, 371 bp, Gossypium hirsutum
  unsure (1)..(371): unsure at all n locations
  Clone ID: LIB3083-059-Q1-L1-E6
ctcaccaggatagngattagaatctaatcacctattttgggggcgggtttaantacgaggcgggcctgcccacttcttcantaacangtgatttggagcgaactcggattgacaacatgagcacattctacctgaaagagacctcgctggatcaaacaattgaaacagaggctcattttttngatgttggagttgaatctttggatgccgtgtcgtccggggcagatacaataagcaggtcaaaggagccaaacatcgcagaaaatccagtcctacgtgatcggaagggtcaacattatggctcggaatgtggcacctaactttctgtcactttcactctcgactcacctgataaatattaaatttgaacc

SEQ ID NO: 9349 - DNA, 378 bp, Gossypium hirsutum
  Clone ID: GOSHI-09MAY01-C121098_1
tcgttggaactggcggacgatgatatccaagggattcaattgttgtacggcactaatcctaactataacggttccaccacttcgaatacgcaggagagagagagtagcgacggcgttccccgttatctgggtccacggtggggccttgctctattcttggccgttggatttgggtctttatttttgtagattctttatttcgtgctctgttgattatgaataatttatagacatacttcttattttattttttttataaattttagcggttggtcctttctatgtgagatttatcaccatgccgcgccatgtacattctcatttgtgttatacatatacctactgatttgttgtagttaaaaaaaaaaaaaaaaataa

SEQ ID NO: 9350 - DNA, 718 bp, Gossypium hirsutum
  Clone ID: GOSHI-09MAY01-C21060_2
gtccctcgcgtccggtcctggtggttttcccataactcgtcctggtgctgggggtttgatgcctggaatgccgggaactcggagaatgcctggtatgcctggaatggaaaatgataactgggaggttcctagaacacgatcaatgccaaggggtgatggactgggtatgctacctggagggcgtgttccttcaccttcaatcaataaaccaacttcagtgaatccaaggttgttgcctcaaggtagtggtgccctaatgagtggtaggacaagtgccctgttgcagggaagctcatcccctcctgtggcacaaccttctcttcctgccaaacctgttctggtggctgctgtgtctccagttttggagaaaccagttacaccagcttcaagactgaatcaagatgaacctagtagaaaaacgaaggcactgttggaggaatatttcagtgttaggctgctggatgatgcattgcagtgtgtggaggaactaaaatctccggggtactatcccgaggttgtgaaagaagcgatctccattgccttggagaaaatcccaccttgtgtcgagccagtttcaaagcttataaaatacttgtttattaagaaagttcttaccgctagagacataggacggggtgtctgctctatgtgccttgtttgattatattggcattgatttaccaaaagcaccaaataatttccgagaaataatttggat

SEQ ID NO: 9351 - DNA, 1333 bp, Gossypium hirsutum
  Clone ID: GOSHI-09MAY01-C21060_1
atcgtactctaggtaacattcgtggaattggggagcttctgaagcaaaaaatggtacctgagaagatagtccatcacatcgtgcaggaacttttgggccatgatactaaaggctgccctgtggaggagaatgttgaagcaatttgtcagttcttcaatacccctgcgtccgcagcttgatgagagcccgaaatgcacggcgcataaatgatgcgtacttcaacagactgaaggaattggccacaaatcctcagcttgctccgagactgagatttatggttcgtgatgttcttgatctgcgtgctaacaactgggttccaaggcgtgaggaggtgaaggccggaacaattactgaaatccattctgaggctgaaaagaatcttgggctgcgtcccggcgctactgcaagtattagaaatagtcgtgttgtttctgttggtccaatgagtcctgggcctggtggttttcccatcactcgtcctggtactgggggtttgatgcctggaatgccaggaactaggaggatgcctggaatggataatgataattgggaggttcctagaagccggccaatgccaaggggtgatggactgggtacccagtctggagggcgtggggcctcaccagtagtcaataagtcgacttcaatgaatcaaaggctattacctcaaggtagtggtggcctaatgagtggtaggacaagtgccctgttgcagggtagttcaacccctcctgctaagccacccaactcaattttaggtgctgagtctgttgcacaaccttctctttcccctaaacctgctccggtggagaaaccactaactcaggctgcaaggctgaatacagatgatcttcagagaaaaacacgggcattgttagaggaatatttcagcgttaggctactagatgaagcattacagtgcgtggaggaactaaaatctccagcataccaccctgaggttgttaaagaagcgatctccattgctttggagaaaagcccaccttgtgttgaacccgtttcaaagcttctggagtacttgtttattaaggaagttctcacagctagagacattggtactggatgcctactttatggtgccttgttggatgatatcggcattgacttaccaaaagcaccaaataatttcggagaaataattggaaaacttgttctggctgggggattagatttcaaggtggtgaaagaaatccttaagaagatggaagatgacatgtatcagaatgctgttttcgatgcaacaatgaggatcattagcttagatccttccgggaaagtctctgttcgatgctcaggcgatcgcatgtgctgtcct

SEQ ID NO: 9352 - DNA, 383 bp, Gossypium hirsutum
  Clone ID: LIB3083-056-Q1-L1-G6
gttgaagccatttgtcagttcttcaatattattggtaagcgagcttggtagagtccaaaatcacggcgcataaatgatgtgtacttcaacagactgaaggagttgactacaaatcctcagcttgcaccaagactgagatttatggatcgtgatgttcttgatctgcatgcaaacaactgggttcccaagcgtgaggaggtgaaagccaaaacaattactgaaatccattcggaggctgaaaagaatcttgggctgcgtccaagtgctactgcaagtatcagaaatactcgcgttgattctgctagtccaatgagtcctggtcctggtggttttactatcaatcgttctgatactggtggtatgatgcctgcaatgccaggaac

SEQ ID NO: 9353 - DNA, 580 bp, Gossypium hirsutum
  Clone ID: GOSHI-09MAY01-C21000_1
attatgttgctcctgaagtactagatagatcatatgggactgaggctgacatgtggagtatcggagtaattgcttatatacttctttgtggaagtcgaccattttgggcacgtacagaatctggcatctttcgagctgtccttaaagctgatccaagctttgatgaatccccttggccttctttatcccctggcgcgatggagtttgtaaagagattggggaacacggactaccgtaagagactaactgctgctcaggctctgagtcatccatggttggcaaattgtcatgacataaagataccatcagatatgataatatgcaggctcgttaaaacctatataggctcctctacactacgaagagcaacactgggtgctcttgcaaagacgttgactattccacagcttgcttatctccggtaacaattctcattgttagggcctaataaaagtggatttattctgatgcagaattttaagatggtgatgttggagaactctactgatgctatgaatgattctcgggtccttgattatgtcaacatgattagttctattcagtatagaaaattggactt

SEQ ID NO: 9354 - DNA, 518 bp, Gossypium hirsutum
  Clone ID: GOSHI-09MAY01-C21340_1
gcgacattggaactgtctacctctgccggctggccgacgtggatgaaaaagttgttatgcgatgaaggtggtggataaggatgtgttggttatgaagaaaaagttcaccgtgctgagatggaaaaaaagatcctgaaaatcctggatcatccagttttgcctactttgtaccctgtagtttgaaccttctaatttctcttgcatagttatggagtactgttcagggggtgacctgcattctcttacacataaacaacctcaaaaacgcttctctttgaactccgcatgattttatgcagctgaggttctggtagctctagagtaccttcacatgctgggtattatctacagagacctaataccggaaaacgttctagtcagatcagatggtcacatcatgctctcagatttcgacctttcactttgctcagacgcgatcccagccgctgaatctccatcatcttcacctgacccaatgccgccacaaaaccagtgctgcaaccttacgtaaccaacac

SEQ ID NO: 9355 - DNA, 913 bp, Gossypium hirsutum
  Clone ID: GOSHI-09MAY01-C21300_1
cccacgcgtccgggaaagtctcatccttgggtggaggctatttcgaagaaggtgaaggataatgtggtcgaaaatggaagctcagttggcgaaagatgttgtgccgtttaactttttgactcctatgaggattataagagatgctattttgggggttgggagtccagctccggtggtggtttcagaaggggcaaatacaatggatgttggaaggtctgtgctggttcagaccgagcctaggactaggttggatgcagggacttgggggacaatgggagttggtttaggttattgcattgccgctgctgtggctaatccagaacggcttgtggttgcagtcgaaggggactcgggattcgggttcagtgctatggaggttgagacattggttcgatacaagttgcctgttgttgtgatagtctttaacaacggtggtgtttacggtggtgaccgaaggagccctgaagaagtaagtggccctttcaaagatgaccctgcgcccacttcctttgttcctggtgctgcttaccatactttaatcgaagcttttgggggaaagggttaccttgtcgggacacctgacgaattaaaatctgccctttctgaatccttctctgcaaggaagccggttgtgataaatgtgataatcgatccctttgccggtgcagaaagtgggagaatgcagcacaagaattgagggagtttcggttttgtttcgttaaatttctttttccaccacttaccgagctggtctttctatgtcaatgaataatcggatttgtgctcacttgtgatagaacagatagggatcatgtcttttgacttttgtagtcaaatgcagtgtgcactgtgttgtatatgacattgataaaatatttcctagtagtaaatgttctcacagttgaatttttaa

SEQ ID NO: 9356 - DNA, 556 bp, Gossypium hirsutum
  Clone ID: GOSHI-09MAY01-C21240_1
caacatttctcatggctcttgtggtaacctttgttggcagataagtgttttacttgctgctatgttccttgtgttcttctggtttagtgaaggggtctacttatcatcagcactcatgaaagtgcctcaaggaggatgggtgcctcttgtgctgtctgtcatctctatgttgggtatgtacatatggcactatgggactcgcaagaagtacaactttgacctgcacaacaaagtatcactgaaatggttgcttggcttgggtcctagcctcggtattgtgcgtgtgcctgggataggcctcatttactccgaactggcaacaggagtccctgcaatattttcccactttgtcacatacctgccagcgttccataaggtgctgcgttttgtttgtgtgaaatcagttccagtcccatatgtttcaccagaagaacgctttcttattggtcgggtatgccccaagccatatcgtatgtataggtgcattgtcaggtatgggtacaaagatatccagcgagatgatggggattttgaggaccagcttatacaaagcata

SEQ ID NO: 9357 - DNA, 566 bp, Gossypium hirsutum
  Clone ID: GOSHI-09MAY01-C22900_2
tctcaaatctcttcgacacaaaattgggccaaggatcgatttcttagattttcttgaaaacaagaaagtgaatcttgattttcctgttctcctcgtgtatgcatctaaggccttgctaacaagctcttgaatggtcccatttagtttggcccgcatttgtcggccctttgatctcgttattgggccttgtggaatttgagcccatcacgctccttgaacttggattgggcctttatgactcgtatcaacgcccttatcaactccaagggcttagcaacgaaggccaatttaaggtccctcaacaagtgcgcatcgccttttctatcggcaagtatcaagacgaagtcatgtgcgacgtagtgcctattaaagtctgccatttgttgctaagagacccatggtaaagggatcgaaaggtcccccccgatggtcgtaccaataggttttctttcaagcatcaagaaggaaagtccccttagtccgctcactccggaacaagtccatgaggcccaaatcaaactgaaaatttttgtattaaaaaaaaaaaaaaaaaaaaaaatttttac

SEQ ID NO: 9358 - DNA, 881 bp, Gossypium hirsutum
  Clone ID: GOSHI-09MAY01-C22900_1
aataatgatgcacttatgaaagtccaacaacagttagacagacatactgctgcaatcacacaaataaatgttacacttcaagcattgaatactactttgaatgaggtacgagtgaatcaaaaacatcaatatcgagatccaattaagaaagatagggataaccagccccataggtgcaaccctcaacgtgtccctagaatggatgatgattgtcatgatcatggacaatcatctttggcaaaaccaaagagcgagcagcaacgagaacatctctttcatactcgctgccacgtacaaggtaagctttgtagagttattattgatggtgaaagttgctcgaacatagccagcacgacgatggtggaaaagctttgcttaaccactaccaagcatccacaaccttatcaactacaagggcttagcaacgaaggccaatttagggtcactcaacaagtgcgcatcgccttttctatcggtaagtatcaagacgaaattgtgtgcgacgtaatgcctattcaagcctgccatttgttgctaggagaaccgtggcaactggatcgaaaagtcactcacgatggtcgtaccaataggtattctttcaagcatcaaggaaagaaacttaccttagtgccgctcactccggaacaagtccatgagggccaaatcaaactgagaaattctgttaaaacaagtgaggaaaaagaaaaagagaatgaaaaagagcaaaaagagattgagagtgaaaaggaatgtgaaacagaaaagaaatttgaaaaagaagttgaagaaagaagagaaaatgagttagaaaaagaaacaaaagaaaaagacgaggaaaggctagtgaggaatgtttccactaaccaagatatgaatttttc

SEQ ID NO: 9359 - DNA, 454 bp, Gossypium hirsutum
  unsure (1)..(454): unsure at all n locations
  Clone ID: LIB3147-041-Q1-K1-D9
cggacgcgtggganaaattccaacaacagttgttatgaacaggnctgctgctcttcgagcccttgactgctgaccatcaatganggtacggattgaatcaagaancctcaatatncgatatnccaatcaagggaagaatcgggataacccagccccatagtgcgcgaaccctcgancgtgtccctagaatggatgatganttttcatgaaatcgtgagcaaccttctttggcaaaaccaaagagtgagcagcaacgagaacatttctttcatactcgctgccatgtacaagggaagctttgtagagttattattgatggtgaaagttgcacgaacgtagccagcacgacgatggtggaaaagctttgcttaaccactaccaagcatccacaaccttatcaactacaagagcttagcaacgaaggccgatttaaagtcactcaacaagtgcgcat

SEQ ID NO: 9360 - DNA, 394 bp, Gossypium hirsutum
  Clone ID: LIB3083-091-Q1-L1-E7
tttggctgcaagatttggtttcttggaccaagattggcaagatttgaaatcttgattgtcttgattcttgaaatctcttcgaagagcaaaattgggccaagattcggtttcttgattttcttgacaacaagaaagtgaatcttgattttcttgttctctcgtgtatgcatctaaggccttgctaacaagctcttgaatggtcccatttagtttggaccgcatttgtcgggcctttgatctcgttattgggccttgtggcaatttgagcccatcacgttcttaaacttggattgggcctttatgactcgtattagcccgatcgtgaattaggagtaaattgaggctttacaaaataggctagaagaaagagggttatttaagcttaaaagggttt

SEQ ID NO: 9361 - DNA, 594 bp, Gossypium hirsutum
  Clone ID: GOSHI-09MAY01-C22920_1
attttctcaacatacgattactcgctttcgcttaaaaatggcaatgattcctaccatctttggcaacaacaggcgcagcagcctcttcgacccgttttcgttggacttgtgggatccctccaaggagttcgatttcccaaccgtcacatcgtttccttcactttcccgagaaaactccgctttcgtcaacacgcgcgtggactggaaggagacaccggaggcacacgtgttcaaggcggacctccccgggggtgaagaaagaggaggtgaaggtggagatcgaaggcgatagggttctccaaatcagcggagagaggcacgtggagaaggaagagaggaacgacacgtggcatcgagtggagcggagcagcgggaagttctcgcggaggttcacgttgccggagaatgtgagaatgggcgacgtgaaggcttccatggcataatggggttcttgctgttgctggtcctgtttgtgtggtggacttacctgtgatcactttcgtgtgccttctctgctgttttggtgttataacgtggttttggccttctctgggtttctgtttggttttggctacttttcctgattgctggttt

SEQ ID NO: 9362 - DNA, 511 bp, Gossypium hirsutum
  Clone ID: uC-gsflnu33B141d01b1
atttttctcagcatacgatcacttgctttcggttaaatttggcaatgattcctaccatctttggcgacaacaggcgcagcagcgttttcgacccgttttcgttggacttgtgggatccctttaaggagttcgatttcccaacagtcacatcgtttgcttcactttcccgagaaaactccgctttcgtcaacacgcgcgtggactggaaggagacaccggaggcacacgtgttcaaggcggacctcccggggatggagaaagaggaggtgaagggtggagatcgaagacgatagggttctccaaatcagcggagagagggacgtggagaaggaagacaggaacgacacgtggcatcgagtggagcggagcagcgggaaagtctcgcgggggttcaagttgccggagaatgtgagaatgggcgacatgaaggctttcatggaaaatggggttttttctttcactggtcctaaagttgggatgaagaacctgaaatcaaatcccgtgaaatttt

SEQ ID NO: 9363 - DNA, 400 bp, Gossypium hirsutum
  Clone ID: GOSHI-09MAY01-C22890_1
ttgttcgtaacctctaacttaacccgacccgcgatcgctttttccgcgaaccttcttgaatcttccgtcgattccgataaccctagaaggagcacttcattcttcaagtttagcaatggagatgaagtcgaagacactactcatactatacgcaactcagacgggaaacgcattagatgtagccgagcgtattgcacgagaagctgagcgaagagcctgcaccgtcgttattcgttcaaccgacgattatgaggctaattcgttgcctgctgaagacactgtcatttttgttgtctctaccacaggccaaggggatactccagattctatgaaggtattttggaggtttcttctgcaaagaaatcttggcagccattggttggaaagaattcactatgca

SEQ ID NO: 9364 - DNA, 570 bp, Gossypium hirsutum
  Clone ID: GOSHI-09MAY01-C22880_1
cagggaaaaggggagaaaaaaaaacccccagtaaccacttaagacctaaaaggtaaaaagagggggaaaaaaaagagggggattattggtttggttttggttgggttctgtatgattattcttttcctcgtttaaggcctcaaaaactcctggtttcctccacttcttcacttccaggggggctttgagttacttatcggcgtactactagaaacctttcttgttaagtatcttctgcatcatacataggaagctagatgggttccagattcccatctcatcagctcagcaatgggctttacgtgtcaggcaggccagagcagcctaaagaaaggactccgaccatgagctcagtggccatgccctatactggtggagatattaagaaatcaggagaactagggaaaatgtttgatatccctacagatggttctaaatccaggaaatctggacctataagtggtgctccttcaaggactggatctttcgggggtgctgcttcacattctggaccaatcatgcctaatgcagcacctcgggctggctacaccacatcagtcctggtggcgc

SEQ ID NO: 9365 - DNA, 565 bp, Gossypium hirsutum
  Clone ID: GOSHI-09MAY01-C22560_1
acaattaaactgtgacagttatgcttgtgaaaagttctctggtaatctcatctaggagtccattaagcacatacttctccacatctttgataacatcatctttctcaagaaacccaaacatggcgttattccaacccaagtcccacatacaattcagatctggttccttgttgttgacatcagcctcaagcattttgggttggtagtcttcaaagggagaatcttctctcccgtcctttccatataacttcaacttatcaaagtccttgcacatttgtttgaccaactcatccaaggattttgctttgtttgaagtgatgggtacctttagaaatgggtgaacacttagttcctgccttcttcctttccttttcattacttcgtagccacagtctaaaacgagcttgctgtcttggtcgatgtgatggtcgtagctgtttgaatgaagaatgctgataggaatgttgagtttgaaaagcgcctctgctgtgttcatacatagttggcttttcagaagtatccgcttgaggtgattttcactttctgttagtggcggacgcgtggg

SEQ ID NO: 9366 - DNA, 1067 bp, Gossypium hirsutum
  Clone ID: GOSHI-09MAY01-C22520_1
gattgaccaataatctattactgttgccattaataatggtggttctccttgtttccaagactgtagcggatgcatttaatggcaatgtttatgaccttattatgaaagtaaaaggttttccatacctagaaactcatgctgaaccttatatgagacagctaaccgttgctgatgttgtctctggcccgcttcagctgtgtcatggaattgagaaggtcggtaatatcgtacacatcctcaaaaccacaatgcatcacgggtttccagttattgatgagtctccacattctgaatccccagttttgtatggtttgatccttcgggctcatcttattgcactgctaaagaagaaagcgttcttgtgcacccctgtgcagttaggtgctgatgcttttagacatttctcgtcagatgactttgcaaagaagggcttaggtaatgttgacaagatagaagacatagaattgacagatgaggagatggacatgttcctggatttacacccttttaccaatgcttcaccgtacacagttgtggagacgatgtcactagctaaggctctcatacttttccgtgaagttggtctgcgacacctacttgtcatacccaagatctctagcagagcaccagtggtgggcatattgacaaggcatgatttcatgccggaacacatattaggtttgcatccatcgttggtaaggagcaggtggaaaagattgaggtttcaattcccccttttactgaaaatattctaggtgggggatctcattcagttgttgcaaacggggcttactcttgggattaaatttgtatatagtcttgcactcttaaactgcaccgagttgtacgatgattctctccctttatgattcagcaccctcatttagctcgcaggcgaagactaacccagcgaggaatcgcatgaacccatccaaaatttgtattttgcatttactgcaggagttgaggcaagtcagaatcttccaaccttgacaatttttgcttttggttaaatctctttgtatgcattaataaactagttacggctttccgaaagagcttttttg

SEQ ID NO: 9367 - DNA, 380 bp, Gossypium hirsutum
  Clone ID: GOSHI-09MAY01-C122448_1
aataccaccaaagccaccaatccacgaacctccaaagaaagagaaaccagaacccaagccaccagtttatgaacatccaaaaaaaccaccttctggtcactatccaggacaccctccattggagaagctcccatcacctagccatccgaagaactgagccacttctatggctatatagatagatcagtacttacaaataagagcggcggccagctcgttccattttcttgtatgccattgttatcatgtaatgttttctttgtatgttaatcctcttgttgttgaaccctgtttgttgcagttcactgtatttcttttcaaaagttttaacacccctcttttattattttcgttggaataaatattgatcgtgtttatgg

SEQ ID NO: 9368 - DNA, 599 bp, Gossypium hirsutum
  Clone ID: GOSHI-09MAY01-C22410_1
acagaatcattttgcgattgggtttctgatttacctgcaatgccaataacacaagtaattgaaacgatacgccgtaaattgatggaattcatctatacacgcaagatggattcggatcaatggtcatcaaaccttactccatctgcagaggaaaacctccaaagaagtcttgtcaattcacgttctcttgaagtagtactttcacacagtagttgtttcaaggttcgggatactttagacatgataaacgttgttaaccttgaaaattgggattgtagttgcagggaatggcagatcaacggattgccatgtttacatgcagtggcagcaattgagcacgttggcaagaatgtgtatgaggcctgctacggttctttttctgcgtctataaacccaataccgccgttagacaggtgcatgaaaagagaatcatcaccggtgcttgtgcatcctccttgtgtgacccgtccggtggggcggcccaaggaaagaaaatacgcacttaaatccaatcaagctgttaagagaacacttcagtgcagcaagtgcaaaaagcttgtgcacaacaaaaggaaatgcaagcaatctgcttagggagt

SEQ ID NO: 9369 - DNA, 1205 bp, Gossypium hirsutum
  Clone ID: GOSHI-09MAY01-C22430_1
attgatcatggtgcattagcatgccttatgaacctattgaccaataattataaaaagagtatcaagaaggaagcatgctggactatctcaaacattacagctggaaacaaggaacagattcaggctgtgatcaatgctggattaattgggcccctggtcaacctacttcaaaatgctgaattcgatgtaaagaaagaagcagcatgggcaatttcaaatgctacttcgggtggtgcccatgagcaaatcaagtatatggtcagtcaaggatgcataaaaccactgtgtgatctccttgcatgccctgatccaagaattataatggtctgtttagaggggctggagaactttttgaaggttggtgaagctgagaaggccacaggtgctgtagaatttaacttctgcgcccaactgatagaagatgctgatggtttagagaagattgaaaatctacagactcatgataatagtgagatatatgagaaggcagtcaagattctcgagacttactggctggaggaggatgaagagacgctacctcctgctgacggtactcagcaaagttttcagtttggggagaatgggcttcaagttccatccggtggattcaacttcagttgaagggtttatagaataaacagttcgtaatgcgggttacgactgatacttggggtcgaagtttggtcagggcaccatgatgtgtctggttacataaaagtctgtccagagtccactgttgtgaagaaggtgcttgggtaagtctattgagacctggtttccagtacagaggggaataggtaccattgagaccagaaaagttgtgggcaaggtattttgcttgtcttaaaccaaaaaaattacatgtgaaatagtacaatgcaagggccttgggaggtgtttcttaagcttgtcactgtttatacagcgcccctttagtgtaaacaggcatgctagtttaccaggtttcggtatttgcctcagttgttttgagtccagagtttttcgggttttagaaggtcagtatttgttgtctcgtaccataatgtgatatgatagtgtgattaatagtacacgagtggtaaatgggttaaaatttctatagaagtgtgataaaatgtgtcatgttaagattcgtattacgttcaaaaccataacttattttcccatttatattttaatttatttaaaataaaaacggctgtgat

SEQ ID NO: 9370 - DNA, 661 bp, Gossypium hirsutum
  Clone ID: GOSHI-09MAY01-C22740_1
gacaaaaaccaaaaccatgaaatcatcagaaagcagaaaagtgaaattaattatgatttttttaatccacctcttccatcttgcttccctcagcttcatcttcctcaagagtaggcatgtccgcatcatcaccaccggtcccgtcctcatcaatactcagacccagcttcagcattctatggattctacctgcgaatgtgttcggatcatccaagctgaacccagaggtcaatagagcagtctcgaacagcaacagtacgagatccttaacggacttatcattcttatcggcttcagctctcttccttagctcttccattattccattatcgggattaatctccattgttttcttgctggacatgtaagaactcatgctattatctctcaaagcttgcgctttcatgatcctttccatgttagcagtccatcccccctctccggtgaccagacagcaaggtgagtcgacaatcctgtcggagacaacaactttcccccccccccccccggaccggtctttccttgtctgacagagatcttcaaaagacttctttttttcctcctttttctttttctcctcctccgtctcgtcctcgagctttaaaccttcctttgtggcagagacaagcatcttgccgtcgtattccttcaactgccagac

SEQ ID NO: 9371 - DNA, 710 bp, Gossypium hirsutum
  Clone ID: GOSHI-09MAY01-C22700_1
agtggaatgaccatcaaagaaagtgtgaaggatgtatttattggtggcggtggatatattgttaatgatgtaaaatttacagtaaaccaagcagttgagcctgttgagaaggggcttactaagttcaatgagaaactgcataagatctcacaaaacatcaagaggcatgataaagacaggagaaagacaaaggatgatagttgcattacaacaacagctagaagggtaattcgcggcatagatgatcccctcttacttgggagcattagtgatagtggtattggaaggggaaggaaacatcgtagaagatcgggatatactagtgcggaaagcggaggagaaagcagcagtgatcagagctatggtggatatcagatcaggggtagtagatgggttacaaaggactaaaccttaaatgaaaaattgtggttacatgaacacaagacaatgctggctggtgtgattgctttggcagatatgctgctgaacattatctctgcatgaggcggctgaagatttgtttcaagtttcttgctgtcaatattctcatcaatggggtagttgtttattcagggcatggccattgcataaaatgaatcaagtattgctttttttgtttgggagagatgtccacgtggcaagtttttttccggcctaaggtattccggcggaatcaaagcttgactaatgtctataaatagcattttgta

SEQ ID NO: 9372 - DNA, 829 bp, Gossypium hirsutum
  Clone ID: GOSHI-09MAY01-C22730_1
gcacgggtttttttttttttttttttttttttttttaccaaaaaaattagcattatacgtattaataaaaaattttagtacatcaagctctttttcttttatttatttatttttcagcccccttcattaatattcaagtttttgtaagactccatgggcttgctaattagcagtaggcacaatggcagccttattgaacctacggttaatgaatgaagcaagtatataacatgagcaaatgaatgaataataaaagctatacctgagcctggccatcatgttattcaactatcactattggcttcaaatacatatgatcaaataatgtaatagccatgggaaatcattttttatctcaaaaattcccccccccctcttctatgcaacggatagaccagattaacccctgctgaagtcggcgccatctgagatctgcactagtcgtttgctgtaaaatgttgcgaacatcatgaagctccctcatctaagaggctccatatccatcacggtgcgccttttgccatctccatgcagtctttaaactctcctcgagatcggtgtgttgagctgtccagttcagttcacgcctgatcttagttgggtcgctaaatacttcagcgtaatcaccaggtcggcggggaagataatcgacttttatatctacccctgttgctttcttacaggcctctacaaactcttttaccgatctaccttttccagtgccaacattgtagattcctactttactgggctcgtgccttttgaagagctttaacatgagcatcgactaagtcagtaacatcgatataatctcgtatgcaagtcccat

SEQ ID NO: 9373 - DNA, 855 bp, Gossypium hirsutum
  Clone ID: GOSHI-09MAY01-C22600_1
ctttttcctttcttctccagcgtccgattttcccttgaaaatccaatctctttcactcccgcccttttccatttttcgttttaatcaatttcaattttttccccactttctggattctttacatggcgacgtcggcaccggttccggcgagtccaggtggcggtggaagtcatgagagcggcggcgagcaaagcccgagatccaacgtgcgagaacaagagaggtttccccctatcgctaacattagccgtatcatgaagaaagctctccctgctaacgctaagatcgctaaagatgctaaggagaccgtacaagagtgcgtttcggagttcatcagcttcatcactagcgaagccagcgacaagtgccagaaggagaagaggaagacaattaacggggacgatcttctctgggctatggcaactttagggtttgaagattacatcgatccgcttaagatttaccttaccaaatatagagagatggagggtgatacaaagggttcggttaaaggtggagatacatttgctaagaaagatgtccaaccaggtccaaatgcccagcttgttcatcaaggttcgttctcgcaaggtgtttattatgggaattctcaatctcagtcacaagcccatatgatggcttctgatgccagacactgagaacgagaccaaatcctacttgagccaatttcatcatctaatctcaatatcatgtttcaatggtggaagaaacaggtgtgataaactgacattttggatggttcaaatcatccttcacatgtaagctgttaatatcatatgtttggagtaaattgagttgtgtgaaaaaaatggtgtaatgttaagaagggtgttg

SEQ ID NO: 9374 - DNA, 592 bp, Gossypium hirsutum
  Clone ID: GOSHI-09MAY01-C22140_1
cagtttgaaagagaaggggaagattcttgaagtattgaaaaactggcccgagagaagcgtccaagttatcgttgtcaccgatggtgagagaattttgggacttggagatcttggttgccaggggatgggtatacctgtaggaaaacgtgctcggtacacagctctcggaggagtccgtccttctgcgtgcttgcctattactattgatgtcgggacaaacaacgagaagttgttaaacgacgagttttacatcggcctcaggcaaaggagggcaactggacaggaatatgctgaacttcttcatgagttcatgtctgcagttaagcagaattatggggagaaagtcctaatacagtttgaagattttgcaaaccacaatgcattcgagctgttggcaagatatagttctagtcatctcgttttcaacgacgacatacagggtaccgcatctgtggtgctggctgggcttcttgcagccctgaaattactcggtggaaccctcgctgaccataggtttttgttccttggtgccggagaggctggaaccggtatagctgagctcattgctcttgagatgtcaaagcagactgga

SEQ ID NO: 9375 - DNA, 541 bp, Gossypium hirsutum
  Clone ID: GOSHI-09MAY01-C22370_1
aaataaatcataccacccaaaattttctcttttctcttctcttctcggtttacataaatctcttcggtttaggaactgctggggttcgattttgtcatcaagatcggccaaattaaaacttcaggcgatcggagaagatggagtctcatgatgaaactgggtgccaagctccagaaggtcccatcctgtgcgtcaacaactgtggcttctttggaagtgcggctaccatgaatatgtgctccaagtgtcacaaggcaatgattctgaagcacgaacaggtgcaacttgcagcagcatccattggaagcattgttaatggctgctctagtggtagcagtaaggaaccagctgtggctgctgctttggatgtacaacctgtaaatattgagtcaaagattgtgtcagcagagccatccattgatccttctagaacaaccgtcagtgagttggagacaaaaaagggtcctaatagtgctcaacatgccataagcgtgttggtttgacaggatttaactgcaggtgtggaaacctcttctgtgct

SEQ ID NO: 9376 - DNA, 793 bp, Gossypium hirsutum
  Clone ID: GOSHI-09MAY01-C22320_1
tgtgagtaggccttttgctagatggtttatttggtacaggaagtggctccactgcttcagttgaaaatgcaggtcttttgggattaacaagagttgggagtcggacagtcattcaaatctcggccgtatttatgcttttcttttctgtattaggaaaattcggggctgttctggcttcaataccattgccaattatggctgctctgtactgcgtcctctttgcttatgttgcttcagcagggctgggtctccttcagttttgcaacctgaacagcttcaggaccaagtttattgttggattttctgtcttcatgggcctctccgtacctcaatatttcaaccagtatctactagtatccggtcatggccctgttcacactcgttctacatggttcaacaatgtaatgcaagtaatattctcatccccggcaacagtgggattcatagttgctttcttcttggattgcacccacagctacgggcatagctcagttcggagagatagtggaaggcattggtgggaggagtgcaggaatttcaatacggatacaaggagtgaagagttctattctttgcctgctaatcttaataggttcttcccttcattctaagctccaccagtaataaccgtactcatcaaatactgaaaatcagtgacaacagtgatcatttaaggcatttctgttcctggggaatcctgcatttcaatttctttattgttatgagtccatacatatagatgtggtttttcatgctattttctgttgttattaaagttctatatatttataag

SEQ ID NO: 9377 - DNA, 663 bp, Gossypium hirsutum
  Clone ID: GOSHI-09MAY01-C122268_1
tttttcacgcgtccgcccacgcgtccgccgacgggttcggaaatctgttaaggtgaggcctaacttggttgtttacaatactttgatagaggcaatggggagggcagggaaaccggggtttgcaaggaaccttttcgaggacttgattgagtctggtttaactccgaacgagaagactttaactgccattgcaaagatatacggcaaggcgaggtgggagaaagatgcactgaaattatgggaggaaatgaagtcgaaaaactggcctgttgattttattctgtataatactttgttaactatgtttgcagatatcggtttagttgaggaggcagagcagctctttattgacattgaagcgatcagagaattttaagccggatagttggagcttctcggcaatgctaatcatatatgcaagtggaggaaatgtcgataaggcgatggagttgtttgaagagatgtttgaagtaggtgttgagcttaatgtaatgggaaccacttgtttgattcaatgcttggggaagacccaaagaatccaagagttggtgagggtctttactgtctcgattcaacaagagatcgaaccggatgataaactttgtgggtgcttgttgtctgttgtgtccctatgtgataacagggaggatattgataaagtcc

SEQ ID NO: 9378 - DNA, 716 bp, Gossypium hirsutum
  Clone ID: GOSHI-09MAY01-C122278_1
gtttgtgcgtggagttacgccaaatacgcggtgtcatttgattgtggaatatgggttctccaatttttccccttttctttttccaacgatttcgcattatttttcattttcatttttgatttttctttcttccatttcaaattttaattccgatcgagcaccaaaatccttatttccttttcattcttttgaaaattttaattgattgattaactgttgcaaagttgagtttttgatcggcaatggtgaaagaaactgatttctacgacattttaggggtcagcccttctgcgacagagtctgaaatcaagaaagcttattatatgaacgcacggcaggtccatccagataaaaatcctaatgatccccaagcagctcagaattttcaggtgttgggagaggcttaccaagtattaagtgatccggcacaacgacaagcatatgatgctcatgggaaagcaggaatctcaactgaagcaattattgatcctgcagcaatatttgcaatgctctttggtagtgagctttttgaggaatatataggtcaacttgctatggcatcaatggcctcattagacattttcacagagggggagcactttgatgctagaaaggtgcatgaaaaaatgaaggttgttcacaacgaaagagaaaataagcttgcacaattattgaaagatcgactaaatcaatatgtgcaaggaaacaaagcggat

SEQ ID NO: 9379 - DNA, 609 bp, Gossypium hirsutum
  Clone ID: GOSHI-09MAY01-C122258_1
tttcgaggtatatggaagcccgtttttatgggtggaacagattggcctagtcccttggcaaatttatccgtcgttctgcaacaaatcaaaaaagggattgctgccactggtgttgatgtcccaagccttgaaacagggggaagctctccggctatgcttcctttgcccttggctgctctcgttagcctcacgataacctataaacttgataaatcctctgagcgctcccttgtattacttggcccagcaatgagttccctaggtgggaagttgtccttggccatgtatgcccatcatatctgcactatgggctcagaaggttaagcggcggaatgatttccttgtattctcttctgcccgtactgtcttccaccacaacagcgatgctgtagttcagcttcttaggagttgcttcacggctactctcggattaagcccttctatcatgtgcagcaaccgtggagtgggtgcactcctgggtcatggatttggctctcatttctcagggggaatggcttccgtttccccaggaatatgtacttacgatacattgaacaatcagagatttatgttatgacaaagaaatcggtctctttaatgtttctgtaa

SEQ ID NO: 9380 - DNA, 724 bp, Gossypium hirsutum
  Clone ID: GOSHI-09MAY01-C22260_3
attttgtcagtggtgaagataacttggtcatcttgcttctaaatgccagggtattggtatgctgcttgaagggctttttggttctcttgttggtactactgcatctgtggaaaatgtgggccttcttggacttacacatataggaagcagaagggttgtgcagatttcaactgcttttatgatatttttcgcccgcgtggggaagttcggcgctttcttcgcctctatcccattgcctatatttgctgccatttactgcattttgttgggcattgtcgctgcttctgggatcacattcatacagtttgcaaatagtaactccatgagaaacatctatgttttgggtgtctctctattcctcgggttatcgattcctcaatactttgtaatgaacacaaccggtgacggtcatggacccgtgagaacaaatgccggatggtttaacagtatattgaacaccttcttttcatcgcctgcaaccgtggccatcatcgttgggaccgtgctcgataacacattataagcaaaacaggtggacgatcgaggaatcccatggtggaaaccgatccaacacaccaaaggcgattctcgaaccgaggaattctacagctatccgttaagaataaatgaatatattccgacccggtttctctaaagcattattactaaattgtttttatattagctacaaagtacagggcatattttgtgttccatatgcatg

SEQ ID NO: 9381 - DNA, 1277 bp, Gossypium hirsutum
  Clone ID: GOSHI-09MAY01-C22260_2
cccagcgtccgggcgggcatggggggagctgacaagattctttagtcccatagttgtggtgccagtggtttgtctcgttggtcttggtctttttgccagaggcttcccattgctaggtaactgtgtggaaattggcctgcctatgctcattctgctcatgatttgccaacagtacctgaagcgcatccattcaagagcacatctaatacttgagaggtttgctttgcttttatgcattggtattgtctgggcgtttgctgctatcctcactgtctcgggtgcttacaacaatgttaagcctgccactaaacagagttgccgcactgatcgatctttcctaatgtcttctgctccttggatcaaaattccatacccatttcagtggggtacgccaatattcagagctagccatgtgtttgggatgttaggtgctgcactagtttcatctgctgagtcaactggaacattttttgcggcagctcggctttctggtgccacagcccctccagcacatgtactcagccgaagtattggcttacagggtatcggtatgctgcttgaagggcgttttggtcctcttgttggtactacgttgcatctgtgtgaaaatgtgggccttcttggacttacatggttttgagcttacaagcagggtagaaggtagaaactctatgagaaacatctatgttttgggtgtgtctctattcctcgggttatcgattcctcaatactttgtaatgaacacaaccggtgacggtcatggacccgtgagaacaaatgctggatggtttaacagtatattgaacaccttcttttcatcgcctgcaaccgtggccatcatcgttgggaccgtgctcgataacacattagaagcaaaacaggtggacgatagaggaatcccgtggtggaaaccgttccaacacagcaaaggcgatgctcgaaccgaggaattctacagctatccgttaagaataaatgaatatattccgacccggtttctctaaagcattatcactaaattgtttttatattacctgcaaagtacagggcatattttgtgttccatatgcatgaggctcaggttaaatcggttcttgtaaaccggtggtcggcaccggtgaatgtcgtgtcggtttttcaaggtatgtaaagtactgaatgtacatgaaaattggctgagaaaaggaaacagggaactggttaaagctatatttatccttactgaactctttaagcaaataatattggtcaaattttataaaaaaaaaaaaaaaaaa

SEQ ID NO: 9382 - DNA, 1447 bp, Gossypium hirsutum
  Clone ID: GOSHI-09MAY01-C22260_1
ctttgatgtttggtactcatggtgataaagcccgggttattcaagtgttgctgtttatgtctggtataaatactctgcttcaaacacttattggctcaaggcttcccacagtgatgggtgcatctattgcgtacaccttaccattgttttcgatcatcaatgattataatgatgaggacttcgcatctccacacgatcggtttgttcatagtatgagaaccattcaaggatcaatgatagtttcttcctttctcaacatcatccttgggtatgggcgggcatggggggagctgacaagattctttagtcccatagttgtggtaccagttgtttgtctcgttggtctcggtctctttgcacgaggcttcccattggtaattgttctttgaacactttaatgcttggttgggacaaataatatgctgatataaataatgcagttaatgtatgatacagcttggtaactgcgtggaaatcggcctgcctatgcttattctactgattatttctcaacagtacctgaagcgtgtcccctcgagagcccatctaatactcgagaggtttgccttgcttatttgcattggaattgtgtgggcttttgctgctatcctaaccgtgtctggtgcttacaacaacgttaagactgctactaaactgagttgccgcacggatcgatcttacctaatgtcttctgcaccttggtatggtcataacgtgctgttctgcttgctttcaccgcgttccagagctagccatgtgttcgggatgttcggtgctgcactcgtttcgtctgccgagtcaactgcaaccttttttgcggcagctcggctttcgggtgccacagcccctccggcacatgtactcagccgaagtattggcttacagggcatcggtatgctgctcgaagggctttttggttctctcgttggtactaccgcatccgtggaaaatgtgggccttctcggacttacacatataggaagcagaagggtggtgcagatttccaccgcttttatgatattcttctccatattcgggaagttcggcgctttcttcgcctctatcccgttgccaatatttgctgccatttactgcattttgctgggtattgtcgctgcttctgggatcacattcatacagtttgcaaatagtaactccatgagaaacatctatgtcttgggtgtctctctattcctgaggttatcaattcctcaatacttcgtaacaagcagaacttttgatggtcatggacctgttagaacatatgctgtatggtttaatgacatattgaatacaatcttcttatcaccggcaactgtgccattattgttggactttgcttgatacactctcgagcaaatcatgcggaagatagaggatcccatggtggaaccattccgctcgctaaggaatgttgaaccgagagctcccgctatccctcaaatag

SEQ ID NO: 9383 - DNA, 476 bp, Gossypium hirsutum
  unsure (1)..(476): unsure at all n locations
  Clone ID: LIB3584-011-P1-K1-C10
gcgttcttttttttgcggcagctcggctttctggtgccacaggccctccagcacatgtactcagccgaagtattggcttacagggtatcggtatgctgcttgaagggctttttggttctcttgttggtactactgcatctgtgtatggaagcattgcttttttaaagagaagttccattctatatgtggtgggtgttaactgtaaaatccttaactgatagcactatgctttagaaacttgtttcagtgtctcatctgaatgatgttgcagggaaaatgtgggccttcttggacttacacatataggaagcagaagggttgtgcagatttcaactgcttttatgatatttttctccatatttggtttgtttttgtacttgttaattatttcattgaaaaatttgcctttttattcatcatttatatactcgattgggtcgcggtgcattcttncagggatgtttggtgcttttttt

SEQ ID NO: 9384 - DNA, 1126 bp, Gossypium hirsutum
  Clone ID: GOSHI-09MAY01-C23910_1
ttcatttttctttctcttgcctttttcgtcaacattaccggccagcaaaataaaacttctttattcttttttggtcttttttttttcatttcacatgtgacccctcctaatctctgccctttgcttcccaggtacttaggtaactaaatcaaattttcatgcgataatagattgtcactatcatccaaaattagttgattgattgatggggtccgaagggccagcagcagtaaccatccatgtgactggttttaagaaattccatggagtttcagagaatccaactgaaacagttgtcagtaatttaaaagagtatacagaaaagaaaggtttgccaaaaggtgttattcttggcagctgtagcgttcttgagactgcaggtcagggagcactccctcaactataccagacattgcaatctgccttaaccggcaaggattctgaatcttcttgttctgggagaattatttgggtacattttggagtcaatagtggtgcaagtagatttgctgttgagcgtcaagctgcgaatgaagctactttccgttgccctgatgagatgggatggaaacctcagaaagtacccattattcctgcagatggtggaatttcacgtgtaagagagacttctcttcctgttgaggagattacaaaggccttagcaaagaagggatttgaggtgatgacctccgatgatgcaggacggtttgtgtgcaattatgtttactatcactcccttcgctttgccgaacagaatgggatcaaatctctctttgtccatgtccctctcttcttgaccatagatgaggagacccaaatgaaatttgccgcttccttgttggtggtactcgcttctctatgtcagtaacatactgcatccactcatctttatgtccagaaattgatatggttgtacggttgtatgtgagtggtggatggaaggatgcatgtttgttgaaagtctttaataaaaggataagtgtatgtgaatgaataaaaactgtatttcagcacatacgccttatgtatttcttttatttctctaaaatgcttcctctgctgcttggaaatttcttgaatcttcatgttaatatgtcaataaattcctgtttgcttctattcccag

SEQ ID NO: 9385 - DNA, 588 bp, Gossypium hirsutum
  Clone ID: LIB3543-042-Q1-K6-E11
gcttttgcccagcgtccgccccgcgtgggcgtagggggcggtcagaagtacccattattcctgcagatggtggaatttcacgtgtaagagagacttctcttcctgttgaggagattacaaaggccttagcaaagaagggatttgaggtgatgacctccgatgatgcaggacggtttgggggggggggtgtttactatcactcccttcgctttgccgaacagaatgggatcaaatctctctttgtccatgtccctctcttcttgaccatagatgaggagacccaaatgaaatttgccgcttccttgttggtggtactcgcttctctatgtcagtaacatactgcatccactcatctttatgtccagaaattgatatggttgtacggttgtatgtgagtggtggatggaaggatgcatgtttgttgaaagtctttaataaaaggataagtgtatgtgaatgaataaaaactgtatttcagcacatacgccttatgtatttcttttatttctctaatgcttcctctgctgcatggaaatttcttgaatcttcatgttaatatgtcaataaattcctgtttgcttctattac

SEQ ID NO: 9386 - DNA, 1202 bp, Gossypium hirsutum
  Clone ID: GOSHI-09MAY01-C23930_2
tattatatctaagaccagcctcaagctggggccaaggggctcctccaatgcaacagcctggttatggttatatgcagcctggggcatatcctggcccatcatcgcagtacaacatgtcgcagcctccttatgggggctacccgtcccaaccgtcatctggtggatatgcctctggttgggaccagtcatctgtacaaccaaaccagcaaacctctgctgcaagtggttatgattactataaccaacagccttcacagcagcagcagcagcaaacctctggtgattcggtaactccagctgataacagtggttacaattacagtcaacctccagcttctagctatatgcaaccaggacaaggttattctcagtatggctatggtggataccatcaatctggttatgggcagccatcatcatacgatcagcaacaaagttatggttctgcttcgagctacggtaatgtgacaaatccaactcaaggtggtcaaggggattcaggtcaggcacctacgtctacccaaccgtctgcaacaggccaacaagggtataatactagtcagcagcctaacccaaaccctggaagttatccacctccaggaagtactcaacctggttatggaatgccgccttcccaaactggctatgggaatcagccaccagcacagcctggttatggagctggatatggacaaccacaaacgcagaaacctttggccaatccccagatgtatgggcaggctcaacagtcgcctagcaccccaggaagttatggccagccaggatatcattcacagccgccatcttctggttatggtcaaccagagacaggttcacaacttgctcaaccaccaagttatggtgcggcatctgcccagcctggatatggagccccaacctatggagctggttatggagcaccttataacacctcttatggtggtagttactcacagcctccaacatatcctgccgacaacattgctggtgggagcactaatggaaattacgaggctgcaccagcatctaaaactgttgaacagggtggagttgccaaggcatccccccccacttgatttggcgttacgatggttttataattttgaatttgtggtcttgtttttgcagtgtttttaggacaatgctgtgttgagtgtttttacttgaatatttaaatgtgctggtaatagtatggtttgttt

SEQ ID NO: 9387 - DNA, 1642 bp, Gossypium hirsutum
  Clone ID: GOSHI-09MAY01-C23930_1
tgggcttctgctggagtaaaacacaatattccctccgaccatacggtatgtaggcattttaaacccttcgtactattgtacaaactccattaaatccactgtggacatattttgtgtatttttgcagttttatgctgattttgatacttgctatttagttttttttgggtatatccctatttgttcatagatgcatattctgtttcgctgtatgtgtttatgtgccactgtgccttcatcaaataaaagtgaacttgttatttgaggaaataattttgtgcagaatcgtatgagaaatccagcaatggctggaggttatcaacagcaaggatatcaagcacgaccacctgcaaactggggccaaggggctcctcaaatgcagcaacctggctatggttatatgcaacctggagcttatcctggcccttcaccacagtataacatgtctcagccaccttatgggggctatccttcccaaccttcatctggtggatatgcctctggttgggaccagtcagctataccaccaaaccagcaaagttcttctgcaggtggttatgattactataatcaacagccttcttcacagcagcagcaaacgcctggtggttcagcagctccaactgataatagtggttaccattacagtcagccaccagcttctggctacatgcaaccaggacaaggttatgctcaggatggctatggtggataccatgcacctccacaatcaggttatggacaaccagcatcatatgaacaagaaggttatggctcggcacaaagctatggcagtgcaacgaaccctactcaagagggtcacactccctcctatggtggtcaaggagatgctggtcaagcacctacttctacccaaccttctgcggtgggtcagcaagggtacaatacaagtcaggtgcctagcccaaatcctggcagttatccacctcaaggaagtactcaacctagttacagtcagagtggctatgggagtcaaccaccagctcagtcgggctatggacctgggtatggaccaccacaagggcagaaaccactggtcaatcaccctgcctatgggcagacacagcagtctcctaccaccccaggaagctatggccaggcaggatatcaatcacagcctccatcttctggctatggacaagcagaatcaggtttgcaacggcctcaatcatctgcttatggtggtgctgcagctgcgcagccgggatatggtgccccaccctatgcagcacaatataacgcctcttatagcagttattcacagcctccagcatatccttctgacagcaatgcaagtgggggcactcgtgggacttatgaggcagcgccagctgctcaaaccgggcagcaaggtggagctggaaatgcatcaccgcgaacttgattagggataagtttgttttaagacgattaaatattttggtacttgatgcaaatggttttattgtactccaggtagatctagctatagtttttgcaatgtgatttaaagtaatgctagtgtttacttcgatattttgatgctgcaaatggttttggatggtttaattgtcttgcacttttatgcttgtgttttaatctgaggactataattgcttgttttaaaaaaaaaaaaaaaaaa

SEQ ID NO: 9388 - DNA, 479 bp, Gossypium hirsutum
  unsure (1)..(479): unsure at all n locations
  Clone ID: LIB3585-011-P1-K1-A3
gcagaataaacactacattcaggacccacccactgttgagaaatgtaaccttttatcaaagcaattattttacactcgtctagccagcatgcctagccgatacgaggcattccagaaggagatggattatgtgaagctaatgtggaagaaaaggaatgaatggaagattgaagatgcaggaattgctacactgttcgggttagaatgttttgcttggtattgtacaggagagattgttggtcgaggtttcaccttcaccggctattacatctaattgagtcaccaataatggcttctgaagatgagctggtctagctttttactatattcgttttcttgaatgtttccgtcaaaacatacggttttgccgttctataagaaaaatcagactgagctagcgataaccttttctgtttcaaaaaaaaaaaaaaaaaaaaaaaaaaaaagggcggncgatttaaaaaaatcaaactttcttt

SEQ ID NO: 9389 - DNA, 469 bp, Gossypium hirsutum
  Clone ID: LIB3825-008-Q1-N6-A10
gaaacaaaaaaggttatcgctagctcagtctgatttttcttacagaacggcaaaaccgtttgttttgacggaaacattcaagaaaacgaatttagtaaaaagctagaccagctcatcttaaaatccgattttggggactcaattagatgtaatagccggggaaggggaaacctcgaccaacaatctttcctgtacaataccaagcaaaacattctaacccgaacagggtagcaattcctgcatcttcaatcttccattcattccttttcttccacattagcttcacataatccatctccttttggaatgccccgtatcggctaggaatgccctaatcaagttcgcggggatgcatttccagctccaccttgctgcccggtttgagcagctggcgctgcctcataagtgccacgagtgcccccacttgctttgctgtcagaatgatttgctggaggctgtgaataactgc

SEQ ID NO: 9390 - DNA, 508 bp, Gossypium hirsutum
  Clone ID: GOSHI-09MAY01-C23850_1
attaaaaaaaaagaaaaaaagccgttgctaattaaattaaaaaccttcatttttttttactatttatatgctgattttgttcctctcttggcttcaaatcgtttactttggttccattgtttgagttgaagttagcaaatttctgggtttaaaaaagaaagaaagaaattcaccattttcttttaatctatttcttaatgattattactattccattttcacatgctttggattctactttaaccgtgtagaaatcatcatcatcacaagaatttgcattcttcaccctattgggcctttgctttttatcatttctctctggtcggcgagtgaaaaaaaaaagcagggtcttcaagaagtattcaactaagcaaagaagtgagcttggaagcagaggattttgaggattttaaaaacgagcttaaaaaccatagatgttaaagaaggggagccgtgaaagtagcagaaacagctcgttttttttgcttcaggttgcgtgtaaagtgag

SEQ ID NO: 9391 - DNA, 535 bp, Gossypium hirsutum
  Clone ID: GOSHI-09MAY01-C23800_1
ctttccgagcctgcaccttcctcggaggatgtttactcttctcttgatggccagccaagcctgaaaattgatatgaatgttgattcccaagaacagcatgctactatggatttggaaacaggtggaaacatatctggtaatgtgcctttggttgtggaagacaacggagataatatcacaaagacaccggctcaggatgctggaacaagttctgaggttgctgcagaatctgtaaatcctgacacagtctctaccaaaccggaaagcatcgaagaagcgcttgaaggtgaaggttttaccgatcatgccaagattgacagtacatgtgtcttgggtggagataccgctgaaaaccaaactgcaatggaggaatagctgttttcggcttttagctcttaagaaggtaaaagttttttcgaattatgagaaactaggtcaggaaattctctcattcaaccagtaatattggggggactgatggatccacatctgcctctgtattttaattttccatggcaattagcaattttggagc

SEQ ID NO: 9392 - DNA, 1643 bp, Gossypium hirsutum
  Clone ID: GOSHI-09MAY01-C23820_1
cccagcgtccgcccagcgtgggggggggggaacccccaaaatgaggaggttcttcctccgtcgtcaccgcctaaacccgaagaggacccggatccatcggcccgacccgctccggtccctaaccaaactctccctcccaccaccgccaccaccgccgccggtcatcggaaaaagaagggaccggtgttcgagcatggcttatactggactcgacatgccaaacccagatggtggaagccggaaaacatgctatcatgagacgtacgggtttgcctgctcgagatcttcggatcttggacccgctgttgtcgtacccatcgacgattcttggtcgagaaagggcgatcgtgattaatttggagcatatcaaggcaatcatcacggcgcaagaggttttgcttttgaattccaaggatcctgcagttactccctttgttgatgagatacagagccgaattttgtgccattatcaagctactaaagaccaggaaggtggtgttgacgattccagctacataattcgatcgagttctcaaaatttgtcgtcaaggttttcacagactcaaactcaggatgatgaaggtaaatcagaagagaaacagagtcttgaaaacccaaatggctcgaagattctcccatttgaatttgttgcattggaagcatgcctcgaagctgcttgcagctgcttagaaaatgaagcaaagacattggagcaagaggcccatccggccttagataaattgacttccaagattagtactctcaatttggagcgtgttcgccaaattaaaagccgattagttgcaataacaggacgtgtccaaaaggtaagggatgaattggaacacttgcccgatgatgatgaagatatggcgcggagatgtattgtgaactgagaaacaactacttgaaaattcttcaacctcgtctatgaatgagagggatgatatggatgatcacgttcttcgaccagacatcaatgagaggacacctgctgaaatctccttggcagccaattatgaaggtgatatccaggacgccgataacccccaggataatatgtttggtgctaccaatgccattggccgagacagccatggaactcatacaagtaccactcgcagtgctatcagcaagcaccttgatgtagaagagttagaaatgctcttggaagcatactttgttcaaattgacggtacactgaacaagctatccacgctgagggaatatgttgatgacacagaggactacattaatataatgctcgatgacaaacagaaccatctccttcaaatgggagtcatgctaacaacggcaacccttgtcatcagtgcttttatcgtagttgcaggtatctttggcatgaacatccatatcgagctattcgatgaagataaagcagggatgccagagtttctgtggacaattggaggtggtgctgccggctcgatattcctttatgtaatagctatcgcatggtgtaagtacaagcggttattagagtaagtcttctgagaccgtactgtatatcgcattgaaaaaaataagatgacattgaaacatctattgtataaacttttccagaatgttggacacgataagcttatatttttactgcctctatagtcgactgaaaaaaacac

SEQ ID NO: 9393 - DNA, 404 bp, Gossypium hirsutum
  Clone ID: LIB3048-015-Q1-L1-G12
cttgcagctgcttagaaaatgaagtgagtaattcgtctttgttaatttgtctatgagcttttttttgccatcttattgttttatttgttatatttggttattgttttctattgccaatgcaggcaaagacattggagcaagaggcacatccggccttagataaattgacttccaagattagtactctcaatttggagcgtgttcgccaaattaaaagccgattagttgcaataacaggacgtgtcccaaagggaagggattaattggaacacttgctccatgattattaaaatattggccaaatgtatttaactggaaaaccacttcttggaaattctttaaccttgtctattaatgaaaaggatgatatggatgatgacattctttgaccagacattaatgag

SEQ ID NO: 9394 - DNA, 383 bp, Gossypium hirsutum
  Clone ID: LIB3083-108-Q1-L1-D5
attaatcattatcgccctttctcgaccaagaatcgtcggggggtacgacaacagcgggtccaagaggttttgcttttaaattccaaggatccttcagttacgccctttgttgatgagatacagagccgaattttgtgccattttcaagctactaaagaccaggaaggtggtgttgacgattccagctacataattcgatcgagttctcaaaatttgtcatcaaggttttcacagagtcaaactcaggatgatgaaggtaaattagaagagaaacagagtcttgaaaacccaaatggctcgaagattctcccatttgaatttgttgcattggaagcatgcctcgaagctgcttgcagctgcttagaaaatgaagcaaagacatt

SEQ ID NO: 9395 - DNA, 428 bp, Gossypium hirsutum
  Clone ID: GOSHI-09MAY01-C23400_1
aaaatccattgtttttaaaccctttctgctagggtttcagactaaaaatgtgcagccatcagaccaccaccatacggttgccgacagcgcgcagatgatggctgattccgccaacggaggagaactccgactaagcccacggaggtttggtatggcgaacatggtttggacatggtgcgtgggtgcgtggtgcgtggtggtggagaacgtgggtagtggcggttgaatgttggcacatggcggctgaagggaggcagcaaatctaggatttccctctttgctgaaaaatttttgtgggctagggtttttttttttaaatttgggctttgttttattgtaataggttaatggctatgtttgggttctaataggctgaaattggatatttgttttttcggtttattttatttgatgcgcccgggcaaaaa

SEQ ID NO: 9396 - DNA, 1015 bp, Gossypium hirsutum
  Clone ID: GOSHI-09MAY01-C23790_1
ccccgcgtccgccccgcgtccgcccacgcgtccggggatagatggaggctgtttgctgctgttcttctttttgtagcttctcataacttagctttttgaagggttcttgcagagggtggaagtttgaagctctctcttaaagataggaccgtcgttttggcccttgcacgagtggatttgctggctttttttggttattctgtttcttcacatgcttagaccaacaaagtaatgctggcagtatgggaaagaaaggaagttggttttctgcaattaaaagggttttcataccacactccaaggaaaagctaagtaatgaatcggataaacgaagtggtaaagaaaagaagaagaaaggcctaggaaaattaaggcatggagaaaccaattcctttattcccctctttagagaacccagcagtattgagaaaattcttggggaggctgaaagagagcataaactagtattcaggcctccaacacctccagagcagccaacgacaccaccttttgtgcctcataaagatgcttctccaagagttccttcacagaggattgcctctcctaggattgcttccccgagggctgcttctccaagaaccgtttcccctccacgagctgcttctccaagagctgctccacctaaggtcgtctgtcctcgaccagaaccaactttaaggaatcatcatgcttctgctacgaaaattcaagcagcctatagagggtatatggcgaggagaagttttcgagcttggaaaggccttgtgaggcttcaaggagttgttagaggtcaaaacgtgaaacgtcaaacttcaactgcaatgaaacgtatgcagcttttggtgcgaatacagtctcagattcagtcacgccggatccagatgttagaaaaccaagcacgacaagaggttcattttaagaatgataaagaagtggagagtaccttgggtaaattggccttcagtcaggcatccgaggcaggcaatgaagactgggatgatagtgtgctaccaaa

SEQ ID NO: 9397 - DNA, 511 bp, Gossypium hirsutum
  Clone ID: LIB3585-054-P1-K1-E7
cggacgcgtgggcggacgcgtgggagaaactctcccccatgtgttagataaaaaggctaggaccaagaaaaagattgtttgaaacaacaatgttgtatgggatagatggaggaggctagatatggctgtttgctgctgttcttctttttctagcttctcataacttagctttttgaagggttcttgcagaatttggaagtttgaagctctctcttaaagataggaccgtcgttttggcccttgcacgagtggatttttgctggctttttttggttattctgtttcttcacatgcttagaccaacaaagtaatgctggcagtatgggaaagaaaggaagttggttttctgcaattaaaagggttttcataccacactccaaggaaaagctaagtaatgaatcggataaacgaagtggtaaagaaaagaagaagaaaggcctaggaaaattaaggcatggagaaaccaattcctttattcccctctttagagagcccaacagtattgagaaaa

SEQ ID NO: 9398 - DNA, 556 bp, Gossypium hirsutum
  Clone ID: GOSHI-09MAY01-C23710_1
cggacgcgtgggcggacgcgtgggcgagaaagtgccgcggaattcctccgagagccattattgtggatcgtgtggtttcggttgcagaagaggagacaagaaagggaccgatcgaacttggctagtcgatgccgtgaacaacaatgcagtgattataacacggtgcaaagccgagagattcatattagaacgaaacaatgtaggcagtgtaaggaaactgaagtgcttgggagtcattgcaaagccttcaaatcaaaacatcacaaaggaacttcatatagaagccaaagtaacaatatcagcatgtggggcacttttgacacctcttttaatgcattctagtgggctgaagaatcgaaacatcggtcaaaaccttcatcttcatccggtcctaatggcgtggggttactttcccgactccgattccaagttcaaaggggaaagcttatgagggtggaataataacatcagtacataaggtggtaggaaatgacaacaaagtgcaagccatcattgaaactccttcattggggcctgcacaatactctgcagtatg

SEQ ID NO: 9399 - DNA, 624 bp, Gossypium hirsutum
  Clone ID: GOSHI-09MAY01-C23720_1
cccacgcgtccgtgaaaatctcaattcgattcgaaaccctaaatctcaatcccatttcaaaccccagacatcacggaccccaaacttcaaaaccttcatttctaaattggttattgaaaaccaaaaaaaaaaaacagtttccttctgccttgggactgaaagagagcatttctaacaatgtctggcgaagaggaagaaaacgcagctgagctcaaaattggagaagagtttttgaaggcgaagtgtttgatgaattgtgaagtggctctaattcttgagcacaagtatgagcagcttcagcaaatgtctgacgatcccatgaatcaagtttcccaggtattcgagaagtcactgcagtatgtaaaacgcttcagccgttataaaaatccagattctgttaggcaagttcgagaaattttgagtagatatcagttagctgaattcgagctttgtgttcttggcaacctgtgtcctgaaactgtggaggaagcaatcgctatggtgccttccatcaagactaaaggacgggctcacgacgacgatgccatcgagagaatgctaaatgacttgtcccttatcaaagaaatttgaatagtggccgctaaattactggctgtctatgaa

SEQ ID NO: 9400 - DNA, 495 bp, Gossypium hirsutum
  Clone ID: uC-gsflnu33B144c06b1
ccctcgctttcgcggacgcgtgggcgacccacgcgtgcgagtggctttaattcttgagcacaagtatgagcagcttcagcaaatgtctgacgatcccatgaattaaagtgttccaggtatttcgagaagtcactgctgtatgtaaaacgcttcagccgttataaaaatccagattctgttaggcaagttcgagaaattttgagtagatatcagttagctgaattcgagctttgtgttcttggcaacctgtgttctgaaactgtggaggaagcaatcgctatggtgcctttcatcaagactaaaggacgggcttacgacgaccatgccatcgagagaatgctaaatgacttgtcccttattaagaaatttgaatagtggccgctaaattactggctgtttatgacactgaaaacatttatagaatgttgaatggccctttcttttaaaatatacatttctatctattttaccatgtgcccaaaaatcttaagagtg

SEQ ID NO: 9401 - DNA, 484 bp, Gossypium hirsutum
  Clone ID: LIB3829-035-Q1-N6-G6
aaaaagcaaaagccgttttcagacatgcggatttgcagcaccttaatgagaaaattactgaacataaaccatttgacacacttaagatttttgggtcacatgggtaaaatagataaaaatgttttttttataagagaaagggcattcaacattctattaatggcttcaggggcatagacagccagtaatttagcggccactattcaaatttcttgataagggacaagtcatttagcattctctcgatggcatcgtcgtcgggagcccgtcctttagtcttgatggaaggcaccatagcgattgcttcctccacagtttcaggacacaggttgccaaaaacacaaagctcgaattcagctaactgatatctactcaaaattctgatcatcagttaagggtcacaatagagaggcaagttaaatatcctaagaaaagcaatagaatatgcgcaagcattattgtcataagggggaagtactagttg

SEQ ID NO: 9402 - DNA, 529 bp, Gossypium hirsutum
  Clone ID: GOSHI-09MAY01-C23140_1
tccgccaacgcgtccgaaaaagtagaggtaaagagaaacaacgaataaaaattcgtcttcttatccgaaaaccaacaaaagaaactgtgtcaatcacataaaaactgagaagccattcacacacacacacggagtaacgccatggctaccatactaggaccatcctccgccgcaatctcagcatcttgtgggtcactcatttacccttcctcaaagcttgtcatcccttctatctccattaacgccgggtcttgttattggaagaagttttatggagggattgggattcaaggaaagaagggaaagccgcaatttcatatcgcagttactaatgttgccactgaaattaactctgttcaacaggctcagaagcttggtgctaaagagagtcaaagaccagtgtatccatttgctgcaatagtgggacaagatgagatgaaattatgtcttttattgaatggaattgatccaaaaattgggggtgttatgataatgggggatagaggaacagggaaatccccaactgttc

SEQ ID NO: 9403 - DNA, 372 bp, Gossypium hirsutum
  Clone ID: GOSHI-09MAY01-C23090_1
agaaccagaggaacccccgggctgcatgaatttggcacgatttcctatcagtcagcatagtgaagatcagctgcaagaaaattacaatggaatttcacaggaacttaatccaacaggtgaaagtgttacatgtcaagggcagctcaatccttcagtgtggtgatttggctgaatctattcaaaggcatgaagggttattaactcaaacgttttctttgaacaatgcaccagatgagcatgataacatggaaattggagatgggaattgcacaacagctgctgatcaagtagagcaaatttctgaaatggtttacttgcctgaggggggttctgttgtgcctgaaaacctttcaccacagagcatgggtgatg

SEQ ID NO: 9404 - DNA, 604 bp, Gossypium hirsutum
  Clone ID: GOSHI-09MAY01-C23310_1
gccggcacatttgaagcaagctacagctgggcaagagtatggcagttcaactctggcttcccgggcagcatctaaaatggtattgatcgtaaggggcttaaaactcgctcacctcaccagtcggtcaggcaagcttatttttagaagctgccatccttggtttagtggcaaggataagcaaatagaagcatcagaagtaaaaaggcgatctgcacccaacttatggagctagagttattcctgtctttgtgctagcattggctgatgttgatccgcaacttatgatggaagatgaaagctttgtttggactggaaatgatgttgtcatagtacttgagcaccaaagtccaaatatacctctgagttatgtttctgagactgagagaaggcatgctattccatcacaagcacagcgccatattgtagcagggcttgcttctgctgtgggtgcggtcgcggcaccggatgcgtgggcctcccctgtacatgaaaggcctgttgtgaattggctctgggctgcgggttgtcacccgtttggaccattcttgaatacatcttgaaatagtcaaatgctttaagatgttgcactgagaaatacgattta

SEQ ID NO: 9405 - DNA, 387 bp, Gossypium hirsutum
  Clone ID: LIB3196-054-P1-M1-C3
cccacgcgtccgagttattcctgtctttgtgctatcattggctgatgttgatccacaacttatgatggaagatgaaagctttgtttggactggaaatgatgttgtcatagtacttgagcaccaaagtccaaatatacctctgagttatgtttctgagactgagagaaggcatgctattccatcacaagcacagcgccatattgtagcagggcttgcttctgctgtgggtggtttgagtgcaccatatgaaaaagcttctcatgtacatgaaagacctgttgtgaattggctctgggctgcgggttgtcacccgtttggaccattctcaaatacatctcgaattagtcaaatgcttcaggatgttgcactgagaaatacgatttatgc

SEQ ID NO: 9406 - DNA, 1196 bp, Gossypium hirsutum
  Clone ID: GOSHI-09MAY01-C23290_1
gaaaggttggatcagaagtagctcggcgagccaaggggcttggcatgcatgttattgcccacgatccttatgcctcagctgatcgagctcgtgctataggtgtggagctggtgaactttgaggaagccatatccactgcagattttatttctctgcacatgcctctcaccgctgcccccgcgtccgtgctcaatgatgagacgtttgctaagatgaagaaaggtgttcgcattgtcagtgtggctcgtgggggtgtgattgatgaagaggctcttgtgagggcattggatgctgggactgtagctcaggctgctcttgatgttttcagcgaggagccaccgaaacaggacagcaagttggtgcagcatgagagggttactgtcactccacatcttggtgctagtacaatggaggctcaggaaggagcggctattgaaatagcagaagctgttgttggagccctgaaaggggaacttgctgcgactgcagtcaatgcaccaatggttcctgctgaggttctaacagagttgaaaccatatgttgaactcgctgagaaacttgggaggttgggtgtccaattggtagctggcggaagtggtgttaaaactgtaaaagtatcatatgcttcctctagagccccagatgaccttgacacaaggttgctccgcgcaatgatcacaaagggcataattgagcctatttccagtgtttttgtgaacctggttaatgctgattacactgctaaacaaagaggactgcggattacagaggaacgcatccttttagatggttcacctgagagtccactggagtccatccaagttcagattgcgaatgtggaatcaaaatttgccagcgccatgtcagagagcggtgagatcaaggttgaaggacgggtgaaggatggaattccccatttgacgaaagtagggtcatttgaagtggatgtgagcttggaaggtagcattatactttgcagacaggttgatcagccaggcatgatcgggactgtcggcagcattttgggcgaggagaatgtgaacgtgagcttcatgagtgttgggagggttgctccaaggaagcatgcagtgatggccattggagtcgacgaacaacccagcaaagaaactttaaagaggattggtgaagtccctgccattgaagagtttgttttcctcaagttgtagctggctgtg

SEQ ID NO: 9407 - DNA, 688 bp, Gossypium hirsutum
  Clone ID: GOSHI-09MAY01-C23260_1
aattcattgctgtgcttcatcaaatcatcctaggtttctttcatctcccaattcgatttttttatttttggatccaacgccgggtctaaatctacaccagatgctcctccgctcggattacagcttcggagccaccgctataatccagttcgaccccacacaaaaagattcatcgccttctccttctcgatccaaggcttccccagctcgctccgcaaagaagcctccccctggcgcacccaacccggatgattcctcactcgataacccggatctcggcccttttttgctcaggttggcccgagacaccattgcttctggagagggtcccactaaagctttggactatgcgattcgagcagcgaagtctttcgagagatgcgccgtggaaggcgagcccagtttggatctggcgatgagcttgcacgtgctggcggcgatttattgcagcttggggaggttcgatgaggcggttccggtgctggagcaggcgattcaagtaccggatgtggaacggggcccggatcacgcgttggctgccttttcggggcatatgcagctgggggatacgtactcaatgctgggtcaagcggagaagtcaattgggtgctatgagcaagggctaaagattcagatccaggctctgggagagaccgacgccagagttggccagacttgcaggtacttg

SEQ ID NO: 9408 - DNA, 774 bp, Gossypium hirsutum
  Clone ID: GOSHI-09MAY01-C98390_1
gcaactcatcaacacggctgttgtgtgttgcaacgatgcatcagtcattccaccggggaatatcgagaaatttggttgaagaaatatcctccaatggacttctacttgcacaggacgcatatggaaattatgttgttcagttcatcttggagttaaaaattccatctgccacttcaactttgatctctcaattcgaagggaactacgtgcacctctcgtctcagaagttcagcagtcacgtggtcgaaaaatgtctcatggtgttaaatgatgagagccgatcgaaactcattcatgaattgctgtctacagatcactttgaacggttgcttcaagatccgcatgcaaactacgttgtgcaaaccgctctccgtgtatccgagggatctctgcacaattcactcgttgaagcaatcgagtcccataaagcaatatcacgcaacagcccgtattcgaagaggattctctctcagaagctactcaaaaagtgaatgtacattctccccctttactttttgttgttttgtgtcaactaaaactatcatctatatatatatgtggaaaaaccggacttgaaaccctaaaaatgagctcgtgcgtttaacctgaggaagagtttttgtcttctaaaaatggcatgggaaatccccttccatgtgctccaaagagtgtaaaagataaaaaaagcaattttgaactataaagttgcttaatttttggacattgtagtatttatgttggcttgttgatctttatctatggtatttggatgtt

SEQ ID NO: 9409 - DNA, 437 bp, Gossypium hirsutum
  Clone ID: GOSHI-09MAY01-C98230_1
gaatgaaattagacagcgccattttcttggagctgatgaatgcgtgagaatagacaccgttttccctggaaacgggtggcctggagttgccattgaccgatcaagtggagaggttccaacaggaaagctgtgggcgtagatttttgcttttgctacatatcgtggcagttcattaacttcacagctttttgggggcccgtaggttctttttaatcccagcagcagtttactcggttcgtaaaaacgatgttttgatcctgccagtaagcggtgcatggaatttaggctgctgatatctgtacagatttttttttcttttggggccgtgatctcttattttgttcgtttattcccccttagccttgatattgtcatatcacagtagctggttagctcaaataccgtttggaatcaaattgaggtttcctgtgtgattg

SEQ ID NO: 9410 - DNA, 799 bp, Gossypium hirsutum
  Clone ID: GOSHI-09MAY01-C98220_1
gctccaattaaatctaaagaagaactcatattccacgttggtttccgtcagtttgttgctagaccgatcttttcgactgacaatattaattcagacaagcacaagatggaaaggtttcttcatgccggacgtttttcaatagcatcaatatatgctcccatttcttttccacctctccccttgattgccctgaagggtgcagcaggagccggcacacctgcagttgctgctgttggttccttgagaagtattgaccccgatagaataattttaaagaagattattttaactggttatcctcaacgagtatccaagttaaaagccacagtgcgatatatgttccataatccagaggatgtgagatggtttaagcctgttgaagtgtggacgaagtgcggtcgtcgtggtcgagttaaggaacccgttggtacccatggtgcaatgaaatgcatatttaatgggggccttcaacaacacgatactgtttgcatgagcttgtacaagcgggcatatccaaagtggccggaacaccggttccctgctaatgtttgatcaggagctcctgtttcataaatgcaggagatgcgcttgcttgtattgggaatgaagcaccggttcagaaatctggaccccaatttaccatactatattcttactctctttgatttcttctctatttgggttttctttgtccattttgtgatatggggcatttgagaactaatatgatatttatacagaaaaaagaaaaagaaagcaaataccattatctatacagctaaagagaagcttgcgtttc

SEQ ID NO: 9411 - DNA, 547 bp, Gossypium hirsutum
  Clone ID: GOSHI-09MAY01-C99550_1
tcgaaaaaacccagttcctagcttcttgccatccactgatgtcgttgacgaagtcaggaaaactttgaaaattaacaagaaacagtttcttcagtgttgggagattttgatatatcttggccttgatcctatagagaagcattatggaagactatgtaacaataatttgcaatagggtgaaggctgatatactaggtaaagattctgagacagcaggaaaggaagtaattgaggtcccaagtgttcatgacgaggagacgtcatttgccatgttcaggttgcagaacagcaaggctgggggtattcaaatggatgaagatcagacaaaaacccaagaacagcagctgcagcagttggtcgatgagagaatcaaggaggtgaagttaattgcacaaaaggtgtctcacaaacatgtatgaagggtaccactttcttggcatgatgcattgacctggttataagcatattactgataatttctagtgaagctagcactgttgtaggattagtaaatttgaggcttgttctgtaaaattttgagccctta

SEQ ID NO: 9412 - DNA, 175 bp, Gossypium hirsutum
  Clone ID: GOSHI-09MAY01-C99530_1
aacatgatgagcagtcaatttgctgaaaatcttaaaaaggctgattgctcttcatgctatgctattgcattcgtttctaacgccacctgctgaattaaagtggcttatttaactgattttcgacccctatttttttctattaataatttaagataccttgtattttaattaattt

SEQ ID NO: 9413 - DNA, 777 bp, Gossypium hirsutum
  Clone ID: GOSHI-09MAY01-C99780_1
tctcttgcctctcaaccaaggtggggcatgaatatttgaaaactgcagggcaaggagcacagcagtacgctccagggggggacctgctatgtctgccacagcactgctgcagaaagctgctcagatgggagcaaccgtttctttgcatccttgcttcatggttttggtgggggggggggatcttcattatctgcacagcaagataatttacaatggggtcaaagagaagttgagcctgagaatacctctgttgtagcagggcttggccctgggcttcctcgtgatggaagttcaggattaaaggaattgatgatgggaactcctgtgtttggtcctaggcaagcaactctggattttcttggattgggaatggctgctggtggcagccccaatggtggcctgtcagctctaattacctccattggagatgaacttgatgttgttgcagcagcaacttcattcgggggcggagatttcaccagcaaggacattggaaggagctcataacatgggacaaataagaattgccagtgcaggggttagcatcaagccatcaaaagaggcagttgaggtctttttttttattgttctgctgccttgtacacaacaaaggcgaaaatgcccgtctgtgtaaaaggttaaatactagaaccaaatttattaggatacctaatgtataaagcttgctgaaagagtaacatctctaaaaaaatgatttgggtgaagtggagacatttcgacattgtttatcttatattttatcaaagcctgggaact

SEQ ID NO: 9414 - DNA, 588 bp, Gossypium hirsutum
  Clone ID: GOSHI-09MAY01-C99250_1
gcaactcatcataaccgaacagacttaggttttcgtggttgctaagttggattcttggttttgtttactgtaactttaacgctaatggcctcctgtcgaaaaacgccgaaacggttcttaggtctgtttttcttgagggttgagacatgcttgtgttgttcgagactccggcaggctttgcccttttcaaagtcttagatgaagggaagctgaataaagttgaggacttgtcaaaggaattcttggctcctgactctgccagaaaggttgtgtcgttgaaagccttttccaagtttgaaaacactgcagaagctttggaagctgcaaccaaactacttgaaagtgcacccagtaaaggtctgcgcaagtttttgcgtgcgcattgtgatggtgaaacacttggagtggctgattcaaagcttggaaatgcaattaaggaaaaactgaaaattgatctgtgttcacaataatgcctgttatggagttgctgagaggtgtgagaactcagttgacagaactcatatctggtctaggtgctcaagatttagctccgatgagtttgggtctttcacatagcctttctagata

SEQ ID NO: 9415 - DNA, 599 bp, Gossypium hirsutum
  Clone ID: GOSHI-09MAY01-C99220_1
acgtcatcgacgctggttttccctttttttcttgttgggtttagggtgaaacttaagtgaaaccactcagatgggatccggtgggagcaagggttgttgtagagtaggaggaggaggaagagacactgcacctgctgcttcctcgtctagcagcggtgggctgaggggaagatccaaggttaagaatagagttttccggtcctcttgtttgggagcgttatctagatctgcttctcctaaacccaactttgatcaccggaaacaacctgcgtcggaatcggatctggtgaaaagagaaagtaacagaaaggttgaaggcgaagcggcatctaatgaggaaatgcaattgccattgccaaccccatgcatatcttccggtggtagcacctctggtgcagctgtaacagctgctcatcgctctccttctcgctgcctctccggcattagcttccttcctggtaatttgagcttccggttcagcagagctaatagcatggggtcctccgcggagatgttgaaccctgatgacgattctgagacacttgaacctcaacaacctccccgcaattcttgttctccgattatcttcaatgattcac

SEQ ID NO: 9416 - DNA, 676 bp, Gossypium hirsutum
  Clone ID: GOSHI-09MAY01-C94140_1
ggaaaatcgtatttattgtaattaaatacagactaacttcaatttcatccaacttaaatgactattttgatgaaaatacattagtttaattaaatttaattataatatatactactataaataaacgtaatgtcattacagttttaccacttgacacgtgtttttggttagccttttggttttttttttaattataagataaaggtcaaatttcagttttgacacctatattatactaaaacttaagtttaatctatatactttatttatttttatttaatttagtttctctacttttataatgtcattagttagcctaaataattaatattgttaattatttcaataaaaatgttagcgctaatttttcttaagaacactactccaacaaaaaaatttatcttattatgacgagttaagatgatgtttttaagaaaaatcctattgaatatttttaacattatttttattgttacataactactcaatgaatatatatttttttatttcaaaatgttatggacaatggtaatatcttataccttcttgtagagtttttttttttttattctgctagcaatgtatagaataattaccctaaacgttaacataaaaattaatattgtaatttttaattaataaaacgaattttatgggataatcttgttgttgaatg

SEQ ID NO: 9417 - DNA, 1441 bp, Gossypium hirsutum
  Clone ID: GOSHI-09MAY01-C94000_1
gggaagatccttttggaaggtggaatgcgctatttggaggtgaagcagattcttttgctggcctattgtcaagcaataaccttttatcttcttctcaagtctgaagggcagcctgttcgtggtcatcccgtcttaggtcgtattgtggagatccaaggcttacttgataaggtgaaacaacttggtgggaacctttcttctgaatggaaggagattctgaagaataaagaggctgaaatgggacaaaacttggttaaagagagtgctgaaccgatatctgactctggcactaaggatcatggtacatcactagtaacggatttacaaatggctgagcttgaagacacacctaatttgctaaaaatggagtttgctagtaaccttgataacaaggggatgaaacttaagcgtgagaatgaccaagtaggtgtacaaagcagggaaatgttaaaagtaagagcagctcttgaggagaaactgaaacagaagggaatctttagttccaacatccaaaagcctgataaaaccaagaaacataggaaaccagtgaagggacagcttgaaacactatgatgattttgttgatgatgctatggatgttgaaggaagtgctcatggattaagtaacgggcatgcaagctcaaaccattctaatatttccaaacttattacagctagacagaacaagtccaaggtcatatctggtgatgatgatttacccaagagagatgatattggagaaagacggaggaaacatgaactcagagtattagcaggagcaacagttaaatccgaggatgatcatggaggtgaatatgacatgttggaagaagatgatgggggtaatggaggcatttctggggacgaggatggtgatacggaagacactgaggaatcagaagatgaattttacaaacaagttaagcaacaaagagcctcaaaacttgctgcaaaggctgagatatatacaaggacctcagcgcctccctcgttacctgaaaccgtcgatggaaaacgactgataactcatcagatagagaagaatagaggtttgactcgacaacggaataagaacatcaaaaatccaaggaagaaatacaggttgcaaagcaagaaacgagagaaacaaaggaaaggtcaggtccgggatactcgaaaaccagttggtcaatacggcggagaagcctctggtatcaatgttggaatcagtaggagtattagattcaagggctgaattaaagcctaaagcatcaagaaagctagtaatagctccaattttgtgttaagattgtagcaaaaatggtcaccatctttttagtctaaaaccgttcaatgactggtccgaaactgttaaatgccccgctgatgtgaccgttatcttgatgacatattttggaatttattgttttaacacataaattttcatgtcatttattttttt

SEQ ID NO: 9418 - DNA, 792 bp, Gossypium hirsutum
  Clone ID: GOSHI-09MAY01-C94030_1
cttcaattttcattcatctactccctatttttcctcttaacttttcttagaagaacatcacctgcaaaaaaaaaaaaaaatgcttttctgatatttcaaccaagtcccatctcacaaaccctagtttatcattcatatccttgcccgaaggcaaaacagtgtaaaagaggagcacaaaagtaaaaaatcttcctcaatctaatcattagtagccgaatctgctctgtttaaaatggctgggagaaaccgcgttcctcgtgaagccttcaatgaccggcgtggattcccccccgagaggccgttctttcgtggtcctcctctgccacagccacctcatcctgcgttgttggaggaagaacttgaaatgcagcatgctgaaattcgaaagcttttgactgataaccacaggctggtagaagatcgaatggctatacaacaagagcttgtggctgcaaaggaggaaattcatcgtttgaatcttgtcattggtgaaattcgtgcagaacaggaactgcattcaaggggacttattgaaaaaggcttgaaactggaggcagatcttcgtgcaactgagccactgaaaaaagaggctatgcaactccgctcagaagttcagaaactgaataacgttaatcaggatctaactggccaggttcagactctcaagaaggatattactcggctgcaagctgataatcagcagattcctattctcagagcagaagttgatggcttgcaccaagagttgatgcgtgcaaggactgctattgattatgaaaaaaaagccaacat

SEQ ID NO: 9419 - DNA, 825 bp, Gossypium hirsutum
  Clone ID: GOSHI-09MAY01-C94350_1
cactgagccaatccttgttttatggtcatatttgcttacggttttctgcaaaagtagggcccaaattttgcccgggcccaaaagcacaaacaaaaaataaaccaaataataaaaacccaaatataaaattataacagtccagtattacaagcccactaaacgtcagtccaaaaacacctaaccctagtccgatagcccaaaacaatttcaacacaaaaaatcagcagcaaaccctaaatcccctggcgccgcaagctcccatgcgtggcctcctcccacgcgcacctccgcacgtacgccgccctccacgtcaccgtacggcctccgtacacctgcagaaaatcaacacgcaaagagcgcaacaaacgagcaaaagacaagcagaaacagcacaacaaaaggagaaaaaaaattgtaatagcgaagaaaaaacagaaagaggggcgatttttgtatttttcttttggctatataaagccataacgaaatctgtaaaatgatgaaaaaaaagagaaataaaaagatcgattttaaggtgattctttttctttgcgtttttctgttctttcatttttttattttttgtatacattcagatataaaaaaagaaaagagttaaaggtataatgataccttcgcgggcctttggagccatcctctactctgtctgaatcggaatgagagagaggagtgttctggctttcaaggtggcgatgagggaaaaggctcacctgtgtgtcgaaaccatcgagtcatcgaaccctagtccgcttcttggtagtcggagatcggaagggacgagggattgcggcgcgttctattaat

SEQ ID NO: 9420 - DNA, 1095 bp, Gossypium hirsutum
  Clone ID: GOSHI-09MAY01-C94340_1
ataaaaatgatattattttataattaacaaaagtacaaccaacaatcaagcaaaattacatcctttacaaaaaaaaaaaaccttttttaatctaattatctgaattgctcgtatatctcgatatttagcatcgaatttcacaattattttctagggacctccaactatcattacataaccataaatttcaacagctttcatttcttacattattgtcctcaacacatgcagcaattgtgtcatgaatacttttaatcaaagcttcaatctaattccacgcctagcttatttcaatcactttaaactcatctttatcaacaatccgtagtactttcccaagcatttctcctttcaatcttaacatatattgaaccataatctagacttactttcctggtgggagctcgatgcatggagaataagatgatcaagatttctttttctctttcttttggggaacagaaagatgaaccaattctttcatcttttataattaaattcaataatcctttaatgcccacatacttagtctaaattgatggatagaatcgagcttatccactaagcttgcttttaatagtggttaattatgcttaggtccttggtttaatactttacccaatccttaaattttagctccctttcaatatagtccctactcattaatttacaaaatacttaaataattctttttgctaaatctcaatttaaaaaattcaattagctggattcatgaaatagggtgattggatcattacagttcccgtttctcactcttagatatacttaattcataattttaattttggtgaaactaaatagaatgagttaatggagatagtcatgcttagccactaattataacaaccatagttaaattgtttttatcacctgtcacatttattttttatttttggacaaaaataaaaataaatacctaaatggtatttataataataccaagaggtggagggcatggaggaggcgacacccaattttttttacataatcattaaaacatcattacgcaatgatagtttttttttaaatataattttttaaaatggaggggtgagagagccagcactaatattt

SEQ ID NO: 9421 - DNA, 647 bp, Gossypium hirsutum
  Clone ID: GOSHI-09MAY01-C94310_1
caaacaaacgattatagtattgtaatcactttactaatcgaatttaaacactttccgggtttcaacattgattaacattttgtgaaaagaaaagaaaatttttataggatgaatagtattcacaaagcagttgttgttcaggtctcatcattctcgccgagatgaattacccaacaagctgtttgttgaaggtgagctctgtccacttgaccaatgatcttgtactgatataggagacctattttttacgtcttctaataaggtggttaaacattctccttccctttgcttcaacttcatcagcctccggcttcccacatcggacatctccgttgacttgttgaatgatttctcactttcttcgtctgaggaagctgcaggagactcgatgcacatgcctggaacccaagcgctgagtctgatgtgttctagctcttctgcgacttcgatcatggttggcctcatgtcccgatgagaagcgaggcatctaaatgctagctcggccacattatgaattgatgaaagtgtccaagcatctctatgtggatcagaggtatggatcaattatctcatccacgcagcctcttcctatcctatcgatagcaagtgcagctaagtttacttcattatgagcgcgtgaaaagtcg

SEQ ID NO: 9422 - DNA, 385 bp, Gossypium hirsutum
  Clone ID: GOSHI-09MAY01-C94330_1
ctcagtccaacacatcagttgcatatacaccacagggttttcaacattttatacaagaaatactagccaaattatacaatttagtattatagagaagttatataaagctctccaccattgtcaattcaaaactcataatcggtttcataactaatcaaaccaaatctacagcttttggtttttatgttgtacaagagagagagggagagaacctgcgcactgggctagaaaaattcttatgaatcaaaacttgcattaaatggcaacactgcagcatttaccagctaagtcactgtctctctctgagtcttacacctgttgcattgagctcgagatgcataattgggattgttgcattttgcacacatccaatctccactacgcc

SEQ ID NO: 9423 - DNA, 901 bp, Gossypium hirsutum
  Clone ID: GOSHI-09MAY01-C94230_1
ctaagaagcatattaacccgagttgctagggaaattccagagatcttccaaactgtaatttttatttttgaaggaagatcaagaagccatagcttcctgtaaaaatccttatagtcatcttgtaaagcataagctctaggattattcagtgttttgtaatagttgataggcgctcctgactgtgaactcacccgacgcttcagcgctccatacttggaaatcatcgtgtggtttttcagccagcggaatactaagaatcttctcggcaacaacttccagaaagatggaattatgggtcgagttatgtggaactaccagagcagctcaaagatatctggttgttgttagatcaacacttggaagccaagattagttattgatttttttcaaacctataataattatgcaatgatttgaaatttaaaattttgtacataacaaaattgataattgtgcactacagtttgaatgggtgtcatacatcgatctagatattatagaatgcatcccgctcgaatttttggccattcgaaatatgtaggacgcaaatttgtcattgattgtttacgtgacggtgaagatgcacaaatcagatcaagtgatgcgataattcgggtgaaggcaaaaaattttgccgccatcgcgagatatggaagcactgcacaagcttaatttacgagggaagaccgatgagaattggtgagattatcacaaggagtatatcaacatttaggatcgtaggatgaaattcttacctattcacaatgattgtgctaaaatgcattatcttcctatttatgagttgaaggactatgagtagttctaggcattatgtcaaaaagagcagatatgatcagaacttataatgagattgttcaaaaaaaaacttgcatagttgtat

SEQ ID NO: 9424 - DNA, 810 bp, Gossypium hirsutum
  Clone ID: GOSHI-09MAY01-C95920_1
gcatgagaaaactgcaagttatattatcatgatcttatttctcttattttacattccatcagctgtatcgcatataactatagctgtagcattattccctcatttcatatatgcttgaaaatacctggatcttccttaaagccctacaagggaacattaaattcctttgtagtgtcactcaactgtctgcaaatgaactttttgggagtttgatactgccaagacacagctcaggttgcctcactatgtaaacttgatcgccgaccttaccacttgaatcctggttccgataccatgtccatagagcccaagtctcattcttcacctccaagatcccatgaccaaagctactctctctgaaggcactgtaatcaggttgctggtcccaacagaactttcctgctgctggaccgctagtgaagtttgttgcacaaaagccacccatatcttcgtcatgggtagatgatggctctggacagttagcagcttcatcagcatgttcaattgccattttttcacggtttcccccatctcctactgtgatatgtactggtccacatggatctaatgtataattgtaaactcgattggacctctcataggcatgaacatgtccattaaagactatatcaacaccataactatacagtaattcttccatttccatcctcatacattctgcctctttataatgagcagtatatgtattgtaccatggtgggtgccaggcagctaccagccatggtgtcatggttctatcaacattagttaagtctctctccagccacttgtattgctttgctgatttac

SEQ ID NO: 9425 - DNA, 498 bp, Gossypium hirsutum
  Clone ID: GOSHI-09MAY01-C95590_1
ctgtatccccgaaactggccaaaaagaaacagaagaagcgaagcggcgtttcttcaatggacgtcaacgaaggaactgttcctgatcttcctcaagcaatggacacttcagagactgaagttcaaaagcctgattctgctactgaaaattaaagacgaagaagggacgtcgcgatgaagagatcgaaaaatgttcggaagatgaaggccgtggaaaaagctatcgctaagaacgagaagtacgccgagaaaagctccaagaccgaaagcaagaaatcaagaactcaatcagctaaacttctatatgactgagtgtgtttaaagaattttatttgccaaatgaacttgaatttgctgtcatttataatttagctgcgcttaggttcatgtataatagttacaaattttgcaattacaactgcttgcactgtcatttatagcttaaaagtatttgttgaggattggggtattccattgcaatagaagaatgttttggaac

SEQ ID NO: 9426 - DNA, 1111 bp, Gossypium hirsutum
  Clone ID: GOSHI-09MAY01-C95540_1
gttatactccatatcagatagaatgttcaagagattaagatcagcccaggattatgttattgattttcactaaagttggcggccatgttcctcttaagattctttcaatagaggatggtactgttcttaaatcttttagtcatcttcttcaccggaataagaaagtggatttcatcgaacagttcaatgaaaagcttcttgtgaagcaggaaaatgaaaacctccagattctcgatgtacgcaatgctgagctaacagaagttagcaaaaatgaattcatgaccccatcagcatttatatttctgtatgaaaaccagttattccttacatttagaaatcggacagtggccgtgtggaacttccgtggagaacttgtaacttcatttgaagatcaccttttatggcatcctgactgcaacaccaataatatatacatcacaagtgatcaagatcttattatctcttactgcaaggctgattctgatgatccattgtctgaaggaaatggctccattaatatcagcaatatattgaccgggaaatgtctcgcgaaaatacgagcaagcaacagtttcccagtggaagaacaatgcagctgcagtgacaaatgtggttgcagttcaaaaacgcagagcaacgcgtcgagaattagaagcagggtcgcagaagcattggaagatataactgcacttttctatgacgaagaacgcaacgagatatatacgggtaataggtacggtctagttcatgtgtggtctaactaagggtttgattttggttaggatgttatgtaatattagttgagtggtttgtgaattggggcattgtgattcgcatggaactgtaccattattaactattatttgtatcgaaaattcatttagtttctgctctaaatgatattcttattaggctttattcaaaaaaaaaaaaaaaaaaaaaaaaaaaaaaaaaaaaaaaaaaaaaaaaaaaaaaaaaaaaaaaaaaaaaaaaaaaaaaaaaaaaaaaaaaaaaaaaaaaaaaaaaaaaaaaaaaaaaaaaaaaaaaaagggggggcccctttaaaaagaaccaaattttactccccggggttggaaaaaaataatttttt

SEQ ID NO: 9427 - DNA, 478 bp, Gossypium hirsutum
  Clone ID: GOSHI-09MAY01-C95450_1
aaccgcggtcagagtgctggccgtcgccgcttaagggaacaatgcattggagcagagccattctaagtgctgccggcgccaagatcaggaagaaacataagaaagcgaaggtcatcgccgatcgaaggttgaggagatcatcggagattaacaaagggaagaagaaatcgacggtcgttgaaaggaagctgaaggttttgagacggcttgttcccggttgccgtaagctatcttcttactcgaacgttctagatgaagctagagattacatagcggctttagagatgcaagttcgatccatgacggctgttgccgagtttctcggtggtggcggtatcgttcgagcgccgccgccggcttatcggcttggttctaatgtcgactcttaaaaaaaagtgagaagaaagtgatattagtatttacaaattacactccttaaatgtaattagcaatttaaatataaaaaagttaatttaag

SEQ ID NO: 9428 - DNA, 707 bp, Gossypium hirsutum
  Clone ID: GOSHI-09MAY01-C95780_1
cccactgcaggtcttggagatttagcaactgttttcatcgaagtagtggacgtgggttatgcaagagaataattgcagtagtcaaagctgcaaacgtcttgggtctttcatttccagaggcatttggcaaacagcctattgaattgctacagctactttctcttaaagctcaggagtcttttgaggaagcacatctccttgtgcagactcatgttatgccagctgctagtatcgctcaaattcttgcagagtcctttctaaagggtttattggctgctcatcgtgggggatatatggattctcagaaagaggaagggccggctcctcttttgtggagattttcagatttcttgaagtgggctgaactgtgtccttctgaacctgaaattggccatgcattaatgcgtttagtgattaccggacaagaaataccacttgcctgtgaggttgagcttcttattctttcacaccatttctacaaatcatcagcatgccttgatggggttgatgttcttgtagcccttgctgcaaccagggttgaagcttatgtttccgagggtgattttgcatgtttggctcgcttgataactggagtcggaaacttccatgcccttaattttattcttggcattctcatagaaaatggtcaattggatctacttcttcagaagtattcgactgctgcagatacaaatactggcactgct

SEQ ID NO: 9429 - DNA, 656 bp, Gossypium hirsutum
  Clone ID: GOSHI-09MAY01-C95750_1
tgcttttcaaacaacattttgaggctcctgcgcaaaaaatccaatacgagcacgatcactgccctccaaaacaacccacgaccagattcaattcttttaccgttgatgaccgatcaggagagcaatggattagattgaaaagaaattcggagaaaaggaagatattacaattgatgtaaccatgtttgacgggtctgttcctgtccctgattctggtcaagtacagtctgatgagcagcttcatataacatttattgtcaacatctctaagggggatgatagtgatgtcttggagattgtctgctcagcttggccaaataccatagatatccaaaaattttatgttcgcgggtgtaataggacagcgaatcatccttacactggtccagagttcaaggaattggatgaacaactgcaggactcactctatgagttcttggaggaaaggagtataaatgatgggcttgcaatattcttgcatgaatacatgaaaaacaaagacaaaactgagttcattagatggttgcaaactgtcaaatctcacattgagaagaaatagagtagttttttttgccgtgttcattttgacttgttgctgttttagttaacaaaatcatgacttgctataccaattctatctgtgcctccattacaag

SEQ ID NO: 9430 - DNA, 424 bp, Gossypium hirsutum
  Clone ID: GOSHI-09MAY01-C95770_1
ccggacgcgtgggcggacgcgtgggcggacgcgtgggaattagacttcgaagccaccagcgatatcagagatttcttctagcatatacttccatggcataagtagatttggtaatgccttaattacatacaaacccaggcgttaggggagcgggtgaaagagttgccaatgccaaagagcaagtggaaacctttttattttattatttttgaaatgaaatcatggttcaatgtactatcatatatatgcccaaggaaataaaggaatagattttgagggctcaaaagaattggagttaaatctttgtaagttggcgggggtattttgaaccccagtcgtctcctgtacataggagggtaatatgatatcttgttctggggtaatacccgacataaatgttcattatccattcatattattattt

SEQ ID NO: 9431 - DNA, 525 bp, Gossypium hirsutum
  Clone ID: LIB3829-035-Q1-N6-G12
aataataatatgaatgggtaatgaacatttatgtcgagtgttacaccagaacaagagatcatattaccctcctatgtacagtagacgactgtggttcaaaataccaccgccaacttacaaagatttaactacaattggtgtgggagccctcaaaatctattcctttatttccttgggcatatatatgatagtacattgaaccatgatttcatttcaaaaataataaaataaaaaggtgtccacttgctctttggcattgtcaactctttcacccgctcccctaacgcctgtgtttgtatgtaattaatgcattacctaactgacaaaacacacagaaatctgaagccatatatgtcggcgaatgtgtcatttttcttaattttatttaacttatatatatatatgaaacggatttaactcaaaggggaaattatgcttcattattgtcctttaattcagagcaaacagaacatagcagcaaatgggatacagacgtaccatatctacttatgccatggaagtata

SEQ ID NO: 9432 - DNA, 648 bp, Gossypium hirsutum
  Clone ID: GOSHI-09MAY01-C96870_1
aaattaaaacatccaaagaccttataggtattccattgtcatggcatgtattccgagttatacaagaaaaaaaagggtacataagtggtgtatcaaacatggcaaaataaatctaaaactagtagcaataatgccatctaattttaactatagatgtttaaagttgcgaggagattttgattttaaggttgaacgaaacatcatccaactatctcttgctgcttggaaactttgcctcgtaagtttgtggcaccatgtatgttgcggtgatcatttttccagcgaaccatctcccatgtaggttccgctgtgcattgattgcaccttgtgcatcttcaaatcgtaagtacacaaaaccagcactgtccctgtccacgtgtatatgcttcaattttccaaacttgctacattcttcctgaacatcctctttgatatccaaatcaaattctggttccgtctccagggttggatcaaacatattctttaacaacaggcattcgcttggacttccgattgtgtcaatagcagggatgccattcgtagggagttgaagaccacctggaagtccaggaatggtagaaatagaggtcggtatcgtaggaggaacaagggacgccaatgaagcggacgcgtgggcggacgcgaaaa

SEQ ID NO: 9433 - DNA, 806 bp, Gossypium hirsutum
  Clone ID: GOSHI-09MAY01-C96580_1
caactctaatatacatattgccttgctggtattactgctgcttctggaatatcagcagagttgggtattcctttgactcatagaggcattgcaaatagcgttaggtttctcacaggtcactcaagaaagggggaaccgatcctctttttgttgctgagaatgccgctgaccctgattcgactttagtggtttacatgggcttatccaccctcccttctcttgcacaaaaattgatacatcatggcctaccaccagatacaccagccactgcggttgagcgaggaaccacacctcaacagcgcatggtctttgcaaaacttaaggatcttgcagataaaatcaaaacggcggagttagtatcaccaacgctaatcataatagggaaggttgttgccctttcaccattttggccgcagtctttgacagaagcatcccgtctggttgaagtttaactaaacggacatctatgagcagcagcttaaaaggttacaaatatggatttgggattttaataacaagtgagaggtcaatttcaaggctgatctaaggtgtaggccaaagcagcattttggtcctccttggacttgtcaatgtcaacaagacgcagcagcagccaccaaatttcattgcgaattttgttcgtcatttcttttgtgaccagttgtaattttcttcttttacatttatttgatgggacagagccaattgctctactgcctcacacttgtaacattgatgcttttcttgatctattaatttgacaaataaaatattgttggatactttttccaatactagtttatttt

SEQ ID NO: 9434 - DNA, 544 bp, Gossypium hirsutum
  Clone ID: GOSHI-09MAY01-C96530_1
cttaaaaaccaaagctttctcttttactctaaaaaaccctgtaggttttagcctccacagtaccaccatcaaattcggtagtcggtaatgcgtgaagagagtctccgactccgctcaggccatactcagagacttagtcgcctctcaacatcaggagaacgaagggaaaagacctaaaccgaggcttccaatcgatgaaccaaaggttcatttgagcacgtctttgatgtggcctagtagaggagtgctcgacgcggagggacgcgcgacgtccggtgcttgggaacctccacggttgcagcggctgagggtgttagatgctagagttttcattgttctttaattcatgttgggctggtagggttgctttgggtttaagtctgatgggtttagggtttgggtaatggtttgtattgggcttagagattggattcagtttgttttgttaactgccttgggttttaaatgtattgggccctgggtataaattgggcttaacaagcaatataaataagacaccaaaaaaaagataccgaattcatat

SEQ ID NO: 9435 - DNA, 274 bp, Gossypium hirsutum
  Clone ID: GOSHI-09MAY01-C96760_1
atcagttccaaaaacccccaactgaaacaaaggtggcccccccactgggactccctgataaaaccccgatttcaattatatccccaaagccccccccttgattttgttatctagattagaggtttctagcccccgaactctttacataataaaaaaagattatggcccgtgataatgcccttgaaggtgaagcccatagatcatgaaaatctatggggagtgtttaaggttgatcgtagggtttggaacaattaatccaattttgtttttgggg

SEQ ID NO: 9436 - DNA, 529 bp, Gossypium hirsutum
  Clone ID: GOSHI-09MAY01-C96110_1
aaatatttaaaaaaaaacttatatatattaagcatttcttcaacaaatgaatcaatggaatatacaacagtagaggtcacaaataatgaatgaattcactctaaagaagatcaaattaatagaaatcccaaaaatcaatgggaaaagaaaaaacataaatcccaaaaataaatgaattcactctatgtttaattcctataaacactaatgaaattaatgttgtgctaaagaagctgtcataaaacgtggtttcttggtcggcaatggactttcaacctcttgctctgtatagatttgacaaaatctgcttccatctttgatttccaactcgcacaaagcgggcaagtttaggtcaaagtcaaagtcgacgcaacgggtttggctcaacgcgccaccgtccgacaccgtcaccccactcaagctgacgctactgctcttgttgttggtgatggcggcggtggtggtggtggtggtggctggtgtttccgcctatcgtagtgacagcgtttgtgacctcccaaagcttggc

SEQ ID NO: 9437 - DNA, 663 bp, Gossypium hirsutum
  Clone ID: GOSHI-09MAY01-C96050_1
atctgaatccgcactatccattaccatatatcaatctaaaaatgtacaagatgccacatctaaccacccattaattacaacatcaacctaaattgttgagctaccaagcttaaaagataatgcctacctagccactcatttattacaacttcaatctaaatggttaaacttcctgccttaaaaggcaatgcctgtctacgatacaaggacccttcatttttcttaaaatactcataacaccaatggataatacgtttgaacatggatatcgagatacgaaaatgattacttttgttgaatgtgcatttgtatccgacgctcattttttgactccggatgacattgataccctctttgaataaagccacaaaaatggttgattggctacaaagggtaaaaactaagaacctgggtctctaagttcatacccatgagactggaatttcttccggcgagaccgggggaagagtagttgtcggattttcttttcagctgcagcttcagacatagcccgaattttgaatggaaaacgacaagtccgtacttccacaccagagaatattcttacatcaatgccgagactcccctatcgactccaatcaaattagcttcctctatttggagacctttttcttgcatagagattttagagcaacattgcac

SEQ ID NO: 9438 - DNA, 570 bp, Gossypium hirsutum
  Clone ID: GOSHI-09MAY01-C97970_1
cgggtcgacctcgcgtccgtcaatctccaggggccactgtttctatcgattcagtataaattttcccaaaagttttcgattcatagcgggaaaacccaaaaaaccagaaacatcaaccacaaagcgaaacgatgaaggtcatccctttaattttgatgggttgtggaggtgttggacgccaactcctccaacacattggggcctgcagatcacttcacgccaagcagggtgttcatttacgagttgtgggagtatctgatagcaaatcactaatcattgcatcagatgttaaacaaaaagagttggatgataacattttagctgaagtttgtagggtaaaatcagatggttcttcattgtccaaacttactagcttaggtgagtctcaagtgttctccaattcagaatcaaggacaaaagtgctagacattgcatcaattcttggaaaatcaacaggtttagcccttgtagattgctcggccagttctgagacgattggagtgctaaaggaaggggtcaacttgggttgctgtgttgttctagcaaataaagaaccttttacatgaacac

SEQ ID NO: 9439 - DNA, 558 bp, Gossypium hirsutum
  Clone ID: GOSHI-09MAY01-C97870_1
tcatcttggggggggggggggggggattccaaaaagtgaaatattggttgttccacggcagttaaatcccggaaaaggtgagtccaatgccatcacagctcatggcagaactgatcctgctcaatcaactggtctctttttcccataactgctccctcaatggcgcgggtggctacacgaaatactactatagcaaccctaaagtgcacaagaactttttgggaaggccatggaaggaatattcaaggacggtttacataaactgtgtgatgggagatcttatttctccgcagggatggttgccatggagtggtgacttcgcattgaaaacacttttctacggagaatatcagaattcaggaccgggttcaaacatgtcagcaagagttccatggagttctccaattcctggacagaatgtatatacttactctgtccaaaatttcattcaaggagatcagtggattccaacaaaagcttgatccccccccccaattattacctacaatactatcttcttgattgctatgtcaaagaaataacaatgctaatgtttgg

SEQ ID NO: 9440 - DNA, 618 bp, Gossypium hirsutum
  Clone ID: GOSHI-09MAY01-C97540_1
gggagcttgcaggaagaagaactggttcaaatggttcaagacttcatagaatcagaaccatcttcacccatagttccttcataccaccttcaatcttctaaccatcttgctcaactttctactttacaggagattcttaggtgtagaacagatactgagagaaaggttcttgagattgtggggaagcatattagaagcaaaagggctgtccaaaagtctagtggtttgaagaagtggcttgccatgaggctcaaaatgaatggatttaatgcttctttacgtcaaacatgttgggttacgtcctcaggatgtcctgctggtgattatgaatatgttgacatagtgatggagaatgaaaacggtgagacggtgaggttgatagtagacatagatttcaagtcccaatttgaacttgcaaggccttcaccaacctacaaggagttgacagatgctctgccatccatctttataggaagtgaagaaaagctgagggagattatatccgtggtttgctcggctgccaaacagtcgtttagagaggcagggttgcatgtaccaccatggaggaccactacctacatgcactccaagtggctctctgccactcctaatgttaac

SEQ ID NO: 9441 - DNA, 261 bp, Gossypium hirsutum
  Clone ID: GOSHI-09MAY01-C97510_1
ggaacaaaggatagaaatatattcatataagatacatatcggctactttttcagacagaatctattgaaggaaaaagagctggcaaattgagggcttattcttcgattgatttagtaatgaatttgtaggaagagacaatgattagttggctacataaaaatttttttagcaagtgcctcctatttctttcctaatgccaacggagacgagttcatttgtcactatttgtttataatgaagttctttttcttttttctttt

SEQ ID NO: 9442 - DNA, 848 bp, Gossypium hirsutum
  Clone ID: GOSHI-09MAY01-C97410_1
cggcgcgtggggcaattggttgctggtggaagtggtgtgaagtttgtaaaggtgacttatgcctcggctagaggtccagatgatctcgatactcggttgctccgagctatggtcaccaagggtttaattgagcctatatctagtgtttttgtcaacttagtgaatgcagacttcataggtaaacaaagaggacttcggctaactgaagagcgtatagtattagacggttcacccgagaaaccactcgagttcatccaggttcgaatagccaacgttgaatctaaattcgctagtgcgatttcaaactcgggtgagatcacagttgaaggaagggtgaaagatgggaaaccccatttgaccaaagttggatcctttggtgttgatgtaagccttgaaggaagtattgtactttgtaggcaaagtgatcaacctgggatcattggaaaagtggggaatatattaagtgaagaaaatgtaaatgtaaatttcatgagtgtcggtaggattgcaccagggaaacaagctgtaatgacaattggtctggatgaggaacctagtagagatgcattaaagaaaataggagaaattacagctgtggaagagtttgtcttcctaaagttgtaactacatggtcacacataatgctgggtttttgacagccatgaacttcaaaaggtgtaaaacgaatttgaagagatcttgattccacaccaccatcatgataagatctttgttactaatactgttcggataatgtagtgtcaggttttagttgacataattcaaatatcccctttcatgtaaatgatattacgggtgcatttgtttcacataaattatttttttgt

SEQ ID NO: 9443 - DNA, 627 bp, Gossypium hirsutum
  Clone ID: GOSHI-09MAY01-C97160_1
atgtctactttaccgtcagctgaaccaactatctgcatcttagtcgtccagttagaacggtgatgttgacagaaaaggcggtcatttgaagcagtttgagttgttgcttctgttaatgggctctcactcttagcacgaggctgatcagcaatcacagttttctttgggaatttagtagctttaccaccagtcctcggattcccttctttacacaatgtttcactaggcatatcttttaactgatcgccagtgactgatatcggtgttaccactgcatttccttcagtttgcttttttgaagacagtgaattagaagtgttgccatttgatgtttccagtttgaccttcttcctgcctgagtgcaaagtactgttttcatcagtgggagttggctgctctgtagcattccttttcatctttttcaaaggaatcttatcttcagtgttttcttttgtggacaaggaactttcaagttctccagccaccttggtgttccgggtaccacagagagcatcccctatcagctcttggtcatcagaagcaattatgacttccttggatttactaatccagtttccatccgtccattcaacgttaggccttatatcagagtgagagagttccttg

SEQ ID NO: 9444 - DNA, 571 bp, Gossypium hirsutum
  unsure (1)..(571): unsure at all n locations
  Clone ID: LIB3825-020-Q1-N6-B6
aaagtgatatttatacatttctcgtcatcaaataggaatgtattaacatgtngaaaaagaaaacaaagaacgaaatgaaaatgatctgatgttgctagtatgaacaatggaactctaaaacaataaatctaactcacagttgttgcttctgttaatgggctctcactcttagcacaaggctgatcagcaatcacagttttctttgggaatttagtagctttaccaccagtcctcggattcccttctttacacaatgtttcactaggcatatcttttaactgatcgccagtgactgatatcggtgttaccactgcatttccttcagttagcttttttgaagaccgtgaattagaagtgttgccatttgatgtttccagtttgaccttcttcttgcctgagtgcaaagtactgttttcatcagtgggagttggctgctctgtagcattccttttcatctttttcaaaggaatcttatcttcagtgttttcttttgtggacaaggaactttcaagttctccagccaccttggtgttccgggtaccacagagagcatcccctatcagctcttgga

SEQ ID NO: 9445 - DNA, 604 bp, Gossypium hirsutum
  Clone ID: GOSHI-09MAY01-C97220_1
gaagggacaacttaaaaattagatacattccgtctctttaggaaaattagatctaccaatcattggatgaccagttttcaaaaccaatactcaatatgttggaagaataagacattatagtttaatatttattacacaaaggcacagaattttacagttctatccataaaataaatggtaaaaagaatcttttgcttttgacatattttattgtattttcgtagcatgtaatttgccaattcacctttctcattcagcttgaagacccttccaactgatctcgaagaatttcgtacttcttaagctctgccatggaaagggatggtgaaagctctctcaataccttcacaaagtcatcatattctacaacaatggagtcagcttgatccatggaagatgaatctggactcaacaccttacgctttgcagcatgaaaccaagcatctgcacacaaggcatacatatctgcaccagtaaagtttggtgggcatctctttgcaattgagtagagggatatatcttcgtgcaatctaaactttctggtaagtgctttaagaactcgctctctgtaagatgcatcagagttaactccaacgtatagcag

SEQ ID NO: 9446 - DNA, 784 bp, Gossypium hirsutum
  Clone ID: GOSHI-09MAY01-C90830_1
ccagccgcttcggtttatcaccgccggcggtaacaactcaaaacccttgccgccgaaaagagcaaaaaaaaaaaagaaaaatgaccgaaagatgggaaaaatagaggaggcgtcacccccagtttcaaccctcaaagccaatatcaatacggcacgtttcaaggcgtagccaattactaccaccctcatttccctcaacagccgccgcctcagccctttgtcggcttacctcacgccatccctccgccgggctgccccgccaacccctatgtccatggctaccaggccgttacaggttttccagttgaagaacccgtgcccttgaggcaacctcgcctacctgtttgtggacttggaatgggatggttattgttttttcttggcttcttctttggcggtattccctggtatgttggaacttttattctactgtgtgtcaaagtggattatagagaaaaagcaggataccttgcatgtgctattgctattctacagtccgttgtcgctatgatcgccattacctttggtttgacaaagggaggaactcgtgcctggtgaggtatgggctatgaaattaagaagttggctgtacattatttttttcagaatcccagaagcattggtgcttgtaatttggtaaaaaaagaattgttcagccctcttgttcttccattaaagagacccccccataatcatttattgggtatatatgtatgtatatgcatatagttgtttttcttctgaattgctgaaagtataatgaatggctgtagttcttctgcct

SEQ ID NO: 9447 - DNA, 939 bp, Gossypium hirsutum
  Clone ID: GOSHI-09MAY01-C90540_1
ctcattctacaaaagaagaaatctacactgggaattcataattacaaaacctggaaactgaattagggttttgagccattcttgggggaaatttgaaggatttatatttagggtttttgggtttggttgatttttggtggagatttgaacttggaatcataaagtttgatgcttttttagttactacacttttgtagcatatgtgaagttttaggttgttgctgtgaaagatttctagctggtgcttgagcttgaattttaagggtttttttttttggatattttgttgaaggttttgaatggtttgattttgtgggtgtttggaaattttggggttagtttgttgtggttcagttttgtggtgaaatggataattcgaagaatcggcttaatgatcatcttggcgtgaacaaaatcgggaagaatataaagaagagcccgttgcatcaacctaatttcgctaataatgcgactaggcaacagcctcagcctcaagtttacaatattagcaagaatgatttcaggaacattgttcaacaactcactggttcaccgtcacataatgatcctttgccaaggcctccacagaatccaccaaaaccccaaagtatgaggttgcagagaattaggcctccaccattgacaccaatcaatcggcctcatattcctcccctggctcctgtccctgcccctgttcctgctcatgcaccggctccggttccacctcctggtccatataataaccctggcttagttaggcctggaccacctggtcaatatggacaaccaccatctacaatgatgcaacctatggttcctggtgatgctccatgggcaaacacagctgactctcctatatctgcttatatgcgatatcttcaaacttctcttatagatccaagtcagttggaaatcaagttcaacctcaactacatccgc

SEQ ID NO: 9448 - DNA, 1003 bp, Gossypium hirsutum
  Clone ID: GOSHI-09MAY01-C90560_1
ctcattctactaccgttagcagtattttattttttttattttttgtttccttcctttttcctttccttttctgctccctctcgctttactctcttcgcctctcagcttattctacaagttgatgttcaaatagaatcctaagtttaccttttttttttaaactatggatctgcttatttgacagttgttttttttcactgttttccttgaaagctcatgcaattgcttcaatgccgtttactgtttgtccccgtcacattgctgacccgcttgcattataaatgaatttccacactcgtgcttccgtcccgctgcttccgagtctcgcgatgctccttgtgtttatctgcttgttgttagtctcgcctctactggttcaatcttttgatgctaatgcctcttcgacaagcgccgccagagccctggatgcgctccttcaagactccccgcgcccgcccccgcgtcgccctaggactggagtgccctacgatgcccgtgttccttctaatttcactgggattagtattacagcaatgaggctgaggagtggcagcttgcggaccaggggtgtgaggatgtacaaggagttcgagatccccattggagttgtggagcaaccttatgtggaaaggcttgttttggtttaccagaacttgggcaattggtccctgcggtattattcgcttcccaactacacctatctcgctcctcttctgggtcttcttgcttatgatgcttctaacttatcggctaccgatttgccggaattggatttaagagcatctggggatcctataaaaatcaagttttcagatgttcgaccggctcccaatgggtcactgcccaagtgtgtttggtttgatttacatggtttggttaaattaagtaacttgacatcagccaacgagtgttcaactatccaacaggggcatttttctatcgttactgagtcaattgctccaccaagcccaccaaccagaagtgaaggaaaggagagtaatag

SEQ ID NO: 9449 - DNA, 1161 bp, Gossypium hirsutum
  Clone ID: GOSHI-09MAY01-C90730_1
cggccgcgtgggtctggaggggctagtagatggagccatggtcatcaccaccatcatcacagaggcaataaaaatttgaagaaaaggatgaagatgctgcgcacagaaacagttcgcaaccggtaggtgacacaccggacgactctttgaatgcagataatgcatctcagcctgaaatccgtaagagaaagagttctgctggtaccaatgatggtaaatcagataccggttttgcagatggctctgcctatagtgttaaaacctcggcactaaaggaaacttctcattcaccatcgaacttggtgtttggctatcttaatctcttctctgatggtgttcacaattttactgatgggatggctttgggaagtgcatttttgcttcatggatctgttggtgggtggtccagaactttatttttgcttgcacacgagcttccccaagaggttggtgacttcggtatactggtaagatctgggttcagtgtttccaaagctctgttcttcaacttcctttcagcactggtggctctagcaggaactgcaatggctttgctttggggacaagatcctggacagtcatctttgattgaggggtttacagctggtggatttatatacattgctgttgctggagtgcttgcagaaatgaataacaatggcaaaacaacattgaaaaatactgcagtgcagttactctcactagcatctggcatggctgttgccctttatatttcacttgtagaataaataaaaatcccttcaagatgagttttgtccaaatgaactcaaagctcctacaaggactaagtcactgctttctttggagttcgggttcctgctcggtttcaaggtaagctaccctctgtttagatctcagaaatcaggagagagaaggataaaagcttataagcttacccctttatttttggacaaattcctcgctctccttgacccacaggtgaaaactacatctctggtatattcccttcgggtaacctgtaacattatattgcctgaaaaaggttaaacagatgttttctttttttggtggaaatgctttttgtctaagattaactggattgtcccatgctgtcttgttacttgaatttgggtacgagtgttagtctggcgcaagtatatatttaatcctttgaagggc

SEQ ID NO: 9450 - DNA, 647 bp, Gossypium hirsutum
  Clone ID: LIB3543-062-Q6-K6-A12
cgacccagcgttcgccccgcgtccgtaatgtctctcaggccgagcgcggggactgaggttcgaaggaaccgatacaaggtggcggttgatgcggaggaaggtcgccggaggagagaagacaacatggtcgagatccgaaaaaacagagagaagagaaccttcttaaaaaacgccgcgaaggacttttcgctgagcagcaacaaccgcagcaacaacaactgctctcttcaaccgctggttccgagaaaaagttagaaagtcttccggctatggttgcgggtgtttggtcagatgacagaaatatgcagcttgaggcaaccacccaattccgaaagctgctatcaatagaacgtagtcctccaatcaatgaagttgtacaatcaggtgttgttcctcggtttgtggagttacttaatagagatgacttcccacagcttcagtttgaggcagcttgggctcttacaaatattgcttcagggacatcagataacaccagggtcgtaattgatcatggagctgtccctatatttgttaagctcttaggttctcccactgatgatgttcgcgaacaggctgtttgggcactaggaaatgttgctggagactcacctaaatgccgtgacctggtccttggccatggggcattg

SEQ ID NO: 9451 - DNA, 570 bp, Gossypium hirsutum
  Clone ID: LIB3543-030-Q1-K6-E11
ctcaaacaacccatcgatcattggggggggggtgaatgggcgattcgattagattgaaaagaagaagcgaatatgtctctcagaccgagcgccaggactgaggttcgaaggaaccgatacaaggtggcggttgatgcggaggaaggtcgccggaggagagaagacaacatggggcgggagggcgggagaacaagagagaagagaaccttcttaaaaaacgccgcgaaggacttttcgctcaacagcaacaaccgcagcaacaacaactgctctcttcaaccgctggttccgagaaaaagttagaaagtcttccggctatggttgcgggtgtttggtcagatgacagaaatatgcagcttgaggcaaccacccaattccgaaagctgctatcaatagaacgtagtcctccaatcaatgaagttgtacaatcaggtgttgttcctcggtttgtggagttacttaatagagatgacttcccacagcttcagtttgaggcagcttgggctcttacaaatattgcttcagggacatcagataacaccagggtcgtaattgatcatggagctgtcc

SEQ ID NO: 9452 - DNA, 463 bp, Gossypium hirsutum
  unsure (1)..(463): unsure at all n locations
  Clone ID: uC-gsflnu33B137f01b1
ttccttgcgtccggttccaaaaaccctcttccccttccactctctctctctctgtcattttctcaaacaactgatcggttctttccgaaaatcgtacgccgtatttcaccagccaattaatcagtgattcggtcggattgactgaaaaaaataaacaagcgaagatgtctcttagaccgagcgcgaggaccgaggttcgacggaaccgatacaaggtggcggttgatgcggaggaaggtcggcggaggagagaagacaacatggtggagatccggaagaacaagagagaagagaaccttctaaaaaagcgtcgcgaaggacttcttgctcaacaaccgcaaccgcagcaacagcagatgttatcttccgcgttggttccgagaataagttagaaagtcttccggctatggttgtnggcgtttggtctgatgacaagaatgcacagcttgaggcaaccactcaa

SEQ ID NO: 9453 - DNA, 968 bp, Gossypium hirsutum
  Clone ID: GOSHI-09MAY01-C90370_1
cctagttctagatcgcgagcggctggccttttttttttttttttattacgattacttgccttatgaaatataacatgaaaattaaatgcaatataacataattcaaggcaagcatatgataaacgaaaggggtcagtctcatttagagagcgatcgcgagggtgatggtgccggtgacactgaagcatcggtgcacggcaggtgtggtgacccttgtctctggaggagctcacgagccaaggcttggagatccccggaaccggtcgatgaggctgagccggtccctccgtattggcgtggatcgatttgcctttgctgcatggcccatgaagtttgcgctaccattggatcaaaaagtgatgataagtcgtatgtggccggcactgaagaggctgatgggaggtctgatatcgagagaggaggtgctgcaactagagtttgtgacggtggcggaggtggcggaggaggcgatggaagctctagtgtagttaaatgagcttgtaagtaggatagttctgcttgcaaattcaccacctgttgttgaagagcaaagatatgagcaacgcagccataaaccggatctcgaagccgagcttgagcctcgaaacatatggtgaccaccgcatcgagtcgtttgtgaactgggatatgaagaagcagcttcgatacattgcttgcaccgaaaaccttatgaaccgctgcgaaatgggctgcaccttgctccgagtcgaaataaggtgcgaatatacaaccaggcacacatttcctcctcaaaaacttgcaagcgccacaaggccctcctccaccgccgccaccagcagcagcagcagcagcactaccactgcaactgccggaaccaccgcctacactgccaccgctgttactaggatttgaactcatgattaaaccgtgcaacactttgatcttaaagtagtagaatagctcccatgatcaaggcggacgcgggg

SEQ ID NO: 9454 - DNA, 874 bp, Gossypium hirsutum
  Clone ID: GOSHI-09MAY01-C91890_1
gaaaacaaggaagatgacttgcttcaaatcctcttttttttttccttcttacatcaacagcatttgcaagattgtacattttttcagacttacacaggcaagccgagataaggcaacttgtaacaaagatgaagatttagacttttttcaccggctaccaactcttgttatgggtgggtcgagtagggtccagacaacacaatccaatacaatacaatacaattgcccccagcacccagaggcctttgtataatcaatgggtcttgggtaatctaaagagatcaagaaaataattggggctcaatgttaaaaatgttaggggaggccctaaaaaatcttcaaaaaaggctattgttttttattcaacttggctcggacttgcctgatctttgcgtccacacgtgcggggaacccgatcttagttttctgtcgtgccttggaccgttctctagtccacatgtgttgatcctcaacatctttcctgtagtacttgatctcttggatgatatgatgatcctctggctcgaaacatctttggtaagctatatgagccatgtaagggagggtacaagcgattgtggctaagagggtggtctgccagtagatgggtgcgggagcaagggcttccactaggatttggtaggcattgccagatattctaggagataccgcgccataaattaagagaaatatataccaagcagcaatgctaccccatattgtgacgtgctggatccatgtgaagtgactcattgtgagggcaatctggcaattgagagaccaaacgatgcaagtgaacattgttgtacccaagacagccaaatcggcggtctggcctcaggcacggaaagcttggtcgtaccccacgcggccg

SEQ ID NO: 9455 - DNA, 569 bp, Gossypium hirsutum
  Clone ID: GOSHI-09MAY01-C91850_1
gagatccaaattcaatcagtctttaagcattataatcattatacattaggggattagcactagtatttgcaacatggcttgggtgtgtgaggggaaggcctcgatttcccccccggccattaatttactgatgttcttttggccacaaaaaaaaaaacttaagaagcaattaattgccgaacattcatgggaacacagtactcggaagggccatcgaaaacggtttccgcaacaatgcgagacattgcctcagttggatgggataaatcccaaaaaacatgatctgccctgttgggacagtagcttgaaaatggcaaacaagggatttttgctctcagttccccaaggccacaacaggctgctcgtacctttttaaacccgtgagccgatggatctcggatgactttttgcatgataccatacaaatcgaggaaggcgtagtttaggcctggaagttctgatttcagcccctttaatacttctttaagcccttcattgtacttaaccacccacatgtttacttcttcattgcattcatgggggctgtgcttggctctttggggctggaa

SEQ ID NO: 9456 - DNA, 658 bp, Gossypium hirsutum
  Clone ID: GOSHI-09MAY01-C91830_1
actaataaaataaataaaatttatttcatcgataaggataaaagaacaagatgagaatcatcttgatcacatcaaaaggaaaacttggtttgtattatcttgacaatggaagccgcaacgacggatacatcatgcaccactttgttcatatcagtcagcggtgatttagtagagaactctatttcacaagaattggcctctatggctgcatcattggcgcctttcgctgcaaacttgtagtcacccgtcttgagagcttcgttgatctcaggtacatctccccttataatgacgttatagcgttcagcgcaagatgttaaggccttttgcatttcagggtcaagggcaagtccatcctgtagtagctcgtcgattagatcaagtgtctcggtcgctttagttttgagtgaatccaccatgatctgagctagcttcttcacgctggcgtcgcggctttcggggtttgatttgagggaccaaatgcaaagatcatagaagggtgtttgcttgcaagttctctctatcagattctggttgcctagaaggaggattggtcgaaaagcgttagcttgacacacaaggaacgcaaatattattacaaaccaatttttcatctttgaaaggtgagggagtgatggcactgggcggccgcccggaa

SEQ ID NO: 9457 - DNA, 628 bp, Gossypium hirsutum
  Clone ID: GOSHI-09MAY01-C91550_1
cccgtgtcgcccatcttcgcgaacggttccgagccctcgaagttcttttccaaccatccatgatcggtatggaagctgctggtatccacgaaacaacttacaactccataatgaagtgcgatgtcgatatcagaaaggatttatacggtaacatagtgcttagtggtggcactactatgttccccggtattgcggatcgaatgagcaaagagatcacagcattggctcctagtagcatgaagattaaggtagttgcaccacctgagaggaagtatagtgtgtggattggtggctccatattagcttccctcagcactttccaacagatgtggattgcaaaagctgaatatgatgaatctggcccttcaattgtgcataggaaatgtttttaaagcacaagcaaagaagagataggctaagcctcaagaactgctctgtctaaggtttcttgcaatttcatattttggtttcattatctgcttttttttttggttccatcattttgtcgtttggacaataatcttgaaacatttgatgattgttggaatatttatattttcagttatcatctgtttttctctttggtagtgaaagataattgcctaagaaaaaaaaaaaaaaaaaaaaa

SEQ ID NO: 9458 - DNA, 878 bp, Gossypium hirsutum
  Clone ID: GOSHI-09MAY01-C91500_1
cttggatcatcaggttggacttgatggagaaaaaaacaaattatacccaaaatggcttcccgaaggtacaatgggtaaagggtggaccatccgaaggtgtaacatggtacaagggatattttgatgcacctgaaggagacaatccagttgctgtcaagatgactggtatggggaaaggtatggtttacatcaatggtagaaacattgggcgatattggatgtcttacctctctcctcttaagcggccaactcaatccgagtaccatatcccaagatcataccttcaaccaacaatgaatcttattgttatagtagaggacgagaaaggtgaccctaaagatattgagatagttctggttgacagagataccatttgcggttttataactgaaaaacacctaccgtcagtgaggttattcgaaggcaaaggtggcaaacttgtagccttggagaaagatttgaaaccaagggttgaacttacatgtccaagccagaaacaaattgttgccgtggagtttgccagctttggtgatccttttggtgcctgtgggcacttacgtcgaaggaaactgcacatctcccgtagcaaagcaagttgttgaaaagttttgcttgggaaaaccaagctgcaatatccctctggacaccccggatttgcacaataaaaatgaagcatgccccgaaatgaagaagacattggccatccaagccaaatgtgcttttaaagcgtagttctaaacctgctttgagaatttcatgagctaagcctaattttgtttagagaaacgacgagtattatttgattgtacaaagtcatttgctattttatttctgaaatgaattgattcttttatattgggaattatccatatttatgg

SEQ ID NO: 9459 - DNA, 693 bp, Gossypium hirsutum
  Clone ID: GOSHI-09MAY01-C91450_1
gatgaataagcattgccattcaacatttcgttatccaaaaaaaatacaaaagttttaacttctataggctccaaaaacataaacatcaaatttaatgccagaaaaaaaaacacgactaaaatagtaaacgatttgagatacgcaacattacaccctaaatatataatttgccaaaacaataagctttcaatcagaagcaaggggactcaattgccttttttagacaataaactaccagtttactaagaaaagcataatctctcaaaaattaaacatgcacataagagcatgtaatatcatctcatttgccaccatgcttggccttcttgtgggactctagaccaccctcggaaccaaaggacttgctacaagatccacaagagaattgaccaccagactttggactctttccagaagttttcccagcttgctttgatgggtgtggggttgcagtgtgaccacccttcttaccatctgttttctgaggtgtcgctgcaggtttagccttctttgcagaaacaggtgttgcagcttctgccggtctctttttgctcgactcaaccttcttaggtgtctcctcatcctcatcatctgaaccccccgcctccgccctctcgtcagcttcatcatcagaaccacttccatcctcggaatcactatcatcatcatcgtcctcatttttcttgttatcac

SEQ ID NO: 9460 - DNA, 779 bp, Gossypium hirsutum
  Clone ID: GOSHI-09MAY01-C91430_1
tttctttttatagtatgattgaatcttgtgtaaaattcgtttttgacccaaattggggtaaaattgtaacacgaccctcacttgggcaaacgggcaacgtaatgaaacactagagttcacgactttttaagctaatcacatccacaatggggatccattctaccaatgatttcactaacaagtccctcccatttttacatatttacatttataccaccctcatctctattccgggatagaactcaacacagccttgaactgccctctccctctccctctccctctcttctccccgccgttcccaccaccagcaccggcggcgggtgaaaccttccggcgaggagacccttcagaaaacgcgaaaggggtaaccgccttactcccgcgcctgcatttttcagaggcggtggttttcatcaaagcggagctggctttgacggccaatgcagccatttcctcagcttgtaaaggatggttgagccaactcaagggcaaagcgaagtaaagttgaccgggttgaagctcctcgtcttcctcgatggcggatacgaagtcatcgaagtccatctcatcggcgttgcagatgaaacacatgggattcttctgcaaaacgtaagaagccttgacggggtaaggaaactcttgtaaccgcccatcatggagaatcagcttggcagttgctacgtgagtcgaatcgcaagaactacaaatacccttttctatttcagatttgtggatttcaacggtcgaagctgtcgattatttttggaatagaaagc

SEQ ID NO: 9461 - DNA, 1086 bp, Gossypium hirsutum
  Clone ID: GOSHI-09MAY01-C91600_1
catcaagagaaactgggacacccttcttcttaactccactaacatgatgattcttactgctgcaactatggctggtgttacagcaactagccatggtgtttctgttttgggcttgaagttgggttccattctcttgttctcaggagccactgcaacgttggtgattatgaacaagatccaaccttcaaagcttttggaagagcaacgtaaggcaacgaaattgtttaaacagcttgggagccaagtacaaaccctaatcactgttggttccccaagcaaagaagatgtgaaaggtgttatggcgaaaatcttggtcattgataaagcttaccctcttgccctgctaggtggtgcaatgcttgaaaaattcccggaaagtttagagcatgctgtttggtggcctagaaacgagtctcagaaagaaaatatcaatagaaaggtggagatgggcaatgggtggactaaggagctcgaatcggaaatgagggaaatcgttgaggtgattaagagaaaagacagtcaagattatgagagattaggcaacaaagcattgaagataaacaaagttttagctacatcagggacattactaactggaattgcagctttggcatctactttcatggggtcttccaatatcggaccttgggcagcaacagtggcaaccattacgggggctttagcttcagctgttaacactttcgagcatggcggccaagttggtatggtgtttgagatgtataggaacaacgccggcttctttaaatatatgcaggaatcgattgaatcgactttggatgaaagtgatgtgaagaaaagagaagatggagcgttgtttgaaatgaaggtagcattgcaattgggcagaagcttatcacagttgagaaatttagccaaaaaatccacttattctcgcatagaaggaatccccattgatgaatttgcaagcaatttgttttaatgttgcactagattcatgatcataacaagaactattaattgcatggtactgtactcacacctgatggatcccaatactctgtttccataataaattaaaataaaaatactttaagttttgttact

SEQ ID NO: 9462 - DNA, 600 bp, Gossypium hirsutum
  Clone ID: GOSHI-09MAY01-C91180_1
cttggagaagggtcactggttctctcttctctcttcttagactctaactaacatctacatggcttctgcaaacagatggctcaaacctgaggtgtatccgctatttgcatcggtgggtgtggcggtcggcatttgcgccatgcaactcgtcaggaatatcaccaccaaccctgaagtcagggtaaccaaagaaaacagggcagctggagttcttaacaactttgaagaaggtgaaaaatatgcagaacatggactgaggaaatttgtgcgcaacagacaacctcagattatgccctccgttaataacttcttctctgaccctaaataaaatccatttgcacaattcttcaaaattggatgaaagtaaggcataaagacgattgtattcttgactgccaagttttttgaaatatattcttcttgaataattaaaataataagatttcattcctttccctttcttcttctgttgtaggcttctagcttatgttagccaaattccaaattgattgtctgttgatttttttttaattatttaaatttacatataaatattgtaagaactctacaatgcctcaagggttgaaaaagattggaatc

SEQ ID NO: 9463 - DNA, 503 bp, Gossypium hirsutum
  Clone ID: GOSHI-09MAY01-C91120_1
tcgttaattcacagccttagaaaatcaacttattaaggtctgttccagcaaccaccgaattcaccacttaatcaggtggtcgatagcatatcaaaaacaatcaacggcgccttaggacctttccaaccttgatctcaacgaagtgaacagatccatggccgtttcgcaaggtacggatggtgctggcgtggctggtggtgtactggagcgtgctagggcagtggaggctgaatggttgcggcgcacagagagagccctagggtttctgctcttgaaatggttcgggccttttgggctgatgtaatttgggtccgggtttatccgttaatgggttttaggatatttgattttgggttgtaattagacagataatggactgttataattatttttgttttttcttggtttaaaaaaaaaaaaaaaaaaaaaaaaaaaaaaaaaaaaaaaaaaaataaaaaaaaaaaaaaaataaacatacacgtgcatgcaaaagaaataaaata

SEQ ID NO: 9464 - DNA, 616 bp, Gossypium hirsutum
  unsure (1)..(616): unsure at all n locations
  Clone ID: AW187560.1
catcatttagccaaaattcacagccttagaaaatcaacttattaaggtctgttccagcaaccaccgaatccaccacttaatcaggtggtcgatagcatatcagcaacaatcaacagcaccttagggcttttccaaccttgatctcaacgaagtgaacagatccatggccgtttcacaaggtaaggtttgctttttccccttctcttcagaaattatttttgaatttttctattcaattttcgtataatgtatgtgtgtgtgctcccttttattcgtttttcatgcgatagataaatcaaagaaaacagaaacaaaatcgaaagaaaaatgagaatcaaatcaccttgtggagacttttttgttcaagcttttctgtattgatttttttttgtttttgtgtctgtattcgtaaaaagaaagaacccccctttccaaagattaaaagctgggcttttatattcgaaaaaggaaatcaattgaaaatatacaatatatttgtttccattcgctgctgtttttgtttctttcttgcaggtacagtctgttggcatgcgcatggggtgggggcgtgatgtacaaaggctgtggaagtatgggactgctatantggaagtat

SEQ ID NO: 9465 - DNA, 565 bp, Gossypium hirsutum
  Clone ID: GOSHI-09MAY01-C91340_1
gcttaactacccttggagaccatttcattaacataaagataatgggcaaattcagtaccaaacaaaagcaaagccaaaaaaaaaatgtaaatttacaaataagctgtaagctgccactaaaacaggctaatcaagtagatccaatcccaaggggaagcatcacaacctcaggtgacagaagagggaggggacaagatctaccacggaccacgcaaggcctgcatattgaaggaatcggataccagtgtcgacatcaaataaatcttgttgagagaagaataacatcttgggcatataacttgattgctttatctcactggatttcctggctgtagctgaaccattaagcattgggatgtagctggttgattttattgggattcccaatgtgtttgacactactgggagaatccatttcgcaagagccttgctgcaaaacttgacaatcaggattgtcggtatcccaactagcattcttcccaaaaacgtagggatcgtgagttgcgaggtaaatattcgtggaacagcttcatgggggaactggtgatatgtctgttgaatcccg

SEQ ID NO: 9466 - DNA, 590 bp, Gossypium hirsutum
  Clone ID: GOSHI-09MAY01-C91250_1
cccagcgtccgtctcactctcctatctctcaatcgattttaatcactatggccaagagctcctttaagttggaacatcccctcgaaaggaggcaggctgaagctgctcggattagggaaaagtatccggacagaatcccggtgattgttgaaagggcggagaagactgatgtacctgagattgattagaaaaaatatctggttcctgctgatcttacagttggccaatttgtctatgttgtacggaagaggattaagctcagtcctgagaaggctatattcattttcgtgaagaacattctacccccaactgctgctatgttgtctgccatatacgaggaaaacaaggacgaagatggttttctttacatgacttacagcggtgaaaacacatttgggatcattgaggcacatgatcaagatatatccatgtgagtatggcttgcgaaaaaaaaaaattagtttaagatgtaaatcctctttgctctgtgttagttgtaggtggatgttgtcttgcttatattattagttcaatattctgtgttaaatggcctcctttgaccatttcttctgaagttggtaactaatata

SEQ ID NO: 9467 - DNA, 1073 bp, Gossypium hirsutum
  Clone ID: GOSHI-09MAY01-C92920_1
catgaaatggatttatattgagaaaaggaagtaaaaacaaattagtgaatgaatattcatatgaatcaagtccctgtgacaggaaattttagactatggattaagcatacagagtgctaatgaatggttctacttttgtttttgttcattcatcggacgaaataaatgatttttgtttgttattgttcattcatcgaactaaataaatgatcatgagtaagatttgagccggatgctaatattttcccggagaacataatctttggagtttcaggtataatacaaatgctttcagctcttcatcttattgggtggtactgttcagagacccgcttcggaggcaattttcgaagaatgaacagcaccaaagctgatggaagaatttctacgaacatgtaatagataagatttaggattggatgatctagaacataaagaccagcattcatgtcggccgagagtgtggacacaatgcatcttatcaagcaacaagtacagcagattcctgttacaaagccgacctcgaacccccgcgtccgcccacgcgtccgttcgatagggaaccgcctcaacatgaagaacaaccttcccaccatatatcatgaaccccaatgcagcacagaatgatattactgaaatgaagagtctactaagttccactgcaagattgctttgacttaatcttactgatatccataggcatgcctgagcaaagtatataaatccgttgatgctatagtatgcaggccgaagtttattaatgggaagacttcttgcctggtgatatatctcggcccagaaaaggacaagtaatgtatatgttgagaaaaataaaagaccgggaagatccagaagcaccatttcaagtgccttagatttaacgagaaacacgctcttgtagaaaccgaatagaacagccctcaatccgttcacaataaagttcatcaagtggaaaacttttgtgttgtccacccatactctgacactctcaactgaattcccgcgacatagttgtaccagggcaacaatggaaaccacagcataggaggcagataataaatggaaaatgatcc

SEQ ID NO: 9468 - DNA, 357 bp, Gossypium hirsutum
  Clone ID: GOSHI-09MAY01-C92440_1
gactactacactcaataccttgacagttaagaagatccgagtaggtctcgtatgtccttctcggatcttcttaactgtcaaggtatagagctactacactcaatatagcatcaaagaaactgcaatggcataaatcatagactttcctcatgtcattgtcaacaacatgattagaatgattagtgtctggtgggcttagcttgatgcttgtttttgtcatgctgtctaaattgtcagaacaatatttgatcagtagatagacctttcctctgtattttggcatgttacacataaataaattaataaatgcggccaaacaaatattgttcagaaaaaaaaaattttaaagaatatgtt

SEQ ID NO: 9469 - DNA, 1081 bp, Gossypium hirsutum
  Clone ID: GOSHI-09MAY01-C92430_1
gttttcgagtctcgaccggatgcctttgttcagatagcttcactagccattcgaactggtaacgggctacttcttaaaggtggcaaagaagctaggcgatcaaatgcaatcctacacaagatcattacttctgccatcccagacagcgttggagacaaacttatcggactcgtcgcttcaagagaggatatcccagatttgcttaagcttgatgatgtgatagatcttgtgatcccaagaggtagcaatagtcttgtttctcaaattaataattcaacaaaaaaaaaattgttcgggacgcaaagatagactacccagcagcatgtaacacaatggaaacacttctattacaccaggatttgtcaaataatgatttgctcaaggagcttcttgcggaactccgacgtgaaggggttaccctttatggtggaccaagagcaagttccttgttaaaccttcccagggcacaatcgttacattgtgagtacagttcactggcgtgcacagttgaattcgtggatgatgtgggggctgctattgaccatatacatcagcatcgaagttctcacaccgactgtattgtcactgaagatcgcgaagttgctgaaatgtttttgcacagagtagacagtgctgcagtatttcataatgcaaacacacggttttgtgatggagcacgattcggacttggtgccgaggttggtgtaagtacaagcagggttcatgcccgaggtccagtcggagttgaaggattgttaacaactcgatggattttgagagggagtggacaggtagtggatggtgacaaaggggttacttacagtcacaaggatcttcccctgcaaacacaaatataatcagctccgaaattaagagatggaaggaaatgattcgtcttcttttccttgttcatcctctccattagtttctgtatcttgtagcatggtactgcggaactgcttgtatgactgcgcattttgtttacggtttttggccttatagttatgttcccagaaattttctgtccggaacatgcggaacgccgtatgattctcttgtaaatggaaaaacttttaagatc

SEQ ID NO: 9470 - DNA, 380 bp, Gossypium hirsutum
  Clone ID: GOSHI-09MAY01-C92790_1
aaagattctacccatgaatttctttttagcccaaatgagcattgaggttacacccactcgacaaattctattgaggcaaaattcatgaaaatctttgctccctcttccatatctgatttagttcgttctaattgaaggaatccattcaagtattgaatttatgttcaagttgcatgttccgattccaagtaggagccaagccatactgcactcgcgaaggcacaatcatggagtaggtgctacatgtcttctctttctctttgacagaatgggcaatcagtatcaaaagattgaattctcttttggatcttcgttttgcacaataatgcattgttcaaaattttccacaaaaatatggtaatacacgacaatttccaatc

SEQ ID NO: 9471 - DNA, 227 bp, Gossypium hirsutum
  Clone ID: GOSHI-09MAY01-C92170_1
acaagcaaaataataagttgaatttcataaattcaaaggaaaatcatgaaatcattatttatgaggaaatgtaggttccatgattgattgatggatttcacactctaaaaatagcaacacaagaatgaggcattgacttttatagaaatgggggtggggggtactaactacttatagccagctgatgttgctgcaactttaaggagtaggccgaagagtgaaaaagg

SEQ ID NO: 9472 - DNA, 514 bp, Gossypium hirsutum
  Clone ID: GOSHI-09MAY01-C92160_1
cccatgcaaatggaaggagggaaaccttggcattcactaagaatgtgaaaagaatctgatccaatgaaagcatcacaaagaacagtctaggttttacaataaataatgtacactatttcatcatacacccttaaaacactcaaaaacccagcaccaatgtatacagagataaaagataatctcctttcatgctctggatggtggaaacattttggacatttacctgcaattgcacttctccttaggcaggtagcttctactcttaagttctgtggatttcggcaacaagaaatacaggaaatctacaagttcaccggaggacttcccttgaacaaaagatcataagcaatgtgttcccaaggcaatgttatagacattaagcaacatttgagaggtatcatttcttcatcagaagatgaagtggcagaacccgctgcataagcgttctttgctgctacagatgcacccacgcctccgcccccgcctccgcccccgcgtccgaaacccttttttg

SEQ ID NO: 9473 - DNA, 315 bp, Gossypium hirsutum
  Clone ID: GOSHI-09MAY01-C92060_1
gctcccaccattggcctccccacgcatgctcagccacctcacgcgccaaccactgttcacccacgcctctgacacctgaatctccacggacgtgtcgtcggaaagctttctccgtcgttgcaatcgggttcgaaaggggggtgagggttctcttcttttgtttcttataggacgctgaaggtttggccttcaaaggggctttgaaatggggttggaatgcccatttttgcgcgtagccggccaccgaatgcagtggtggtgcggcgggcagcgagagaacccgatcatcagaagaagatgagagggagagagagt

SEQ ID NO: 9474 - DNA, 577 bp, Gossypium hirsutum
  Clone ID: GOSHI-09MAY01-C93950_1
gaagatgtaagaatgttgtcagcccagagggccagagatatatcctcagagatagaaagggaatttctccgggaagttgagcatgctgaggaacttgccaaggttattgagcctggaagtgcagagatgcctgatgcaatagagacaatatttcaagccgcccttgccttgggaagacatggaggagttgatcagctcatgggtgatatggaaagtgcagctttattgtattcaaaggctgagcgtttattagtcttccttctagtggaagcaccatctctcattctgaatcctccattttcccttacaaactcagatcggtatagactccgaacttacattgattttcttcgaaataggcaaggttactcgagatcccagatgatggctcttctcaagtgcaaggttcagccatagagtttacccatatttattactctatttttaactcctgttgctgatgatttccattttcattgtgtaaaaaaatatttatttgtacagttaattcttttgagtaacagggaattagggtgttaacatgggtcaactcaattgtatcctgtttgaatgttgt

SEQ ID NO: 9475 - DNA, 1040 bp, Gossypium hirsutum
  Clone ID: GOSHI-09MAY01-C93960_1
gcgttcggtacccactcgtggtggcggtcttgctggacgtgccagaggatcacagaaagattctggtggctcaagggtgcatagtcaaggagatcgaacccgtcctcccacctgagaaccagacccagtttgccatggcctactacgtcatcaactattccaagctgcgtatctgggagtttgtggaggattccaagatgatatacttggacggagacatccaagtgttcgacaacatagaccacttgttcgacatggaagatggttacttttatgctgtgatggactgcttctgtgagaaaacatggagccacacccctcagtacaagatcggctactgccagcagtgccctgacaaggtccagtggcctgcgcagcttgggtcctaaaccccctctttacttcaacgctggaatgtttgtatatgaacccagcctttctacttatgatcacctcttggccaccctcagagtcacccctcctaccccttttgctgagcaggattatctgaacatgtactttagggacatttacaggcccatccctcccatttacaacctggtgatggccatgctatggcgccaccctgagaacattgagctagacatggccaaggtggttcactactgtgctgctggctccaaaccctggaggtataccggcaaagaagacaacatggacagggaagacattaagacgctggtggctaaatggtgggagatttacgatgatgagtcgcttgactacaacaatgtcgtggcttctggccaagcagcagaagctgatgaggataagcaaagcggcctgcaactgcttttggcagctttgtcaaaggccggcggctttgttcaccgtattaacgccccttccgctgcttaatttggtgacgatacagattagtaatacaatacaatccacctaagctaaagcagtggaagaatgaatgtaaatgggttccttttcttgcttgtagtatgtatttgatctgcccttccatttttgaaatggacagatgttttatcatcaggaacataaggact

SEQ ID NO: 9476 - DNA, 501 bp, Gossypium hirsutum
  Clone ID: LIB3825-018-Q1-K6-G10
tcttatactctcacaaccaagatgtgctgcacctcctgcacgtacaactacatcacactgacgacacctgttagcttgcgtccgcacaccttccaaaaagtgagggccttgtggaatcatgttcggggctgctgcggtgatggggagtgttcagaatctgctgcaccgcctactgtccgtaccaggggcgcctacttcgctgatctggattctttactgtgtctcggaatgggtgagtatgggactaggctatgatctttggaaacatgataactggtccttgtggtgggggattgttcttcttatcatctgatagtatatataacagatgtgatggctgaagggagcttaatgaatcaataggtacctggtctaacacctgaaaatcagacccagcgtgctataggatactacgttatcaactattgcatgctacgtatatggaagtttgtggagtatcccaagatgatatacttggatggagacatacaagtgtttgac

SEQ ID NO: 9477 - DNA, 1020 bp, Gossypium hirsutum
  Clone ID: GOSHI-09MAY01-C93810_1
cccgtcttgacatagatcttggagtagcatcaccgttatctgagtttttgtctcctggggatgcaatagcgtcattggatggtgcagccatccatagcatgcaagattggatagagatgactgctctactagataaaaagatacttcacaattcaagtgattcccattactttaaaggttttggtgctgtagatagcagaaaggggtactgcgtgcctaatgccttgttggaagatggcaagaatgttcaattggccaaaaaccaatctgtttgccctgaagatttcacggcatttgtgaaaatttactgctttgatccaagtaagtcagtagatatggatggtgaagatgttgatcttggaagaaaggaaaatgcactctgtttgaatacaaaggatattgtcaatctcgaaaaatgtaatggacggggaaaagtaaagaaaaatggaagcagttgtatgtgttccgaggatgagtcttgcttaagtccggttcagtttccagatttgatgtggtttgagattacatattcacgtctttattcagagagaatgcttacaacttagaagttcccttttagattccaacacttctgcggctgctctacagacatgtggtgggacttttatttttgttggtgacatgatatcgatggtgcattcagttcagttgactgaatatcaacctcggtggggggtttttctcagcaaatatcttccaaataaactggaaaagagcttaatatgcacattccacatttctttagcattagctcttctcaatagtttgcccgtatatttcctagatggggaatcgattttggaggtggcgttgtcccacttcacatcattgagctcaagaaaaacaagaaaaatccatcaagtatgtgttgtgggagggagtttggtttcagttctggccttcttgaggatgacgtttatcaatttcttctagtatggatgtctttcaggaggtcagaagttaaaagggaaaaaaagaaaggatggagcatcgcttgta

SEQ ID NO: 9478 - DNA, 908 bp, Gossypium hirsutum
  Clone ID: GOSHI-09MAY01-C93590_1
gagttaaaacgttcccttttattcccattggcagatcaaatttataaaacaaccctatacccttttttgaaccatatcccacaaaaatggatcaaatctttctcggcctttgccacaggttgtacaatttcatcacgaaatatctagcaacatatgccatgaaaagtgtaacattaggcgatgtttctcatcaggcttcagctcagttaccttctccaggtgctgaatcagctatatcgagctccatgaccgaccaagcaacacaccctgtggctgaagcaacaccagttgaagactcaagtttgcaggccaaagtagagccagaaccaatgtataatcatagtgaaagtggaattccttctgcaacatctaatgaagagaaaaatgaggatgttattgaagcagcaatgtctgaagctcgacctccgaagaaaatggttagcataaatgatacagtagaggagatgactgcaactgcaagcaagaagaaaagtaagaagaaaaaaagagcagaaaaaatgggttcactttgaccaagaaatagaggaaccaaaacctttgaaatcgattctaaaagtagggtctaagatagattatgagagcaacagtttggggtctacctgaatttaccttgctggtaatgttctttgtaatggttcttgatttgtgaatatcatatcatatcaatttgtgaacttagatgaattattgcagttttgattctccatgccaaaagcaaattgagagaactcaacactgtttaatttaaccctgagaacacatgaatatcatatcaatgcattatcctttatcttcaaacaaatccattattataaaaatattaaaatgctgaataaaagtttgtttttaagttaatttattaaattttcatcagtgatgattttgct

SEQ ID NO: 9479 - DNA, 462 bp, Gossypium hirsutum
  Clone ID: GOSHI-09MAY01-C93510_1
gttcagggaaatagcacgggtagtgtcgtgaacgagttaagagttgaagatagagatccactatttgttgcgaacgtgggtgattattattcaggcttggcaaagacaggttcagcgcgatggattcgaggaggtaacaactgaaatatcctcattatctatgatgcttatctggcacaaagttatttatagaacggccaaggcaaaatttccccctccttttatgagaaatctccttgtaagtcaaagtaggtaaatgcgccatgctgcattcacagaaggttgtatgtaaagaaattagttaaaggggtgtaggtgtattgagcttgtaggtatccatatggattgttatttttaaaatcgattccctgtataacagaataagaattattaccatttccccggtacgtaagcttcagcttgcaatgtaaatgtggaagtcaagtttatgttgtgatttgc

SEQ ID NO: 9480 - DNA, 765 bp, Gossypium hirsutum
  Clone ID: GOSHI-09MAY01-C93040_1
gcatatctatcatctgtccacgccaatctcccaaaaggttcaaccacagccaccatgtgttcttcgaacacctcaagtatgttcctaatcaataagaaaaggagcgccaaaccctgcagcaattactgatggatggtcaactgatttacaaacacaacaaaagaattcaggttttaggggtttcaaccacgaagtggatcacatcatacgcactccatcagtgtaagaatgttgtaaaactattaagtaatcaaatcaatgaaatgcttgtataatatactacaattcagtaacaccatacctaccatcctctgcaatggagcatctttcgagaccctttgagttatgataattttacagtctgccatttctgcatattcttcactcctcaccagctataaagtttggcccttcaccttggcacaagtactcatcacatagagatgctgttccccagtcctttcggagtcgcaaaatgtcctctgtgaaagttgagcctggggctccaatgaacacactcgccatcgcacagatggtcttatccaacatagcttccacctgggggtcatcctcaatgccatgtctgtataacaatgcatcccatttttcagctgaattacgaggaggccgtttaaccagtggtatagtcttcccattcagtacaaccatcgattgcagcaaaccagtttcgctttctgctgcatctgttgaaaggtatataattggagtgttggccctttcaaccattctagtgatgcaatccgc

SEQ ID NO: 9481 - DNA, 641 bp, Gossypium hirsutum
  Clone ID: GOSHI-09MAY01-C93060_1
agacaaaaaagccaaaaattactaccataatttgatatagtacagtatacaaccatatgaatttgtagtactattactagctagcatcttcggggttgctttttgctatttttctctctaagctgcaataattgataccagtctaccagagtctttatacacaatttcccatcatctttttttatctttcaatcatctaatgcacattcatgaaatattttgattttgattttgattttaaatttgacgacattggacttcctttcactcactgtttcgagatataacctctccaaagttgatgaaaagttgtgcatctgaggtactcatagatgggcaattgactaagtgtggagtcttgagatttgcatactcatccatgtaagaagtgaccttggtagatgaaagtggtgccggtgggattgtggttggttgctttgctgggggttccaatggcattaggcttcctagaactcgtgtcacttcatgcattgttggtcgatccgatgggtgtctcttggtgcatagaagggcaagctgaaaaactttcttaacagctccaagatctttgcaagttgcagtgatctccggatcaatggtttccctgaccccatcattagcagccagatgatgaaaaccga

SEQ ID NO: 9482 - DNA, 861 bp, Gossypium hirsutum
  Clone ID: GOSHI-09MAY01-C93010_1
aatgaattagacttggtttaaaattcaatatctgagtcatcaaatcaggttatcagttgtccatttatttcacaaatcaataaattggaggtatcagctacaagtttgctttgacgaactatatcgccacatgattcatgcctagagtctggccttagtgattttaattctctgaggggatctgttatcacatttttactgcatatttctttagctggttgaacatgcttccaccaaaagtcagagagtgccgatttcagaacattcccagtattttacatctcggtaaatcctaaacagactgcttccgttaggagtccaaacatagaaatccatccattcccggtccatgatttccattaaaccctgagcttgtggaatgcaatagagggggatgcgcttccaagggaaagcctcgctcattttcccatcaatatatggacattttatctccaatactcccccaggaggcaacccataaacaaacctgttcaccaagccatcaggtgaagctgctaaccaattgtcttcaggattcatcttaccataaacttgaaattcaggaaactcaattgtattcccagtaatctgtttatatctttcaaatgcttcctcttctttgatattgccccaacatgtagctaagttaccataaaaaggctcaattgccccaagtttctctagccagagctgggtccttcgcaaaggccagaagccgatagccccagcaaatgtgctagctgtcaatttatgctttctcagttctagcacttttgaaccgattctgaagactactggaccgaacgatagaatgaatttcagcaggtgcaaattactgataacaactagattgactaaaac

SEQ ID NO: 9483 - DNA, 943 bp, Gossypium hirsutum
  Clone ID: GOSHI-09MAY01-C93020_1
accaactccaaggaataattatattattattctataaatataacgatttgttacaacaacaatcatctacccatcatttatgctatataattagaacctaatctctatgaccaacacatttcaattcatttctctactctaatggtgataaagccatatgagaaacagataaaagggactaatcccagaacctgcaatgcataccacatatttctatgtacaagatgcttacagtgattggattttcttatgcttaccaagcatttccttccaacatgaaactatgccctctggttaaaatccataaagtgaggttgaggctgtccgttcaaagtcgggttattggtggatgaatgaggcatctgcagctgctgctgctgctgctgctgctgttgttgttgatgcggtgtctgcaggacgccaaagtgatgtggagcaggttggtgggttaaatattgaggagatagtcctctattgaaaggatttccattcatagcagacacttgaccagcttgtatcctaagccgttgcacttcttccttcaatttttcattcaaagcatccctaagctgcgcttgttgctccatagcctgtagccgtagtttcagttccttgttctcagtagtcaacccagtagtgtctctctgtatcattgggacttgtgcggagaagtggttcccttccttcgctgtgaatgcaataaacaaatatttgggccttaaagacacaaaacaggtgctttccatgttagcagaaaccagatgtcatggggctgaaacccaaccgagcccaccttatcgcaacgaaaggctattttccaggcacatgcatgacctaaatggtggtagcagaatcaaagaaggattgatatgaaatagttgaaaagcaatgcgccaatgccaaaagggagactcatgcctttgcatcattccaaggcatgatt

SEQ ID NO: 9484 - DNA, 870 bp, Gossypium hirsutum
  Clone ID: GOSHI-09MAY01-C93390_1
gctatatttcagattcttgaagttttgagaggctgaaacacagggtgtcttactgaagaacttgcttgccaatgtatttcattttacacacaactggggagattggaggaagccaagaaagtagcagagaacctttgcagtggaaaaatttcagattcagtacaactgtggcttttaagggtttcagtagacattagatgtatcacaaaggattctctttctcctagcaaggctgatgcattatccatctttgaactttttagaactgttctaacaaaaatgtcaatatcagaagctgagagcttgtggataatggctctcaaattctttgcaaatcagaaaaaatcttttgagaagctgattgaactttctctcaaagcagtcgctaaatatggtggcagtgagaaggggttctctctttcttcagctgtagttaatttcatccttcaaaaggatgggcttaaacatgcaagaggggtttataagcgattcctggctcttacctcatccaggtcttgcattatacaaaaattgcattgaattagagtcaaatcttgctttttttggcaacgaggattttttagtaaatacccgaaagttgtacgaagctgcccttgcaacttatgcccaagcccctagcttatggaaagattcccattccctggaaactaagttgggaacaacagaaactgctgctgctatttattggcgggctcggaaatccttaaaggactctgctgtagattttacttcccctgattagttataatttctgcaaatttttgccagtttctgcaattttgatgtctattattttagggaaaacaaaggaaatccagttattttaagttccgaaagggaattttgagt

SEQ ID NO: 9485 - DNA, 279 bp, Gossypium hirsutum
  Clone ID: GOSHI-09MAY01-C93370_1
caggcagttgtaatatatgtattcgctgtgaagcttggccaatcctctcctaggtatgtaggatctgcatatcggtgggtttgagcagttgggttgggattatggtggttgcagaatgtgtgggtgagaatcgagtgatgtgtatgttgtttgatatgggattcgaatacttgtttatgttttcagggatggatgatgataagtgtcttttgtttaagttggggtgggttcactccaaacattttctgttatgaaataaaaagaatgcatgattttctc

SEQ ID NO: 9486 - DNA, 871 bp, Gossypium hirsutum
  Clone ID: GOSHI-09MAY01-C93360_1
gtgaaggaatttggagagagaaaaaagtcctttgaggaggaaaaagagagagaactggacaatattaattatttaagagaggtagctaggagagagatggaagagctgaaacaagaaagacttaagatagaaaaagaaaggcaagaagttaatgctagcaagagtcatcttgaaggacagcaaattgaaatacgaaaagacattgatgaccttgtggatctcagcaagaagttgaaggaccaacgagagcaattgatcaaggagaggaaccgctttatttcatttcttgagaaacaaaagagttgcaagaattgtggtgagattacctctgagtttctactctctgatctaaaatacctacaggaaatagagaatgagggagtccctctgcttccaagtttggcagataactataccagcggtaaatatttttggggaattttgttgcatctgaggaggcagatgatgtctgcatctgttgcttcaggatctccaatgtctgctggaactatgtcatggcttcgtaaatgcacctcaaaaatatttaaattctctcctgcgaaaaacattgagcctcatgctctaaaaaaattgaacgtggggccctcactctctagtcaacaagttaatatgaaaggcatgtcaacatctgaaaatgagccagagctcacttctgttgcggcaactgaatcttggagattcataggttccagtcagacaccagcacaagagatgttgaggctggtcaggacttgtcagttgataatcagaacaacatggattgtaaggaactggaagcgttggaagattctcagaattgtgatcttaatcatggtaaagcagttcacaggataagcaggcctaatactaa

SEQ ID NO: 9487 - DNA, 733 bp, Gossypium hirsutum
  Clone ID: GOSHI-09MAY01-C93270_1
cccttaactgctgatttttctttgcagcctttgcagtttttggaagaaccatttcagccttgaccttccttccaacttcgattccaatgaagcaaagagaagatccttggcctactcgcacgatattgctcccttcctttgtttttctttattttttttttaaaaacgcaataatgatgtattctaaaaaacaaattgaaaaagaaactcgaatcggaaaccaccttgaactttgattgatttcctttgtttgattaatatgcgtagtgtgcgtgcgtatgcatacagtatgggtaaaaaattaaggtccaaataatggctttttatagccagatttacagaataaatgaaaaataaaaattatatttttcttctgtcatttggctgtatattctgttactctttcttctcgtgtgttctttgcaggaatggccgtacggaggagcggggaaaggggtgcgtgaaagaggccgtgcgaggaaaccgttcgtgggagcccgaccccttggcactgttctgggacgttccagaagattctagtgctcgcaagctgctgagataatttttgggtgtattgggcctcgggttttagggcttatttaattgggtcatgggttactttagtaattgggttgggttattggacttttattgaattgttttttaatttttcattttagttttgggttttgtaaatggactttggccctataaataatctgatctttcattt

SEQ ID NO: 9488 - DNA, 325 bp, Gossypium hirsutum
  Clone ID: GOSHI-09MAY01-C88590_1
gaacccatttggagaatgcaacaagggttcaagaacaagaatcgaacaacaaattaataccttagggacaatgctgggctttgtgggcgtggggaacaaataagcaattgctttgggttaataaagtcagattagagggagacaagtaagggaagcatttatctgctcgttcatggtgggtctaaggaatagagctacagaagttataatactattgacaatatatagtagcttaattagtgcgtcagagaatcatattataattcgagtctcttattttaactttcttttacaatttagcattaacacctttcggctttttctt

SEQ ID NO: 9489 - DNA, 969 bp, Gossypium hirsutum
  Clone ID: GOSHI-09MAY01-C88500_1
tgcatttgaaagcttgaggaactatggcttccaaccggacacgaagatctacaactcaatgatgatggcatatatcaatgctggtgaacctcgacagggtgagcaattactaagggagatggaaacaagagacatcaaaccctcagaagagatttacatggcattgcttcggtcttatgctcgtagaggtgatgctgttggagctggacgaattgcgaacagcatgcaatttgcaggatttcaacacaatttggagtattttgcattgctcgtggaggcatacgggcaagctggtgactgtgatcaagccaggagcaattttgacaacatgataaaactcggacataaaccggatgataagtgtaccgctaacatgattgctgcttatgagaagaaaaatttgttagataaggccttaaaccttctattggagctagagaaggacggttttgaacccggcatagaaacatataccgttcttgttgattggttgggtagattgcggctggttgacgaaaccgaaaagttactagacaagattgcggaactaggcgaagttcctcctttaaaggttcacgtaagcctctgtgatatgtactcgagggctacatccgagaaaaaagctcttcaagctgttggagttttggaagctaggaaagatgaactaggtcccaatgagttcgagagaattataaccgcactttgtgcaggtggatttgtgcaagatgctcaaaggatacttcaattgatggaagctaagggctttgctgcatcggaacaagtgaaattctccctatcgtcatctcaggttataaaccagaaaagacccaagaaataacctactcgttttaaacctggtatgctgctatgatgttttattttaattgtcaacctaattttcttttgagaccttgaacatggttttcatttttgattattggttgaaccattgcaatgttcatttcaagc

SEQ ID NO: 9490 - DNA, 497 bp, Gossypium hirsutum
  Clone ID: LIB3825-002-Q1-N6-F10
ggaattaaataagattatctcaaacactctcattaaaccagaacttcattagtccataataattaaagttgcagggaaatgttgggggcaggaactatcattagaacttgcaatcctcccctgcctagggtggggaaattggaactccacatttacaccaaaacccccccttccattaccatgacaggttttcctaaaaaaaaaactctttggttttgctcatcgaaatggatcttcactattcctcctctaggggatgccgcatgcgcaacaaaatctaactttcccagcttttggctccaatagggggccaaggcacagtgtgcacttccgcaaaccggatcctttttaataccatacttaggacagaagaaccgactaataaaatcaaattcagaatctggaggggcagctcctgaaacaattaagcctcgtccaggacatttcagtatgtcatcgaaccgtggctccatttcgataacagattttccagatgg

SEQ ID NO: 9491 - DNA, 332 bp, Gossypium hirsutum
  Clone ID: uC-gsflnu33B063h03b1
tgagtatccagtttgcggaagtgcacattgtgccttggcacccttggagccaaaagctgggaaagttagattttgttgcgcatgcggcatcacctagaggaggaattgagaagatccatctagatgagcagaaccacagagtgcttctgtgaggaaatgctgttatggtgatggaaggctctgttttggtgcagatttggagtcaaatctgcctaccctaatcctggatgaagtgcatgaagtagagttaggtactgacttcaacgttttcttgcctcatcaattacaacggtcgtacgagggtttgtgcaccaacggacaatattttgtgc

SEQ ID NO: 9492 - DNA, 573 bp, Gossypium hirsutum
  Clone ID: uC-gsronu33B111f07b1
actataggtaaagctgcgtcctcctgcacgcgccgcggcatgaatcggggggatccgcacgcggccgcttgacttcatgcggcgttcttccgtttcgcatgggtcctggaatgacggcattcagtgagcttttcttcggaactatacacaacacatagttgaccggggatgacgttgcccctaaagcatacatatgttgcgaactcttacatacagcacaccgttcggaagctcggatggataatgcttaagtagaatccaacttgaccgcaccttgcgagacctccatactttatccagctgatggaggcaacatgcattgcttcactgctgtcacagtatgcacggtgttggatgttctaggccctccttactcggatctcgaaggacggcactgtacgtactacttggcctacccattcacaaaattctcaggcgatgaacaagtatcaattccggatgaagagaaagactagggtgctttgctccaagagagggacaaacctgaagatttggttgtggagggggctttgaacactagacccgttatcagggaaaactgatctgaaagtc

SEQ ID NO: 9493 - DNA, 324 bp, Gossypium hirsutum
  Clone ID: LIB3825-001-Q1-K6-G6
gtattacaagatgatatgtaatgagactctgagatcagttttcccggatgacgggaccagtgtacaaagcccccttcacaaccaaatcctcaggtttgtccctctcttgaagccaagcatagttattcttctcttcatccgggattgatacttgttcatcacctgagaattttgtgaatgggtaggccaagtagtacgtacagtgccgtccttcggcatccgagttcggttggctaaagttaaggtcgattccaacttgaccgaaccttgcaagaccttcatactttatccagctgatggaggcatcattcattgctttactgc

SEQ ID NO: 9494 - DNA, 650 bp, Gossypium hirsutum
  Clone ID: GOSHI-09MAY01-C88110_1
tgaaaaaagcaccaatcacttggtgaggaagaattgttgcgctattgtttttcttcagcatatattgtggccttacttcatgatagccttggaattgctttggatgatgaaaggatcagctttgctaatcgggtagaaaatataccactagattgggccttgggagctttcatagtacaaaacacggccaagttggatgcgccgcaaattgattggataactcccattgtcagcaatgattcccccccgctattctccatcattgccgtttctgcaatattgatgttcatagcttggtttatattgaaatggaggaaccctgagttgaagccagtgtatgatttagagaaaggccgatatatagtgactcgtattggcagaaaatgatattgttgtcctgaggagattggtttacgagtttgcacccaagtgaggagaaggcatgtcttatgatggtatattatcattaggcttccttggtttaatatgccccccccttaggttccccatgtgagtgggaaatataagcctgtatatcatcaccttttcccgtgggattgagtgtaacccccccctgggggaaccgggataaatgactaaattccgattgtgtaaaaaccggaagttccaaaccctttttttttatcccc

SEQ ID NO: 9495 - DNA, 760 bp, Gossypium hirsutum
  Clone ID: GOSHI-09MAY01-C88050_1
tgtttttttttttttttttttttgaactaaaacttggtgtattaaattgaataagtataattgcagactactaacagttttcacatcttcagttttgatacatgccaaatgcatcagcatgtgaaataatgatttcaaacttgtgattggggaatacaagtatcacttgaaatgcacgacacacttgaaagaaacagctctgctatggcttacaatgagtattcaggattcaattgtttgatacttttggagcattagtcgtcttcacccccgacatcaccccaccgaacattgtacttggctgcaagataatgtgctccgacgggtcctctgctcccataagggtatagttctggagaaatcttttttgcttcaagttctttcaacaacggcgtaaacagtgaccaagcagcgtcgagctcatcgcttctaatgaacaaccttcgctcccctgctatagcatctaagagcaacctctcatatgcatctgggatttctgttggatacctggctcgataaagcaaattaaggtcactgcggtctaatctcattccaagaccaggaactttgttattgatcttcagataaatggcttcatcaggttgcacacgcagcacaagctcatttgtagccttgtccaaatcagttccaaaattacgcttgtacaaattacctggaacgtgtctgaactgaactctgatctccgcccgcttacgatgcaaagcttttccggccttcatgagaaaagcggaagcatggg

SEQ ID NO: 9496 - DNA, 1063 bp, Gossypium hirsutum
  Clone ID: GOSHI-09MAY01-C88340_1
aaagatccggtgctcctcactcacaaagcaacaattaactctctctccccctcgttctgttcgccggtaaattcatcataaaatcctcgcttttttccggtggcaaagcaaggggaagctttgaattagggtgatctaagcagagattatatgctttgattgagaattagaggaggagaagaagaagaaaagggaagtgtatcatctccagttgaagtagtgggaagctggaaagaaatgtcttttcagaataagagtttttggatggcaaagggtcctccacatgtgtctgatggagatgcagcattcgataatccttcaagaatcgaacccaagcgatcacatggttggtttgttgatgctgattcgcagctgttccctaacaagaagcaagctgtacaagctgcaaacaacaaatcaagttcaggaatttctaattcaaatgttccgccttgggaaaatgtttccagttttcagtctgttcctagcccttttattgatcggttgtttggttccgaatcctgaaaggtctgtcagtttcactgaaaggaacatatctcccatagaagcagattacatgagacgaaaaagcattgaagatcattttggtgaagatgcatcttttggtttgtcaatatctccttcaattgaagatcctgaaacatgctttaattatggtggaattaggaaagttaaggtcaatcaagttaaggactccgattccggtatgcatgatccaaaggaacttagttttagtagggaaagtaacagtgagatgtctaatattgaggcgtataatggggaaaatgaaaatagttttatttcaatggggcatagctacgataagcggtgtgataatgttgcagtaatgagtcatacctataacagggatgatatgcgtatcaccactcctgcctacagtaaggataatgaaattccaatatcaatggccaacagttatgttaaagaggatgccaatattctttctttcggtggctttcatgaagaacatgagattatccctgtgggcaggcctcttggtagcttgacccatcatactgtc

SEQ ID NO: 9497 - DNA, 600 bp, Gossypium hirsutum
  Clone ID: AW187653.1
gagccatctccagcctctccctcccaacatcaaacagaagctcccgatttctattcctgtttcactttcatttctattcctgtttcatttcttgcttccaattgttttgtcgaccaaaaatagattgtcttcttcaaatgcagtgagtagggaagtctcttgacattgtctgccaattatctccaaatgcagtgaatcccaggcattggaatgcttggtaagactagcatctgtaagacgttctttatttgtaaatgatgctgcccggtccaagtttttggctcatttaatgacaggaacaaaagatattctccaatcagaacaagattgcagtacaaaatgcattttgctttacataacaatatatcatgaaattagaagaggttatggatctggagcttggctgtggacaatatggcatcattattatgaatagatcctccatctccttttgtttgttcttccccccacagttgaagcgacaaccgtgtcgtcgaggcttttcgggattagcagggtccgagtcacttgattctgcaaaaagccccctgaggcatctttttcgtaccgtaggttcatatgtacgcttctctgctggtc

SEQ ID NO: 9498 - DNA, 543 bp, Gossypium hirsutum
  unsure (1)..(543): unsure at all n locations
  Clone ID: LIB3543-050-Q6-K6-A1
ccccgcgtccgccaacatcaaacagaagctcccgatttctattcctgtttcactttcatttctattcctgtttcatttcttgcttccaattgttttgtcgaccaaaaatagattgtcttcttcaaatgcagtgagtagggaagtctcttgacattgtctgccaattatctccaaatgcagtgaatcccaggtatctccaaataaaccctcaagaaaacctttccaattcaatcaaggcattggaatgcttggtaagactagcatctgtaagacgttctttatttgtaaatgatgctgcccggtccaagtttttggctcatttaatgacaggaacaaaagatattctccaatcagaacaagattgcagtacaaaatgcattttgctttacataacaatatatcatgaaattagaagaggttatggatctggagcttggctgtggacaatatggcatcattattatgaatgtatagntatcattctctatatcttgtttgcatatgctgtcagcaaactggcaagtaattcttacaaagttgcga

SEQ ID NO: 9499 - DNA, 1006 bp, Gossypium hirsutum
  Clone ID: GOSHI-09MAY01-C89180_1
ttttatattttctatatttaaatacataaaacagtattgtcgagtctattctcacaatataataaaaggggtaatatttaccataatcctctcttttatttgtaaattaaatctaaaattcactgctaaccctcccttttctgcgaatctcggtcgctcctttggctgttctgtccatggcgattgcagcggcagctgttatcgtcccattgggccttcttttcttcatctccggcctcgctgtgaatctcattcaggcagtatgctttgttcttattcgaccactgtccaagaacacatatagaaagatcaatagggtattggcagagttgttgtggctgcaactagtttggctggttgattggtgggcaggcgttaagattgaagtgttcgcagatcatgaaagcttcaatttaatgggtaaggaacatgcccttgtcatatgcaatcacagaagtgatattgattggttagttggatgggttctagcacagaggtcaggttgtcttggcagtacattagctgtaatgaagaaatcatcaaaattcctgccggtcataggttggtcaatgtggttttctgagtatctgtttttggaacgaagctgggccaaggatgaaaacacgttaaaggcaggccttcaacgtttaagggacttcccacggccattttggttggcgctttttgtagaaggaactcgctttacacaagcaaagcttgttgcagctcaagaatatgcgacctcacaaggattgcctatacctagaaacgttttgattcctcgtacaaagggttttgtttcagctgtaagtcatatgcgatcatttgtcccagccatttatgatattacagtggctattcccaaaagctcaccttcacctacaatgcttagacttttcaaggggcaatcttctgtggtacacgtacatatcaaacgacacctcatgaaggaactgcctgaaatggatgaggctgttgcacaatggtgtaaagatctgtttgtgga

SEQ ID NO: 9500 - DNA, 648 bp, Gossypium hirsutum
  Clone ID: GOSHI-09MAY01-C84410_1
tctttatcttccattcattggttcgttacttctttgtctacgctattcatatagtaattttgagacagtaatccagttctcatagatcgaacactttcttttttttttgaagtttccaatcaaattttctcggtcactttcctgcatttattcgagaaaaagaaagaagaaagtatggagatgcttgcaaatgtgttggctttttttcttccttgagagagtgactggaaacggcacagtttgaaagcacttttcttttggggacatcttgtggggtgaaaagctaagatcaatgtgtgtactgtaagctcaaaatattatgcaattgttggcgttgaagggtttgatgaagttgtttaaccttttcctttatgaggaatgtgattgctttttggattttattagtgagttctgataattttgaggtgggattgacaatgttgaggattggaatgaactaaagagctgataaagtgagtgaactttggactgttttgaggttttcaaaagaaaaaactgagatcccttaataattagtggtgatttgatagatttcttaacctatgtctggtgctccaagattgaggtccatgaatgtgaccgattctgaggcaaggcctgtactagacttgcgaacaaactgttctt

SEQ ID NO: 9501 - DNA, 595 bp, Gossypium hirsutum
  Clone ID: LIB3585-037-P1-K1-G7
aaagaagaaagtatggagatgcttgcagatgtgttggctttttttcttccttgagagagtgactggaaacgacacagtttgacagcacttttcttttgaggacttcttgtagggtgaaaagctaagatctgcttgggaagctctcaagggataaatgtgtgtactgtaagctcaaaatattatgcaattgttggcgctgaagggtttgatgaagttgtttaaccttttcctttatgaggaatgtgattgttttttggattttattagtgagttctgataattgaggttggattgacaatgttgaggattggaatgagctaaagagctgataaagtgagtgaactttggactgttttgagggtttcaaaagaaaaaactgagatcccttaataattagtgttgatttgatagatttcttaacctatgtctggtgctccaagattgaggtcgatgaatgtgaccgattctgaggcaaggcctgtactaagacctgccggaaacaaagctggttccttgagtgctaaaaaacaagcttaaaagtcttcgaaaaaggttgaaaagttttccgttgaggtgactgtagtagaggagaaaa

SEQ ID NO: 9502 - DNA, 568 bp, Gossypium hirsutum
  unsure (1)..(568): unsure at all n locations
  Clone ID: LIB3582-028-P1-K1-B6
cattctcgtagtatgggcttggttgctgttgacaagaacacagttgcaatttcttcttcggatgtgatgctgtcctttgctgcttatccaattgaaattcctggagtggttgtttttcttcaccctgttcacaactatgctctagttgcatacgacccttcaactctaggtcctgttggtgcttctgtggttcgtgctgcagaactacttcctgagcccgcgttacgtcgaggggattcagtctatcttgtgggtttaagtagaagcttacaagcgacatctaggaaatcggttgtgaccaatccatgtgctgctctaaacattgcctctgctgactgtccacggtacagagcaacaaatatggaagtaattgagcttgataccggtgtgctaacagatgagcatggaagggttcgagcaatctgggggagcttttcaacacagctgaaatttggttgtaatacatcagaagatcatcaatntgtgaggggtatccccgtttatgcaataagccaagttcttgataaaatcatagctggtgcgaatggaccacctcttctcataaatg

SEQ ID NO: 9503 - DNA, 542 bp, Gossypium hirsutum
  Clone ID: uC-gsflnu33B146a07b1
ggatagtgctgcagaactacttcctgagcctgcgttacgtcgaggggattcagtctatcttgtgggtttaagtagaagcttacaagcgacatctaggaaatcagttgtgaccaatccatgtgctgctctaaacattgcctctgctgactgtccacggtacagagcaacaaatatggaagtaattgagcttgatactgattttggtagtacattttcaggcgttctaacagatgagcatggaagggttcaagcaatctgggggagcttttcaacacagctgaaatttggttgtaatacatcagaagatcatcaatttgtgaggggtatcccggtttatgcaataagccaagttcttgataagatcatagctggtgcgaatggaccacctcttctcataaatggtgtcaaaaggccgatgccacttgtaaggattttagaggttgaatattatcctactctgctttcgaaggccagaagctttggattgagcgatgaactgatacaagcgctagttagaaagatccagttcgacgtcaagttta

SEQ ID NO: 9504 - DNA, 585 bp, Gossypium hirsutum
  Clone ID: GOSHI-09MAY01-C84670_1
cccacgcgtacggaaggagcatgaggatcgtgtaactaggttaggagagcaactagataatttgcagaaggatctccaggctagggaatgttcgcaaaagctgctgaaagatgaggtcttgagaattgagcatgatatcatgcaagctgttgctaaggctggagcaaataacgactgtgagctcaggaaacttttggatgaggtttctcccaagaattttgaaaagattaataagcttttaactgtcaaggatgaagaaataaccaaactgaaagatgaaatcaggattatgtcagcgcactggaagcttaaaaccaaagaactggaatcacagttagagaaacagcggcgagctgatcaagaactgaaaaagagggtgttgaagttggaattttggccccaggaagctcgttctcagacacgaaaactccaaaggatgggagagcgaaaggacacagctcttaaagaacttagaagataactggcaaccaaaccaacaaaacggaggcgtttggtgctgagaaacagattttctgggaaacatctggtttcaagattgtagtctccatgtcaatgctgatcttg

SEQ ID NO: 9505 - DNA, 697 bp, Gossypium hirsutum
  Clone ID: GOSHI-09MAY01-C84160_1
gttgtctcatttcgccctcagttcatggtgtaggtacttctccgtcatcagaggtttttgtgcacaacttagttgctgaagaaagtctggtcagtcgttcatctgaatttgaatctgcgatccaaatggggagaggtcttctctaagggttctatgtgaaaagaaatctcaagagtctgaatctcagcatgatagagaagcgtggggcttcttaaaggtgatgtttgaagatgacgggacagctgggacaaagttgctcatgcatctgggttttagcccacctgcagaagaaaaagatactgtacaaaatgacctctctcagagtgtgactgatattacccttgaggaaaaagtgagctatgagaaagaggctaccccctttgctgctgataatggggaggatttcttcaacaatcttccaagtcccaacgctgatacaccagttgcaacttctgaaaataactttcatgttgagggcacagttcctagcacggatctaacacctcaagaatcagatgggctggagggaagtgctgatccatcatttgatgatgctgttctacgtgctttggtggtgggtgactataagggagcagttgcacaatgcattgcagccaataagatggctgatgcattagttatgctcatgtggtggtactttcttatgggagagcacatgtgatcagtatcttaagat

SEQ ID NO: 9506 - DNA, 674 bp, Gossypium hirsutum
  Clone ID: GOSHI-09MAY01-C84310_1
gcttcttttttatgtgtttcttttgttgtttgttgttagtctatagagaaaaacaagggaggggatgggcaacctattttgttgtgtccaagtagaccaatcaaccgtagcggtaaaggaaagatttggcaagtttgatgaagttctagagcctggatgccattgtttaccttggtgtattgggagccagcttgccggccatctcactctgcgtttacagcagcttgatgtgcgttgtgagaccaagactaaggacaatgtatttgtcaacgttgtggcatccatacagtatcgcgccctggctgagaaggctaatgacgctttctacaaacttagcaaccccaggactcaaattcaagcctatgtttttgatgttattagggcaagtgttccaaagctggatttggatgatgcttttgagcaaaagaatgatattgctaaagctgttgaagatgagcttgaaaaggctatgtctgcttatggatatgagattgtccagaccctcattgttgatatagaaccagatgaacacgtgaaaagggccatgaacgagattaatgctgctgcaaggatgagagttgcagcaaacgagaaagcagaggcggagaagattatacagataaagagagcagagggagaggcggaatcaaagtatctgtcaggagtggggattg

SEQ ID NO: 9507 - DNA, 938 bp, Gossypium hirsutum
  Clone ID: GOSHI-09MAY01-C85810_1
ctatgatccttcttttagctctatcctccgactgcacaacgtaatcggaaaacttgataatcgataggaaaagacaagaaaagaaaatggtgacaggggggcttgctccggggctgtcgcgtaaactgaagaaggtattggaatgccggactgatacccccgaagttttggcttctctcaatacgctctccactttctacaccgaaaacactccccaggcgcgtcgcaatctcagatccaccattgagaagcgctctctccaaatcaaccttgatttcctccgtgcttcccaggctgctcaactcgctttagatcgagtcgaggacgaggtcaattccctcgccgactgctgcgataagattgcgaaggcgttgagcagttgcagtgctagcaccggtgatattatcaatacaaccgagaggttgaaccaggaacttgaagttaccactcagaagcagcagatagtctcctacttccttcgagattatcagctttctcctcaagagattagtgcattgagagatgaagagctgaacgaaaatttcttcaaggcactttctcacgttcaagaaattcatgccaattgcaaaatacttctcaggacccatcatcagcgtgctgggttggagctgatggatatgatggctatgtatcaagaaggagcttatgagcgactatgcaggtgggttcaggcagaatgtaggaaactgggtgataatgataatccagaagttggtgaccttttgaaaacagctgtgcgctgcctcaaggaaaggcctgtccttttcaagtattgtgcagaagaggtagcaaatatgagacataatgcattatttagaagatttataagtgctcttacacgaggaggaccgggtgggatgccaagaccaatagaagtgcatgctcatgatcccttacgttatgttggagacatgcta

SEQ ID NO: 9508 - DNA, 1044 bp, Gossypium hirsutum
  Clone ID: GOSHI-09MAY01-C85430_1
gaactcgcgattattgtaccaacgtcaaagcacattattcagatgtgtttgagtgcagtgcgggggagcattgagatgggtcaatttgctcatgtgacaagttacgttagtaaggctgagcaaacacccgaggcacttgaccctccaactattgctaagctacgttgtgctgctggattggctcatctggaggctaagaagtacaagctggcggcgcgtaagtttttggaagtgggtcctgaacttgggaattcctacagtgaagtgattgcccctcaagatgttgctacttatggtgggctttgtgcacttgcaagctttgatcgaactgaactgaagaacaaagttatagacaatatcaacttccggaatttcttagagttggtacctgaagtaagggagcttattaatgatttttactcgagccattatgcttcctgcttggaatatcttggaaacctcaaatcgaatctgatgcttgatatccatatacatgaccatgttgagaccctgtatgatcaaatccggagcaaagcccttatccagtacacccacccatttgtgtctgttgatatgcgaatgatggctgatgcctttaaaacaagtgttgcaggacttgagaaagaacttgaatccttaattactgacaaccagatacaggctcggatcgattcacacaacaaaattctttatgcacggcatgctgatcagagaaacgcaactttccagcgggtggggcagactggcaatgagttcgatcgggaggtgagggcaatgctgctgagggcaagtcttctcaagcatgagtacaatcttagggcttccaggaaaatctgaattctggactgaagcattatcaagatattcttgaaaagggtccttctatggctgggcataggttctggatgtgctgaggcactattgtaagaccttaaaaaggagattggctatccatgatgatggatttgcattttgagggttttggcatacacacttctgtatatactaaaaagtttatctcataagtgttacattatttgtttt

SEQ ID NO: 9509 - DNA, 573 bp, Gossypium hirsutum
  Clone ID: LIB3825-029-Q6-N6-F5
aaagaaaacaaataatgtaacacttatgagataaactttttagtatatacagaagtgtgtatcccaaaaccctcaaaatgcaaatccatcatcatggatagccaatctcctttttaaggtcttacaatagtgcctcagcacatccagaacctaggcccagccatagaaggaaccttttcaagaatatcttgataatgcttcagtccagaattcagattttcctggaagccctaagattgtactcatgcttgagaagatttgctctcagcagcattgccctcacatcccaatcaaattcattaccagtctgcaaaacccgctggaaagttgcatttctctgatcagcatgtcgtgcataaagaattttgttgtgtgaatcaatccgagcctttatcacttaatttgcaaaagcccatttccatttgaactggcttccttcactccagggaactaatgtataaacaaggattgactctacttccccgtctaactgtatctggttgtcagtaattaaggattcaagttctttctcaagtcctgcaacacttgttttaaaggcatcagccatcatta

SEQ ID NO: 9510 - DNA, 1336 bp, Gossypium hirsutum
  Clone ID: GOSHI-09MAY01-C85620_1
ctaaatttaatccaatacatgtcaactgatgaggttgagggcattcttagaatgcagctcgctgcaactcacagtaatgatccttatgtggatgattattaccaccaagcttgtcttgcaagaaaatctgctggggcaacattgagacatcatttttgcccaactcatctcagggatcttccttcccgagcacgtgcaaatgctgagccacacgcttttctccaagttgatgctcttgggagggtacctttctcttcagttcgcaggcctcgccctcttcttgaagttgaccctccaaattcttcctttgtcaccaacaatgatcagaaagcttctgatatgccccttgaactggaaccaatgcttgctgctagagttacaatagaggatggtctatgccttcttcttgatgtagacgatattgatcggtttttgcagtttaatcagttgcaggatggtggagcccagctgagacgaagacgacaggttttgttggaagggctggctgcatcgcttcagttggttgacccacttgccaagagtggccacacagatgagcttgctcagaaggatgatcttgtgtttttacggatagttgccctccccaaaggccggaagctgcttgcacggttccttcagcttcttcctccaggtggtgagcttatgcgcattgtctgcatgtccattttccgtcatttaaggttcttgttcggaggccttccctctgatccaggagcagctgaaaccactgttaaccttgcgagggttgtttcctcttgtgttcatggcatggatcttcgtgcacttagcgtctgtcttgcagctgtggtttgttcctctgagcagcccccgcttcgcccccttggaaagcccgctggagattgggcatctctttattctgaagtctgttcttgatagggcaacaaagctcatgactgattctagagctgcgggcaattacaatacggccaatctgtccctttggaaggcctcgttcgacgaattctttaaccttcttaccaagtattgcataaacaaatacgacactgtgatgcagtccttgcgtatgcaggccaaaccaaatatggccatcgatgaatcagatgttacaaaagcaattaaaagagaaatgccagttgatcttttacatgcatgtttaccccacattaacgaccagcagaaaaagctgatattggatctctctcagcggtctttggttgtaggacagtcatgatggcagaagtttttgaattcacacattgaagcattatacgagcaaatgatgccatgtgctggaaggaatgcgattagcgataccattgcctcatgcagctac

SEQ ID NO: 9511 - DNA, 1087 bp, Gossypium hirsutum
  Clone ID: GOSHI-09MAY01-C85050_1
ttttcgcgtccggagcatctccttatcctggtcaaaattctttacaacgggtcgtcattttcggagacatgggaaaggctgaagctgatggttccaatgagtacaatgatttccagcatggctctctaaacactacaaagcagcttattagagacttgaataacattgatatagccttcctaattggggacatatgttatgcaaatgggtacctttcacaatgggaccaatttactgcacaagttgagccgattgcttcaaccgttcctttcatgattgcaagtggtaaccatgagcgtgactggccgggaagtggatccttctacgggaacaaggattccgggggagaatgtggcgtgttggcggagactatgttttatgtccctactgaaaacagagcaaagttctggtactccacagactacggcatgttccggttctgtgtagctgacacggaacatgattggagggaagggacagagcaatatcaattcatcgagcactgccttgcatctgttggttgacaaaaagccaccggggctggattttccttgcacatagagtgttgggttattcttctgcaaccttttacgctgatacgggatcttttggggaaccaatgggaagggagagcctccaaaaactttggcagaaatacaaagttgacattgccatctatggccatgcacaccactatgaacgtacatgtccgatttaccagaatatatgcaccaacaaggagaaacaacattacaaaggcgccatgaacgggacgatacatgtggttgccggtggcggaggagcaggcctcgcagaatttacaaccctaaacaccaaatggagtttcttcaaagactacgattatggattcgtaaaactcacggcgtttgaccatttgagcctcttattcgaatacaagaagagcagtgatggaaaagtgtatgattctttcacaatatcccgggactatagggacatcttggcttgcactgttgatagctgcccaagtacaacccttgcctcataatctaaattaaaacacagattttcctttccttgatattaataaaactattttccacactct

SEQ ID NO: 9512 - DNA, 872 bp, Gossypium hirsutum
  Clone ID: GOSHI-09MAY01-C85030_1
ggaagaccggggagtctctgaaaccagggcttgggatatttgggtcttaatggcatcggtttaacaggggaaaactcctgcctttttggctagtttaacaaacctcaaatacttggtaatcggatacttcaacgcctacgttggaggcattccacctgagtatgggtcattgagtcaacgtgggacttctcgacatggcaagctgtaacctaaccggtgagattccttcgagtttgagcaatttgaaacacttgcactccttgttccttcaactcaaccgtctcaccggccgtatcccttctcaactctctggtttaatcagcttgaaatcacttgatctttctataaatgaactcacaggggagataccggacagtttctctgctttgaacaacattacgcttataaatttgttcaaaaacaatctctacggttcgataccgtcattcgtaggcgattatcctcatcttgaagtgtttcaggtgtggggaaacaactttacgtttgaattgccccagaatctggggcgcaatgggaagctttataagcttgacgttgcttcgaatcacctcactggattgattcctcgggatttatgcaggggggggaggttggagacgtttgattatgatggaaaatttcttctttggtccactccctgaagaacttggcaactgcaagtctcttaccaagattcgtatcatgaaaaaccttctcaatgggacgattccagctgggattttcaacttgccattgctgagtattatggagttaggcggcaatttcttctccggtgaacttccatcacagatgtcgggtgcttcgcttggtcagttaaaaatttcaaacattggatcaatggcaaaaattct

SEQ ID NO: 9513 - DNA, 808 bp, Gossypium hirsutum
  Clone ID: GOSHI-09MAY01-C86930_1
agttaaaaataactgatataaaatttgagcaatataatgtgcaatattcgccttttttccatcagccttacaattaatgataaaggtaagaattgcaaattcaattcagagaacaggttaaagaaaccaaaacatgaaagcaagagaagaacttgaaaggcaaagggggtttagtaccaagtgttccaacaacctgagtatcataaatgcgtatacaattcaagctaaatgaacctacttgtccgatgttatcacagaacaatctgtatcttggcaacagaaggttgtaactcaacacttaaaaccctctggagctcacttgattgcacaaaaatgggtagaacgtggcgaaaatacagggcggaggaaggtaacgtacataaagtcgttctaacaaacggcaggagttgacggttgtcatctgaagttgcaacagcgtgcctgacctctagaaagtttgtcccaaagacaaatcatctgcctaggggattggtaatgtgcagtataatagtctaccatgcatccgtattgacagaacttccaactatgggagtattggacagtcgtcgactggttaaattgttcgacccacattcccatactcacatcctccatcttgaaaagccctaatttttgatcggcatgttgtgagacaataaacttggcaatatcactggaaataatgtatccaggtccattggcatagggaggataaacttcttctggccactcctcataggtaacggcccacttcctttctcaaagggcggtgcagaaggttgagattgcccatataaagtgacctttc

SEQ ID NO: 9514 - DNA, 819 bp, Gossypium hirsutum
  Clone ID: GOSHI-09MAY01-C86890_2
gtcacactatcaaagaaataactcggtataactagatgttttgttttgggtatggcatgtatagaaacttagctacttttggtataatatgaacaataaatgatgtgtgatcggcctccgacgtttccttcgatccccgagtgactagataagtactttatacaaaatgtgactaaactttacaatttagtcatttactttttctttcccccgatctactcccgaacttcattcttcttgattttatcataggagcactcttttcttttctttttgttgttttagatgcgaaaaatgaaaaaaattaaagtcgaaaggaatagatcaagagaaaaaccgcaacaaatccggagattcaaagaaaggaaaatcaccttcctctatttttcttgctttgtattcaatatctgtatgcgtaaatgtgcgttcttaacctttacaaagactaaaagttgggcttttatagccgaaagaaaagaaaaataaaccgaaaatatacaatatgtctttgtttctattcgctgttgtttttgtttccttcttgcaggtacgggtgcgcgttcgtgtatgggggtcctgttggcgcttggcgtgaggagtacagaggcgaaggcatagggaggttgctgttgcggcgcaggagaaagaaaggaaccctagggtttctaaaatttttgggccatttgggctcatttcgggttttgggtcagtccttgggccgtggggttttagttattgggtctaggggcatgtattggcgccaaagttctgtaaatagacattataatggactaatatattattttttgttttgggatt

SEQ ID NO: 9515 - DNA, 552 bp, Gossypium hirsutum
  Clone ID: GOSHI-09MAY01-C86890_1
attttgtttttttagctgacctttagccaaatcatttggccctcacccccatcgtccccaaccacaggcgtattttcgccttttgaagtccattttcgacctcaagattcctcctccaccttcgacttcgacgaggcaaggaagaaccaatagtagatttgcgaggtacgggtgcgcgttcgtgtatgggggtcctgttggcgcttggcgtgaggagtacagaggcgaaggcatagggaggttgctgttgcggcgcaggagaaagaaaggaaccctagggtttctaaaatttctgggccatttgggctcatttcgggttttgggtcagtccttgggccgtggggttttagttattgggtctagggcatgtattgggccaaagtctgtaaatagacatttaatggactatatattattttttgttttgggattattctttggttgttgggcccgagcggatttggcccattacaatgttaatttgagtgagggattaaatcataaactatgaaaagtattgtggcctaaaaaaaaaaaaaaaaaaaaaaaaaa

SEQ ID NO: 9516 - DNA, 912 bp, Gossypium hirsutum
  Clone ID: GOSHI-09MAY01-C86790_1
gcagcttagagaggagaacaagcacaattttgaggatgccagaattacgcgaggtggctcataaacataagattgaatctgaagctctagagagccagctgatggagaggcaatttgaggttgaagcttctaaaaaggaaattgaaaagcatctgacagagagagagatcttggaaaagagggtctctgagttacttgagagatgtagaaacattgatgtggaagactataaccgtctgaaaaatgatgttctacagaaggaggaaaacttgaaagagaaggacgctcagattgaggagattacaaaccttctgtgtaagaagcaggatattatatcaaaattggaacaagatcttgcaaacagcaagttggaactcaatgagtagtcgaagaagaagaagaagaagaagaagaagaagaagaagaggagaaaaggagaaagtaaaaggtaaataaacaatgtcagggcacaaggagcattgcccaaggagtcgaagacggcaacgatatatgaatcagtacaaggaggagagaataagagcaaaacggagctgaggtccaaggaggatgagggtggcaatcaggttgataggctggaggacaaggtgaaagatcctactggcgaaggtggccctatctttggctctccctctcccaacaacgatgacaacccagacttgggcgttactggcacagcctaggcctaccttgcttcatttagctacccttccctacctaccaacctaccgctatctccttttacatgtcttatatagtaagatgtaatagatatatatacacacacgtatgctcctacatgtaataacacaaagatgctgtttttcttactttcttttttaaataaatgtatacaccagtgctcggctggggtgtgttgtggtttgttgatgt

SEQ ID NO: 9517 - DNA, 1158 bp, Gossypium hirsutum
  Clone ID: GOSHI-09MAY01-C86760_1
atcgtgaaccaaaacccctctgccctctctataattatcaaaatcaaatcaaaatctctcaaagaaataaaagtttcgaagtttgatttacaacccaaaaggagatggctcttttaagaagattcaatactattcgttctctttatcaaacccttgggatgcatcaatcttcttcattcctaagctcaagaagctattccactgggttttcaaatgtatctcaattctacggccaaggtgtaacttcttgcttatataagacacaaactaatgctcttccttggacatgtagaaacacaccgacacttcgttcaaccacggtaacattctgaagctgccgaattgttgatctttttgaatgacaaaaagtccttatccacacaagcgcctacacaaacacggaaagtgggagctcaaatttctatgactagccctggatttgtgtatgaaccttatgcacttcgtgaaccgatcccgttttggaagaggtattttacaagaaccggttggagacaaacaaaagaagatatcaagtctgagctcaagagtgcctatgcaattgctaagttaaggaaaacggggtactcaaaacagaaggtctataaggaagccgtagaattatacaaagagataagtactctagtagcaaatggtgacaaaacatcattacggaaagcagttacggaaaatatgttctctgcactcaagaatgaaattaagcaaagggaatctatatggagtaaggtttactgggagttggtcgaacctattgttaaaatacgaactttgcgagcccgattgattggtgttgataagaatgaccttaataaagctttcatccaacttactctcgagttcctgactaaggagaaattcgaagcatatgattctaaaggcgctgttgttgctggggataaaatgaaggaggttcttgtccgttccatctgggtattcgagaagtctctctttcattctggggctcactggcgtctctgcggacgaattaaagtatgagccaactattatttactgcaaagttcaaactgatagttctgatggcaataacgaataatttacgcttacccgattttgtttgccgagcttcttgtacattaactctatgcatattgatagattcaatccatggagtgatttctt

SEQ ID NO: 9518 - DNA, 451 bp, Gossypium hirsutum
  Clone ID: GOSHI-09MAY01-C86130_1
cgaaggcagcctcccattgataccacttggcagcagatttatttttgcttgaggactggttattatgatgaagcaagacaagttgccctgtcatcccgtgcttctcaccaatttgcaccactgcttgcagagtgggttaatggtggaggcatggtgccagcacacgctgcagctgctgctgcagaagagtgcgaaaaaatgttcagaatgggtgatcgggttggtcgagcttcatatgacaagaaaaaactgttgctctatgctatcatatcggggtctcgtaggcgggtgggccggcttctcagagatataccatcacttttcagtaccatagaggatttcctgtggttcatattgtctgcagcacaggattttcctggtggaacctcgtctatgagggttagtaccatacagtcttgacgatttgcaagcttacctaaccaatttgagc

SEQ ID NO: 9519 - DNA, 565 bp, Gossypium hirsutum
  Clone ID: GOSHI-09MAY01-C86330_1
cctcccactatttctcgctccagctgcggggggggggggggggctgccgatagagaattaaagcagaaaaaggggccaaaaatggctgcattaaccgttctaacaaaatcgctcggctatcactgcgccaaacgatctaaaatttctaccttttctcaaaatttcccttcgcataactctcgggggcgggcggggaggtctctgtttttagaaccctctttatccgaatctgtcaagctcaaccgtctctccgactataattccggaatcgttgaggtcaatttggaccggcccgaagcaaaaaatgcaattgggaaagatatgttgagtggcttacgccatgccttcgaagctatcgatcgagattcctcagctcgtgtagttatgatctctagttctgttcccaaggttttctgcgctggcgctgatttaaaggaacggaagaagatgactgctgctgaggttcactcttttgtcaactacttacgatccactttctcgttatagaggaacttcaaattcctactattgctgttatcgaaggtgctgcttgggtgggggactt

SEQ ID NO: 9520 - DNA, 966 bp, Gossypium hirsutum
  Clone ID: GOSHI-09MAY01-C86200_1
ttgccccgcgtccgcagactcggtgaccttgattgggctgcttactgcttgtagtcatgcaggactagctggtcttggtttccactacttcaatttaatgagtagtaagtaccaaataagaccttcaaaagaacattatggctgtatgatcgatctactctgccgagctgggcgactaactgaggcggaggaaatgattaaaagcatgccatttcatagagatgatgttgtttggtcaacacttcttagagcatgtagagtccaaggcaatgttgattgtggagaacgtgctgcagagaaacttcttgaaatggatccgaattgtgcagggacgcatatcacccttgctaatatttattccgcccaagggaaaatggagagaagcagcagatgttaggaagatgatgaggacaaaaggggtcatgaaggagccaggatggtcctggatcaaggttaaggatcgggtttctgcatttgttgctggtgaacgatcttaccctgagggtgaagaaatatatggcatgttggatttactagcttctagagtggatatttctgtccggcagttaggttctcttctagatctagaggactaacacgaaatgaagatccaatttcgttgcttcattgcaggtttgggcctctttctcctgattgaatgctgaatttaacagcagcaaggttctaatcagtagttaacaaatgacatcatgcaaccattagtacttgatttttgcgcagatgaagtattgaagtcgagggctggagcaagtccaacagatctgcaaatggggctgctggtgcttgaacaatttcattagtaaatggaatgacatcttatatgtgacttaagcatgaaatagctgttacagttgcacagaatatcaatgtttgggtctaaggtttttccaacatttgcagtgaggcagcttgatttctaaactcaggaatttgaaagtgtctatt

SEQ ID NO: 9521 - DNA, 606 bp, Gossypium hirsutum
  unsure (1)..(606): unsure at all n locations
  Clone ID: LIB3825-016-Q1-K6-D10
ggnacccaatccaactattatnntgcaaaattggnnatgaggaaactccaatgaatcctaaaaccttggatgaggaaactaaaacgagttccacaaactcagctgaggaaacttcgactactcccacaacctcaggtgtggaaactcctaccattcctggaatgttgggtagggaaactctgaccattcctactattgtgtgtgaggaaacaaccattcctgcaaccttaggtcaagaaactcctacccttcctgcaaccttgggtgaaggaactcatagtattccctcaacctcgagtgaagaaagtcatatcattcccactaacctggatgaagaaactcctactgatccagtgaccttggcagaggaaaggccaagtattcctgaaaccttgggtgaagaaaccccaaccgttcctctgacattcagtgaagaaactcaagttattcctccatcattcagcgaaggagctactattcctccttccttcaatgagggaagtcctactgttcctgtaacattgggtccagaaactcagaccattcctacaaccacgggtgaggaaactgcacacattcctgcaacctcaggtgaggaaactacaa

SEQ ID NO: 9522 - DNA, 571 bp, Gossypium hirsutum
  unsure (1)..(571): unsure at all n locations
  Clone ID: LIB3826-002-Q1-K6-D3
tttgcgtccgcggacgctgtggnngcggacgcgtgggtctcgactacctcccacatacctcatnggtgtggaaaccctcctaccagttcctggaatggttgggtagaggaaaccctctgaccattcctacnntattgtgtgtgaggaaacaannccattcctgcaaccttatggtcaagataactcctacccttcctgcaanccttgggtgaaggaactcatagtattccctcaacctcgagtgaagaaagtcatatcattcccactaacctggatgaagaaactcctactgatccagtgaccttggcagaggaaaggccaagtattcctgaaaccttgggtgaagaaaccccaaccgttcctctgacattcagtgaagaaactcaagttattcctccatcattcagcgaaggagctactattcctccttccttcaatgagggaagtcctactgttcctgtaacattgggtccagaaactcagaccattcctacaaccacgggtgaggaaactgcaaacattcctgcaacctcaggtgaggaaactacaagtgctcctgtgaccctacatg

SEQ ID NO: 9523 - DNA, 746 bp, Gossypium hirsutum
  Clone ID: GOSHI-09MAY01-C87000_1
tttgttcacgcgtccgcttcacatctcttcccttaaaattcctctttgatttccaaccaaatcagagagcacaaagaaaacaacaaagggggaaaagagaagtagaagtagaagatagaagaacacatcagaagatctctttctctctctctctctagctggtgttttagcgatgtttcgttaagaatcatttggaggttgatgtatgaaatccagcactggggaataatgggtaaaacaatggaggttcagcgtatgaaggaattgttgttactttggtcgaggttccaaagtaatcgtgtggctctcgtgggtggaaatcacactgccgctcgattttgcactcgctaagttttgccttcttcattcctctctttctcgcctgttataatctcttccttgttttactttaatatgctatctctagattttcttttccggaaaagttttctatttttcttctcgtacaatctaccttgcctttgatcacctttggtttctgaatttttgtgattggatttggaagccctttttttctttgtgttttaatcgatcatttggatcaaaatggctgtccatattatttatggacttctgaacaaattccataaaaacaagcataaggccttgaaaaatggcattaatttgcagtctggtgcacgattgatcgtcaaagttcctcgctctagggtttttaagcttcttgctcgggtcttgacggttttggctttgaccttatttttgct

SEQ ID NO: 9524 - DNA, 622 bp, Gossypium hirsutum
  Clone ID: GOSHI-09MAY01-C87310_1
ccttctcgtccgcctctctaccagccgcagactgggtagctatgagctctcttgttcgaaatgccacatccaattttagccgtagagtggatgggtacgaactgttggatcaaagcggcgaaacaagggaagaaaatccctctcaatataggacgtcttccaagaggagacctcacagcgtggtggcttccctgagttacaggcgagatcgagctaagaaaaggcagattttcttgaggtcatacaagttatcagccatggacaacaactggggacaacccaagccaaagtcgcggaaactgaagaagatggtgcttaaggttaagaccgtggtggtatcactggtgtcgtttatgcgaattggttccttcaaatcttgtaactgtggatcagcaatttgtgcagctgctcctatcgccattaagaagtgttgttgaatgattaaggagtaaagtttgtgctgtaagctttactttctctctagttaatattctctcaactttttaactttttgactattatgtttaggtgaataacagcagctaaaattaacttagaatttgtatttatgatccaacgattgctttccagttatttgattgcagttaactccttgattcct

SEQ ID NO: 9525 - DNA, 807 bp, Gossypium hirsutum
  Clone ID: GOSHI-09MAY01-C87300_1
cccagcgtccgccccgcgtccgcgggcgcgtgggctttccagaacttcttcatcgtcgattccatgtagaacgaacgctaatatgagaaaatccgaactctgcgatcccacaagggagaagtttcaatggaagcccttttacaatgccggctgttatcacaaatcccaaagcatttaacctcaacactccggctaatagcccttcagatttttctcgaaggcattcaactgacagagaaagtgtagcttctttgcgtgatcccaacaaggagaattatatagaccaaaatccaaaaccaacaagactcagatcaccagctgtttcaaagggtaaaaagaatttcatggcaccgacaatctcggctgcttcgaagatcaatgcgtcacctagaaagaaaatcttggtagagagaaacgagctggctcgatcttctgtttcattctctgatgtcaaaagtctaatcatgcaacataatgaatcaacatcggagattgctttgaagccgaagaaggtttcattttctgatgttaaaagcatgatcatggaagataatgaatgtaaggagcctttggaaggcaatgccaattcggttcaagtgattcccagctttgagattagtcctaaagtttcaattttagcaccacttgatgcagatccattgatgcttcctcatgacccccaaaccaattacctttctccaaggcctcagtttcttcattacaggccaaatcctcgaatcgagctttatcaggaacaagatggcaagcaactcaaggagtgcttagcaacggaaagctattacgaca

SEQ ID NO: 9526 - DNA, 663 bp, Gossypium hirsutum
  Clone ID: GOSHI-09MAY01-C87330_1
gaaaaaaaaaaaaagagagaaaaaaagaaggggaaaatcaaagaatcctctctgtctcggactgagagtagggctttagtctcgctttccacactcttcaacgcataaagagggcagcaaactttgcatctctgccccctctttttctctcatcagcaaaagttgaagaatcagtgaagctgttgaatatatatatataatgatgggagaaagaatctcaccagggagttattttcaataccctccacctggtttcccttctctttctcctcatagaccttcatctattcctacagatcgtgaaagatacttagctgaattattcacagagaaagagaagttgggacctttcacacaagttcttcctcaatgcaccgcgcttcttaatcaagagatcataagggtctcaggttttagtccaagtttattggatcatgagagatttgagcatgatagtcctattaggtcatttggtcatcatcccaatggaagacaaatggatttggaaggatggtccataatgcaaacagaggaaaatgggcatctgcaacgagttgctccggttcaagctgcatcaatgggttggcctggtttgccaggagctccaacaacaccgcttgtaaagaaagttgttagactcaatgtacctgtgggatcaatatc

SEQ ID NO: 9527 - DNA, 723 bp, Gossypium hirsutum
  Clone ID: GOSHI-09MAY01-C80830_1
caacaacaaaagtgataaaaagaaacatgctgctacacaggaatccgtgcctcagtacattcaactccttgatcccaagaaggcacaaaacttagcaatccttctgcgggcattgaatgtgaccacagaagaagtttgcgacgcactccgtgaaggaaatgagctccccgttgaactccttcaaacattattgaagatggccccaacggtggatgaagaactcaaactcagaatgttcaatggtgaaatctctcaactcggtcctgctgagcggttcctaaaagttttggtcgacattccttttgcttttaaacgaatggaagtgctgctttatatgtgctctctttacgaggaggttacttttgctagagagtcttttgaaacattagagattgcatgcaaggaactcagaagtagccgcttattcctcaagctcttagaagctgttcttaaaaccggaaatcgcatgaatgatgggacattccgtggtggtgcacaagctttcaagctcgacacacttttgaagttatcagatgtcaaaggagtagatggtaagaccacgctattgcactttgtcgtccaagaaattatacgcacagaaagtttaagagctgcccgtgctgcaagagaaaacaaaagttctctttcttgaggatgtttcccccgatttggaagagcacttccataccctgggcttgagggggttcacgtcctaatagtgaa

SEQ ID NO: 9528 - DNA, 583 bp, Gossypium hirsutum
  Clone ID: GOSHI-09MAY01-C80530_1
cccacgcgtccggcaaaaaaccctaaaaaaaatcctaccctttgaattccatcttgtgtgaaaacaatggggaagaaacggaagcacagtgaaacccagacagctgaaccgaaaaagaaagatgatgcagctccagagagacccaaaaggtcacttttcggttggaaagacaaggaagaagttcagcaacaaactgagtctaatacggatcctccccaagtttttagaaacaaagaaaaagttatggtgacttgttcacgacgcatcaattacaggtataggcatttgatgttgaatatggtttcacttttgcctcattgtaagaaggataataaggttgaatcaaggaatagtaaaggggctaccttgaatgagcttattgagttgaggggttgttcttctgctctgttttttgagtgtcgcaaacatcaagatctttacctgtggatggcaaggtgtcccaatggtccatctgtaaaatttttggttaacgctgttcacacaatggaagaactgaagctcactggaaatcatttgaaaaggttcacgtcctttgttgaccttctcgagcaattttgagatt

SEQ ID NO: 9529 - DNA, 651 bp, Gossypium hirsutum
  Clone ID: GOSHI-09MAY01-C80440_1
gcggtgatacaattgggcctattgtccatgaccctaaacttagcaagtctgagaagagggaggagattgttacccccgaggttatgaatgttggcatcatgggaagtggcacagaagcaacttgttcgggtttgaatcaacatagagttccaaatccctgcaactcttccgtggaaggaggcatctctccatttgttcctgaaggtagggtgcatggtgggagtttgatggcaatgcttgcaggtggttctggtcttggttcaggcaactgcgagggtttggctggtaatccatcagagccaaataaatctcatatggcgccccaaaagtggatgtaactacaacttaacaacaattgtcaaagtggtgttggaagttggcctccttttcatgcttgtttgtgtcctttgcgttagtccctaagtgttagaaagtcgtcgtcattcattggtctagatagtgatatgacaaatgtggtggaaaatgtatgaaggggatatagttagcaattaaccaggtctctgttatttagtgtaaatatttagatatgtccagcaggttgttgtgaatacaggtagtgcctgtatggtctgtctgtatgcccaacatcatggttttaataaggctttcattggcgtgttattttggttt

SEQ ID NO: 9530 - DNA, 519 bp, Gossypium hirsutum
  Clone ID: GOSHI-09MAY01-C80710_1
ctttcgttttcgaagggatggagcaccggaggaaccagcatgcgtctcggtggcgacaacttggaaggcttatgcagggctctgcaccccggtccggttagcttgttgcattggagcggtaaaggaaagccatggctgagaatcgactctaagagaccctgtccgttggattccttgtgggctccttacgatctgttccgccatccgtctttgttctccaatagctaaaatacggcggagagagttcatcggatttcgcaggagaataaggacacgcgtaaaaaaaggaaagcaccttgcaacttgcttcgccagtgaaaatatggagttaccgcgggtataagctgcctgtcaaccgcgctggttgccatgttgtcattctggtttgtgtgctcatataggaaagtgggaaggggaagtttaaaggtgtactccctttctcttttgactataatttttggattaattaaagttgtgtagattaagacaatatctacataagtagatatgaccccgtga

SEQ ID NO: 9531 - DNA, 762 bp, Gossypium hirsutum
  Clone ID: GOSHI-09MAY01-C80670_1
gaagcttttagcatcattttcagaaacagagcagccgagtccagaataaataaataaatggaatgaccccatcttcaagatttcgacaacaaacaaatctcaatcatataaaatttgcgccaaaaaaagaagaagaaagaaaatcataatttaattttcatcaaatgattagtcttagaagcaatccatcaacagcacccccccccccagaagatgcttgggttacttcttaccaaaggctacttcctcactggcactctgtttctctttctcatcagcattccacgctaccgatatcaatatctagggttaatcagtttgatgccgccagattggatattgagctgtcagccatgttgaaagaacagctggttaaagttttctccttgatgaagccaggaatgttatttcaatacgaacccgaactcgatgctttcctcgagtttctcatttggcggttctcaatttgggtagataagcctactccaggaattgcacttatgaatctgaggtatacagatgaacgtgccgtggcattaagaggaaaagtaagaacaggtttggaaggacctgggctaacttttgctcaaaagatgtggtattgtgttgctccagtgggtggtcagtacatctgggctcgtttacagtcattctctgcttttcgcagatggggtgattctgagcagaggccattggcacggcgagcttggggtttgatgcaacgtatagaagggcttttcaaggctgcatcatttggcaacc

SEQ ID NO: 9532 - DNA, 985 bp, Gossypium hirsutum
  Clone ID: GOSHI-09MAY01-C80660_1
cggacgcgtgggcggacgcgtgggcggacgcgtgcccggccgcccgggttcccgctcgccgagtttcccactcgccgttagccggcgatccatttccccgcccctccgccaaatcaggtacttgaagttaggaaattaatggcttatatccagtatggaagacatgcccttcggcaaattatcaaagaaacgaatgtccagcaaagccatgatcgtttgatgcaacctctgttctatgcttgtcaaggaattagatacagaaagttggatgtgattcttacgacgagcattgagaaacttggcaaagctggtgagactgtcaaagtcgctcctggttattttcgcaatcatctgatgccgaaattgcttgctgttcctaatattgataagttcgcttatctcattaaggagcagcgtaagatttatcaacccaaggaagaagaggttcaagtagttacaaagaatgtggaagataagagcaaagtatatgaaaaggctgcttatcggctacttaattggccggctggtattgaggagatctatcaatgttgaaaagtttcgtgcccaatcgaccaaagatgacccaattgaattgcgctcacctgtgacaaaagatgaaattggtgctgaggttgcaaggcagctttgcgttcaaattgatcctgaaaatttgcaccttccaacacctttggaaacatttggactgtttgatgtgcaattgcggatgccaaaatccataccgctcccaaaaggaaggtataattggacgcttaaagttaaaatccgaggtaaataaacggccaagaggaaataggaggttgactgaaaagagctttcaagcttgaggaaccgtcttcttttcgaattagcttgagaatggaatgataggaatcaaatgttggatgattattgacctttgttgtctgattatgctatttaccatctgttccaactctttgttttaccaaaaaagagtaataatttc

SEQ ID NO: 9533 - DNA, 445 bp, Gossypium hirsutum
  Clone ID: uC-gsflmaxxa006e09b1
cttacgggatcacccactgagtcgatggatgtaaacttatttacaaaaggagactcaccagaaatacattagttacagttgagtcattcaattgcacggaactggagatcccataaatactgaacctattcaaattgatgactcgaaggaagtgaattatggaggtatatgcagaatggaagacatgcgctaccatgtattatgaaagagacgagtgtgcaggaaaggcatgaacgtttgatggaacctgtgatatatgcttgtgaaggaattagatgcagaaagtcggatgtgattcttacgacgagcattgagaaacttggcaaagctggtgagactgtaaaagtcgctcctggttattttcgcaatcatctgatgccgaaattgcttgctgttcctaatattgataagttcgcttatttcattaaggagcagcgttagattt

SEQ ID NO: 9534 - DNA, 666 bp, Gossypium hirsutum
  Clone ID: GOSHI-09MAY01-C80140_1
ttggtgatcaaactcaagacctacacagtagaatagttttggaccatccacgaggttattctcagcaagttcacaaatgtatcgtggctcattcatctgggcaggcagtttttgatgggaatgtgaaggtgaacagatatgcacaacaaacggatgcagggcagctaactaggagccttcttcttgaacctcgagcaactgtaaatgttaaacccaatctccaaattattgctgatgatgtaaagtgctcgcatggagctgcaataagtgacctagaagacagccaactcttctactttcaagcacgagggattgatttggaaactgctagagaggctcttgtcttttcattcggggctgaggttattgataagctgccctattcttttgtccaaaagcaagtaaaagaccatgttgaagccttgctgaaatccaggaggaagggctcttcataatcatccataagtcgtggcttatgtacctaattatgataattatctattttcaaataatcatccctctgctcaaataaattttgttcttttttggaatagaaatgaaaattgctgtactatcgatttgatgtttagttgtttcatatcatcaccttttcccgttgtccacgggttgtgatctttcttcattgaataaaaatggatgtactat

SEQ ID NO: 9535 - DNA, 796 bp, Gossypium hirsutum
  Clone ID: GOSHI-09MAY01-C80160_1
cggacgcgtgggttcgagagttcgaattgttggtaaagatcattttagagggtccggtggagagtccggatgaggagtctgactctacattaagtaaacctttgacatttaggtcacagctcgcagcatttgataaagcatggtgctcctaccttagttctttcatggtgtggaaggttaaggatgctcggtcattggaagaggacttggtaagagctgcttgccagcttgagctctcaatgatacaaaagtgcaagttgactccagaaggagataagactgctcttactcatgatatgaaggctattcaaagacaggttatggaagatcaaaaacttttaagggagaaagtgcaacatttgtgtggagatgctggaattgaacgaatggaatgtgcactatctgaaacacggactaaattttttcaatcagaggaaggtggcagccaaacaggatcaccaattacgccctccctatcttcaagcacagatggttctcctagttctttgactgctagaactgataatggaactgatctggctcagatgccaaaccgtgttgtccgctctctgtttaaggacgatgaagatagcacatcctcatccaagaattctgtttcctctgtgactagcagcagccatttaaacactcagttagcatcttctattgaaaagcaaccagtctctgaaaatgaatggatggttaatgaatttcttaatgaaaggtgtggttttgttgatagcatcagtggcatcgaggaagatcaaattggcataaaggcaaagataagagaaac

SEQ ID NO: 9536 - DNA, 655 bp, Gossypium hirsutum
  unsure (1)..(655): unsure at all n locations
  Clone ID: LIB3585-049-P1-K1-C6
ggaattctccgggntcgaccccacgccgnntccgggacgagggcagagcncnngccattgagnnaaaagaggtgnnngtggagtatatttgctagtatgttggttcttcacaatgtnnggagcatgagggagaagcngaaagccaacttttttcaggaattatgcaatgtntnnttgggcgggtttaaatttgcttttgttggaaaaatgnnngtttgattcaagaattctgtannnattgganannaaacccaaattaccgaacagtantnntgattcacaaatcttnngtttatcaatacntnnggtcctcttanntccagagctttttattttgcctacanannttttccttctacnctgtnnntcttgattgnnngggtttggtattttattagatgngcngacnncaagaacatcncnntcctcacatgnngacacacgcnctttctttcatgcnnagattcggcaccattcnntgatgagactggatgnaagagttttgacacaaatttccttacttcnnccgcccatcaggattattgtcaaggatgaagaatatgatcggcctgagaaagtanttgcttgggaagaattcaagaaacggtggttggtgatttaagccacacangggtgagaggctgcaaatctcttt

SEQ ID NO: 9537 - DNA, 570 bp, Gossypium hirsutum
  Clone ID: LIB3543-035-Q1-K1-B11
attgactgttagccagctcgatagcttgaggcaccaggccacacagattgtgtcaatgaggctaggacgagcagagccgccattgagaaaagagtggtggagtatatgctagatgttggttctcacatgtggagcatgaggagaagcaaagccaactttttcagaattatgaatgttttgggtgggttaattgctgttggaaaatggtttgatcagatctgtaattggaaaaacccaattacaacagtattgattcacatcttgtttatcatactggtcctctatccagagcttattttgcctacaattttcctctacctgttcttgattggggtttggtattatagatggcgaccaagacatcctcctcacatggacacacgcctttctcatgcagattcggcacatcctgatgaactggatgaagagtttgacacatttcctacttcccgcccatcagatattgtcaggatgagatatgatcgactgagaagtattgctgggagaattcagacagtggttggtgatttagccacacagggtgagaggctgcaatctcttttaagctgg

SEQ ID NO: 9538 - DNA, 527 bp, Gossypium hirsutum
  unsure (1)..(527): unsure at all n locations
  Clone ID: LIB3585-005-P1-K1-C8
gggggatgcaaatataactggntggnctagtccgtcagtcttttctgaaggagaggatgatgcagaagaatcaaaagtcaataataagagaaattctgataatctactgcgaaaggcagcccttcacacaaagaaccatgggcaagaaaagacattgttgtctgatggatttgatcgtaatttgaattctcatgagcttccatctggtatattttctctttatgatcattacacgcttattttctgtcaaactgttttcagtttttctcatataggtagaatctagatggttataggtcaaaagcatatatgaaaattgttttaatgcttgtgtctcttctttgcccaactttctggagataccaaaatatttgttaatattcaaattccccaactttcaccaagtctcattatgagagtactgtggattttgtgtgtgcagctcaatcaggcatcagaacgtttaatacccacaaattgcacaatggcagcgtttcagctgcagccttaactactaaaggtcaatt

SEQ ID NO: 9539 - DNA, 523 bp, Gossypium hirsutum
  Clone ID: uC-gsflnu33B136a12b1
tttctttgtagaaaaggatcgaaacctaccaaacctatctgatgtggaaaaaagctgaaattacatcttcagctgacatagcacccatggtatcagcaagtccacgtgtgcgccactctctgtcacagatgctgcaagaagaaagtagcgaaggttatattactgactggggaaatgctgaaagtttgcctgcaatggtctaccaaaaagatgcacccaagggattgaagaagctgttaaagtttgctcggaagagtaagggggatgcaaatataactggttggtctagtccgtcagtcttttctgaaggagaggatgatgcagaagaatcaaaagtcaataataagagaaattctgataatctactgcgaaaggcagcccttcacacaaagaaccatgggcaagaaaagacattgctgtctgatggatttgatcgtaatttgaattctcatgagcttccatctgctcaatcaggcattagaacgtttaatacccacaaatggcacaatgggcagcgttcagc

SEQ ID NO: 9540 - DNA, 704 bp, Gossypium hirsutum
  Clone ID: GOSHI-09MAY01-C81190_1
tcgttcacgcgtccgcggacgcgtgggcggacgcgtgggcgggagcaaatatgagctcggagacgaagtaggaagaggccatttcggttatacttgtacggcgaagtttaagaaaggagagcttaaaggacaacaagttgccgttaaagttatacctaaagcgaagatgactactgcaattgccattgaggatgttagaagggaggtaaaaatattaagagctctatctggacatagcaatttagtacaattctatgatgcctacgaggaccatgataatgtctacatagtgatggaattatgtgaaggaggggagctcttggacagaattctttctaggggcggaaaatacactgaggatgatgcaaaagatgtgatgattcagatacttaatgtagtttccttttgccatctgcagggtgttgtgcaccgcgatcttaaacctgagaatttcttgtttacatcaaaggatgaaaattcacaattgaaggccatagattttggcttgtcagattttgtgaaaccagatgaaaggcttaatgacatcgttggtagtgcatactatgtagcaccagaagttctacataggttttacagtacagaagcagacgtttggagtataagtgtgattgcttatattctgttgtgtggtagtacggccattttgggctcgaacagagtctgggatttttcgagctgttcta

SEQ ID NO: 9541 - DNA, 600 bp, Gossypium hirsutum
  Clone ID: GOSHI-09MAY01-C81170_1
cttccttcaaacctctccaagccttgaaatcccctctggctccaattttccataataaaaacctcctctttcctcacttccaaagtgattttctttttttaattttttttatttgaagtcatagaatcaaacagatagaaataatatattattttgggttggaagctactattactgattatcctcattaacatttcttgatgtcaagcacccatttttcattaaggtatggtaagtggtagtaaccatattcaaaaccataaccaccatgaaaatggggagaaaaacccaactttgggaggagcttctaggtcgtggggcacgaccgtttccggtcaatccgtttcgactagcggtagtgttggctctccctcgagccggagcgagcaagctatggctacaccagctagtgagaatactttcttaagattgaaccatctcgatattcacggagatgatgctggatctcaaggtgcctgttggtaaaaagaagaagagaggtcaacgtgcagttgcaggtgataagagtggcagagggctccgccaatttacatgaaagtttgtgaaaaggtggaagcaagggaagaaccacatacaatg

SEQ ID NO: 9542 - DNA, 712 bp, Gossypium hirsutum
  Clone ID: GOSHI-09MAY01-C81090_1
cagaagttttaaaaatggaatgtgttgttcaaggaattatagtcccacagtatgttgaagcactcgaaattctactccagggtctgtgtggggttaataaagaacgcttaagagtccatgaaatttgccttaaaagtggcccaaatcttggatttgttgcttcagaggtcagattattgggggatcttgagcagtctgaacctacatggactgttaaacatgttgggggtgcattgaggggtgctggggtagagcaaatttctgttctggttaggagtatggtagaaagcaaagcaagcaagaatgtgcttcgattattttatgcactcggatacaagttggatcatgagctgctgagagtgggaatcacctttcatttccaaaggggtgctcagataacagtaactgtttcatctgttaataagatgctaaaactgcacgcaaccgatgaggctgtgccagtaacacctggtatacagctggtagaagtgaccgcccctgcaacatcggaaaattataatgaagtagttgctgctgtgtcttccttctgcgaatatcttgcaccgctgctgcatttgtcaaagccaggtgtttcaaccggtgttgtgcctacggctgctgcagctgctgcatctcttatgtctgatggtgggggcacaaccttgtaactggatttgtaaaattgcagaatgttgattatgtacttttgcat

SEQ ID NO: 9543 - DNA, 926 bp, Gossypium hirsutum
  Clone ID: GOSHI-09MAY01-C81050_1
gaaaaatgttacagtctttgattaaaatgtagaagaggatgaaatcgaatagccaatgacctaaggtactagaaggcacatcttgagatggtcgacattaggaaattttgaacaggagtatagtaaactgatccacttttcgctatgactatgaagttgtagtagaatgtgtgattatgctgtatgctacattttatgcctttcatgaaatttgccggctcttatgtttcgattctttgtttctggttccattgttatgctttggagattcagtttcctttatgctggagtgttgcacataatttcatatgttttgctccaaatacagtgacctaagctgatgtgttaaattctgtattaatattacatttgtgattgattaaccgtaacatctccattttcagatctacgacatattccagcaactccctccgaaaatacaggttggtgttttttctgcaaccatgccacccgaggctcttgaaattaccaggaagtttatgaacaaaccagtcaggattcttgtgaagcgtgatgagctcaccctcgaaggtattaagcagttttatgtcaacgttgacaaggaggagtggaagctcgacacgctttgtgatctctatgaaactttagctataactcagagcgtgatctttgttaacaccagacgcaaagttgattggcttaccgatcaaatgcggagccgtgatcacacggtatccgccacccatggagaaatggaccagaacactcgtgatatcatcatgcgcgagtttcgatcgggatcttctcgtgtgctgatcaccactgatctattggctcgagggattgatgtccagcaggtctcgttggttattaactatgatttgccaacacaaccggagaactatcttcatcgtattggtcgaggtggtcggtttgggaggaaa

SEQ ID NO: 9544 - DNA, 561 bp, Gossypium hirsutum
  Clone ID: AI728358.1
gattatttgggtgtaaaggttcatgcatgtgttggtggaactagtgtccgggaggatcaacgaatccttgcagctggcgtccatgttgttgttggtaccccgggtcgtgtttttgacatgcttcgtaggcagtctcttcgtgcagattatattaagatgtttgtcctcgatgaagctgatgaaatgctctctcgtggttttaaagatcagatctacgacatattccagcaactccctccgaaaatacaggttggtgttttttctgcaaccatgccacccgaggctcttgaaattaccaggaagtttatgaacaaaccagtcaggattcttgtgaagcgtgatgagctcaccctcgaaggtattaagcagttttatgtcaacgttgacaaggaggagtggaagctcgacacgctttgtgatctctatgaaactttagctataactcagagcgtgatctttgttaacaccaaacgcaaagttgattggcttaccgatcaaatgcggagccgtgatcacacggtatccgccacccatggagaaatggaccaaaacactcgtgaa

SEQ ID NO: 9545 - DNA, 497 bp, Gossypium hirsutum
  Clone ID: GOSHI-09MAY01-C81230_1
acaatatcaaagactcatcaattcgcgggaaaactgattgaattttaaaccatccagttccaaaaatatcactatcaatgtgagtgatccaagttcaccaatctgtgttaaggccccttcgcctccgctctttggttcaaatctttacgtcttcacattagccgagttaaggctaataacccacaattttgcacggtgtaacttgcttggtgaaggtgggttcggaccagtgtacaaagggtttgttgatgataagcttagacctggtttaaaggctcaacctgtagctgttaaaacacttgatttggacggcttgcaaggtcatagagaatggctggctgaaattatcttccttggacaacttaagcaccctcatttggttaaattgattggttattgttattaagacgagaaccggcttcttgtctacgagtatatgcccagaggcagcttggaaaattaactttttataatgtattttatttcttttgctattg

SEQ ID NO: 9546 - DNA, 503 bp, Gossypium hirsutum
  Clone ID: GOSHI-09MAY01-C82970_1
tctgtataaggagccaaagcgatataatacaaaaaaaagaaccgagttctttttttttagtctatctaaaataaaataggagatcatatgaaaaatgtaaccgattctttcgtttccttgggtcactggccatccgccgggagtttcggggttaataccgatattttagcaacaaatctaataaatctaagtgtagtccttggtgtattgatcttttttggaaagggagtgtgtgcgagttgtttatttcaagaataggctggattcacccagttgtactttttttcattataactaggaaagaaaagagtgcatgatcccgcgaattacttctgaataaatttctaaaaccatcttatagaaccattagcattcccgtgattcattggtacatcgactttgattctctattaaccaataatctgggaccattaacatggttaaggccaaacccgtttgaagttcagatgcagcagggtactctttctactactatgttacta

SEQ ID NO: 9547 - DNA, 963 bp, Gossypium hirsutum
  Clone ID: GOSHI-09MAY01-C82080_1
cttattttttactttgtgttataatgcactcaaatgacaacagtgatcttttatcatcaatgtcacggttatctgctgaagcaaagaaggatcaagctgttcagcatgcacttgcagttcggtcagcagtgacttcaggaaattatgtcttgttctttagattatacaaaacggcacctaacttgaactcctgccttatggacctttatgttgagaaaatgagatataaggctgtaagctgtatgtctcgttcttatcgtcctcaagtacctgtttcgtacattgctcaggtgctgggcttcagcagtggtgtgcttacaaatgaaggaagtgccgagaaggagtcggatggattggaggactgtgttgactggttaaagacacacggtgcatgccttgttgtggatagtaatggagagatgcagcttgatgctaaggcatcatcttcaactctctacatgccggaccctgaagatgctgtagcccatggcgattccagtcgggcagttaacgattttctgacacggacatcatcgtagccttgttctccttttttaaaagtgtatttgaaagcattagtaagacgccgaagatgttaagcatttgccaaatcgctatcaaagaaagagtgggaacttttcgtagaaggcgtggcaaaatccgaaagactcaacatctgccgacgtttcctgtaccctaagaaagagttaagatcctatttgtataccatgaaaaactaattctaaagaactcaaatccttcaaaatggggtgttagggtggcagatgagaaagaaatcgttttgagtagggcaagtccaatggtagttcttttatgaggtttggtttctgaaaacatatatagattcattcttgtggtgaaaagacggacatagatgtatttcaggaagatgattatagggaaaatagtctccctgtttgataaaaaaaaaaaaaaaaaaaa

SEQ ID NO: 9548 - DNA, 436 bp, Gossypium hirsutum
  Clone ID: LIB3583-015-P1-K1-D10
ccctcgcgtccgccctcgcgtccggtctagttctttagattatacaaaacggcgcctttctagaactccgagccttatggatctttatgttgagaaaatgtgatatttagctgtttgctgtatgtctcgttcttatcgtcctcatgtaccggtttcatacattgctctagagctgggcttctgctatggtgtgctttcttatgttagtagtgttgtgtttgagtcggatggattggtagtctgagttgtctggttttaggctctcggagcatgccttgttgaggatagttacggagagatgctgcttgatgctaaagcatcatcttcgactatctacatgccggaccctgaagatgctgaggcccatggcgattccagtctggcagttaacgattttctgacacggacatcatcgtatccttgtactcctttttaa

SEQ ID NO: 9549 - DNA, 454 bp, Gossypium hirsutum
  Clone ID: LIB3585-003-P1-K1-D4
cttaaaaaaagggatcaaaacccacatgagtttcagttttctgcttgcctctgcctgtctttctgacacaacacaaattttggctctgcacaacatgcaaaatcaagacatgaatctggttctatcaactgatgctaagcctaggctaaagtggactcctgaacttcatcaaagatttgttgaagctgtcaatcaacttggagggccagacaaagcaaccccaaagaatctgatgagggtcataggaatttctggactcactttgtatcatctcaaaagccatttacagaaatacagactggggaaaagccaacagactgaaatctgcctcagcgataatctagatgattacagagagatacagagcagtaatagggatttgagtagtgacacaagtgatggaactcacaagctgatgaatgaaagctcgaagattgctcatgcgcttcaaatg

SEQ ID NO: 9550 - DNA, 397 bp, Gossypium hirsutum
  Clone ID: uC-gsflmaxxa043b07b1
ttttctactaaaaaaggatcaaaaaccacgtgtgaaattcagtttcctgcctgcctctcttacataaacttggttcttcaaaatactcaaaatcaaagaatgaatttggttctctctactgatgcaaagcctaggctaaagtggacacctgaacttcatcaaagatttgttgatgcagtcaatcaacttggagggccagacaaagcaacaccaaagagtgtgatgagggtcatggggattcctggactcactttgtatcatcttaaaagccatttacagaaatacaggctggggaaaagccttgggaataatacagattacaaagagatgcagagcagtaatgggaatttcattagggacacaagtgatggaattcacgggcatatgaatgaaagct

SEQ ID NO: 9551 - DNA, 668 bp, Gossypium hirsutum
  Clone ID: GOSHI-09MAY01-C82390_1
gcgttcgcagcatgttgattactggtggagttactattacaaggatcttgacagatccaatggctccatcgtcatttttacaatggatgaaccatgctggtattcatcatatcagtgctatatcatttttgattatggatttcctcctcttcttcggtgtggcatcgttaaccgctgtacaggcttcgcggatatcacagaatataaccacgaatgaaatggcgaacgtaatgcgctatagctacctcaagggtgcaggtggtctattcaaaaacccatatgatcatggctgccgcaagaactgcacagatttcctgttcaaaggctataatgaagacgtggaggcctgtgaagatatagaacattctaaaggaattggggtagcacaaatgctgaggaatttgaagttacaaaatggtgattcgcagtctcgcaaacagaaatggccatcttgctataaatgccaattctagcaacaccatttcacacattcatccttccaactgcaaacacagtcaccatagcaaggcaagaacttagagagtgcttctggggttgggtcttggtcatggtcttgaacggagtagtccctgttctgtcacgacatcacgataatcatgtccagcacaagctggaattgatgtgcagcataatgtaagcgttatttt

SEQ ID NO: 9552 - DNA, 915 bp, Gossypium hirsutum
  Clone ID: GOSHI-09MAY01-C82310_1
gttttgcacttatgcttgacaatcagggcttccatggagtccaaaatttccatctttctcccaacatataatctctgcaatcttctcgttcttgttttcttctgttttgctgcttgtccttcacttggtcgcctctctttcaacttctatgcaacatcatgtcccgctgcagagttgatggtgagcaacactgtcagggcagcttcctccaatgatccaaccatccccgggaaactactgcgcttgttgttccatgactgtttcgtggagggttgtgatgcatcagtactattacaaggaaatgggacagagcgaagtgatccagctaatacctctctcggaggattttcagttatcgattcagccaaaagggtgctcgaaatcttctgccctggaaccgtatcttgtgctgatattattgctttggctgcaagagatgcagttgcaattgcgggcggacctgcatttcaaattccaacagggagaaaagatgggaggatatccaactctgttaacgtcaggcccaatatattaaatactagctttaccatggatgaaatgataaagctcttcaattctaaaggcttgtctctagatgatcttgttacactatcaggtgctcatacaataggcctacctcattgtagtgctttcagtgatccgttccaccaggactccaagggaaagctcaggctggttgacacatccctagacattacctacgcaaaagagctcatcagaaagtgtccagcaggtggaagtagcacatccaacaccgtcagcaacgatcccgagacatcctttgcattcgacaatcagtattatgggaacctattagcccacaaagggttgtttcagtcagattctattctactaaaggatggaagaacaaggaaacaagtagaggagtttgcc

SEQ ID NO: 9553 - DNA, 670 bp, Gossypium hirsutum
  Clone ID: GOSHI-09MAY01-C83950_1
cggactctttggtttcaagcaaataatatcaaatctccttgggcttcttcttcttcttgttcattgagttgagtgttgcaagaaaaatgggtattaagcaatttataggttatgctttagctgtgttagcaagcttggtggtgccagctcagggctctgattttgcattttataagctgagtctgatatggccgacttctgcttgttatccactcgccaactgtaagactccaatacctactttcttcaccatccatgggttatggccaacatttgccaacgacaccgcagttcctgcttatgggcctaataatagatgccatgccaatcctgttggctcccgatgctgctgtggctagactaacacccattcaagacagactaaacccaaaggtggccaaaccttagggcagggggttgaaaactctgttttttggagacatgaatggcaaaaccatgggattgggctctggttatcctcaagatcctttgagttattttaatgataccttaaaccttgcaacttccaccaaattcgaccctttcaaagctttgggagttcaaccatcaaacactccctatcttttaaacacattgctacaaaatgtgtacaagaacgtgggagcctatccttaaatcttatgcagtcaacgaacaggaggcgcacttt

SEQ ID NO: 9554 - DNA, 562 bp, Gossypium hirsutum
  Clone ID: GOSHI-09MAY01-C83830_1
gcctcttgatttcaacacattgagccctttttttctctcttcccgaaaaggaaaatggggaaagcaatcacacccaataacaatttcagtagtaaacaaagcaaaaagcaaacccccaaaattagttgaaaagaaaatgcctacaccaccggacaccagcaaaaccttgaaattagagagatacaacaattatctccgaaaaattcacagcaccaaactcatcactgcttcttctaaacttctctttcgtgcaacccttctcattgctttgattctgatcctttttttcaccatcaattaccctcctctttccgatactccccaccatgtccctcctcaccaccgtctccaccaccacagcttactttccacttcccttttctccgccgggggcggtgccgcctgggagaaacaagtccgactctcttccacgccgcgtagaaccaatgggttctccgttttggtcactggcgccgctgggttcgtcggttcccactgttcccttgctttgaagaaacgaggcgatggggttctttggtttagacaacttcaataactacta

SEQ ID NO: 9555 - DNA, 638 bp, Gossypium hirsutum
  Clone ID: GOSHI-09MAY01-C58987_1
gaacacgacatcagcggcaattcttcttcttgccataagcaatgcaaaggacattggaggaggttgcaaccttcccttcaatccgaattagaagcagaacgactattgaaacctataaacatcgataatagccgaagattgaagcatgacagggcacgacgctcttcattcagggctctctgacatgtacagattttgatctggaagattgaaattccttttttttttttgggtgagagaatgaactgtattacggcttttttttcttagctattctttttcttggtagcgaaataagagtgaattcggaatgaggggtaggttcatatagctgatgatcgattgagtcaataacacgccgccgccacgttttgtcgttgagacatctttgtttcacatctcgagctggagagccatttgcttctcgtcgatattccaagcacggtatcgatgtacgagaactgctgcggtccaaacggcattatagattgttattgtttttccctaagcctaatatttttataaggttggtaaatttgttcttaaaattttgtccactttcttcttcatatatgattttgattgtgaaagatatgcttttgattacaaatataaaatagcatattagttgctttgtt

SEQ ID NO: 9556 - DNA, 566 bp, Gossypium hirsutum
  Clone ID: GOSHI-09MAY01-C58507_1
cttgcctgcggctacttatcgcaatctctgcttctttccaggctccactcaacctcgatcgaggtcaaaggaaactgcttttcactgtaatccaaatccattccagactccaatttgcttgtgttgtaataacataaagatgtctactgaagcaccggccaccatggagatcgaaaccgtgccttccgagcctaaacccgagtcaaatcctttacccccaaagccaaaatttgagcctcttaaggcacacgagatgtcagacggtcgagtgcaattcagaaaggtttcggttccacctcataggtattcacctctcaagaaatactgggtggatatctatactcctgtttatgaacaaatgaagatcgacatccgtatgaatctcaaagctcggaaagtcgaactgaaaacacgacaagacacgcccgacattagtaacctacaaaaatgtgcagattttgtccaagctttcatgttgggtttcgatgttccggatgccattgctcttttgagattagacgagttatatgtcgagtcgtttgaaatcaacgatgtgaaaacactta

SEQ ID NO: 9557 - DNA, 1342 bp, Gossypium hirsutum
  Clone ID: GOSHI-09MAY01-C58487_1
gttgatgcccctggtttacaccatttgtatgactgtctggtcttccctcaaaaggtgagagaccccatacgaatgaagcttctggaagtgatcttgatggggacctttattttgtcacatgggaagaggctcttatcccccctagcaagaagagctcacaacccatgcagtatgaccctgatgcgcctcgagagttgaatcgctcagtcactcataaggacataattgagtttttttcaaaaaacatggtgaatgagcacctgggaagtatctgcaatgcacatgtggttcattctgaccttagtgaacatggtgcttcagatgagaaatgtatacatctcgcagagttagcggctatagctgttgattttcctaaaaccgggaagattgtgtcgatgcctgctcaattaaaaccaaaactttacccagattttatgggtaaagaggagttccagtcatacaagtcaaacaaaattctgggaagactatatcgttatatcaaagatgcatatgacaaagatgtctctgaatcttctgagctcaattttggtgctagtgacatcaattatgatgcagatcttgaaattacaggatccgctgactacataactgatgcatgggctaaaaagtgctcctatgacgggcagctgattggactacttaaacagtacaaagttaagagggaagaggaggtcgtaactggccaaatctggtccatgcccaaatatgccagtaagaaactaggggatttgaaggagaagcttggtcattcttatggttcccttcaggaaagaattcagacaactttttgagaacatggactccgaatttgagcagctcaatgaggatgagaagaacaagttgtatgaaagaaaggcttcagcatggtaccaagtcacttaccatcctgaatgggttcagaagaagttagagttccagaagcctgatggcgatgaaggcgttgtgatgttaagctttgcttggattgctgctgattacctagctcgaataaaagttaggcaccaggggactgaaaatcttgactttgctaagcctgtcaactctctagtaaggtacctagctgatcgaatataaccagtatttgactgttttggcagcaaattcttttgctggatcaggcttcttggtcgcaaagccactctgccattttgaaagatgaagttgtaatgttggtttgtaatgcagtacatctctgctgttaccctattgttgctatgacctattgtgattgttcgtagagtgattttcccatgctttgtatgaaactaatatttttcaattttcttgctttgcttgaatataatcatggtcttgtctcagt

SEQ ID NO: 9558 - DNA, 596 bp, Gossypium hirsutum
  Clone ID: GOSHI-09MAY01-C58697_1
ctcccctgtaggtaagccctttataaaagctgctttctacttcaagaggccttacaattattacttcctttgaacactagcaatacatcagttatgtccaattataacatgatattcaagattggtgcttacaaatcgttctccgagatatctccgatcgttcagttcgcgaattttacttgtaatcaagcgttactcgaggttttcgaagggtgtaataggcttcatataatcgatttcgatgttggttatggtggacaatgggcttctttgatgcaagaacttgttttaagaaatggtggtgcaccttctatgaaaattactgcctttgcttcaccttcaagtcatgatgatatcgaactcggtttcacaatcgaaaaccttaagcattatgctagtgaaatcaacatggattttgatatcgaaatcatgagccttgaggccttgaattcgggttcttggccgttgcctttgcacttgggcgaaaacgaagcgattgctgttaatctcccgatcggttcattttccaattacccttcaatcttgcccttggtccttcgtttgtcaagcagttatcgcccaagattgttgtctcg

SEQ ID NO: 9559 - DNA, 802 bp, Gossypium hirsutum
  Clone ID: GOSHI-09MAY01-C58157_1
ggtatatttttcatttttttttctttttttattgctggtgaacaggatccatattttagaatgacaagagatgttgcccctcggatagggtatcacaagcctgcattgattgaatcattattcttccccgctctccagggtgaaacggggaaaatgtcagctagtgatccaaattctgcaatttatgtgactgattctgcaaaggacattaaatacaaggtaaacaagcatgcatttactggaggacaagaaaccatagaaaaacacagacaatatggagcaaatcttgaggtagatataccaattaaatatcttaacttcttccttgaggatgatgcggaacttgagcacataaagaaggcgtacggtgcgggacgcatgcttacaggtgaggtgaaaaagcgactgatagaagttgtgactgaaatagtagaaagacatcgaagggctcgagcagcagtatctgatgagatggtggatgcatttatggctgtgagaccacttcccaatatgtttgattgaattaataccaggtaatgaaaagagcttggtgagatgttttccaaattatcgagcaagaacacaacatttggttatattttatttgcattcccttgctagaattctctaaattattgagttttgctttagggaaaatgtattttgtggtgcaatttctcaactctagaaatatagtgaagtgagtgtacaattttgattcagtggcaagctgcatatttcatcttggactaagagttatgcttttgaatatggatggcaaatttaattcgtcactcttaat

SEQ ID NO: 9560 - DNA, 1155 bp, Gossypium hirsutum
  Clone ID: GOSHI-09MAY01-C58097_1
ggtttgtgacattggtgtaaaatggcacaattacctccaaaaatacccaacatgacccagaattggccttcttttccacatcaaagattgcctacaatggcaaacttcatttccaccactgccaacaccgccactatgaatgcctcccaccaccaccagccttcttgggtcgacgagttcctcgacttctcctccgcacgccgcggggcccaccgccgttccattagcgactccatcgctttcctcgagcaaccattggtggaggaatgcagggactccaacaccaaccacaacaacaatgccatgataacggaaaccaatgtgttcgatcgtctcgacgacaaacagctcatgtccatgttctccgacgacgtagccatcaccatggctgctgcaccgacgttatcctcgtccaacccttccactccgacgtccgaccaaaacagcaacaatgacgagaaaccagtgccgtccctggatctgcagcagcccaagaacgaaccaggagaagtggagagctcatgcaaacctgaaccacaagctgctcaacctccatcaacctccaatggcgaccccatcgttgatcccaaaagggttaagagaattctggcaaaccggcaatcagcacaaagatcaagagttagaaagctgcaatatatttctgaacttgaaaggagcgtcacaacattacagactgaagtatcagcattatcaccaagggttgcattcttggatcatcaaagattgattctcaatgttgacaatagtgctttgaagcaaagaattgcagctttggctcaagacaagattttcaaagatgctcatcaagaagcactgaagaaggaaattgaaaggctaaggcgggtgtaccagcaacaacaaatcctcaagaaaatgaacagcaacaatagcaacaaccaccatgcaccaccacaacaacaaccatcacagccgccgcagacgaagaaagaagaacaactatgagttgttcagagaaatagagagagctagagacggcagtgagaaggtcttggtgccaaataaaaataaaaaataaaatgcaataaagctatctaaccaattggggggtggggggggcactttttcccagttatgttgttcccccattggtgttttttaataagtggttgggcc

SEQ ID NO: 9561 - DNA, 526 bp, Gossypium hirsutum
  Clone ID: GOSHI-09MAY01-C58017_1
gccaggggaaagcttagaagaagcagtgaggagagaaacatatgaagaggccggtattgaagtcggagaagttgtttatcatagttctcagccatggccggttggtccgagtagcataccatgccagttgatggtcgggttctttgcatacgctaaatctcttgaaataaacgtggataaggaagaactagaagacgcccagtggcacagtagagaagtcgtgaggaaagcattggcggttgcagaatacaagaaggcgcaaaaaacgaccgcagccaaagtagatcaaatgtgcaaaggagtcgagaagggacggtgtttgtcggcagattttaacgtcgaaagtggggggctcactcccatgtttttctcccggtccattcgcgattgcccctcacctccatctctacttgggctaatcaaggtgtaccgactgacggtgtcgaagccagctcaaaacagcctagcagttccatttcgaatctatagctcttcatcttctactataaatatatcaataatcatt

SEQ ID NO: 9562 - DNA, 417 bp, Gossypium hirsutum
  unsure (1)..(417): unsure at all n locations
  Clone ID: LIB3149-040-Q1-K1-C5
aaaacccggtccgacccacgcgtccgggccggtattgaagtcgatagaagttttttatcatagncctcagccatggccgggggggccgtgtattttaccatgccagttgatggacaaaanctttgcatacgctaaatctcttgaaataaacgaggataaggaagaactagaagacgcacagtgtcacattaaagaagtcgtgaggaaagcatttgcagatgcagaatacaataatgcgcaaaaaactaccgcaaccaaagtagatcaaatttgcaaaggagtctttaaagcaccgactttctcttcatattttaacgtcgaaagttgtctactcactcccatgttttttcctctttccatacacgattgcccatcaccttatctctaccttttctaatcaaggtgtacctactttca

SEQ ID NO: 9563 - DNA, 726 bp, Gossypium hirsutum
  Clone ID: GOSHI-09MAY01-C58387_1
gaacaactttgaaggtctcatatcgactcgagtttccactgatgacggttcaaacatagaagcatttgatgccaacactgcagttgatgcgcgctgtggctgggaaggatataggatggttaagatctattacaaacttgccagttctgctcaagggagtacttactcatgaagatgcaataaaggctgttgaagtaggggttgatgggattgttgtctcaaatcatggagctcgccagctagattatgctccacccactatttctgttctagaagaggtggttagtgcagttaaaggaaagattcctgttttatttgatggaggaataagacgaggaacagatgttttcaaggcgttagcccttggtgcgcaagctgtccttattggaaggccagcagtttacggacttgcagccaagggagaatacggggtgaaaagggttattgaaatgcttagggatgaacttgagctcaccatggccctctctggatgccctactctcaaccatattaccagataacatgtcagaactaagcatgagagaccccgctccatgctttaaaatactacaatattgttgaatcgcattcataaatgtattcagatcattcctgaatctgtcatcatttaattgaacaaactcataaatcagctcctattaatggttgtactactttcatttgaggcaatagaggaaactgcgaccctgtattattcaagcattc

SEQ ID NO: 9564 - DNA, 426 bp, Gossypium hirsutum
  Clone ID: GOSHI-09MAY01-C59857_1
atgtccgcctgacctacctcaggaaccagctggcagagaaggacgagttcgacatcccggacctcaccgacaacagccggcgccagctgttccgcaccaagagcaagcgccgcttctttttccgcgtgtcggaggagcagcagaagcagcagcgcagggagatgctaaaggacccctttgtgcgctccaagctcatctcaccgcctaccaacttcaaccacctggtacacgtgggccctgccaacgggcggcccggcgccagggacacgtcccgggctctggaagagaagggccgagtttctcgcggctcctctggcccacagcggccccacagcttctccgaggcgttgcggcgcccagcctccatgggcagcgaaggcctcggtggagacgcagaccccctgaaaaggaaaccttggacaatcc

SEQ ID NO: 9565 - DNA, 443 bp, Gossypium hirsutum
  Clone ID: GOSHI-09MAY01-C59877_1
attgcgctttcagaccgtaaggagcgtgctgggagcccggaagggaaactacgcagcgaaggtgaccggggaccaagcatttcagatctgcttggtagacctggtgcaccaccaccatgttggctgcaaggcttgtgtgtctccggacactaccttctagggttttccacccagctttcaccaaggcctcccctgttgtgaagaattccatcacgaagaatcaatggctgttaacacccagcagggaatatgccaccaaaacaagaattgggatgcggcgtgggagaactggtcaagaactcaaagaggcagcatttgaaccatcgatggaaaaaatatttaaaattgatcagatgggaagatggtttgttgctggaggggctgctgttggtcttggagcattgtgctactatgggttgggactgtctaatgagattggagct

SEQ ID NO: 9566 - DNA, 719 bp, Gossypium hirsutum
  Clone ID: GOSHI-09MAY01-C59867_1
atcccgcctggggcctccggacattgctccctgaaccctcggaggtggcggtggatcttactccttccagccagtgaggatccagcaatcttctccgtgcctccccccgcgcctgttggttggaagtgacaaccttgaagatcggccggttggaagtgaagaccttgaagatcggcgggcgcagcggggccgagggggcgggtctggcactaggtcccgcccctgcacgccaggaaccccagaggaagtcgcagttcagcccagctgagtcctgtctgcagaatccacaccaaccagcatcatgtccatgacactggggtactgggacatccgcgggctggcccacgccatccgcctgctcctggaatacacagactcaagctacgaggaaaagaagtaccggatggggcacgctcctgactatgacagaagccagtggctgaatgaaaaattcaagctgggcctggactttcccaatctgccctacttgattgatgggactcacaagatcacccagagcaacgccatcctgcgctacattgcccgcaagcacaacctgtgtggggagacagaagaggagaagattcttgtggacattttggagaaccagcttatggacagccgcatggagatggtcagactctgctttgacccaaattttgagaaactgaagccaaaatacttggaggaactccctgaaaagctaaagctctactcac

SEQ ID NO: 9567 - DNA, 850 bp, Gossypium hirsutum
  Clone ID: GOSHI-09MAY01-C59547_1
tttttcttaatgagaaccgggggtgggggggctttccatgttttcaacttttggttctctgtgtcagtccttttttgcttccattttattgtaacttttctggtttaatgaaagggtaatggaggtaaagggtaatctaatccaattgtaacttgtttaaatttttgcgtttgatgcgaactctgttcaaagccctttcaaaagcttgaactttgagactgttgagtatagaaacacttgatgatcttcaaagcttgaaactttaagcctgctaatgctcttcagcttctgggtctttccaaaatgtcatcatttgagatgtcccatatcgatttagagcaaggaactcaccgccggaacgagagcgaagtcagcgccggcgaagctagcgtgtgcttctccgacgccgacgagggctcttgctactctcagttttattccaccacgggtggttcttacgatgagtacagcttcggttgcgagattggtggcgattcggattccaggagggtgtcttcggcctcggattgctcggtggaggtgcgggctccaagtggagctaatgaactcaagctgcatttggccaaagttgagaaagattgtagaatttgccatttgggtttagagagcaacagccatgaatctggtgcccctattgaattgggttgttcttgcaaggatgaccttgctgctgctcataaacactgtgctgaagcatggtttaagatcagaggaaataagacctgtgaaatttgtcattctattgcacgcaacgtagttggagtgaacgaggtcgagtcgacagagcaaccaaacgagacaaacagttccactgcaaccactgcagtct

SEQ ID NO: 9568 - DNA, 603 bp, Gossypium hirsutum
  Clone ID: GOSHI-09MAY01-C59527_1
atcgccgcggagcctcccgaacctcctcagccgcccggagccgcgcccggagcccggctatagaggctgcagtcgcagccgggagcccgcagcccgcgccccgagcccgccgccgcccttcgagggcgtcccaggccgcgccatggtgaaagtgacgttcaactccgctctggcccagaaggaagccaagaaggatgagcccaagagcggcgaggaggcgcttatcatcccccccgacgccgtcgctgtggactgcaaggacccagatgatgtggtaccagttggccaaagaagagcctggtgttggtgcatgtgctttggactggcatttatgcttgcaggtgttattctaggaggagcatacttgtacaaatattttgcacttcaaccagatgacgtgtactactgtggaataaagtacatcaaagatgatgtcatcttaaatgagccctctgcagatgccccagctgctctctaccagacaattgaagagaatattaaaatctttgaagaagaagaagttgaatttatcagtgtgcctgttccagagtttgcagatagtgatcctgccaacattgttcatgactttaacaagaaacttac

SEQ ID NO: 9569 - DNA, 418 bp, Gossypium hirsutum
  Clone ID: GOSHI-09MAY01-C59457_1
atatcgagttcaccatgaattcactcagtgaagccaacaccaaggtcatgttcgatctgttccaacaggtcggaaaatcacaaatgaacaacaccttctattcccctatcagcatcacaacagcattagggatggtcctcttaggggccaaagacaacactgcacaacaaattaacaaggttcttcacttcgatcaagtcccagagaacaccacagaaaaagctgcaacatatcacgttgataggtcaggaaatggtcatcaccagcttcaaaagcttctgactgaattaaacaaatccactgatgcatatgagctgaagatcgccaacaagctcttcggagaaatgacgtttcaatttttacaggaatatttagatgccatcaagaaattttaccagaccagtgtggaatctgttga

SEQ ID NO: 9570 - DNA, 375 bp, Gossypium hirsutum
  Clone ID: GOSHI-09MAY01-C59447_1
atgtgaatcgtaagagaacctcagcattgtgcacgataagagaatgtgtcagtatttcagggttcgacattgtatctgtaaaatgtgacttggttttttttatcacaacagaagtaaaatgttgctttgtacctggtgtcttttattaagaatttactccccccatttctcacagagaataacagtcgggagtcattgtcacaatataatagaaatgttagcaaccagattcatgtaaggactaagtggtcctcatgaattgcattaagactctgtactgctcatattacactccatcctctctgtagtttgctgggtagtggagggggttagccttaattgtagtttctggcattaacctggaaggatttttct

SEQ ID NO: 9571 - DNA, 981 bp, Gossypium hirsutum
  Clone ID: GOSHI-09MAY01-C59767_1
cccggttcgacccagctttcgccccgcgtccgccccgcgcccgctgacgatagccaaacatcatatattgacttttttttccttaaatactcctgttgaggattccacttacaaaatctgcatctatggtattgaagtctatggatatggatatacggaagttgatcttggttttgtttttgttggctctagtttttggtgttgctgagagttttgattactatgagagcgacctggcctcagaggagagcctgtgggacttgtatgagagatggaggagccaacatacagtctcccgtgacctggaggagaagcaaaagcgtttcaatgtgttcaaggagaatcttaaacatatccacaaggtgaaccagatggataagccttacaagttgaaactgaacaagtatgctgatatgaccaaccatgagttcatgagtacaaggagctcaaaggttagccattaccggatgctccatggtccaaggcagatgactgatttcagacatgataaaactgacaacctacctccttccattgattggaggacgaaaggagcagtgactggtatcaaggaccaaggcaaatgtggtagctgctgggcattttcaactgtcgttgcagtggagggtataaacaaaataaaaacaggggagcttgtgactttatccgaacaagagctggttgattgtgataaggagaaccaaggttgtgagggaggattgatggaacaagcatttcagttcatcaagcaaagtgatggaataacaactgagaattattatccctacagagccaaagatgagtcttgtgactcatccaagttgaatggtcctgtagtgatcattgatggctatgaaatggttcccgaaaaggatgaaaaagctctaatgaaagctgttgcaaaccaacctgtgtctattgctatagatgctggtggtacggatttccagttctactcggagggagttttcattggagact

SEQ ID NO: 9572 - DNA, 522 bp, Gossypium hirsutum
  Clone ID: GOSHI-09MAY01-C59017_1
attccacaacatctacccacagttgggtttctttgttctttttttctttttatttcttcaaaacatgtctgcgattcctccatcagcttcacaaaactcatcatcttcaggtttccaggatttcttgcccgtgatggctgacaagctcggaggggatggcttgataggggaactgtgcaatgggttcaacctgttgatggatagagaaaaaggggtcattactttcgacagcttgaagaagaattcggccccgttggggttacaggacttgacagatgacgatttgaagtgtatgatggaagaaggtgattttgatggcgatggggctcttaatcagatggagttttgtgtgttgatgttcaggttgagccctgagttgatggaagcatctcggtttttgtttgaagaagcttttcaacatgaattcaaggattttcattgattgttcttgtttcatccataattgtcgttttaatgaaattgttggatagacagagagtttggaacaaaagagaattgatc

SEQ ID NO: 9573 - DNA, 447 bp, Gossypium hirsutum
  Clone ID: GOSHI-09MAY01-C59377_1
atcggcgcgatcctcgcttacgtgagagttggcccgggaggaaagatggtgctggatctggatttgtttcgggtggataaaggaggggacccagccctcattcgagagacgcaggagaagcgcttcaaggacccgggactagtggaccagctggtgaaggcagacagcgagtggcgacgatgtagatttcgggcagacaacttgaacaagctgaagaacctatgcagcaagacgatcggagagaaaatgaagaaaaaagagccagtggaagatgatgagtctgtcccagagaacgtgttgaatttcgatgaccttactgcagacgctttagctaacctgaaagtctcacaaatcaaaaaagtccgactcctcattgacgaagccatcctgaagtgtgacgcagagcggataaagctggaagcagagcgatttgagaaccttcgagag

SEQ ID NO: 9574 - DNA, 395 bp, Gossypium hirsutum
  Clone ID: GOSHI-09MAY01-C59287_1
tgcatcgaatggaatgcatggcacaggagcctgtgctctttgaggacatcttatgtcagataattgatatgattaagccggaggctgagagctatatcacattgcgtgacctgaagggctctaaactttctggaagtgttttcaatatccttttcaatcttaacaaattcatggcctttgaaactcgtgatccattcctcatacgtcaggagcgtgagaatcctacattgacggagtgggaccgttttgcacatagagaatatattaggctttcaatggaagatgatgtcgaagatgcctctaatggaagtgcagaagtttgggatgaatcacttgaggctcccttctaagttgaataggatgctcagagaagagctcaacacacttatatgctg

SEQ ID NO: 9575 - DNA, 1250 bp, Gossypium hirsutum
  Clone ID: GOSHI-09MAY01-C59217_1
gctaatagttaaatgggttcaaggtttgggatatatggtaaattacagaggaaagagaattctcaaattaaatgctttgctgctgctgaagaagagatcgttacttctggatttgacaataagatatggagaatttctcttcatggggatcagtgtggggatggagattcagttgatattggcagtcaaccgaaggacttgagccttgcccttctctctcctgaacttgctttggttacaactgactcaggagttgttatgttgcgttgtacgaaagtggtatcaaccataaaccttggttttgctgtgacagcatcagtggttgcacctgatggaagtgaagctattgttggtgggcaggatggaaaattgcatgtattttgtatagtaggtgattccctcaaggaagaggcagttcttgagaaacaccgaggtgcaattactgtcattcgttactcaccagatttctcaatgtttgcatctggagatgcaaatcgagaagctatagtctgggatcgtgtctctcgagacgtaaagcttaaaaacatgttgtaccacactgctcggataaactgtcttgcttggtctcccaataacagcatggttgctactggatcacttgacacctgtgtaataaatttatgaggttgacaagcctgcatctagccgaatgaccataaaaggagctcatttaggtggagtttacgcattagcctttactgatgaacacagtgtggtaagctctggtgaggatgcttgtgttcgagtgtggaaattgaccccgcaatgataaagaccaataaagaaatgccttgatcggttggtggatgtgctgcattttatccgagatatcgtttttgtgagcttggtcggcatcaggtatgcaaattgaaaatctttaataggagttggttgagtttgtgacattaccagcctttctagtgtgtagtgtgtgttgtatggtacctggtatcaagttttcgatctcgagaccattgtttccccatgcaaacaaagatggttctcacttctcacatcacatggttttgcatttaaatgatggcgtgatagggtcgcataatatacttcatttcttatttatctttgagcgtgttaaattatgatgtgtgattgttgtattgtactctcctcttcttttccattgcattactgctcaaaatttttctaccttgctttgctacgcgagtgaaaatatactctcttttttattataaaaagtaatgggtatt

SEQ ID NO: 9576 - DNA, 628 bp, Gossypium hirsutum
  Clone ID: GOSHI-09MAY01-C54027_1
acgcagatattcccccgcccccccttttgtttggatagaaaactctatggttagctaaacaacaatggccacgacagcagttctaacacttactcctctctcctccacttctttcttgactgcccatacttactccaagctttcctctgcattaacttcaacttccatcaaacccaagtttagaagctatcaaatcaaagctattaaagaaaaagctgaagaaattcaaaccccccctcccgccccaccgtcatcatctgtggatgaggttacaaagaagtatggccttgaagttgggctatggaagatattcagctcaaaggaagaagggggacaaaagaaatcgaaaggggatcaagcaaaagagcttctagcaaaatatggaggggcatacttggcaacctctattactctctccttgatatccttctccctttgttatgcactaatcagtgcaggcgttgatgttcaagcactgctgcaaaaggtgggaatctcaactgatgctactggagagaaagtcgggacctttgctttggcatatgctgcacacaaagctgcatctcctataaggtttcctccaactgtggctctcactcccattgttgcgggttggataggaaagaag

SEQ ID NO: 9577 - DNA, 454 bp, Gossypium hirsutum
  Clone ID: GOSHI-09MAY01-C54217_1
atttgatgaaaaagggagtgaaggtgagacaaaaggacgccatctgagggggaagagatctacagaaagtgatgggaaagcggataacggtgatgataagatcgtggttcggagccagactaagaagaacagaagattgggccttgataaaaggattgaactgaaaaagaatagagaagaaaagtcggttgtttctggccagagtaaaaagggtatctcgaatgaaagtgagaagatcgataggcttgtccgggactattcggcttcaaccgatttggtcagcctggactggaagaaaatgaagatacctccggttctgccgtccaccgaacatacttggttgtttaagctaatgcagccaatgaaggcactgcttgaggcaaaagagaacttgcaaaaggatctgggtagagatcctactgaagatgaattagctgaggcaacaaattcgagt

SEQ ID NO: 9578 - DNA, 577 bp, Gossypium hirsutum
  Clone ID: GOSHI-09MAY01-C55577_1
atcgttgatggaacgtattgtaggacagagcttgtttacaaaaagggattatcacaagaacctaataatcctctccttcttgctaattatgctcagtttctctaccttgttgttcatgattatgacagagcagaagagttgttcaagaaagcaatacaaatggaaccggtagacgctgaagcacacaataaatatgcgatttttttatggaaagcgaagaaggatatgtgggcagcggaggaaaatttcttggaagccattgaagttgatcctaataactcatattatccggcgagctatgctaattttctatggagtaccggtggggaagatacttgtttccctcttggttcatcggatggtattgcttaagaaacaatggccaacactctgttttttctttctttttctggaattttgctcagataaatgaaaacctttctttcccaatgattttaggtttgtttttattgcaccaatccatgtgagaaaatgtaattagtaataatatatattgttaataccattagattgaatttacaaaaaaaaaaaaaaaaaaaagggctctagatcgcga

SEQ ID NO: 9579 - DNA, 595 bp, Gossypium hirsutum
  Clone ID: GOSHI-09MAY01-C55477_2
aacaagcaggacccgagatatatggctactataattatggacagtgctaaggttgttgttttggatatccgcttcccgacactgccgggtagttgagctgcagaggcaccaggctagcgtcaatgccatcgcatgggcaccccacagctcttgccacatttgcaccgccggggatgattcccaggccttgatttgggacttgtcctccatgagtcagcctgtggagggtgggcttgaccccatccttgcctacaccgctggggctgaaatcgagcagttacagtggtcatcttcccagcctgattgggttgccatcgccttctccaccaagcttcagattctcagggtatgagtgaatgggattggtatattgggtcgtattcaatgctaaattgctaattcatagtctagtaattgtactcagatctagaggaataacaagattgttgctgtcgttgtgtctgagctgactaaaagtcccaaaactgttttggttttcctgttgtttcgtttgtcttcaacatgtttggatagttgattgacaccaatctctttattctgttcttattttagtgtttcccattcctttacatcc

SEQ ID NO: 9580 - DNA, 1429 bp, Gossypium hirsutum
  Clone ID: GOSHI-09MAY01-C55477_1
cccacgcgtccgtggaataagaatccgaagggagtggcagtggaagatggccgctagcagcgatcctaacccggagggttccgatgagcagcagaaacgatccgagatatacacttacgaggccccttggcatatctacgccatgaactggagtgtccgccgcgacaagaaataccgtctcgccatcgccagcttgctcgagcattacaacaaccgccttgagattgtccagctcgatgactccaatggcgagatccgatcggacccaaatctctccttcgatcatccttatcccccgaccaagaccatcttcatccccgacaaggagtgccagaaacccgaccttctcgccacgtcctccgacttcctccgcatttggcgcatctccgatgaccactcccgcgtcgacctcaagtctctccttaatggcaataagaacagtgaattctgcggtcctcttacctccttcgactggaatgaggcggagcccaagcgaatcggcacctcctccattgatacgacttgtactatatgggatatcgagagggagacggtggatacccagcttatcgcccacgataaggaggtttatgatattgcctggggcggcgtcggtgtttttgcttccgcctctgctgatgggtccgttagggttttcgacctgcgcgacaaggagcactccactatcatttatgaaagttcggagcccgatactccgcttgtacggttggggtggaacaagcaggacccgagatatatggctactataattatggacagtgctaaggttgttgttttggatatccgcttcccgacactgccggtagttgagctgcagaggcaccaggctagcgtcaatgccatcgcatgggcaccccacagctcttgccacatttgcaccgccggggatgattcccaggccttgatttgggacttgtcctccatgagtcagcctgtggagggtgggcttgaccccatccttgcctacaccgctggggctgaaatcgagcagttacagtggtcatcttcccagcctgattgggttgccatcgccttctccaccaagcttcagattctcaggttgtgagagcaaaagagctgcagactcatttttttagaacgcatgggaagcagtgatttatggaccctgaactgaaacacaagatcaagacgaccactctttgctgtttggtttatgcaacataatctttgtcgttctgttggacaagatgagtgtgttttcagctttatttggttgtctgataagtttgattagttactataaatgtgataaatgatgggcaggaagaatatggggggcttaccctgggctgctttcagatgcttgtgttgtgttaatgttataactagctttagccatagaattgttataagaatgacttagttcttgatagatcgatggaaaacc

SEQ ID NO: 9581 - DNA, 1313 bp, Gossypium hirsutum
  Clone ID: GOSHI-09MAY01-C55717_1
cccacgcgtccgctctgctcttcaacttttgcctttctttcatttctcaaactaattcctttattttcaaagtcctagtctcccttcccatctccggaaagaagaagaaaaaagatacactgtgagcaaaggagcggagaaaaagctgtgaaatatcccgggggggaggcgtcatggcgtcctctaaggtgataacgacaacgtcacagaccaatcctgatctgccacgtcagccatctctatgcccttcgctctccactctcctcgccgaccttcagaaccaacaaaacaatcaaaaccaatcccagaacggccttggttccatgaacatggacgatctgttgaaaaacatctgctcctccccacctccaccgccacctacttccgatgcacacccgcagtttgccggcgtgtccatctcacgcgaaggtagtttctcgctcccgaaggatgtggcgaacaagtccgtcgacgaggtttggaaggacatcgtggtcggtggcgacgatcagagacagcccacgcctccggtaggtatgactctggaggatttcttgacgaaagctggggcggttagggaagaggatgtcaggggagttgctaatcaggtgggagtaggtgcaggggtttatcctgttgacccggccgttatcaacggtggtggaaatcatttttcggcgttcggaaacagcggtggcgttgatcatcagaggttggtggcggtggcaggtggaggcgctagaggaaagcgacgcgccgtggaggcaccgcctttggataaagcgactcagcagaaacagaggcggatgataaaaaacagagaatctgcagctacttcctgtgttcgcacacaggcttatacggttgaattggaatcactggtgacacaattggaagaagaaaaagcccggttgctgagagaagaggctgagctgaacaaggcgaggtttaagcagctgatggagaacctggtccctgttgtggagaaacgaagaccacctcgagttcttaggcgagttcattctatgcaatggtaaatatagtagctcatcttcttttttcattaatgtagatgacaagaagaaacaaaaagctttgaaaaaaggagtggggaagtagaagtttgttgaagcatttggggctttgttttttggcatagaatcccattacagttgaacttatatacttttgggtattttgctaagataatgtaaataagacacaagttcatttgtgtaaagtatccttattccctgtaattctgtcggatagtagggctgtgaactgatcctctatacaaacatgtggtggtg

SEQ ID NO: 9582 - DNA, 437 bp, Gossypium hirsutum
  Clone ID: uC-gsronu33B162a10b2
tctacgcgtccgcccacgcgtccggggagtaggtgcaggggtttatcctgttgagcccggccgttatcaacggtggtggaaatcatttttcggcgttcggaaacagcggtggcgttgatcatcagaggttggtggcggtggcaggtggaggcgctagaggaaagcgacgcgccgtggaggcaccgcctttggataaagcgactcagcagaaacagaggcggatgataaaaaacagagaatctgcagctagatccagagaacgcaaacatgtcaggctttcttttttcaaaatctggttggttgccgagaaaatggagagaaatagcacttgggttaatggcaatactttttaatgctttttcttccaacttttaaaatttcttttcttcaaatggacacgtaatttaagttttttaagttggaagattttttctccc

SEQ ID NO: 9583 - DNA, 376 bp, Gossypium hirsutum
  unsure (1)..(376): unsure at all n locations
  Clone ID: LIB3149-013-Q1-K1-H9
gctttatttgttgatacataggcttacacggttgaattggaatctctggtgacacaattggaagaagaaaaagcccggttgctgagagaagaggctgagctgaacaaggcgaggtttaagcagctgatggagaacctggtcccggttgtggagaaacgaagaccacctcgagttcttcggcgagttcattctatgcaatggtaaatatagtagttcatcttcttttttctttaatgtagatgacaaggagaaacaaaaagctttgataaaaggaagtggtagaaccaattaaaaggagtggngaagtaggaagtttgttgaagcatttgggactttgttttttggcatagaatcccattacagttgaacttatata

SEQ ID NO: 9584 - DNA, 637 bp, Gossypium hirsutum
  Clone ID: GOSHI-09MAY01-C56947_1
ggaaaatccctacgatatctttcaatgtatgataaccgatgccttcgctacttcaaaggacataaagagagagttgtttccctctgcatgtctccggtaaatgatagcttcatgtcaggttctcttgaccatagtgtgaggatttgggatctccgtgtaaatgcctgtcagggaattttacgcctacgtggtagaccaactgtagcatatgaccaacaaggccttgtctttgctgtggctatggaagggggtgccattaaattgtttgattcacgctcctatgacaaggggccgttcgatacatttttagtcggtggagacacagctgaggtttgtgatatcaaattcagcaatgacggcaaatcaatgctattgacaaccacaaataacaacatatatgttcttgatgcatatggaggagagaagcgatgtgggttcaggttagaaccatctccaaatacaactattgaggcaaccattactcccgatgggcagtatgtgatctcagggtcaggggatggaaccttgcatgcctggaacatcaacatgcgaaatgaggtagccgcttggaacagccacataggtgttgcagcttgcttgaagtgggctcctcgtagggccatgttcggtgctgcat

SEQ ID NO: 9585 - DNA, 726 bp, Gossypium hirsutum
  Clone ID: GOSHI-09MAY01-C56887_1
gttttctttccactacaatcatgtctatttcttcatcgaaccactgatcaccctcccttgtggacacaaacaaaaaacccccaccccgaaaaatgtcaacatcagcagcagctttcaggctgatctgtctcctccactcggtgatcgccttatcaagcggcgcactcatgatgttctacatgagagagaaatgtacacattcacccacgggatcgagacggccaccaagctcttgggatccactccacacgatcagctcttgatccggacctccgattccttcgcgggtctgctattgttcgccgtggggttcttgcttttcatggtctcatttgttaaagacagagagttccaatcattctttgccaaagggtgcacggttttgcatggttcggtggcggtgtggagattctggttcgagagaagagtagaggatttggcttgggattggctccgacagacggttggtgacatattgttggctttttcttgggtattctttttggtttactcttggagagaaaagtatgactagatttgaatttgtttttgtttgctgcttggtatggtgtacattttggtgaagttgatttgaaattcagtgtaagatgattgggtatgaatcagaatttgaagattcttcaatccgtcttgctatttttttcttattaactatccattaaaatgctaatgattccgtgaaatgaaattcaaggcttctcccca

SEQ ID NO: 9586 - DNA, 478 bp, Gossypium hirsutum
  Clone ID: GOSHI-09MAY01-C56827_1
atgactttgagaaaggatggtaattcatcaacttatataacaatctcaccggatataagctatctttccaaagtcttatctccacaaccaacatggatccacctcctccacgtccaactccaccaccgacgacaccgctgctagctccgtcacctccagaaggagggttatgggaatcatgtttgtggtttctgtgttgctgtggaatattcagaagctgctgccctccactgtttgaaccagggccacctcctccgtagatctgcattcttttttctcttttggaatgtatgagtattttacaaggatttaatcatttggaacatgatgattggttcttgtggtttgtcattcttcttcttattatctgctaatctatgtagcaactgagattagagttgcaaaatttatgaatttatagctttcttgtaattttatgtcttcaataatatattaaagataaaaaacaatgtcgttt

SEQ ID NO: 9587 - DNA, 254 bp, Gossypium hirsutum
  Clone ID: GOSHI-09MAY01-C56597_1
gcgttcgccccgcgtccgtgaagaagaaacatcttcagtggttgaatcatggtgagtgttagctaagtctggtaaccggagatttccttttaggcattcgttcattctgaatgtcatatgttctgcgttagctgctgtggtaaacttgttccattctgtgaaacttaataagcttttggaacttgaagactttatattagcatattcgagaaacttaaaaaagaaaaagaaaaaaaagcgacgttgcttgattc

SEQ ID NO: 9588 - DNA, 424 bp, Gossypium hirsutum
  Clone ID: uC-gsronu33B029g04b1
gatggatgctgggttactccattttttggagcgtcttgaacctttggctaccatcacttctccaccaacgggacgagcagggttttagcttcgtttatctataaaaccggaattaattgccttattctcttcatactcattttttaattaatttttttatttaattatattattttatatatatttatcttttaattcaaatatacttttttcaatcattttatttttttcatattcttctttattattaaattctttattcttaactctcttatattatttttaatttttatattatattcttatttttacatttttatataaacttatcatctcattatatttttttttttatttatatatcttttatactttattattatctttaatatctattctattttatttcaatcctgtactattt

SEQ ID NO: 9589 - DNA, 293 bp, Gossypium hirsutum
  unsure (1)..(293): unsure at all n locations
  Clone ID: LIB3149-019-Q1-K1-B12
gttgttttggctataaactggcgaaagatatcagcagagaggggaggacttcaatgagtggagacctcactaacacaaagggaactcgtaggatgctgggttactccattttttggagcgtcttgaaccttcggctaccatcacttctccaccaacgggacgctccaattctaaaactgaattttatgtataaaattttaatacttccaactcgatcacaaaatagaaaacttcctcccgnaggaaatcaagtgtatgcaccaaggctggatgatccatactcaaaaaacatg

SEQ ID NO: 9590 - DNA, 666 bp, Gossypium hirsutum
  Clone ID: GOSHI-09MAY01-C56187_1
cccacgcgtccgcaaatttcatccccctccaaatccaccctacctttcctttcccttcccttaaaacaacctgctttttccagtttccccccaattaaccatttctctccgctctcaaacccaccttttttttctctttgtaattccgtagaacggatacttcaaccgaaaaaacaaaaaaaaaaaaacaaaccagatgtcttcggtttattcagatccgatccatggaacccacccggaaccaatcgatcacttcgaccgtcttcccgattctcttctccttttagtcttcaacatgatcggcgacgtgaaagcgcttggccgatgctgcgttgtttcgcgtcgtttccactccctcgtccctcaagttgaaaacgtcgtcgttcgtgtcgattgcgtcatctccgacgacgattattccccttcttcctctgtcaaatcacgtgccgacggtccattttccaccctcttccgtctcgttttcggtggcattgtcaagcccctccaagctttgggccaattccttggccccgaacgcccctctctcaacaaaacgctcaatacctcttcatcttcctctttatctgtcggtctcggcggaggtgaagatggggaaagggaccaaggtggggttacccatcattcttcgacgcaagtgcttagaaa

SEQ ID NO: 9591 - DNA, 966 bp, Gossypium hirsutum
  Clone ID: GOSHI-09MAY01-C56177_1
attttctctctcttcaaaatctctgctcccctctctttatgtggggtttctcgacatcctaacgctccctccacactttaaaattttgacactcttttgcagtctgctccttataaaatctccctatctttctatgtatccaatgacaagttactatattgaacactaagctttcttttccaatttcctgaaacattttccaatggaaaatgacgataacagaggcgacaagaagagtgcccgggaagagtttgagaattttgagtcagaggctaactcggttcccttcttaaaactctctcgagtccactcgcccgagtccactcgtgtggaatccgcccttgattacgtggacgttcagttgccggagacaaagcatatccaggaggatttgctgaacttcctggacgattccgacccggacattggacctgggctggggattcagggacttgacttggttctcaaaagtttcgaagaagagattgtagttccgactcaggcgacgctaccggtaacatcgttggaaaccggcaagtcgaggccggatctagggtttcttttagaggcttcggatgatgaactgggtttgccaccgagtttttcgtctgttgagcagggcgttgatatagagggaagtgtagagttaggagccgatggaatagaggaaatgatggggtatgagttcccgattccgagttacggatcgtttgacttcggaatcggcggtgactcagatgccgacaacaaaaatcatagtaatagcggtgattttgtggcgttaggaggcttgttcgaacccattgtagaaatttcggagctaacctcgtgacctgaatcgctttgcgaactacggtgccgtttgatgtaaatcttttaaaaaaaaaaaaaaagtggatatgtaggtttgtaaatcttgttaattactaaaatggtaaattaaagaaaaaaaaaggttggaggcgg

SEQ ID NO: 9592 - DNA, 468 bp, Gossypium hirsutum
  Clone ID: GOSHI-09MAY01-C56367_1
cccacgcgtccgggcagaacaaaggaccccctttcaagttcctagtccctttagtctatgcccctgttctccctttaattcgactttctttgaggaagaacccagttttaagggaccgactgtttactattgtgttggctggggcttttattcatggttcttatttggtttcggatctatatgatgctgagagcaagtgagcattgcagagtctggcttgaggaactgattacccctctaataattattcttctattatgccttagaacaagtttgaattgtattcttctcattcctttcgttgtgggatgataatttgtatctcacagttgtaatcaagttaggcgtaagatttaaagcttcatattacggaattagtttcaattttaaagagaaataagattgagtgagcagcttgtttcttatactgtcttttccccatcgaatgtgatagatgtgcaagtcacg

SEQ ID NO: 9593 - DNA, 734 bp, Gossypium hirsutum
  Clone ID: GOSHI-09MAY01-C56307_1
gggaaatttaactcactggacctcgctatcttttacaaagcttgttataagtgtaatcaagattctctcagggctttattgtaagagttcttgtggatcatccagtataggaaaggcttgtggcaattctaaagccgtgggtggtgttgatgaatttgctctaaccacagattgtaaagtggatagacatgatattatctacatcagttcattctgaaaaatcctcaagcatggagtggtcctctgaaaaatgtttcaataaatctcagattgagccaggtccctccactcagtggttaggtcatctcgtacctagttttcaaagtgagaatacatccacgaatgatagtcgtttactaaaaacgagaacccgttcttccttcgccagctcgtgccgcgggaaattaggaaattcatatgatgaaatacctgtagcaagtgattggtcagggattctttctgagaggcctgttggttcaaaagatgacaaatggcaagttttagaggatagtcaggatccttttgcttttgatgaagaggaattcgtgccgtcaaagtgggacttagtctctgggagtaaaaaaccatcccaaactaaaaagcatcggaacctggggccaagaaatagagaagtccaaattgagcatcaatgtcatacaataagccaaaaggaattactagtgagggaaattgtctgagaaaatctaccaatgaagaatataatcattctaatg

SEQ ID NO: 9594 - DNA, 568 bp, Gossypium hirsutum
  Clone ID: GOSHI-09MAY01-C56257_1
gatggaattattgatgacagctgttggagcagcgaagaattttgcagagaaaataagctatggcttgcattgggtgagaccaaggcagacaaggtagcttggatgaaagcaaaggagctaaaagtaaacctggttactgtctgccctggtcttctcatggctcccacttttccaaattctcatatacaaacttctataccataccttaaaggtgggcaggtgatgttgcaacaaggttgcttagcaattgcagaggtgggaaaagtggccaaagctcatgttagtgtgtatgaaggcatgaattatggagcaaggtggaccggacttatgcttttgatgggagttgtgcgaagacagcaagaggccattgagcttgaaaaggggttaaaaatgacagggtttttgttgggagaaagacatgtagtcttatcagaagaagatgaagaagaaattccaatcaaaattaggaactcaaagcttgctgccctcttaaataaaatcaatcaacgcttgccttgtaaaacttgaaacctcgttgttgtaatcttttattgagatttttatttct

SEQ ID NO: 9595 - DNA, 563 bp, Gossypium hirsutum
  Clone ID: AI054797.1
ctcaaaccggactgctttgatcgcaggtttaacagccggacttggtacggcgctcgtcgcagtgatcattggcattttgctctacaaacgacataggcgaatagtcgaagctcaagagcgcctacgcaaggaacgtgaaacaatcctaggtgccggtggctacggcgaagtctataaaggaatcctcgacgacggcactccggttgctgccaaatgtgccaagctcggcaacaccaaaggcaccgatcaagtcctcaatgaagttcgaatcctatgccaagtcaatcatcgaagccttgatggactctcggatgttgcgtcgaactcgacaacctataatgtgtatgagttcatgaaactgtacctttatatcactttatagctcaacttctatgaccgatcttgtcactggccctggtctataattgcttgtgaacttcgaggattgtatactacattattgctgttctctattatctttgatctaatgtatatatcttatcgtctttatcttagtttattttggttatgtctatatgatttcctctggttaacaccttgtt

SEQ ID NO: 9596 - DNA, 330 bp, Gossypium hirsutum
  Clone ID: LIB3165-060-Q1-K1-F7
cccacgcgtccgagagatcaagaaagcaaccaacaatttctcgaaagaccgaatcctaggtgccggtggctacggcgaagtctataaaggaatccttgacgacggtactccggttgctgtcaaatgtgccaagctcggcaacaccaaaggcaccgatcaagtcctcaacgaagtacgaatcctatgccaagtcaatcatcgaagccttgttggactactcggatgttgcgtcgaactcgaccaacctataatggtttatgagttcatcgaaaacggtaacctcttagatcatctccagagcccaaacattaatgaccgaagtctactcac

SEQ ID NO: 9597 - DNA, 318 bp, Gossypium hirsutum
  Clone ID: GOSHI-09MAY01-C57847_1
tttggatgtcacatttttggcacaagggacccatttcgtccaagaacttcttcctgaggaggtgaatcatctcgtgtggctccttccttaacaagcactgcgaatagaggaaaccgatgacctagttgcttcttcatcttcttccttctttaccgctgaataaaaggacctcgtgccatttaaataaagaataatatgacctcaaaatggtcaaatttgaatgttttgggagttggagaatcttcattccagttcaattgggcattcaccctccctcagatataaaaactctgtctacgatgaaaagcgggagttttt

SEQ ID NO: 9598 - DNA, 716 bp, Gossypium hirsutum
  Clone ID: GOSHI-09MAY01-C57587_1
caaaaatttccaaatgcagatcctttggctctacgtctactgcaaagattgcttgcctttgatccaaaagaccggccaacagctgaagaggcccttgctgatccttactttaaggggctggcaagagttgagagggagccttcatgtcaaccaattacaaagatggagtttgaatttgagaggcgaagggtcacaaaagatgatatacaagagctaattttccgtgagatactggagtaccatcctcagctgcggaaagatcatatgaatggaactgagagggcaaactttctctatccaagtgcggttgatcaattcaaaaagcagtttgcacatctcgaggaaaatggtggtaaaagtgcaccagttattccactcgaaagaaagcatgtctcccttccgaggtcaacaattgtacattccaataccattgcccctaaagagcagcagccaagcctcaagtccttaaaagagagacaaaatgcagaggaggcatatcaagcctcaaaatccttgcaggcacaacaaagaatccctctagctaaaccgggaaagatagtaggccccgttgcgctgtatgagaatggaacaatcatgaaagatgcctatgatacgagaacgttcataagaagcacaggtcttccaccacaggctgtccaccctgcatatacttattcaaaatctaacactggaaatcaagaaagaagcgaaaggga

SEQ ID NO: 9599 - DNA, 716 bp, Gossypium hirsutum
  Clone ID: GOSHI-09MAY01-C57567_1
gaggaaaacacaagcagcacgttaacattttgaagcaataccgatcaaaagccgagtactactatgctcatgtctcaacaaaaacaacgacaccaccaccaacattgaccgaaccccaggaggccttttatacatccggcaatggaacaacatgcaatacgtgacgacggcagcattccttctcaccatttactcagaattcctccaagatttgaaccaaaacctccgttgtcctgccggaacagtggatcatgaagagatcctcagttttgccaaatctcaagttgattacatactaggttcaaatcccatgaacatgagttatttagtgggttatggatcaaaataccccaccaaggtgcaccatagaggggcctcaatcgtgtcatacagggagaataaagggttcattgggtgcactcaaggttatgaccattggtataatcgagccgaagtgaatcctaatgtgttggttggggcggtggtcgggggacccgattccgaagataatttttgggaccaaagagataattacatgcaaaccgaggcttgcacgtataatacagctccattagttggagttttggccaaattgttacagttagaggaaaaccatgaactagaattgttggcctcttattagaagcaaatataaatatcaagtgagagcaaaaaaaaaaaaaaaaaattaaaaaaaaaaaaaaaaaaaaaaaaaa

SEQ ID NO: 9600 - DNA, 438 bp, Gossypium hirsutum
  Clone ID: GOSHI-09MAY01-C57677_1
tgcaattctattgaatacatgccttgcttgccctttggcttcaatacttcacactcctctagatgaacaatcggcaaggttctgtgctgcctctattgttactgccttagaagatctacatgagaatggcgtgctttacagaggtgtgtctccagatgttttaatgttggacaaaacaggccatttacagctagttgacttcagatttggaaagaagttatctagtgagagaacatttacaatttgcggaatggcagactctttagcgccagaggtagttcagggaaagggccatggtcttcctgctgactggtgggccctgggagtcctgatctatttcttgttgcaaggtgaaatgccatttgggtcatggagacaaagcgagctcgattcatttgcaaagattgcaagaggatacttttattcttttacataaat

SEQ ID NO: 9601 - DNA, 633 bp, Gossypium hirsutum
  Clone ID: GOSHI-09MAY01-C57607_1
agtaagggagttcatggagtgcaattcggctaggttcaaaggggatacatatcatttgatcgtcaagaactgcaaccacttctgcaaggatatttgttacaggctgactgggaaacacattcctaaatgggtaaatcgattggcaagaataggttcaatgtgcaactgcattcttccggaagcactgaagacatcggttgtgaagcatgatccaaattatcaaccatacgatagcgagaagaggaggctgaggtgtgccttcagttgcctatcttcggtttcaatacggcagaagtcttcagtacttttacaatcacccttaagaggctgtctaccgctgtgggaaccaaaaaaatcaaacaaacttttgttgaaggaaaggtgagataagggacttactttgttgaaaaaatccaacaacattcggcgtcgaggctccatgagcttgacgattgcagatatcttattttagtgtagacatctatagttgtggagtattttgtaatgtctgtaaggataaacgtgttgttaagatctgttttgaagatggctgatccacttctgttccaaaagccctatgtattaatgcaaggtttcgatgatgatattgccttagatcatcacccattgatt

SEQ ID NO: 9602 - DNA, 188 bp, Gossypium hirsutum
  Clone ID: GOSHI-09MAY01-C57187_1
gtttcattgccactggtggagaagcaatttaagttcccacatttgacagtgcttagtgaaactttggtccagtatttgggtttgcttctgggaaatacccacattgaggctggttgtttagtttgagattgatctttttccttttctgtatgataagtgggtgtgccaatttcaaagattttaacttt

SEQ ID NO: 9603 - DNA, 738 bp, Gossypium hirsutum
  Clone ID: GOSHI-09MAY01-C57107_1
cttcaaactcgacttctagcacaaaaatcaacgttgaaattgtgtttccggtctcgtcagactctatgacaaaaacatctacaagtgcatcacctgcacttatatcagtcaaagctggtgatgatgttatactccctgttgtacccggagttgcaagcggtgaaggatgctctattcatggtggctgtgcatcttgtccttacatgaagatgaactctcttggctcgctcttaaacgtttgccaccatttgcctgatgaaagaaacaaccttaaagcatacgaaaccgaacgattcaagtcgcaaaccccacaaggaaaatctattgcagatgttggatgtcagcctatactgcatatgagacactttcaggcaaagaaagaactgtcagaggaacttgtctaccaggttcttggttcacacggtaatgggaaataggtgtagctaacctgagctggtaaatgaactgtaaccgggttttgattagggatattgaatccacctgaggttcacaacaaagttttaacgtacaacttcagtgatagattctttacttcattagccgaagttgcttaaaataagattgaggtgttgagctcagtgctagcttttacaggtaattaaatggattcaatcctgatttattttatagagattgtatccctgttagtttacagggaagaaatcatcttcaagactaattcttataaaaatacttaatacccttacaattctattc

SEQ ID NO: 9604 - DNA, 611 bp, Gossypium hirsutum
  Clone ID: GOSHI-09MAY01-C57137_1
ggtcaataagatatacaggaaagagctcactctggcattcctcctgcttacagcttcggttaggagcctgttatcggcacagggagtacatttctacttcctcctcttccagggggtgacttttctcctagtcggtctagatttaataggagagcagatgagctaatgctgcatggaagcttgaaagaaagcaaaatgtgctaagactctctccatttccaccgacaaaagctggtttctggctgtgcagtcgaagtttttctcctcaggaaatggtttaacggtaccatcctggtgctcaataaccaaagtttcattctctacgtcagcattgaatgccgaattgaaggtttttattcgtcagtaacactactttctgtattcacagtttctatctacttctaatatccttttatatatatatatttcacattggatagtggtcattgtattcttagggattgaaccatttgttattattgttgttagacttataggtagattttgtacttcagtgttcatgtttcaccctgattcttgattgtgtggtttggcaatgaagattcaagccatattgtatttgtaaaagcttggaaagcttgcttgatgtc

SEQ ID NO: 9605 - DNA, 595 bp, Gossypium hirsutum
  Clone ID: GOSHI-09MAY01-C57257_1
gagatgagaaagaggcaatcaggacctggcgatggcgttttgtttcggacctttctaggactctccgataaccggacccgctagcacccggcgtcagcttttggaccggctttttcctcttctcttcctcgggccacggtttttgctaaggttacttcgatggtgaccaatgattatatcaccatgaacgggaacgggtttagcaagagggcagaagagttcatcaagaggtaccacgaactcgaggttaaagaaaatcagtgcagctcttcgctcgttaaacacatcaaagctcctgttcacctggtttggtcattagttaggaggtttgatcaaccgcagaagtacaaaccatttgttagcaggtgtgttgtgcaaggggaccttcagttggaagtgtagcagaagtaaatgttaagtcaggtttgccggcgacaactagcactgaaaggttagagtatctagatgatgatgagcacatcttgagcatgacaattgtcggaggagatcacatgttgaagaactactcatccattttacagtccatcctgaggtcattgatggcagaccaggaaccgttgtgatcgagtctttt

SEQ ID NO: 9606 - DNA, 544 bp, Gossypium hirsutum
  unsure (1)..(544): unsure at all n locations
  Clone ID: uC-gsflmaxxa064a03b1
cagatttatgtacggatctagcaccaaataggaacccaatcgattctattagaaaaagtaaatataattgaaatttacaaaaaaaaagaaagtatttttagaaaaagcataccaggtgaacaggagctttgatgtgtttaacgagcgaagagctgcactgattttctttaacctcgagttcgtggtacctcttgatgaactcttctgccctcttgctaaacccgttcccgttcatggtgatataatcattggtcaccatcgaagtaaccttagcaaaaaccgtggcccgaggaagagaagaggaaaaagccggtccaaaagctgacgccgggtgctagcgggtccggttatcggagagtcctagaaaggtccgaaacaaaacgccatcgccaggctgttttttttataggtccaaggattttttggactgatgcagtgaaattgagaacgacggcgtacttaagccttctggtttggtgttattgggcccaattttcaggcccaaagtttcccngccaaggatctatttttttggcctaatcct

SEQ ID NO: 9607 - DNA, 528 bp, Gossypium hirsutum
  Clone ID: uC-gsronu33B007g06b1
ccacgcacccgcattttcttaccttccgtcgaggtgcatcaacgggggggaggttatcacaggagccggggcccctaacacccggcgtcagcttttggaccggctttttcctcttctcttcctcgggccacggtttttgctaaggttacttcgatggtgaccaatgattatatcaccatgaacgggaacgggtttagcaagagggcagaagagttcatcaagaggtaccacgaactcgaggttaaagaaaatcagtgcagctcttcgctcgttaaacacatcaaagctcctgttcacctggtttggtcattagttaggaagtttgatcaaccgcagaagtacaaaccatttgttagcaggtgtgttgtgcagggggaccttcaggttggaagtgtaggagaagtatatgttaaggtcaggtttgccggcgacaactagccactgaaaggttagagtatctagatgcatgataacacatcttgagcatgacaatttgccgaggagatcacatgctgaaaaactactcat

SEQ ID NO: 9608 - DNA, 622 bp, Gossypium hirsutum
  Clone ID: GOSHI-09MAY01-C57247_1
cccacgcgtccgcccacgcgtccgtgagaagtgtgagcccaacccctaaacgggggccaaacaacagccgcagaagcagtcgaagcatgagtcctccaaaagatgatgttagaagctctcccaggaaatctggtgcaaggacttcacgtagcccattgaatagtccttcaaggaaagcccctgcatccaaccaagggtgtattgcctcaagaagtccatctccgggtggcacatcaaagcgcataagaaaaggccgtggcttcactgaccgttattcctttgcacgtcggtaccgtacaccttctcctgaacgttccccgcctagatcctatgcttatggtggaagaaatgttccagaaagaaaccatgatagatattctagctacagaaatcattctgatcgatcaacacgaagacgttatagaagcccgccaagaggccgtagtccccctagatatgaaggcagaaaaagtaggagtccttctcgcagcccagttcattaccggagaagatacagagatcatagtgagagccagagtcctgttcgaagtcctagtcctagagacaaacgacctgccataagtgaggggttaaaatctcgtcttggtcctcgaatcgatga

SEQ ID NO: 9609 - DNA, 781 bp, Gossypium hirsutum
  Clone ID: GOSHI-09MAY01-C50887_1
ttccacgcgtccgcccacgcgtccgctcaccctctcttttgcactttaaaatgaacttccctttcacttcccaatcccattgtgaaataaaaatggctacttcaaaattctttttatcttctcttcttctgttactttttgttcatggagttttgccaagagcagaatccaagacgtactggggagatgttgatgccttgaaacaactcaaaaatggagtccagcctaattctgtgagcccgggttcttgcttgggttcttgggatttcacattcgacccatgtgacagcctcttcagtgaaagattcacctgcggtttcaggtgcgaccttacagtttctgggttgagccgagtcacggaggttactctcgactctgctgcttattccggttctctctcttccatttcctggaacctcccttacttgcaaacccttgacctctccaacaatttcttctccggcaggattccaggctcactctccaacttgactcggttaactcggctgggtctttcaaggaatgcattttccggtgaggtaccagcctcgattgggtccttgtctactcttgaagaactctacctcgataacaacaacctacaaggtcctatccccccgacttttaatggtcttggtagcttgaaaaggctcgaaattcaatcaaacaacatctctggtgagttaccccgagttgggttcactcaaaaacctgtactttcttgatgcaagcaacaatgtcatttctgggtatttgcctacaacgctgccaccttttttag

SEQ ID NO: 9610 - DNA, 529 bp, Gossypium hirsutum
  Clone ID: GOSHI-09MAY01-C50877_1
cggacgcgtgggtttgcatggagctgagaaggaaactgatccactcgactggggtgctcgaatgaagattgcgcttggtgcagctcgaggtttagcttatttacatgaagactccagcccccgtgttatacaccgagacttcaagtccagcaacatcttgctggaacatgattttacaccaaaagtttcggattttggattggctagaaccgcaatagatgaagggaacaaatacatctcaacacatgtgatgggaacctttggttacttggctccggagtatgcaatgaccggtcaccttcttgtcaaaagtgacgtttatagttatggggtggttctacttgagctcttaacagggaggaaacctgtggacttgttacagcccccgggtcaagaaaatctcgttgcatgggctcgtccactccttacagacaaggaaggtctggaaatggtcatcgatccagccataaaatctgatatctcacttgatagcatagcaaaggtagcggcaattgcatcaatgtgcgtg

SEQ ID NO: 9611 - DNA, 724 bp, Gossypium hirsutum
  Clone ID: GOSHI-09MAY01-C50487_1
aaggtaccatcaacttctccaaaacaactttttctccatgcggtttccatgtgggacgctgagttctatgtcaaggttgacgatgatgtccatctcaacttgggtatgctggcgacaacactagcacaataccgatccaagccaagagtgtacatagggtgcatgaaatctggaccagttctttctgagaaaggggtgaaatatcatgaaccagagtactggaaatttggagaagatggaaacaagtatttcaggcatgccactggtcaaatttatggcatttccaaggatcttgctgcctatatttccatcaactcgcccattttgcacagatacgccaatgaagacgtgtcgttaggatcatggttgatcgggttggaagttgaacacgtggacgatcgttccatgtgttgtgggacccctccagattgtgaatggaaggcacaagcggggaacatatgcgtggcatcatttgattggtcgtgcagcggagtgtgtaagtcggtggagaagatgaaatacgtgcacaactcttgtggagaaggcgattctagtatttggaaatcagatttttaagttgcctccctagtcctacctcctcaccggctttttattatccattttcaaatttattattaagtagtaaaattacttcaagaactttcaacactttgcatactccttttattattattattattattattattattatcatgtattt

SEQ ID NO: 9612 - DNA, 565 bp, Gossypium hirsutum
  Clone ID: LIB3829-030-Q6-N6-C6
agaaaaaggtaatcaacaccactgctttaacaaaggttctacattaatccatctaagcagctctgtaatcaaaagacaaaacaaaggctaatccaatctatcctgatgctgcaccttaaataacaggaatttctttcacccaaccgaaaaaaaaaacactttgacccctacaaaacactagtaactgtgaatatttgctagccacaagcctaagcatatgtcaatactaaatgcatggctagctgcactgtggacatttaaaaaggctccaatgaaaactaggattcagataagttcgacaatggacaagaaccatcttggctggctatgacggttcaggtgaagtggcttttggctcatctcgcagcttttttgcaggcttgggatcatttccctgtcccttagatgaacttggggttttccgctttgcagtttccacaacctcagctgaatcaggtgagctctcttttatgctctcgccttctttcacctttgatgaaccagatttcaatttaccagtaccattagtgtctggtttaccatcattttttagaggcttatcctt

SEQ ID NO: 9613 - DNA, 396 bp, Gossypium hirsutum
  unsure (1)..(396): unsure at all n locations
  Clone ID: LIB3146-020-Q1-K1-F11
aaccactctttcgcaattattnttctagttaattgatatttttttcatcaaaagttcaagaaggctatagagagttttttaacatacctgattcatctgtagttgcggaaactgcaaagcggaaatccccaagctcatctaaaggacagggaaatgatcccaagcctgcaaaaaagctgcgagatgagccaaaagccacttcacctgtaccgtcataaccaacctagatggatcttgtccattgtcaaacttatctgaatcctagatttcattggagcctttttaaatgtccacagtgcatctagccatgcatttagaattgtcatacgcttacgcttgctgctaaccaatatttcacagtacttatgttttattggggtctaatagttttttttt

SEQ ID NO: 9614 - DNA, 521 bp, Gossypium hirsutum
  Clone ID: GOSHI-09MAY01-C50737_1
gcggtttcttgggataattggaagagaagaatccctttgcagagatgtggaaaagacttcactattatgaaagtgttaccatcgggtgtttaccagtataggttcattgccgatggacaatggaggtatgcccctgacttgccatgggctcaagacggcacgggcaatgctaacaacattttggacttgcaggattatgttccggaagatattgcaagtatatctagtttcgaacctccgctgtcccccgagtcaagttacagtaatttgccgcttggagccgaagatttcgctaaggagccaccactcgtccctcctcacctacaacttcctctccttaatctacctgcatctcacatggagatcccgccacctctgtcgagaccaaagcacgtaatcctcaaccatctgtacattcaaaaggggaaaaatggccaacccgtggtggcactcggttcgactcatcggtttcgagccaagtatgtgactgtggtgctgtacaaacccgtgcagcggtagta

SEQ ID NO: 9615 - DNA, 517 bp, Gossypium hirsutum
  Clone ID: LIB3583-020-P1-K1-G7
gtttctcttctctctttccactgaaaagcttgaaagagagattcacacactccaccactcaaaaaaaaaaaaaaaaccataaacaataaccaaaaaggattcatcattgaaaccccaaaaatccttcttgatttcaatgcccccccccccaccccattatttttctttctcaaaggaatcaatggattccacctctgcaactaagctccagcttcacaagaagaaaacatggttccttctcttaacattttctcttctcctctcaactctcctcatcaccatctccattacttcaacttcttcaacaactccttctcttttaaactacgcccacaatcgcaaacccaaacccccactccctcagttcgtggaatctaagctccatgttgcttcgatttcaccgaacccggttcctaaactggcttacctcatctccggctcagccggtgatggggttagcttgttgaggactttgaaggctttgtaccatccaaggaaccagtatgccgtacatttg

SEQ ID NO: 9616 - DNA, 443 bp, Gossypium hirsutum
  Clone ID: LIB3146-019-Q1-K1-D9
cgcacacacgcgtccgcccacgcggtctctcacgcgtgcggttcttcaacaaccgcgggtgtgttaaactacgcccacaatcgcaaacccaaacccccacttgctcagttcgtggaatctaagctccatgttgcttcgatttcaccgaacccgattcctaaactggcttacctcatctccggctcagccggtgatggggttagcttgttgaggactttgaaggctttgtaccatccaaggaaccagtatgccgtacatttggatttggaagcttcggctgaggagaggttggaagtggctgagttggttgaaaacgaaccggtttttaaacgagttgggaatgttaggatggttactagagctaatctagtgacttatagaggaccaactatggttactaatactcttcatgctgccgctattttgtttaaagaaggtggtga

SEQ ID NO: 9617 - DNA, 678 bp, Gossypium hirsutum
  Clone ID: GOSHI-09MAY01-C50677_1
cagagcaaaacaccatgctagcaaagcagatcaaagagagggagaagacagtggcgcagcaacagcagcaacagcagcagcagccgcaatgggggcagcaaaaccatggcctcaacacatcatcctttctgctgccacagcctcctccctgtttgaatatcgggtagcacccctcattggcattcatcgttaatgatatctagagatgcatgaaaggcatatgttacttgtgatgcaagaaataaaatcctatcaactgaaaaccgaataattttgaaaacgtatgccaaagaagatggatccacataagctttcgttttctgttgtctataatgaagtggcaaaagcttggttaaaagatttgattgtttatagtttacaatttttgcagtggcacataccaggaagaaacaacagaaatgaggaggaatgaactagaccttactctggaacctatttactcatgccatttgggatgctttgctgcatgaaaatgggtacaattaatttaactatgcttttggttatatgtgaatatggacatagatccatgcactatggttcttttctttaaaaaaggaaacagcatgagaaaggataatttgttgggaactcatgccttttgtctgctttgtcttgacatacatatatatgtgtatcgatgtcgatgattagtgt

SEQ ID NO: 9618 - DNA, 407 bp, Gossypium hirsutum
  Clone ID: LIB3146-019-Q1-K1-G4
ctcaaggagctgcagaatttggagcagcagcttgatactgctcttaaacttattcgttcaaaaaaaaaccaactcatgtatgagtcaatatcagagcttcagagaaaggagaaggcaatacaggagcaaaacaccatgcttgcaaagcagatcaaagagagggagaagacagtggcgcagcaacagcagcagcagccgctgtgggggcagcaagaccatggcctcaacacatcatcctttctgctgccacagcctcctccctgcttgaatatcggtggcacataccaggaagaagcaacagaaatgaggaggaatgaactagaccttactctggaacctatttactcatgccacttgggatgctttgctgcatgaaaatgggtacaattaatttaactatgcttttg

SEQ ID NO: 9619 - DNA, 397 bp, Gossypium hirsutum
  Clone ID: uC-gsflmaxxa040h08b1
ccttaatgcttacattggttgccattattcagcaaagcagcctactatccacataagctttcgttttctgttgtctataatgaagtggcaaaagcttggttaaaagatttggttgtttatagtttacaatttttgcagtggcacataccaggaagaagcaacagaaatgaggaggactgaactggaccttaatctggaacctatttactcatgccatttgggatgctttgctgcatgaaaatgggtacaattaatttaactatgcttttggttatatgtgaatatggacatagatctatgcactatggtccctttctttaaaaaagaaaacaacatgagaaaggataaattggtgggaactcaagccttttatgtctggtttggcttgacatacata

SEQ ID NO: 9620 - DNA, 597 bp, Gossypium hirsutum
  Clone ID: GOSHI-09MAY01-C50127_1
cggacgcgtgggtaacgttttaggtcatttgaactacgaacaccgagtatgcgagtaaccggattgggtttcttcctcctgtgtgttatttctaaagaaaacgattgagttgtcgaaattgacacactgacccgaaaaggttccatgctcgcataaaattgctttcagtaaaagagctcctctttcagttgactctccaaacaaaatacaatcatctttaaataacaaatgcgatacttgtgggccccttctgctagccttaaccccttacaattgtccttctcttagtgtcagtctcataaggcaagataagccctctccacatatcaaaaataaaaataggctcaagggatcaccttgtcttagtcctctcgttggtcgaaagttctctccaatgtgaccattaaagacgactgaataagatgttgtggatacacatgtcataatagattcaatccagctagggtcaaaacccattcgcaccatcatttcctgtacaaaattccattcaactctatcctacgtcttactcatttcaagttttatcgctataaacccctttttcctaatttcttctgttttagagtgtgtaaaatt

SEQ ID NO: 9621 - DNA, 478 bp, Gossypium hirsutum
  Clone ID: GOSHI-09MAY01-C50067_1
ttgctcacgcgtccgcattcatttgtttgggaacttgattattgaatcacacctgaaagcttctacatgggtgaaccttacggtcttattttacagaaagctcaaccattaaaaatcatcgcacattcagtctaaaaatattctgttgaatatttgttgaatgttggcaacaatgcagcagcaaggaaatattcagtgtgtaatttggttgttggaactctttgtaatatgtaaactaagtttagtttggttgtaattttgtttttactaaggttagtgagctacttagctgatttagtagctttttaggttattattaagctgattttacagcttggatacaagcacaagttacgtttgttttcttccaatgttttggagctttttatgcatattgccttgttactaaaactagtaatgagaattatcttttccccttttcttttgtctaatcatatttttggttcccctatgttta

SEQ ID NO: 9622 - DNA, 410 bp, Gossypium hirsutum
  Clone ID: LIB3146-011-Q1-K1-C3
agccttcgggaaggggatttaccattgaccgaccgctgacaacggttcaccggcgttgattcgggcgtcgaccacggcatgattcaaagcctggaatcatggcctggaatcacggcattgatagtgggtaactggaacgatgcgagacgaacaaacgcgttgattgaagtgtttgcggcgcctaaagtttgtgaaaccctaggtcttccgtccttggcttacgatttgggccacttgggcttctctgagttgggtcaagggtgtaatgggttagtgggtttaggtataactgggtgtgggcttattgggttgtaaccgggcatagggtcttaggctaaatgggtcttgtatcatcaggcctataggcccatttgtaaactggacatttcaacatcgagatttaattattt

SEQ ID NO: 9623 - DNA, 274 bp, Gossypium hirsutum
  unsure (1)..(274): unsure at all n locations
  Clone ID: LIB3582-050-P1-K1-F5
cccacgcgtccgcccacgcgtccggtgatgggttggtgggtttaggtataactgggtgtgggcttattgggccacttgggcttctctgagttgggtcaagggtgtaatgggttagtgggtttaggtataactgggtgtgggcttattgggttgtaaccgggcatagggtcttagggggggggggtcttntatcatcangcctttaagcccatttntaaactnnacatttcaacatnnaaatttatttatttaatttacaaattttnnttatttc

SEQ ID NO: 9624 - DNA, 787 bp, Gossypium hirsutum
  Clone ID: GOSHI-09MAY01-C50307_1
cttggtttacttaagttgattatgacaggagtagccgttgtagtcgtcgataggctcgggaggagacctcttttattgggtggtgtttccgggatggttatttctttgttccttcttggatcatattaccttttcctggatgatttggcggctattgctgttgttgcactgctgttgtatgtcgggtgttatcagctatcgtttggtcctattggttggctgatgatctcagaggtttttcccctacgcctcagagggcgaggacttagtgttgctgtacttgtgaatttcggagcaaatgcactcgtaacatttgcattttctcctttgaaggcatggcttggagctgggattgtgttttatgtgtttggagtgatagctatattatctctcgtctttatattcttcattgtaccggagacgaaggggttaactctcgaggaaatcgaggtgaaatgtctataggtttcggcactgtgctacttgttcaatggctgaatgctttgtagaatatgtccctatgtaagttcaaatatgcagggaagttcttcatgttctgcagcatctaggtaaacagacagtagtatgtacctcctggctgtatgctgtgtaagaataatgtcccctcgttggtgcgtttagcatagccactccactattcgttgttttgagttcatttcttgtacctgctttcattttaacagctcttctagccacgggtttcaatgtcttcatcggccactgtgttacagctgtcactggcctgtcttggacttacaggcaagtg

SEQ ID NO: 9625 - DNA, 386 bp, Gossypium hirsutum
  unsure (1)..(386): unsure at all n locations
  Clone ID: LIB3146-014-Q1-K1-H7
ccgtccgnnggttggctgatgaaaatctcagannggtttttctctcctacccgcctcaaagagggnncgaggacccttagtgtggtgctgtnnacttgtgaanntttcggagcccaaatgcccactcgtaacccatttgcnnattttcnntcctttgaagggcatgnnngcttggagcccctgggattgggtgttttaatgggtgtttgnnngagtgatangcnnntatattatnnnctctcnngtctttaatantnntcttcaaattgtacnnncggagacccgaaggngnngttaacntcnnntcgagnngaaatcnnngaggtgannaatgtctaatagnnngtttcggcaccttgtgcttacttnngttcaatgnngctgaa

SEQ ID NO: 9626 - DNA, 441 bp, Gossypium hirsutum
  Clone ID: GOSHI-09MAY01-C51947_1
atgggttccattgacacgccgacaattacagagaacggttcgacccagtctcaagccgccgctccttccggcggcgaccacaagcctccggcctcagctaacggagcgcaagtggaggtgtcgccggagcctgaaggaacgaaaaagaggcggtcgagtatgctaccgctggaggtgggtactcgcgtgatgtgccgctggagggacggcaaatatcatcctgtcaaagttatcgaacgccgtaagatgccctacgctgtgccctatgattacgaatactacgttcattacaccgaatttaataggaggcttgatgaatgggtgaagcttgaacagcttgatcttgattctgtcgaaactgttgtcgacgaaaaggttgaagacaaggtaacaagcttaaaaatgacacgccaccagaagcgggaagatgatgagacgcat

SEQ ID NO: 9627 - DNA, 770 bp, Gossypium hirsutum
  Clone ID: GOSHI-09MAY01-C51937_1
cttttggttaatactgaatgcatttgtaggcatgcttaaggtgatactaagtgttactcctttttttggtaacagttctttgacagcctcattgcgcagccatgcacgaaaaaaggaatccgattacaaaactgaaggcaattatttgtctcagcaactcaaagcccaaacccggttccccttcaaaagaaaacagctcaagttatattcagacacaagaagatatcttccaccttcggcatggcttactggtgctgcatattttggctacactaatgtttgttccctctctggtgtcttggttgcagagaatagggatgcatcagagcttcccaaggttcctagattcgttcctttgcatttgtttgattcttcacggtatcttcagttcggagtcattgttaaattctgaagtgccccttccacgcatcatggtattgtacgccatgggtgccatcgggatcatttcctttgcattgagtatcttacaagcatggacaggagcaacttcggtttggaagaccaaggcattggcacaggtacatccaatccctcatccattttgcaaatgagcttttggcggggaagaagggactcttttgttggaatattaaaacggcagggccctattttttgtgactgccatgatcaaacctagttttggcatttcaatttgagcaaagagaagaggtgagagattggattttctagccttttttattattattattattttcatattgaaattggctgttttgtttttgggggtt

SEQ ID NO: 9628 - DNA, 437 bp, Gossypium hirsutum
  Clone ID: LIB3146-037-P1-K1-B11
cccacgcgtccgggcttactggtgctgcatattttggctacactaatgtttgttccctctgtggtgtcttggttgcaggtatcggatttggccaattgtaatgcctttccctttttgagttttcacaaaaatgcatccatttaaatttcttttatcatcttgtgggacctattttgcgattgcagagaatagggatgcatcagagcttcccaaggttcctagattcgttcctttgcatttgtttgattcttcacggtatctttagttcggagtcattgttaaattctgaagtgccccttccacgcatcatgggtaaggaagtgagactgaatttgatctacctaactgccggaatttactcttatctctctggtatggaactggcaccctataaagtattgtacgccatgggtgccatcgggatcattttctttgca

SEQ ID NO: 9629 - DNA, 355 bp, Gossypium hirsutum
  Clone ID: LIB3146-034-Q1-K1-D3
cttctgataattcgaataattctgctaccttaaactgttggcaactggatgagttcttagggcaaaggttcggtgcctaagccagttgagaattattgttttgtacagtaatagagacatccacatctgaaggaaacactattagaaaccaatcctcagctcatgcaaattgcttttgtagaaatgactcaaggtaaggaatctattaacctattctattttttcggtccctgctagattcggttgttgaaatgttttttaagttagaaaatcttgaaattattaacctacattggtgaaccacaatcttgtttttctacctataggcattgatttttgaaccctttaccaattt

SEQ ID NO: 9630 - DNA, 211 bp, Gossypium hirsutum
  Clone ID: LIB3146-034-Q1-K1-D5
cttctgataattcgaataattctgctaccttaaactgggggcaactggatgagttcttaggacaaatgttcggggcctaagccagttgagaattattgttttgtacagtaatagagacatcttcattcgtaggaaactctatcataaactcttcttaattccttgcaaatttattttggtggattgattcatggcatggattttattaaca

SEQ ID NO: 9631 - DNA, 545 bp, Gossypium hirsutum
  Clone ID: GOSHI-09MAY01-C51557_1
gaaggcgaaaaatgtcaaagggaaaggatctgtggggaaaactgctaagaaaccacagagtgagagagtgaagaaggcgggtaatgaggcagctaatgttgatggtagtgggaatttgagtggtgcgtccactgtgccagaaggtgtggtgactgctgaatcgagtagaagaggagttgttaatagtgggaggaagcagatggcgaggggcacaaagaatttggggaagttggatttgaatgtggagtttagtaatgaagttgaagagccggcaccgaggaggaatgaggggaatcaccccggctatggggaggaggataacattgaagggaatgggttctttgagggtcttgatgagtttttgagtagcttgcctatactttcagctgttggggatgataaagttaaggctacttagtgaagtaagatccttgctttttgtttttccgcactagttgtagttgttgtaattgcttgttgtattcaaccgtgtcggaggtgcttagggcctccttttttagcctttcaaggttgacttcgactgt

SEQ ID NO: 9632 - DNA, 537 bp, Gossypium hirsutum
  Clone ID: GOSHI-09MAY01-C51497_2
atgctttgttcaaattgtaggatggccaccagtccgatcataccggaaaaattgtttacaaggcaagaaagatgacgttgaaggcgggacaggaatgtatgtcaaagtaagcgttgacggagctccttatctcagaaagattgatctcaaggtttatagaagctaccctcaactcctcttggctttggaaaacatgttcaagcttaccattggtaagatttcaaaacatccccaactgttgttttcccttgacaaatcaaatgaaattaaccccatgataaaaagctgtagtctgattggtttttttttttatctgcaattttaaaggtgcatactcagagagggaaggctacaatggatctaactatgctccaacatatgaagacagagatggtgactggatgcttgttggagatgttccctgggagtaagttcctcttccaaacctttttctcttgaactatatatacatataccctttgttctttccaaaagtaactcattaattttgctaatttcttgcgtttacagaatgtt

SEQ ID NO: 9633 - DNA, 561 bp, Gossypium hirsutum
  Clone ID: GOSHI-09MAY01-C51497_1
ctcacggttttggcaaacaaagaaatataaaggaaccccactgtaaccaatatccccaagccttcttcctttcaagcaattatatcattgtaagttagcaatggagaatgatctcaacctcaaggcaacagaactgagattgggattacctggcagtgatgagcccgagagacaaatgacccctaggcctaacaagagaaccttatctgacattgtttctgagggatcaaggtcgaccacagaggaagatcatcaagacactgctcctcctgccaaggtgcaaattgtaggatggccaccagtccgatcataccggaaaaattgtttacaaggcaagaaagatgacgttgaaggcgggacaggaatgtatgtcaaagtaagcgttgacggagctccttatctcagaaagattgatctcaaggtttatagaagctaccctcaactcctcttggctttggaaaacatgttcaagcttaccattggtgcatactcagagagggaaggctacaatggatctaactatgctccaacatatgaagacagagatggtgactggatgct

SEQ ID NO: 9634 - DNA, 553 bp, Gossypium hirsutum
  Clone ID: GOSHI-09MAY01-C51727_1
ctacgcatacggtcgtgaggtcgacaatctgtgctagaggtggggctagggggatttatgctgatactgtaggacatagagggtatgctctacaacggggaaacatatgcggagcataccggtgcaccaggtgatggggaggtcttgcaataggcacgagttgttattgattgtgcccgtgcaaaccctgatggtcgtaagagagcccttctcattggagggggcattgctaactacactgatgtagctgctactttcaacggaatcattcgagcattgagagaaaaggaagccaagttaaaagcagcacgaatgcacatctatgttcgaagaggtggtccaaactatcaaactggtttggcatggatgcgtgctcttggggaggaactaggagtaccccttgaggtttacgggcctgatgccacgatgactggcatatgcaagcaggctatagattgcattatgtctaagcataaaagggtattatttttgttctccaaaatcgaagtattctgcccatgcaatttggtattctttggtcaaagtataaact

SEQ ID NO: 9635 - DNA, 281 bp, Gossypium hirsutum
  Clone ID: uC-gsronu33B076h02b1
agaccgggggcaggggaattttacatatcttaggagaaaacgcatgcttcacaactgggaaactatgcggacataccggacaccaaatgaagaggaggtcttgcatatgcacgagttgttattgattgcgccactgcaaaccctgatggtcgtaagagagcccttctcattggaggtggcattgctaacttcactgatgtagctgctactttcaacggaatcattccagcattgagagaaaaggaagccccgttaaaagcagcaagaatgcacatctttgc

SEQ ID NO: 9636 - DNA, 577 bp, Gossypium hirsutum
  Clone ID: GOSHI-09MAY01-C51677_2
ctccctctctttccttcatccccttctaaccccccccccccaaaaaaaaaaccacttgtgtaaacaaaatttcagcttgggggggttggagggggcatgtaatacaggccttgttcttgggttaggcttttcatcaaccctggaaactccatccaaggccaacaacaatcaaactcccaagaaatcatctatgtccatggcagcaacaagtttcgagccatcgctgacgttggggggggccggtctgatattctttagttaatgataataacaaaaagattgatgtgaacaaaggaggtggttatcttcacaaccatgaagagcctggatccggtgatttgtaccgtcaggcttctccccatagtgctgtttcttcgttttctagtggtagggtgaaaagggaaagagaccttagctgcgaagaagtggaggtagagaagaattcctccagagttagtgaagaagatgaagacggtgttaatgctagaaagaaactcaggctcaccaaagaccaatctgctttgctcgaggaaagcttcaaacagcatagcactttaaatcctaagcaaaagcaagc

SEQ ID NO: 9637 - DNA, 577 bp, Gossypium hirsutum
  Clone ID: GOSHI-09MAY01-C51677_1
cccttcttcttcctttctataaagaaacctacctaatccatggttttgataagcttaatgggtcttgatgatgatgcatgtaatacaggccttgttctggggttgggattctcatctgccctggaaactccatccaagaagccatcatgtcttaagtttgaacaaccggccgcgacggtggcacctccaacaacttttgaaccgtcgttgaccctgggtctatttggtgatcagggttaccaagttaccaagaagtcggatgtcaataaaagtggttatcttcatcaccatgaggaacctggcgccggtgatttatatcgtcgtcaagcttctcctcatagtgctgtttcttcgttttctagtggtagagtcaagagagaaagagaggttagcagcgaggaattagaggtagagaagaattcgtctagagttagtgatgaagacgaagacggtgttaatgcaaggaagaaactcaggctcaccaaagaacaatctgctcttctcgaggaaagcttcaaacagcatagcactctcaatcctaagcaaaagcaagctttagcaaagcaattaaacctga

SEQ ID NO: 9638 - DNA, 444 bp, Gossypium hirsutum
  Clone ID: GOSHI-09MAY01-C51187_1
cactatttctattgtatctgctagttggtttttattgtctgtcagttgaaactgcagtgctaaagggtgtagctcagtagtgtggaccaaaaagcatttgtttccgtgttgcacgtttatttgctcatacgaatgtcttttttttttttttttttttttttctctccaggtatatgggtacagtaactggcataagcgatttggatcaagttcgctggccaaattcccattggcggtctgtgaaggtaattattaacatttttttacatggatctcatagtagatggtttttattgtttgggatggataatatcatgttctattttattatgcatgtctaaagaaatttatgtgtttaacgtccatgatttcttgtttgatgtctttgatttcatggagattcaatgctaattgaatgattatgtaatgttagaatcttgaatg

SEQ ID NO: 9639 - DNA, 418 bp, Gossypium hirsutum
  Clone ID: GOSHI-09MAY01-C51157_1
caaatttgaaatgcatattcaggagaagcagagatggtggtggaaggggtggaaacggtggcggaagtggtggaaaaggtagcaacgacggcggagaaagtatcaactgaggtggcggaaaagcttcccgatgatagcatgctgaaaattgcagcaatggaggtggaacatgtttctgatataactgcccatgatgctcatgccactacacacttcattcaccaggttgaagaaataaagcatgagttggatgatttggttaacaaagttggagaagcaaggaccccaaaaaattgattcataggtaaaacttctttgaataagttctaaaaaataagtttgctattaattttaacaattcatgtaattttttttaaaaaaagtcatcgtattaattgtataaatatgaatataatta

SEQ ID NO: 9640 - DNA, 349 bp, Gossypium hirsutum
  Clone ID: LIB3146-025-Q1-K1-B1
catgagttgagttgggtctggtgttaaaattattgtgtcagaactgtcaatttggtaacttattattgttgttgtgttgtgagtgttgttttccaatgcaattggatttagtgaagtgtgtggggtccagcatgagaagagttccttctcctccttctcattttcggtgtttccattgtctaataaatatctgctatcttcttcactttcttattattgcagatacttctacttcaaaaaaaagatgaaagtgaaaaaacaggaacctttgcctcttaattagaacaaagaataatgtttgtcataaagaaactatacctgtgactactgttaaaacacaaaggggggg

SEQ ID NO: 9641 - DNA, 356 bp, Gossypium hirsutum
  Clone ID: LIB3146-026-Q1-K2-A7
gctcgacctacgcgtccgcatgagttgagttgggtctggtgttaaaattattgtgtcagaactgtcaatttggtaacttattattgttgttgtgttgtgagtgttgttttccaatgcaattggatttagtgaagtgtgtggggtccagcatgagaagagttccttctcctccttctcattttcggtgtttccattgtctaataaatatctgctatcttcttcactttcttattattgcagatacttctacttccaaaaaaaaaaaaacaaaaaaaaaaaaaaaaaaaaaaaacaaaaaaaaaaaaaaaaacaaacttcaaaataaaaaaacaaaaaaaaaaaaaacaaaaaaaaca

SEQ ID NO: 9642 - DNA, 833 bp, Gossypium hirsutum
  Clone ID: GOSHI-09MAY01-C51047_1
ggttaccccagtgtgattcactggcttcaggcataccatcagttaatattagccctctgtcgtctgtcaccccgactgttattatggcctctagttctactgcaagtggagataaagctgatttcccgagtcagccacaactgggtactccacatcgaacaagctcatctgaaacgagcctcggtctcagagtctataaaatctaaatggtccactgcttcagccagatacaaggaaacaatttctaaaggtaccaaaggtctcaaagagaagcttcttgctcgtaataactctgttaaggagctcagcaagggagtgcagcgtgagatgactgctggggttgcaaaaatgattgagcgcctagatatttcatcaaaaagatctggagcctctgtacctgcttctggtggcacaggcagtacctcaaatattttatttaagggaaagggtgtgcaagataatgttattgctcagaatcttactaacaacaacgtagaatttgtacgtggtttaaattcagaggccccatcttatccttctcgtatcatgcctgacaaactagaagcttctcacccacagagggatcactgatgcatatggcataagcatctgccgattggtagtgacagtttaacattttcacgatgggaagggttcaatgcaagtgacgttcgggtgcgtgttgtctctgcgtcctgcattgcttatttctttatttgtgccaaagaagttgcaatttggatggcatgccatattaatataaccctccctttgtttcctcacaatatttcatgttggcataaacaactcttcaaggaaaagcgttttatttt

SEQ ID NO: 9643 - DNA, 714 bp, Gossypium hirsutum
  Clone ID: GOSHI-09MAY01-C51237_1
cccacgcgtccggtttcttttttctaaaagaaaagcagtgtctctggttttttttaacccattatttggccgccatttaaccgtgcgccaaggccccgattgtgacggagatggcaccggctcgacgacttcggcgattaggtgagtttcccctttcccttttatattttaagagaaaaataactaaaaaataaaggaaaaaaataaaaacaaaaccgataactaagaatgacgaacaccaaataaataaatggaaaaaaaacctttttgtattcaaaaatctctttatatctccccccttttacactgaaaatattggccttttatagccgaaaatggaaaagaaaactaaatccaaacaaatctattcggttgtttgttggctcgatttttgctcttctctttcgcttgttgcaggtacgtgcttgaggagcgacatttgcggaggtgtggcgtgcgtagaggagcgcgaagaggcagtagttgcggcgccagattgctagtggccgctggggcagaagctgctacggcgctgaagcagaaagggctaagggtttctgcactgggctagggttaatgtaattgggctgaatttttgggtttagtctgcagatgggtaattaggttaattttgggccttaaatgtcttacgggcctgggcatagaatttgggtattacaggtatcaaattggaatatttgttatagtaaaaag

SEQ ID NO: 9644 - DNA, 511 bp, Gossypium hirsutum
  Clone ID: GOSHI-09MAY01-C52987_1
ttccacgcgtccgcaagaacagggtgcacccgttggtggaattggaattcaaggacatatagggagccctgtaggaccagttgtgtgtactgctcttgataagttaggcattctcggccttcctatctggtttacggagctcgatgtgtcttcaatcaatgaacacgtgagaggggaagatttagaagttatgcttagagaagctttcgcacatccggccgtggagggtgtaatgctgggcggattttgggaactgttcatgagccgggataacgcacacttggtgaatgccgaaggcgaagttaatgaaaccggtaaaaggtttcttgctcttaaacacgagtggttgtctcatgctcgtggacaagtagatgtaaaaggacaattcaatttccgaggctttcatggggaagtacgccatggaaatcgatactccctctaagaagatcgtgaaaacttttgtcgtcgacaagggtgatacgccctggttgttcccgttgaattataaatt

SEQ ID NO: 9645 - DNA, 554 bp, Gossypium hirsutum
  Clone ID: LIB3584-050-P1-K2-G1
cccacgcgtccgaaagaaatcaaaatgcttagggaagaggttaattccctagaggcaaaaattgcagaactgcaatcacataaaagtgaggataccactgaaaataaggagatgcttgtgcgaaagccaccttcgctgcagaagttcgatcaaaagctggtagttacgttggatgatgcagcacagagatatacaccttatatcagatacacaaagcttgaattcaaggttgacacattctttgctgtgggatcacctctgggagtgttccttgcccttcgcaatatccgtattggacttggcaaaggccaagattattgggatgaggaaaacatttctgaagagatgccagcttgtcgtcaaatgctcaacatcttccacccatatgatcctgtagcatatagaatagaaccacttgtttgcaaagaacacatcacaaaacgtcctgtcattatcccttatcataaaggtggaagaaggttgcatattggatttcaagaattcactgaagatttagctgctcgttctcaaggagtaatggatcgtctcagctt

SEQ ID NO: 9646 - DNA, 282 bp, Gossypium hirsutum
  Clone ID: LIB3146-050-Q1-K1-D7
cccacgcgtccgcctacgcgtccgcccacgcgtccgcccacgcgtccgcatttctgaagagatgccagcttgtcgtcaaatgctcaacatcttccacccatatgatcctgtagcatatagaatagaaccacttgtttgcaaagaacacatcacaaaacgtcctgtcattatcccttatcacaaaggtggaagaaggttgcatattggatttcaagaattcactgaagatttagctgctcgttctcaaggagtaatggatcgtctcagctttataagggctaa

SEQ ID NO: 9647 - DNA, 283 bp, Gossypium hirsutum
  Clone ID: GOSHI-09MAY01-C52897_1
ctgagtttgtggcttcaggatctccaaattccagttatggtcaggcattgccaacggaggaagattttgcaaaggagcctgttatagttccctcccagctgcatcaaactgtcctcggtacagataatcaagatggagcatcatcctcaaagcctcaacatgttgtacttaaccaccttttcattgagaaaggatgggcatcgcattctgttgttgccctgggattgacccataggtttgagtccaaatacgtgactgttgtactctataagccactcaaaag

SEQ ID NO: 9648 - DNA, 538 bp, Gossypium hirsutum
  Clone ID: GOSHI-09MAY01-C52807_1
tacttttttggggttttcgcttttctttttcactatcatcagttcagcaaatcagttccaaaaaaaaaacccacttctacaaacatgaaatctggttatggggtcactctttttctcttgtttctcttcttttcagcttttgtcttcaattacaatgaagctacaagcatggcccaagtaaatgggccttcagaaatgttcccattggtggaagagaagatgatgttgttcaatgaaagcagaagaaagttggggagtttccagatatgtgctgtttgtacatgctgtggtggagctaaaggtgcttgcttaccttctccttgttgctatgctatcaattgcaacattccaaacagaccctttggtttctgttctttcactcccaaaacctgtaactgctttggatgccatctctagtttaaacctttgttttatctatttttcttactctctctttttttatttatttaggagttaaaaaaaatattgattctgatgcaagtttgaaagtggagaaagagaatatctgttttctttc

SEQ ID NO: 9649 - DNA, 541 bp, Gossypium hirsutum
  Clone ID: GOSHI-09MAY01-C52717_1
cccacgcgtccgattggatcatcccaagagtggacctcggtctttgtctggtgagatgtcggggtttgctggtgtccctcctacttgcatgggtcactgcttgcacaaagggtttaaccatccaggtgggtataaatgtgcacctgagaatgttaaggttgggtccttacagatgtatatgaagaatgccgggagtggtgaggatgtaggtccaggaggtttccctgtggaggaagcgcacaagctcagcgtgctccatataagaatggcaaatgccgaccgacgcgccgggaatatctttgattggtaaacgggaaaatgaccaaactgtgcttattccaattgatcatggctactgcttccctgagaatttccaggatctcacatttgattggatatatggccacaatcacgacagccttactccatagagacttttgactatataaaatcacttgaagctgaacaagatgttgcactattgagatttacgggtgggtgatcccgctagtgcgcttgacgctttgatcttgccatgctt

SEQ ID NO: 9650 - DNA, 565 bp, Gossypium hirsutum
  Clone ID: GOSHI-09MAY01-C52617_1
cccacgcgtccgcccacgcgtccgcccacgcgtccgcgacttgtcttatcgtcttgctcatccattccattcgtctgtcgatagctctgcccaaggatactttctttgctatcctattttgaaaaacaaatttctcctaatccattagtctggattcattacccgttgttctacttcaccgccagtgcgccgaatcagttcttcgctctccaggtgtgtattctctcctttcttcaatgattcacttccgatattatgagctctcctattccctgttctctgaatgtatttgaactcgatcttttgaaagcatgatttcttgctgtggatgtctccaataattgctccgataactgagtaatcccttgttgtcgactggcatttttgaattactgttcttgagtcacccaatatctgatcttcctgaaaacccatttcgattcctaactttactgcatccatccctgcatgtgcctctgctgcgaacggagatgcaatattggcatgaatgattgacttcgaaaccagaaactcgtccctcatgccccaaattaccaaccctgac

SEQ ID NO: 9651 - DNA, 552 bp, Gossypium hirsutum
  Clone ID: GOSHI-09MAY01-C52107_1
tccaaatgtggcgttgctgtggcttaatcttttgatcataagcctgagagagcagatgagggggagagaattgaagccggcggcggatgggtgataaaatggaatggacatcgcgtgcttggagtactcgccacttcaagatccataggcgatgggtgcctcaaaccatttgttacatccacaccagaagtgacggtaagcgagcttaccaatggagatgaattcctgatactggcgagtgatgggctgtgggatgtggtatctaatgaagtggcttgtggagtagtgaggcgatgtttgaacagccaaatgacgaagaggaaatcatcgcttcagttcgtcgacggaaaccgacgtgccgaagcagccgcggcgatgttggttgagcttgccattgctcgaggtagccaagacaacattagtgtcatagtggttgacttcagaaactcaacctatcactaatctccagtaaatctatctgtgtattattattgataaatttgtacaaaggaggcatagaaattcgggaataaaataattgtacatgtttgg

SEQ ID NO: 9652 - DNA, 1083 bp, Gossypium hirsutum
  Clone ID: GOSHI-09MAY01-C52067_1
accacgcgtccgcaaattcataatcgacaactcttttaggatttattgttgtccggaacaccctacttacttaggatgggagtaatgacaggatagggtttttaaatactaattgttctgaactaaggaggagagttcagctctctggtgctcctgcaccaactcctttagtctccccaagcaaggatactaaaatggaaattccttctgtactatccccaagtgggtcaccatcaaatgttcttccaggttcatctcatgtgggatttataacatttcatatgtcaattagcaccactgattcaaacttcaagtccatcctcaaggagcttacagaattaatttcggaggaactggaagtcgataattcacagattcgcttgcttaatgtcacttcacaagagaaagattaccttgttagatggggcatttttcctgctgaacctgctaattatatctcgaataccattgcaaggagcatcatcctgcgcttaagggatcatagaatacagttacctgagagatttggaaattataagttgatggaatggaatgccgaaccccaaaggaagttgacatcgtggcaacatcgctttctgataatgttagttggatccgtcacaactctgattctcagtttatcagctattggcatatggttggtccaccggcaacgacaacaaactgcttatgagcctgttggtgcttctataccagaaagatatcttcagcctcttcaatcttaaatatttatctgggaatagttttcttggatactatattattattctgcataccacacatgcttttgaagctctcaaaacaacaatgatggtgcttccaagccagaccagtactactcgatgaactactacccagtgcctctgttgtaaatgatagtttatcatccatttttattagaaaaacggaaacaaaaaggaaatctctttgatttcctgagatcaagttatacgatacttgatccagaaggaaattgcaaacttgattgaagatcttgtgagcttgttcatcgtcattaactacaaacaagccagcagcatcggtaaaagtgttctaactgcc

SEQ ID NO: 9653 - DNA, 427 bp, Gossypium hirsutum
  Clone ID: GOSHI-09MAY01-C52007_1
cattcatcaaagtccaaagtcccgaaatatctgtatatttcaacatgcctaaaaccttctcaaaattatcttcctctactttcttctttcactttactctgctcttcttctctgcaacctctagcggttccttctccaacattttgtctcccaaaaagttcggtctcaagcgagagaagctcacccatcttcacttctacttccacgacatagttagctcacgaaacccaaccgctatccctgtcgccagcgccgcctcgaccaacaaatcccatactggctttggcgttgtcatgatggccgatgaccctttgacggccgcacccgaccccaactccaagctcgtgggaaaagcgcaagggatttacgcatcagcagcgcaagacgaagtcggtttattaatggtaatgaacttggctttcatgga

SEQ ID NO: 9654 - DNA, 750 bp, Gossypium hirsutum
  Clone ID: GOSHI-09MAY01-C53887_1
cgcaaatcaaattaaagcaactcatcactgtgaatgaattgtgatggatgcctggtcttcctcctttctctccaccctaacaccttcaacaaaactcctttctcccgttatcaccaccactctcagatcaacttccccatcaccttattatgctcctcgcccacgcgtccgctctgtcagaattgaagagaaacctccaacctccacaaccaccaccaaaacatcacatccaccaccaccccaatctcctaaagcttggcctccaccagcgccatcctatgcttctccatcagttggagccaagaaaagagtagaaccaaggctgtccaccatgatcttcaatacatttgacgatattataaacaacttcatagaccctccactcaggccttctgtcgaccccaagcatgtcctgtcccacaacttcgctcctgttgatgagcttcctcctacaccctgtgaagttatacaaggatccctcccgccttgccttgacggtgcatacattcgtaatggccccaaccctcagttcctccctcgtggaccttaccacctcttcgatggtgatggtatgcttcactccattcgaatctccaagggcaaggccaccttgtgtagcagatacgtaaagacgtacaagtactccattgaaaaccaaatgggttctcccgttttccccaatgttttctccggctttaacggcctaaccgccgcggccactcgcggtgctctctccgctgtcagaattct

SEQ ID NO: 9655 - DNA, 390 bp, Gossypium hirsutum
  Clone ID: LIB3146-058-Q1-K1-A2
ggatcaagtgagagaggcttctgagttatcatctaggaaaagaagggatagttgggaggttgaccgagtccggggatttggtgttggagaagccagttccatagaacaaccctcaacctcactccattagtccccgacctgcattgcctcaaaaagagaaaacagagaggtctgcaaatgaattatgtcatgtgcaccatggtttattgcttgagactatcatgatatggatgaattgttacaagaatgataaggaagttttgtacataatgggcaatcaaatctatcctagtagacattcctgatttagtcattatccaagtaataagacttggtaacggttggatttgaatcgattttggaataaaattacatttatcctgctttttt

SEQ ID NO: 9656 - DNA, 291 bp, Gossypium hirsutum
  unsure (1)..(291): unsure at all n locations
  Clone ID: LIB3829-009-Q6-K6-G10
ctgcaaatgattctgtcatgtgcaccatggtttattgcttgagggttgttctatggaactggcttctgagttatcatctaggaaaagaaggatagttgggaggttgtccgagtccggggatttggtgttggacaagccctgttcagggaacatcccccacgccttctgccggggggcccgggggggagttctgctgccgcggccgcgtgcggcgccccgggtgttccggacgcggttcctgcgggcgtnccagcatttcctttngcgntgcccctttctggtgccccggtt

SEQ ID NO: 9657 - DNA, 750 bp, Gossypium hirsutum
  Clone ID: GOSHI-09MAY01-C53417_1
cccacgcgtccgcaggattttattgttactttgaatgagatgaaggcagaagtttcttgtgtatgccgcttgtatgaatacaaaggatatctctgcaggcacgcaatggtagttctccaaataaacggccactcagccatcccttctcaatatattttgaaacgatggacaaaagaggcaaagagcaggcatttcatgagtgaagaatctgaacaggttcaatctagggtgcagaggtacaatgatttatttcaacgagggatgaagttgattgaggagggttcattgtctcaagagagctactatattgcattccgaagcctggaagaagcctttgggagctgtttgagtgcaaacacttctaataagagccttgcagaagctgtggcatctccctcccagggtatgatctgtattgaagaagacaatcaaagcagaagcacaagcaagacgaataagaaaaagaacccaaccaaaaagagaaagggaaactcagagcaggaggtaatggctgttgcaccgacggatggcttgcaacaaatggttagttctgttctatatattagcagactagttaaagatgttttgatgatttatggcacctgcatcaagtaatagcataacaataagattattgtagcttttgcaatcaagaaatgttctcaagctttggaataaaatgatcaaatatgatcacatcacttgttagttttttaatttgtagggataaaataaaagctcaagatcagt

SEQ ID NO: 9658 - DNA, 587 bp, Gossypium hirsutum
  Clone ID: GOSHI-09MAY01-C53687_1
gcgttcgcttgaaatgctcaagagtgctccaaggagggtgtctagggaggctggaaagctaccaggttgcattatcattccaattttgctgataatcgaggacatattgatcattccgcgagggtaatgcgtgtcattacatggaatagttctttcagaggtatgacaaacggtgaaaacaggaaggatgagggggattctgaagagcacgagtctcacgccactgtcctggataagttgctagcatgggaaaagaaactttatgatgaagtaaagcaaggagagctgatgaagctcgagtataaaaggaaggtagcttggttaaacaagcagaagaaacgtggtgctagtgctgaatcattggagaaaacaaaggcagctggtagtcatttgcatacaaggtacataggtgacatgcagtcccatggattcaacagtgtcagaaggtaatcgattacgtgatgagcaggtatatccgaaaacttgttatgcttggtgatgggatggctaacatgtgggcaagcatgtgcatacatcatgataggcaactcaaggttggtgaaaagcttaagtctcttgacgttgcc

SEQ ID NO: 9659 - DNA, 744 bp, Gossypium hirsutum
  Clone ID: GOSHI-09MAY01-C53657_1
tttccgttgatcattctgctccaacacttatggggacgctaggtgtttcaaactcaattctcaagcagtatggagtagaattcgccgcagagcatatcctccctctactcacacctcttcttacggcccaacagttgaatgttcagcagtttgccaaatgcatgctctttgtcaaggatattcttagaaggatagaagaaaaccgtggggttactgtaactgattctggagtcccagatttaaaacctgctaccacttccaacgggcttcagtctcaagtcttgagcaaagcaaatggaactgtggcttctgcaaaaagcagcccagcatgggatgaagactggggtcctactaccagagcagctgccaatgccagtcacactgcccaccagcctcccaaggacaatttatcctttcactttattttggatgataagtcaattcaatcggcacccacacaatctcaatcttccttaatatccactatatctagccagcaaacatccaattcttgtcctgcagttgacatagagtggcctcctcgtccatcttcaggtgttactgtagagtcaggcattggcgagaagcaattaaatgctggaacatctttgtcatcaaattttgaagatttagatccttttgctaactggcctccacggcctagtgcctctcaaatgactctggaactttaacaatggtattatgggaggaccaggcatgaacaattatggatcagttctatac

SEQ ID NO: 9660 - DNA, 356 bp, Gossypium hirsutum
  Clone ID: GOSHI-09MAY01-C53377_1
gcagacccgaacgagtaaggcacagctgagctgcacaaaccaactcatcaacctgaatgtgtgcgcaccctttatggtgcctggtgccaccgagacccagcctagttccctgtgttgtggtgcactccaagctgtgcaacatgattgcctctgcagcactctcaggattgctgctcaacttccttctcaatgcaatctcccacctctctattgtgccacctgacatatatgcatgcatgcaagcaagctggtagaatatatatatatggctgcagttttatttttcttttggaacgtgtggcatcatatgtgacaaagcaaatgcaatggagatcaaagttataattagtacttgg

SEQ ID NO: 9661 - DNA, 432 bp, Gossypium hirsutum
  Clone ID: LIB3146-055-Q1-K1-G7
cccacgcgtccgtgcctttatcaatatgctgtctccttcacacattataccatttgggggggcatttaatggaaagaagtgggagaagtttaatagcgagaaagttgcttctttggcatatgctcgaatccagggaaaggcagctcttgttgcccacttccagaattcaagcttgatgaatgaagataagcgctgccgcccaattctctttcactctgaaggtccagatggtggcgatcagaccatcccagagcatttacactctagtttgaatatcatccgccagccaaacgggttaccctcgggtgattcttcaagtagccccaaaaagaaagatgctggcgaggagcttgaaaccttctagcagcttaatatcaagagattttgcccttgtaccaaattcatggggcagtgaaggctaacatatttcgt

SEQ ID NO: 9662 - DNA, 374 bp, Gossypium hirsutum
  Clone ID: uC-gsronu33B077e03b1
cccactcttccgcggacgcgtgggcggcgacgcatcgttcaaatttctgccattgattaaaatcatcagggaacttacgattttctctatttgccaatagattttaagaataagtgcaatgtgggctatgcctttattaatatgctgtctccttcacacattataccattttacgaggcatttaatggaaagaagtgggagaagtttaatagcgagaaagttgcttctttggcatatgctcgaatccagggaaaggcagctcttgttgcccacttccagaattcaagtcttgcttttccctggggtatcccaactaaatcgccttgaaaaaaatcccccttttgccagttggagtaaaaacaaaaaaggccggg

SEQ ID NO: 9663 - DNA, 593 bp, Gossypium hirsutum
  Clone ID: GOSHI-09MAY01-C53327_1
aacaaatgtgggatgccaagaacattatgtgcgctgctgatccacgccatggaagggaccttacagcatcggctatgttcaggggcaaaatgagcaccaaggaagtcgatgagcagatgctcaatgtccagaacaagaattcatcctactttgtggaatggatcccaaacaatgtcaaatcaacagtgtgcgatatccctccgaatgggttgaaaatggcatcaacattcattggaaactcaacttcgatacaggagatgttcaggcgtgtgagtgaacagttcacagccatgtttaggagaaaggctttcttgcattggtacacgggcgaaggtatggacgagatggagttcacagaagcagaaagcaacatgaatgatctggtgtcggagtatcagcagtaccaggatgcaactgcagccgatgaagaagatgtatgagcaggaagaggaggagtatcaagactaattcggttctatatagatattagctttttcaatgtagcacaatgctaaaagaaatcccaatccccgattggatatctgtatgcaatatcatgtcaagtgcccatattgcagctctcttctttcaat

SEQ ID NO: 9664 - DNA, 456 bp, Gossypium hirsutum
  Clone ID: GOSHI-09MAY01-C53207_1
gaactgaggatttagtggtgacagctgatgttaaaaggctggaaagttgggttcgagcggaggcagaaaagtctgccaatgtgattgagaaaagacatcatttggaactggatgcatttgctgaacaaatgagactgaaagatgagaagttagagggttttcgctggcgactgttgagcatggaactagagtcggagcgggcgcaggcccatgttgatggactgaaccaggatgtatctcagctcagacaagacaacatgaaattggaggccatgctattggagagagaggatgaattaaattccttgaaggatcagtttgcatcacaatcaaagcctatgacttgtcaaaagagtgacatattaaatatatctctgcacgatccagctttgacacatgattccttttggcctaatgtcaggattgtaaagaaaaaggcaaccgagaaggagcaag

SEQ ID NO: 9665 - DNA, 1117 bp, Gossypium hirsutum
  Clone ID: GOSHI-09MAY01-C53237_1
cgacgttccaattttagttgcaatttggaagaaaaaaacgtgcctatccaaacaaaaacagaaatgggtttccccgatgcatccgcaatcggcggaggcccggaacccgactctgaatccgccctcctcctccgcacatccctaaaaccagaagacaaattcaatttgggctacatcatctacttcactttgggcgttggctttctcctcccatggaatagcttcatcactgccgtcgattacttttcctacctctacccggaagcttccgtcgaccgtgttttcgccgtcgtttacatggtcgtcggcctcgcttgcctcttggtcattgtattttatgctcacaagagtgaagcttacatgcggatcaatgttggtttgggcattttcgtggtttccctggtcgtcgtgcctgttatggatgcggtttatatcaagggtcgggtcggattgtatgacggattctacgtcacggtcggtcttctcgctctggcgggtataggcgatgcgcttgttcaaggtgggctcattggagcggctggggaattgcctgaacgctacatgcaggctatcgttgcgggatccggcggttctggggtccttgtttcaatgctaaggatcctaaccaaagctgtatttccacaagatggtgatggcctgagaaagagtgcctacctttactttttcgccacccgtccgtttatggtcatatgcatagtcttgttcaatgtggcacacaaacttccggtggtgcagtactatgaggagttaaaggctgaggctgttaaggaggaaaaagcagagaaaggtcccatgaccgggcctgtttggagagcaaccttgtggaatatagtaggaacagtcaagtggtatggatttgggatcgtcctcatatatgttgtgactttatcaatattttcaggatacatcacggaggatgtgcactcattggttctcaaggactggtatccggtcctccttataacaggctacaatgtgtttgacctggttggcaaatcgttgactgcagtctatctccttgaaaatgcaaaggttgctatttccgcttgtgttgtgaggttacctgtctttcctctcttcataggttgtttgcacg

SEQ ID NO: 9666 - DNA, 547 bp, Gossypium hirsutum
  unsure (1)..(547): unsure at all n locations
  Clone ID: LIB3585-041-P1-K1-E12
cagcttctcatctcccattccctaacttttcatcaaaactttcaacacaaagcctttgcatagatctacatggtaccagtgtatacgagatcaatttcagctcaattttgttggaatacaagttgccactgttgttgagtaaaaagctccttcttgatcatccgaaagctccaagaaatctacgaaagggaagagacctggaaagagagggaaccgtttctggaagagcattggtttgggcttcaaagctcctcgtgaagctattgaaggggtccttgtttcaatgctaaggatcctaaccaaagctgtatttccacaagatgctgatggcctgagaaagagtgcctacctttactttnttactagcattctgtttatggtcatatgcatagtcttgtacaatgtggcacacaaacttccgattatgcagtaagagttaaaggctgaggctgttaaggaggaaaaagcagagaaaggtcccatgaccgggcctgtttggagagcaaccttgtggaatatagtaggaacagtcaagtggtatggattt

SEQ ID NO: 9667 - DNA, 506 bp, Gossypium hirsutum
  Clone ID: GOSHI-09MAY01-C48977_1
cccacgcgtccgacaaaggaaagcgtaatgtcagatgagaaaaaggggaagttcgttgaatgagaagattccgaatttgaaaaggttatagacttccatatatgttctcagagtgatgtatttgtaccagccatatccggcttgttctatgccaatgtagctggaaaaagaatagcttcagggaagcctcaaatccttgttccagctgatatacctgctacgtctgcccccatcaccaactacctctctccttacgttgccaagaggaaccacttggcttattcctgtttctgctagtcgcgtcggttcgatgcacgtgtgccttcctaaaagggtgtcgggtcttcccgtttacctcagttggagtctctttgagtaagcagagggaaagaccaactttggggttcatacttgggtgttaactggccctgataaaagttatatgttaagatgatttttggtttttctttaatgcgtttctcaatggggggggggggtcagaaatg

SEQ ID NO: 9668 - DNA, 420 bp, Gossypium hirsutum
  Clone ID: LIB3135-051-Q1-K1-G8
cccacgcgtccgcccacgcgtcctggtgcatctgccgtcgaccacctgctccagccactggtgcatctgccgtccaccacctgctccagccactgctcaagagcttagggagtctaattcggataagagaaaaagctacctaaccgaatagtcgatctgtaatcgttcgacaacttccgagatctcatttggaagctacaggctcggggatcgtcagcaactagtcacactatcactatccactgcttgttactgttatgttttgaattattttatggcatgtatagaataggccagtggccgaagaatattttggttaatgtatataagccatgcgaaaatggcatcttttgaatgtgtacttatagaagtttaaattggatccctgactgtctttagtacttatctaaaggaatgttc

SEQ ID NO: 9669 - DNA, 399 bp, Gossypium hirsutum
  unsure (1)..(399): unsure at all n locations
  Clone ID: LIB3582-051-P1-K1-F8
cccacgcttccgcttcttcttaccgtgagtgtgtagagaaaatagaaacctttgagcttagggcattcggcaaaagaaggcttcaaataagttaaactcaagagcatagaggggcaattttggataaagagaaagtaaacgaatagccgtggatatctagtcgtcgaccacttccgattgtcatttggaagctacaggctcggggatcatcancaactantcacactatcactatccactgtttggtactgctacgttttggattatcttatagcatgtatagaatagactagtagtgagaggatattttggttaatgtatataagccatgcgaaaatggcatggtttgaatgtgtacttatagaattttaaattggatcactgactgnctttagtact

SEQ ID NO: 9670 - DNA, 372 bp, Gossypium hirsutum
  Clone ID: LIB3196-022-P1-M1-G12
cttaaaacttactaagcattgtaatgcttactccgtttactttgtttcctctgttttatagatctcatttggaagctacaggctcggggatcgtcagcagctagtcacactatcactatccactgcttgttactgttatgctttgaattattttatggcatgtaaagaatagaccagtggtcgaagaatattttggttaatgtatataagccatgcgaaaatggcatcttttgaatgtgtgcttataaaagttaaaattgtatccctgactgcctttagtatttacctaaagggatgttctttataaaaaagatatttcaaaatttttactgttctgatatgagtttcaagtgcggtaatgcccatttacct

SEQ ID NO: 9671 - DNA, 802 bp, Gossypium hirsutum
  Clone ID: GOSHI-09MAY01-C48627_1
gggagaacaggcagtggtaaatcaactctcatacaaacacttttccggatcgttgaacctgcagcagggcacatcataatcgatggtgtaaacatctcatcgatcgggttgcatgatttgcgttcacgactcggcatcatccctccagagcctaccatgttcgaagggactatacgaagcaacctggaccctcttgaagaatacacagatgaacagatttgggaggcattggataaatgccgactcggggatggagttcgaaacaaggccggccgactcaattccttagttagtgagaatggagagaattggagcatggggcaaaggcagttggtgtgccttgggcgtgtactattgaagaaaagtaagatcttagtgcttgacgaagcgaccgcatcggtggatacagccactgacaacctaatacagatgacgttaagggagcacttctccgattgtacggtcatgacgatcgctcaccggataacttcggttctggatagcgacatggttctgcttctaagtcatggagtaatagaagaatatgatagtccatcaagtttgctggaaaacaagtcttcatcatttgcacagcttgtagcagagtacactgtgagatcaaattctggtttgaattagatgatgatgaagaagaaaatttacgagtgtaaacaattcgtgatgtttttaatttgtaattgtgaatgtttttcattgtttcgtgccattttctttggctcccaataaacgatttaaaaaatgcgttggtgtcaaatacatatctatactttatatttgccaa

SEQ ID NO: 9672 - DNA, 953 bp, Gossypium hirsutum
  Clone ID: GOSHI-09MAY01-C48147_1
caactttagtgatgctcatggatgtggcaataggtgtgtagtgccaggatgcccacgcggccccccccgccgccccgactgctgtgtcaggcatggtggtggaaaacggtgcaagttcgagaattgcggcaagagtgcccaaggaagcacggatttatgcaaggcccatggtgggggcaaaagatgctcctggggagaaggcaaatgcgagaaatttgcaaggggcaggagtggtctatgtgcagctcacagtagcatgttgcaagagaggcaggcaagcaagggagggctcattggagttttccatggtcttgtatcagcaacatcaaccacgggaagcagctccaacaacaatcactcatcttctggcaatagtgtcatttctgattgcatcgattcaccagacaagccagtgaaaaggcaacaactcatacctccacaggtattggttccaccatctatgaagtcatcagcctcatactcaagcttcttgagttccgagcagcaagatgaaggaataaacaggcatggcaatcacaatgccgggggagttggtaatacaagcttcgacttcttgatcccagaggggagggtccacggtggaggtctcatgtcattacttggtggaaatctgaagaaccccattgatggaatttgaagtccaaatttactttggaatgaagaaacctattgtggaatttaagttaattattcaactgtggaattgtttataagatctggtggttgtagagagactcggtatatatagttgtgtgttgattaatagtggtatcattgtcacggtattggtttacagcattggccaatgatgcatggctgctgtactctttttttttttttagtttataattgttgtaattagaccatggttatattttctgtcattcatctattgtttgtgttgttggtggtgaggttattctctttgtccc

SEQ ID NO: 9673 - DNA, 722 bp, Gossypium hirsutum
  Clone ID: GOSHI-09MAY01-C48397_1
ccggattcggtcgcccagctcgttttttttggtgttgaatgggttttgtttggtatgattgtgttgtgcgattgtttttttttttagaggaaaatagagtggaaatggagaaaaagagagcagccagataatggaagcatcgaaggtggagtgatgaagaaactaaagccaaagaagaagagattgaaaagattgggaaattaaattgggcactcgaagaaagggtgaaatcactatgcgtagagaaccaaatatggcgagatttggctcaaaccaacgaggcaactgccaacgcgttacggaccaacttagaacaagtactcgccgccgctgccaacacccgtgaggaggcggaagcggcggcggcagacgaggtgcacgatgcacaatcttgttgcgggagcaactgggaagcaactgcggagaaaaccgtcgccggcggtggaggacgggagtgtaggaattgcgggaaggaagaagcgtgtgtgttgctgttgccgtgtaggcatttgtgcttgtgtacgatttgtgggtccacacttcacgtttgccccgtttgtaaatccactaaaaatgctagtgttcatgttaacttgtgataaacccccaaaccaaaagaaaatacccaaaaaatattttcaagaagaaattgttggattccaaaattttgtaattagtttagattaattcttttttctttccaatctttgaattctccagtt

SEQ ID NO: 9674 - DNA, 361 bp, Gossypium hirsutum
  Clone ID: LIB3135-044-Q1-K1-G8
cccacgcgtccgtggagaaaatgttagtggttatggaggaaagaaggaagagaggagcctgtaagatatttgaagcaatcgaaggtgtattgattaataaactaaaagccaaagaagaagagattgaaaagattgggaaattaaattgggcactcgaagaaagggtgaaatcactatgcgtatagaaccaaatatggcgagatttggctcaaaccaacgaggcaacagccaacgcgttacggaccaacttagaacaagtactcgccgccgctgccaacaaccgtgaggaaacggaagcggcggcggcagacgatgtgcacgatgcacaatcttgttgcgggagcaactgggaagcaacagc

SEQ ID NO: 9675 - DNA, 702 bp, Gossypium hirsutum
  Clone ID: GOSHI-09MAY01-C48357_1
taggagatggactggggggggggggggtggtagaaaaatttgactggaacctcaagtgatgaactgatgcagatgatgaatggacagataaaagtaccagggaacaggcttctagtgcttctggaaaagcattttttttcttgtctagtgatgaaaggaatggggggggggggggtgccaactttatccacctcccaccatcatctaattccttttcaaattcagtacatgcaaaatcaaggtttggatcttcatctagccgaaattcatccatgcgaagagctgaaatgtctgcatcaagcaatgcatcaaatagcagaagtggttcttcctttaaggcagggggatcctcaaactcaaagacaggaaacagtagtaatttaagttccaattctgatgctcgtaagccacgtagaaagaggagaccaaaaaagagaaagcaacaggcatgacaaaaacgcagctttggttttgtccatgagaaaacaagtggtgttatacccagacttgtattgaaattcaacaacgctttttgtagtatgttccaagaatagttttagttttggtttagctgaaatttaattattataccacctgttttttttttttgatggatttaattgtatgttggcaacgctttgtattgtattccccacaattgataattggagagggataaatgatccttgatttgagccccgg

SEQ ID NO: 9676 - DNA, 512 bp, Gossypium hirsutum
  Clone ID: GOSHI-09MAY01-C48327_1
cccacgcgtccggtttgaaaaaaaaacagagaatactcccccacccctttttctcttggagttagggtttcaacacccatcattgtcggcggttcaccgtgtcaaacggagaggggagctctgacgacgcggccacggtgtagatccggtaagactctcttcccctcctctttcctttgtctattttcgtataaaaataaaaataaaaaaacaaataatacaaaaaataaatgaaatcagaacatagaacaagactagaaataaaatcaaccttcctgtttttttgctattgtgattttgtttgctaaagttcgtgtcccccaaaaaaaaaaactacaaatggatgtttccacttttataaccgaattacatagattcggttttttggttttttcttcttggctgctatttttttctttcttcgattttcttgggttttcgcggtgccttagtttcgtctttgcagggggctgacgcgtggaaggccgatggttggtgccccaagcgtggtg

SEQ ID NO: 9677 - DNA, 427 bp, Gossypium hirsutum
  Clone ID: LIB3135-044-Q1-K1-A1
cccacgcgtccgaaaaaaacagagaatactcccccacccctttttctcttggagttaggggttcaacacccatcattgtcggcggttcaccgtgtcaaacggagaggggagctctgacgacgcggccacggtgtacatccggtaagactctcttcccctcctctttcctttgtctattttcgtataaaaataaaaataaaaaaacaaataatacaaaaaataaatgaaatcagaacatagaacaagactagaaataaaatcaaccttcctgtttttttgctattgtgattttgtttgctaaagttcgtgtcccccaaaaaaaaaactacaaatggatgtttccacttttgtaatccgagtgccgccaaagtagctcgtggatcatcgcctacgtcggagaagtcagtcacactatcatttgaagcac

SEQ ID NO: 9678 - DNA, 727 bp, Gossypium hirsutum
  Clone ID: GOSHI-09MAY01-C49987_1
ttccggtagtatgcacgggattccgatggaagtttcagtcgcattaggcgtattggtatcggatttaagtgaaaaaccatggaaaggaaagcttataacttttagtgaaagccctaaacttatattagtagaaggtgaaaacttgaaggaaaaaacagagtttgtgagagatatggaatggggtggcaacactgattttcaaaaagtatttgatcttatattgaaagtggttgttgaagggaatttaaaaccagaacaaatgattaaaaggttgtttgtgtttagtgatatggaatttgatcaagcttcaatgtcaccatgggagactgattatgatgttattgtaaagaaatttacagagaaagggtatggagatgtgatcccacaaattgtgttttggaatttgagacattcaagggctacaccagtgcctgcaactcaaaaaggggttgctttggttagtggattttcgaagaatttattaaagatgtttttggatgaagatggtgatataaaccctgttgctgttatggaagctgctatttctggtgaagagtatcagaaattggttgtacttgattgatagaaggatgaagtttctttgtctatttcaaatttttgttaaaaaggaataaaagttttgctatttcatttctcattttgttttcggatctatgtatattattcattttgttgttagatgtaatacaatatctaccctggactt

SEQ ID NO: 9679 - DNA, 363 bp, Gossypium hirsutum
  Clone ID: uC-gsflnu33B050f08b1
tataaaaataaaataaaaaaaggcagagcctccatctgtttcggccctccgagctccggcgccaaactcaaccccctctttccgatttagacccggcgatggcgctggtaagtcctcgtccttccctttttattatttatttcttatgtagaagataaaataaaaataaaaataaaatgaaacaaacaaaaacgtaaataaaaaaaatcaccttcaaaagtctgttttgttttttttttatttcaataatccgtaaaagcaaaggaagaagaagttcttccttacagtagattcggtattaaccgcacatttactttttctatgtttacatttttaacttcaaacataatttaaattggcctt

SEQ ID NO: 9680 - DNA, 336 bp, Gossypium hirsutum
  Clone ID: LIB3146-010-Q1-K1-C6
aaaaggcagagcctccatctgtttcggccctccgagctccggcgccaaactcaaccccctctttccgatttagacccggcgatggcgctggtacacagcaaggtcaacttgccatttcggtgaaaggagggctggcggtggcagacatcgggcgtggtgcgcgctgaaggcgcacatggcgtagcaacggcgcgaggggcgccagaaaccctagggtttctggccattccaaaattttttaaggttttgggccaccgggctttgtttcagtaattgggcttaatttagtttgttgggctggagcaaatttgggctttgtacagtatttattatata

SEQ ID NO: 9681 - DNA, 740 bp, Gossypium hirsutum
  unsure (1)..(740): unsure at all n locations
  Clone ID: AI725471.1
gcaaactctgaagatagagagccgctttggaatggaagaaataatccaagactcacaagtatcaaccacaagcttccaatgcctaagggaagtacaagtcactgaatgcaataagttgaaatttctcttcccaatgtgtgttgctaatagtcttgggcaattgcaaactctgaggataaagagctgttcccaattgcaagaaataatccaaggaccagtggtgttaatctcaatgtctcaaggtcttgcacgattgaataaagtaaagttgattaatttgcctcaattgaacggaagggatagaaatgacatcgtgctgacatcgccatctttacacatgttaaaagtgagagattgtcctcaattgacaccttttatcgtttcaactaatatacaattctcggacatgacagaaaagaagcaaataagcaacgtgacagtccctgaaaggagaggaggaacatcnncntgtacggaatatttaacaattttcaattttgaagagttatttgaatattctggatataatctttcaagtctaaagttcctaacgttgtccgaactaactgaattgcgggtgatatggagtggtcccacccaagtcgagcactttcaaaatctcactcaattgacagtcgacnattgcaaaggttaaaaataatcttctcacctaacaatccctcaaaatttgccacaattgtgggactttggatatattttgactgtgcaggaaatcggaa

SEQ ID NO: 9682 - DNA, 405 bp, Gossypium hirsutum
  Clone ID: LIB3146-008-Q1-K1-G2
cccacgcgtccgctctttccaattattgttgataaaggtagctctaaaaaactaaatgtgcccaatttgcaaactctgaagatagagaggtgctttgtaatggaagaaataatccaagactcacgagtatcaaccataagctttcaatgcctgagggaaatacaagtcacagaaagtaatgatttgaaatttctcttcccaatgtgtattgctaatagtcttgggaaattgcaaaccctaaagatagagagatgctttggaatgaaagaaataattcaagactcacaagtatcatcaaccataagcttccaatgcctaagggaagtacaagtcacagaatgtaataagttgaaatttctcttgccaatgtgtgttgctaatagtcttgggcaattgcaaactctg

SEQ ID NO: 9683 - DNA, 453 bp, Gossypium hirsutum
  Clone ID: GOSHI-09MAY01-C49817_1
aatggatttggttcagttgcaaaggcaactagttgactacagaacctcactctaccatgagggttttctggatgaacaattcacccaacttcagtcactccaagatgaaaataacccagattttgttgtggaagtagtgtctcttttctttgaagattctgaaagacttcttaatgaactgagtaaagcactagagcagcaggtcatagatttcaaaaggatggatgctcaggttcaccagttgaaaggtagcagctccagcattggtgctcacagagtccagaaactctgcatcgtcttccggaactattgcgaagctcacaacgtggaaggatgtcttaaatgtctgcaacaagtgaagcatgagtatggcattattaaaacccaagcttgaatctatgttccagcttgaacaacaaatcttgaatgctggtggctcaatccctgtgtaat

SEQ ID NO: 9684 - DNA, 684 bp, Gossypium hirsutum
  Clone ID: GOSHI-09MAY01-C49807_1
cgttcgggtttcacgaaggtacggcgagaagttgaagctttcagggcagttgagcttgggttctttgaaacctgctgcaacgccaccgtccacggctgctcagaaaccggcttccggtaaggcaacgacggtggagaagggacaggtggaggcagagggtgggaagaacctcaagcaggtgaacattccggctggacttagggtggtttgcaagcatttgggaaagagtagatcggcttcctccgccgtggcggcttcccctccggcgccaactttgtctaagaggagagatgattctctattgcaacagcaagatggaatccaaagcgccatcctacattgcaagagatccttcaatggctgtcaagattcttcagagtcttctggtttgccaaggtctgtaagtgacccatcccatgaaaaatcaattaatttgtcaagaaactcatcaccagatgaagccaaagcatgaacactgggaagagagaaaaaagcgggaaaaatttgtccttcattaatgaatggatcgattatctctgtcaacatttgtttttgttttttaatccttttactaattagccataggcataagctagtcatcgttgttctctagtctattatcccctactgtatgtaaagctcctctttctgtgaaagtgaaagtaagaatcagatctttgtatg

SEQ ID NO: 9685 - DNA, 648 bp, Gossypium hirsutum
  Clone ID: GOSHI-09MAY01-C49657_1
cccatatttccttgttctttgtcttcaattttaaaaaacaaacaacttccatttttatttttattttattactaaattctacttattgaaaaaaattatttgtttttttttattatcttttatacgcaaatatatataaaaaatccatttacaaacatgaaaggtgaatatttagaatccaaaaatcagaaccccaataacatgttctcaaagctccaccaccaccagcaccaccctcatcaacatcaacatcaacatcaaccccaacaccaaactcaccctttctctcatcacttccaactctctcgtgattctcagactcccgactctgatgacactacccatacccctcccaaagatcttaccaccaaccacagcccttctctccccagtggtggtggcaacggcggtgcttctcgtggtggtgccaacagtggcgacggtgctagcatcgaaatcgttcgtagacccagaggtcgtcctccgggctcgaagaataagccgaagccgcccgtcatcatcactcacgagcccgaccctgcgatgagtccttacattctcgaaatccccggagggaacgacatcgtcgaagctatctcccggttctctcgtcgcaagaacattggaatctgcgtgctcacggcatct

SEQ ID NO: 9686 - DNA, 976 bp, Gossypium hirsutum
  Clone ID: GOSHI-09MAY01-C49297_1
gcgttcgcccaacaccactatcagttcttttctgccactccaattccatcatattcaatctctcagttttattttacttttttttttaagtttaaataaaaataaagaataactaatacttgataaatcattctgacccaaaactctagaacttcatactgtaaccattatcttcaaccttttttttttcaaaaaaaaaaatctcaagcttttctcattttagtagttatttgctgagagacgttagcttttatggatgaaatatacgggttctactccatgggagatcagtacgttgacaacgccttgatgttaccggagaacatgatctttccttctgattaccaacctcggctttgttcttccgatcgggttccggcgtttggatccgacgagttaatctctgtcgcctccgccatctccgaagcagcttatgtcacccctcaaattcaaggagaagtggacgtttcaaacgtgatcaaagcaaaaatcgcttctcacccttattatcctcgtttgcttgaagcttatattgattgccagaaggtcggagctactccggagattgcgaggatattagacgaaattctgatggagaccgatgttaacaagcgggatatcctgccaacctgcttgggagccgatcctgagctcgatgagttcatggaaacttactgcgatatgttggtgaaatacaagtctgatatttcaaggccttttgatgaagcgaccacttttcctaaacaagatcgagatgcagcttcgaaatctctgcacgggtgcctccattacaggcccttttggtgaacggtgttcggttttatttgaatcaacagaataatcccctgaaccacccatattaagatagttccccatttcctcgcggaatttcctgtagtatatctaaagaagcgcctgtgttgtacgctttttgttggacgtttgttcttcctatggatgttttagttctaaccat

SEQ ID NO: 9687 - DNA, 926 bp, Gossypium hirsutum
  Clone ID: GOSHI-09MAY01-C49247_1
cgccccctcgcccgctcccgccccccccacctcctccagacccttttgcaccaccaccaccaccgcacttatatggtgcacccccaccacctccgccttactatgctgcacctcctcctcccgcaccccctcatcaccaccatccaccgggtccaccgccaccgcctcacgctttttcaccacctcctggacctcctccaccaccttattttgatccatataggccaccaccgccttggaatcgccctcctccaccatactagctagctatgaataattgccttgggagttttatatttcagcagtttacgagctttatctccccatgacgcaattagaggtcatgtagatttctttacccttcttccttttccccgctctgtctgtaattttccttgtttttaatagccttgtgaatcttatttctaattatatatgtggctgcgccagaaaaaagacgatgctattatgtcccccccccccaaaaaaaaaaactaggagtagattggataacaaattatgcagtaaaatagatgatgttcaacaataagaaaatccaactgagcaggtggaagagcccattttttatgcatttcccgtacaatcattttagtgttgcttttgtttgcatctgcttcagtcgtattgtgattttctcagctgtagactcttacaaggtacgaatctcgataaagttgatcaaatcaacaagttcaaagttaacaaaaatagattatgatgatatatgaaaccgaatggaactgtggaaaatagagtaggctgtccaattgaatccatgaagagatcttcaaagaattcaattgaagactataatcaatcatctcagataagctcttggcaaattgaagttacaacattagcttgaataattgctaagaatcaaaccaacatagttgagcgtttaa

SEQ ID NO: 9688 - DNA, 694 bp, Gossypium hirsutum
  unsure (1)..(694): unsure at all n locations
  Clone ID: LIB3583-034-P1-K1-C4
taaacattctgaattttattttttgtttaaaaaaacctaaatactttatgctttccatctccctcactctccctttactcttcagtcgaaaggctaatgcccaagctctccattcgcaaccagcgaaggtcctcctacggtgactccggtgagctgcttcccctttctcttattgcttatatacagtagataaaaaaaatcaaagaaaatggcaataaagttgaaagaaaaatgaaactttaaatcacctcaaacaaatatggttgctatatctttttgtatgtgtttgatattatctctatcttcaatttttctaaaaaaaaaaagtccaaaaaacccaaccctttacaatgaaaaatttggaggctttatagccgaatacaagtagttttcctgctattttcttgctcaaatcgtaggtcgtggagacgtgaatggacgtgggcgagcaacgaactagttgggggtcgtgcctggtggtgccaccntgttgtgtggaaaggcgctgaacgtgggggttgcggcgtgggtaacctagggattcctaagttagctgactattttgcttagaattttgggtcaatgtattgagcctgtttaatttaggccaaagctgtattttgggccgacatttaactngngcttcaaaatctatattgggactgattttattttgattttacagaaatttaaa

SEQ ID NO: 9689 - DNA, 442 bp, Gossypium hirsutum
  Clone ID: LIB3148-033-Q1-K1-F6
ccctttctcttattgcttatatacagtagataaaaaaatcaaagaaaatggaaataaaattgaaagaaaaatgaaactttaaatcaccttaaacaaatatggttgctatatctttctgtttgttttgatattatctttatcttcaatttttttgaaaaaaaagtcccaaaaaaaaccccatacaatgaaaaatttggaggctttatagccgaatacaagcagttttcctgctattttcttgctcaaatcgcaggtcgtggagatgtgaacggacgtgggcgactaacgaacgagctgggggtcgtgcctggtgtgccacgtgtgtggtggagaggcgttgatggtcgtgggtggagaacgtgggcacatggtggctgaagcgagtcagtttctctctttgctgaaaaaattttgtgggctaggggttttttaaaaatttggg

SEQ ID NO: 9690 - DNA, 654 bp, Gossypium hirsutum
  Clone ID: GOSHI-09MAY01-C44817_1
ctcaggtcatagatccagagtttgcattttatggaccaatgggatttgatattggtgcttttattggaaacttgattctggctttctttgcacaagatggacatgctggtcaagggaatgacagaaaatcatacaaagagtggatattgaagacaattgaggatacttggaatcttttccaccaaaagtttaccgcactatgggatgaacacaaaaatggctctggggaggcttatcttcctgcaatttataacaatcctgagcttcagaaacttatacaggaaaagtatatgaaggaattgttccacgatactcttgggtttggtgctgctaagatgataaggagaattgtaggtgttgctcatgtgcgaggattttgaatcaattaaagaagctaacataagagcagatttcgagccaacgggctcttgaattaggcaagacacttctgaagaggaggcgagagtttgtgtcgattagtgaagttatttcagccatgaagcacgtccaatcatgatggaaatgctggaaactgctgtgcacgtatccataaaagcttttgcgcttaaatagatggaaggttttacaggatccataatttaataaagttttcatggtccttgaggcataggcctttgattgtgtgtgatgagc

SEQ ID NO: 9691 - DNA, 595 bp, Gossypium hirsutum
  Clone ID: GOSHI-09MAY01-C44437_1
gaggggtgtggcgccaaaggggcgatccacaggagggaggacctttaaaaagtgaacttttgaaaaaaagaaagctttattaaggcaacttctgggttcaacttttgaaataaacttgccaatgattttcccccttaaaaaaacaccaatgacccctttgatagtagtatgggattattttaagttccccccagattagtccccgtcaaaaggtacatttggattgtagttaaaggccaccggtgacgttttataatttgaggcccccctaaagtggtggaggtgtctttggttcagggatctaagtggaccgacttaaatttttctagtaaatttatattcccctgcccttattattaattggtttaagattgggcggttagcattgtatcaaaatccaagttgttccttctgcctaatcccatgtgtaatctataaccctttgagggtgttcagtttttccttttctttcttttcttttctttttttttaaaaaaaaattttgagttttgtaaaaaaaaaaaaaaaaaaaaaaaaaaaaaaaaaaaaaaaataaaaaaaattttgagggccgtcctttttgaaggatcctttc

SEQ ID NO: 9692 - DNA, 292 bp, Gossypium hirsutum
  Clone ID: LIB3148-030-Q1-K1-D6
cttcatttgtaataataatacagttaggtatattaagatagatacccaatctttgtaggaaatttgttgtaactttatcacagggttatctccaatttagcattgggaggaacaaagaatgatctgcaagattgctgtttagattttctttatagatgtagctaatatacgtgtaaaactatgtaaaaggttccaagtcgtagcatgtgaaaatctcatgtaacttgaacgaagctgaaggtgaggactgtgcagtaatttatttataataaaaacttaattggttcaactt

SEQ ID NO: 9693 - DNA, 278 bp, Gossypium hirsutum
  unsure (1)..(278): unsure at all n locations
  Clone ID: LIB3148-034-Q1-K1-G3
gaaaaaacttctgaatcgtgccaatacctctcaatccacttcttgttgaggatagtatgcatgtatgtatttcagcttttgcactgtataaatgtaagcttcatttgtaataataatacagttaggtatattaagatagatacccaatctttgtaggaaatttgttgtaactttatcacagggttatctccaatttagcattgggaggaacaaagaatgatcttcaagattgctgtttcttaaaaaaattatcngaaaaaaaaattcngaaaactttt

SEQ ID NO: 9694 - DNA, 426 bp, Gossypium hirsutum
  Clone ID: GOSHI-09MAY01-C44647_1
gggaaacaggcactctcggttacatggctccagaggtccttgatgggaagccttataatcggaaatgcgacgtctacagtttcagtatatgcttatgggaaatatactgctgtgacatgccttatgctgatcttagtttcgctgaagtttcatcggcagtagtatgccagaatttacgaccagaaatccctagatgttgcccgagttcattggcaagcatcatgcgaaaatgttgggatgcacaccctgaacgacgccccgacatggacgaggtggtgagattgttagaagcagtggatacaagtaagggaggtggcatgatacctgatgaccaggctcgcggatgtttctggttcacttgccttggtccgtgacacttaatgttgtcctacatgcttttagtttgagagagacagacagtatttg

SEQ ID NO: 9695 - DNA, 483 bp, Gossypium hirsutum
  Clone ID: GOSHI-09MAY01-C44157_3
tggaagtggagggtatcaaattcctcgtgggtttctgttcaccattgtgccttgcgcgaactacactcaagagatttaccaatggttggggtttcaatatcgctacacagactgttgctggctacgtattccttgtggttgctacctctatcatgacaaattgggcccttgcaaagcaccgtcggttgaagaagctattcgacggtaaagatggaaggccgaagtacccccgaagatgggttattcttcctccattcctgtagaaaggatcgatgagcatcgtacttttcgagatattaaatttacgacgttgaaacatggtttccgagttcattgaaagatcaattcttgttagattatggaattttagtatgtgggcatgcattaggatgcttttttgcttatgtaaaatcattgccggtttaaactattgctgttggttattatttcaattgatggattttcattttcttattttaaatc

SEQ ID NO: 9696 - DNA, 1301 bp, Gossypium hirsutum
  Clone ID: GOSHI-09MAY01-C44157_1
tcctcgcgtccggccccattccataaactgtcaccaccttcgcttactttcctttcaaagttctaatctttgagatctccgaagatccaaagatccaactctcccaaaccttaaaaagcttcaaagggtttctccctttagccataacaaaaactgggtctcatttgttttgatctcaaaaaggatgaaggtcactctagtttctcggagtgggagagagttcatcaaaggtggccttgagcttaatgactcggctactgtggctgatctgcaggaagcaattcacaagagaactaaaaagttctatccttcaagacaaagactaacacttcccgtgccatcgggatcaagggagaggcctgtcatccttaactacaagaagagtctcaaagactactgcgatggaaatgagaacaccttaaccatagtgttcaaggacttgggtccacaagtgtcgtatcgaacacttttcttcttcgaatacttgggtcctttgatcctctaccccgtcttctactacttccctgtatacaagtactttggatacgaagaaaagcgtgtcatccaccccgttcaaacatatgctttatattactggtgtttccactacttcaaacgaatcatggaaacattcttcatccaccgtttcagccatgcaacgtccccactatcaaacgttttcagaaactgtgcttattactggaccttcggttcatacattgcttactacgtcaaccacccactttacacacctgttagtgatcttcagatgaagatcgggttcgggtttggtatagtttgtcaacttgcaaacttctattgtcatattatactgaagaatctacgcagtcctgatggtagtggagggtatcaaattcctcgtgggtttctgttcaacattgtgacttgcgcgaactacacaacagagatttaccaatggttgggtttcaatatcgctacacagaccgttgctggctatgtattccttgtggttgctacctctatcatgacgaattgggcccttgcaaagcatcgtcgactgaagaagctattcgacggtaaagatggaaggccgaagtacccccgaagatgggttattcttcctccattcctgtagaacggatcgatgagcatcgtacttttcgagatatgaactttacaacgttgaaacatggtctccgagttcattgaaagatcaattcttgttagagtatggaattttagttggtggtgaaccaatataatttacttgacatgcgcattaggatgcttttttgcttatgtaaactcattgctggttt

SEQ ID NO: 9697 - DNA, 442 bp, Gossypium hirsutum
  Clone ID: uC-gsronu33B149g05b1
gcatattaactgtttggcaatctgcatatcatcttggataagttctttaagacctatgctcggggcttatactttagttttcattgcgttccattattccgtccatggtctatttttaagtttcccttaccttttacttcttgttgttcacagctattcgacggtaaagatggaaggccgaagtacccccgaagatgggttattcttcctccattcctgtagaaaggatcgatgagcatcgtacttttcgagatattaaatttacgacgttgaaacatggtttccgagttcattgaaagatcaattcttgctagattatggaattttagtatgtgggcatgcattaggatgcttctttgcttatgtaaaatcattgccggtttaaactattgctgttgggtattatttcaattgatggattttcattttcttattttaaatc

SEQ ID NO: 9698 - DNA, 391 bp, Gossypium hirsutum
  Clone ID: uC-gsronu33B169e02b1
cccactcgtgcggcaggaagcacttcacaagagaactaaaatgttttatccttcaagacaaagactaacacttcccgtgccatcgggatcaagggagaggcctgtcgcccttaactacaagaagagtcttaaagactactgcgctcgaaatgacaacagcttaaccatagtgtgcagggacttgggtccacaagtggcgcatggaacactacccttcttcgaatacttgcgtcctttgatcctatatcctgtcgtcatactacttacctgaatacaagcactgtggataccaacaaaagcgcgccatccaccctgtttaaacataggctttatattactgtgtgtttgctgcatttgagcgaaatgagctacatgctcttatttccgagtg

SEQ ID NO: 9699 - DNA, 556 bp, Gossypium hirsutum
  Clone ID: LIB3825-026-Q6-N6-F12
gaagcttgttgccaagtttcttttatttctctgttaccaaattgcttttacacgacgagtattatttggagctcgtatcttcatccgtttcagtagtcactacccaagcctgatgcgagagaactaattgctacgtaccgcatttggattccgaatcaatgacggaaacctattagatattgatacgagacatggcctcgactttcccagaattttaacagcatctaccaacctggcacgcaagctgaaacaaacactcgttgaatgcactaaacaattttaataccatgtcaggcatcagttgccttatccgtatctccagttttaccttccccgccaatatggaggccactctcaatcttacgggcaacctcatcagccacagccttcactttcccacttggttcgcttccaagtagatcactctcatcatgagtcactggacttgtctgccatattctaatggtaccatcttcagatcctgatgcaaaggacccccctcctggtgagaaacgaacacagtggacaggaccatggtgacccttgttgcaaccta

SEQ ID NO: 9700 - DNA, 399 bp, Gossypium hirsutum
  Clone ID: LIB3148-022-Q1-K1-C2
cttgcgtgccaggtttgtaggattatggtgtctttccgcacctttcctgttcgtcttttctatcgaaataaaatgaactgccaaacttcctttaattttcaataaagttggaagttttgatcttaaaatcaatgaacgttttggctttgtttaaggttggtagatgctgttaaaattctgggaaagtcgaggccatgtctcatatcaatatctaatagttttacgtcattgattcggaatccaaatgcggtacgtagcaattagttatcgcagcaggcttgggaagtgactactgaaacggatgaagatacgagctccaaataatactcgtgtaaaagcaatttggtaacagagaaataaaagaaacttcgcaataagcttcaaatataatgcttttat

SEQ ID NO: 9701 - DNA, 545 bp, Gossypium hirsutum
  Clone ID: GOSHI-09MAY01-C44177_1
caactgtcacagcaaagcaatgggctgaagcacttgaagctgccatcgctgcagtcagtaaatatggtggggctagtactggatatcgcacgttattggatgctcttatgcctgcattagcagttcttaaggagaggttaactagtggtgaagattcttgtacttcttttgttctctcatctgaagcagcagtggcaggagctggatcaactaaagacatgcaggcccaggtgctgggcggtcaagctatgtgtcagcagctatacttgcaacagttccggatcctggagcgatggcagcagctgcgtggtacagagctgcagctttggctgtgaaggataaattccatccttcttttaactcgtctatcaataaatcagaatcataatattcatttgtagtctttctttaatcgaatctaccaaagcgttgcttttgtggttttagccttgcttttcaaaagtgttgtaaaatagaaaatatgtatttagacttaaattataataaaaattttaaaattattaaattaagtaaattcaaattat

SEQ ID NO: 9702 - DNA, 479 bp, Gossypium hirsutum
  Clone ID: GOSHI-09MAY01-C44057_1
ccacgcgtcgcttttggctaacactgttatcaacttttttaacaacggatatttccagggacccggggacgcgccgttggaggcgggttcagcttgcacggggattttcgggtcgggttcgtacccgggttatccgggtaaactgttggtggagaagagcaccggagcgagctacaatgccaacggcattaacggccggaaatacttgttgccggcgatgtgggatccgcagacgtcgaggtgcaaggcgctagtttgacggggacaggtggcggaaatcagtggtgaaatggggatgtaatgtagatattagggtatgggtatttatggttgatcacgtgacgggtaaaatttgttgtttggtactgggggagaaaaggaattgtaggttgggggtaaaagaaaagaaaagatgcgaatgtaagataataatgataccgaatatagagcgattaaaagaaaaaaaaaagacgacacgc

SEQ ID NO: 9703 - DNA, 472 bp, Gossypium hirsutum
  Clone ID: GOSHI-09MAY01-C44067_1
ttagatttcgatttggcccccttatttaaagactcaatgcaaatcggtgtaaattgtaaatacattcatccagtccccttgttctctccaccatttgttgtcttttaaacctaccaaataaaaatggccaaaaccatttttgcattatcaatcttgcttggattcaactatcttgctacgaccgtgaatgcctacgcggcttctggctggactaaagctcatgccaccttttacggaggcagtgatgcctcgggaactatggggggagcttgtggatatgggaacttgtatgcgactggctatggaacaatgacagctgctttaagtaccgccttgttcgatgatggagcttcatgtggacaatgctacaacatcaagtgcgattatcaaacagacccaagatggtgcataaaagggaaatcagtgaccattactgctacaaacttttgccctcaaactttgcttttctaac

SEQ ID NO: 9704 - DNA, 584 bp, Gossypium hirsutum
  Clone ID: GOSHI-09MAY01-C44317_1
cggcgcgtgggttttaacgttcccaggcagttcccatggtctgctccaatactttggttgcacgagaggattctggaggagtcaaagaaaagggataggaaaaatgcttgtggcctgttgagggagatttatcagatggagaagtgttctcggttgttggcggccgcccccgcttccgtgcagtttcctttgagtgaggacaaggaaagggaagttaagcagagagtgaaggaattggagcaggttcttgatgcattgaaggaagatttagaaccgctggaaaagctggttagggaagtgttccataggattgttcgaagccggactgaagggcttgattcttttgcaaggggacacaaccctgagtgaaacctctcttgttgtgttggttgatttacaccattagtgtcaaatgtgcaacttgcaaatatgtctgtttttggctttggggaagtcatggatcatgaagatgaagatggataaaagggcttgaggtatgcaccaccaaaaaaaaaaaaaaggggtaagaaggaaaaccataagaaaatagagatttgtttgtatttatcaccatatatcagtgt

SEQ ID NO: 9705 - DNA, 681 bp, Gossypium hirsutum
  Clone ID: GOSHI-09MAY01-C44327_1
ctcaagttcctcgccgtctccgccgccccttgtggtcattgtcgccagttcctccaggagctacgcgccgcccccgatgtcaacatcctcataaccgccaccgagaaggaaaaagaaaacaaaacgatcaacaatcgtaacgataaagacatgcaatttgctcctttatcttattttttacctcacaggttcggccccgatgatttgctggaaaaagacgtccctcttctcctcgagcctcaccgaaacggcttgtcgttttgctccgatacccgcaacggcgaaatcaacggcgacggtgacgattcaaagtacgcggctctggaagcggcgaatgcatcccacgcgccgtacagcgggtgtccatcaggggtggcgttagtggacgtggaagggaagatatacaaagggtcttacatggaatcggcggcttataaccccagtttaccaccggttcatgcggcgctcgtggcgtacgtcgcgagcggtggcggcggagggtatgagaggatcgttacggctgttctggtggagaaagctgatgctgttatcaaacaagaacatacagcgaagctgcttttacagtgtatttcgcctaagtgtgagtttaaggtggttcattgtaacaaaaacatgttaaaatgtgagtatcaagtataatttatatatttttatatataa

SEQ ID NO: 9706 - DNA, 623 bp, Gossypium hirsutum
  Clone ID: GOSHI-09MAY01-C44297_1
cccgggttctacccacgccgtccgcggtacgcgtggtgcggtacgcccgtgggcggaccgcgtgggttagatattcaacccagttacaccgcagtgctcaagggtggtagtggcgtgccatcatatcatatcggaaagaacgccgagaggaaggaaacgaggcagatggattttatggaggaatcagaaaactttgcagtgaggaggagatttccacatggaagcgcctttggccatctgaaatcctggagtaggcagcctgcattgcgaaaaagtcaccatcctttctctgcaaaaattatcaagtttttgctctacaaattgatgctcttggaaactgaagatcaagttgaaagttgcatgaatgtggagtgcgcagtgaatgtaaaattcccatatttacatgccaatatagtatatcccactaccaaggttttgttgaaaaccatttggaattggaaaccccattgattatggaagaaatatgtataaccttctagagctctgaaaaaaaaaaaaaaaaaaaaaaaaaaaaaaaaaaaaaaaaaaaaaaaaaaaaaaaaaaaaaaaaaaaaaaaaaaaaaaaaaaaaaaaaaaaaaaaaaaaaggggggggcccctttt

SEQ ID NO: 9707 - DNA, 964 bp, Gossypium hirsutum
  Clone ID: GOSHI-09MAY01-C44287_1
cggcaaggataccaagttgcacctgcaccacaagttgcacagcagaagaatcaccaaatatctgatgggaagagtggatctagttcaaccagcaaggatgatggaaaaaaggcaagttcggggaagtcgcatacaacaaatggtcagacatatttttttgacaattcagctagatctttgaattttgtatcctctaccgtcactggaaatcggaccccgcgcgcccgtacctccactacagtagccataagtcctcccgttgttgctaattcatcaaattcccatcaacagctgcttcaacttcagaagcagcacatggtgcaacaacatcatcagcaacctgctacagcttctcgaagcaaagttcagacaaccaacaccatgcctgcatcttccattgctgctaaattttctagcaatgctgccatatacacgcatactgtgccccaaagcaaccctgctgcacaatcaaccccatggaaaaactcagctagaaccccagcttcccctgctaccaatgttcggccttttccccagcaaccattgaggcctccacaaggccaaacacaaatatcgtttggggtaaataccaagtccgtgttatcgcctaaggcacaagaaatacctacagcagccagtctgcatcgcctatgattgtttggtttcacgtagctgtggcaactcgagaacaagctcaacaagcaacacagttggtttcatcagttcctacactgccatcacaacgggacacagatttcttctgctcgtaatcgccaaaaatcgtctctggtttgtggaagaaacgtgccttcaatctttgagcacatgcaccagccaccttttctacagcagatgccttgttattacaggagacccccatggaattttcaagggacgaggtttttgaggggaccagagctcttcatgtatgcctgaggaactaaagatattaattgtctgacag

SEQ ID NO: 9708 - DNA, 395 bp, Gossypium hirsutum
  Clone ID: GOSHI-09MAY01-C44257_1
atccgtttgcctttgaagattcttaaactgtgttcaagcatttgttgttgctcgtcttgatgttattcgagctagaaatcagcaatggaggaggggctggtatgcatcaaagcattttgttcacggtactagtggttctaggatggattccttctttatactgcttttgctgttcagagatgaaaagaataacccacttcgcttgctgaaccgcactctggcaaatattcaattgacgtgcctgttatggtttatgttataaatttgtgcatatgcttgttttgtaccactgcttgtctagttaactactcaaatgtcaaactgaaccgaaaatagaatataagctgcgttgtggtttgactggcttaaaaaaaaaaacaaccaaaaaaataaat

SEQ ID NO: 9709 - DNA, 852 bp, Gossypium hirsutum
  Clone ID: GOSHI-09MAY01-C44217_1
attggtaacctatcatcatgtatatatattcctaggaaatttatattgattgtatctgttgctgaagaacattgttgtgcttaggactgcatttttgttttgggataatattgaagagtgactgatggtttgatcagtttttttacatcttgtttgtgcatgcatctccagtccaacatgacaaatattgcaccattagctgatattaagatttgttttctctcctccccgcagcattggtgggcaatgtattgggttctctcactctttctgttgatcacattttacaggctctatttcggaagattgcagctgcattgcctggaatggaaacactatcttcaacaaagcatgaagacatggtggatgtgaatcttaagtcgagcaattcaaatggatcgcagtcacaacaagagtcaggaggatgtgcctgctaatacccaaaatcattcatctcagcatttcttttgtgcttccatgatcctactaagtgcatgtaagaaatcttgttttgaagcactgggtgtggttgaatatttgagcatataacttgagagagaagatatttggtatggtagttaggctagtcctaagtcctaaccagtcatatatgagcccggttcttgtgatctcaagcaattatgccagtttgattttgcttatttatattaatagaggatttgctttgctcttgactatgtaaagaatattattagcttcactttaagcgattttcctcgtcagtgatggtgaatgcaaaggtaagcgccttaataataatcaaacctttcattacatgtccccagcttaagtccttgctttgggccctcgatgtagtggttatttaagtcc

SEQ ID NO: 9710 - DNA, 440 bp, Gossypium hirsutum
  Clone ID: GOSHI-09MAY01-C45977_1
tcttcgccatccaatggttagattgacttgactgggaccgatggattgaccaacattaaatctaccccacttcaagcactggtctcacctcgtcttgctcctgagctttataactaaaatccagttgaagattccagtaatcaagcatgaagaataagaaagtttaaacattttgattgttacgttgtattattatttaatcaaggtctctctctttgcggaattaataatggtaaaatagtgaaacaagcaaattcttgttgggtaaaacatctagatttgagtgttgcttatatggtgaacatggaaattcttaagtcaaatttaagttcaatattaaattgtgaaaaaaaaaaaaaaaaggaaagaataataagcacaaaaaagaattcagagtagtggactaaactttttgcaacaaaattctaactttatttgaa

SEQ ID NO: 9711 - DNA, 506 bp, Gossypium hirsutum
  Clone ID: GOSHI-09MAY01-C45817_1
tgacactacaaggatgaactactacaaggcttacctgactcaactgaaaaaggcagtcgacaacggagcaaacgttattggctactttgcatggtcattgctggacaattttgaatggagattaggctacacttcaaggtttggcattgtgtatgttgattactctaccctcaagaggtacccaaagatgtcagcttactggttcaaacagcttcttactcggaaaaaacattaagcgggcagagtttatgtctcagtcatgtagagtaagtgctcatggaagaaaccaagtatggtgaggccattcctatgctttagtcctcccatagtatgttctttccttcctggcttaatcaataaaagcatgctaatgcttctcagttcatcgctctaaaaaaaaaaaaaaaaaaaaaaaaggaaaaaataaaaaaaaaatatatgtaaaaaatttataggaattttactaaaacaaaaaaagataattatttgatatgtaatttttaaaa

SEQ ID NO: 9712 - DNA, 759 bp, Gossypium hirsutum
  Clone ID: GOSHI-09MAY01-C45517_1
tttctttcgcgtgggtaaattctgtttgtgtgggcaggggcaattgtttgtataattagaggagaaaaatgggtgttttcacaaaagaagcagaggtgagtaccccactcccaccagccaaggctttcaaggcctttgctgtagatatcgaaaacctaatgcccaaagttgccccacaaacagtcaagagcatcgaggtccttgaaggaaatggtggccctggtactatcaggaagatcacctttgctgaagggcatggattaagtcatgcgaaacacaaggttgatgtattagacaaagacaacttggtgtacgcttacactgtgatggaaagcgatttttttaacaagaagatcgagaaaatcagttacgacatcaagtttgttgcagcagctgatggagggtcaactgttaaggtagctgccacgttttacaccgccggtgacactgaggtcactcccgacttaatggcccagatcaaggaagcttccgagaagcgagcccttgttatgaaggctattgaaagttacatcttggcaaatcccgatgcctaaaactgtgctttcatggcgttaatggtgggtggtttcgtttgttcatatgttgtgttactcaaaagcagtgtttgattgggtaataagtgatttgtctctctagatttgatcatctctatttctattgtaataaaagtctttggagttgttattatgtttgatatatgagagtgaagaatatacttgcaggtttaaaaaaaaaaaa

SEQ ID NO: 9713 - DNA, 608 bp, Gossypium hirsutum
  Clone ID: GOSHI-09MAY01-C45717_1
gtgagcaatatgttttgcccaagtttttcaaaggggcacaccttcaagttttggatgctgccgagtacgaagaatcaccggatgtaccgttcaaccttataaccgaaggagagctggttacgacagcttcctttgctgatgatggagagattttagacggaatgattacccgaagccggggtgagattagacacatgtgcagcccgaaggtaacaagctcgtccggaacaactccgtccaaagaatttaagagcattcaaagcccacggttcttcggaaaaggtatatagccccaggataagccaactgagaggtgagctaagtcctggaaatgctggaagagggccatttagtcctagagccaatgaaaagccatcaaatttaggcaaaggttagcaagtaatggaccaagttgctaaaagaatatatatacatatatgagcatgcagttcaagaagtctgctatgcatatcccatactaatcccctgattttcgctatcactcatgtaaaatatattctactactaataaaaatgccgttgattagtggaaaaaaaaaaaaaaaaaaaaaaaaaaaaaaaaaaaaaaaaaaaaaaaaaaaataaaa

SEQ ID NO: 9714 - DNA, 619 bp, Gossypium hirsutum
  Clone ID: GOSHI-09MAY01-C45657_1
tcttatggaatttggagattttaagcttaccatatggggaatgctcggaacttatggctttgaaagaagaattctggatactgcaaaatctttgattgaggatgacacattttacacaatggagcttactgaagaatgggagccttctcattggattatgcaccatcgaagttcattatgttgtatatgcaacagccttcttaccaagacctcttctagctttcgtgttcgggttttcagttgtggtcacgcaactcatattcaatgtgagcttctggaaaacgagtcatcaactagaggcttgtcatctggatgccctgtttgtttgcccaagaaaaacactcacagatctagaagtaaaaccgctcttacagagaatggtttagttagttcgttgccctcaagatcccaaccagcacatggatcaacattacaccctcacgaaaacgacgcactagataactcttacggccttcaacaaatatcacggtttgaaattttaagtaaccttcaaaaagaccagagattagcccagatagaaaatttaccacagttgaggcttgcaccgtcggcgatttatcacgaaaaagtgaagaaaggaagtggagtattagcagca

SEQ ID NO: 9715 - DNA, 321 bp, Gossypium hirsutum
  Clone ID: LIB3148-038-Q1-K1-E1
tcggccacgccttccgccaaaccaaaccaaaaaaaaaaggcttttgaaaaggttggagtttggggtttcaaagtctccaacatcctcaagtgaaattgcattaagtaaggcagtggaagagcccaattttttagggaatatacatatcttaaacatgttggaagatgtgaatgatattccccattcggagatttgtacatggctccaatgtattggattttttttagtattttatttccatctgagtaaagggacaattagaactattatccagtgtgttatgtagataaataatataaacggcatttgaccctttgtttc

SEQ ID NO: 9716 - DNA, 328 bp, Gossypium hirsutum
  Clone ID: LIB3148-038-Q1-K1-E2
cccacgcgtccgacaaaacaataacaaaaattttttgtcttatgaaaatgtttgagttttgagtgggagaagtcttcaacatccttaagtgaaattgcattaggtaaggcagtgaaggagcccaattttttagggaatatacatatcttaaacatgttggaagatgtgaatgatattccccattcggagatttgtacatggctccaatgtattgtattttttttagtattttatttccatctgagtaaagggacaattacaactattatccagtgtgtaatgtagataaataatataaacggcatttgaccctttgtttcattataaa

SEQ ID NO: 9717 - DNA, 610 bp, Gossypium hirsutum
  Clone ID: GOSHI-09MAY01-C46867_1
attattcggtttaaagcaagtccttgagggttgttcgttcaatgtgacctttacgccatattaaggatgggtatcttactggcgccaccagtaggaaattcaatggctcctcatggtgcttggaagagaacagagttctttttgaatcatgaagcacttcaacaggtcatcagagttgatcagagacaaattacccggagcctctctggaagaacttcagatgtaacagatatggacaaaagggctataagagttgatattccagatattgtttctgtatcagcatgtgctgatctgactttaccaccaggtgcaggtctctgtatcgataccacctctggtccagttttcttggttgctgactcgtgggaatcactagacggatggcttgacgccatccgcttagtttacacaatttatgcacgaggtaagactgatattctggcgggtatcattacgggctaattgttgctttatgtaaggacctttcatttttttttttagtttatttgcattactttcagatttcctcggatctaattttactcctgttattatcaaaatttttggaatactgtctggttaagctatttatttggcatctcaactg

SEQ ID NO: 9718 - DNA, 216 bp, Gossypium hirsutum
  Clone ID: GOSHI-09MAY01-C46767_1
ggtcgaccacgcgtccggaacattcttcgataatgaatattcatcatgaaaagaatatagacgaacaaatgtatctggagcgttatatatgccagatggatcagcatcctgaacaatccatggatgctcaagaagcttatgtagcgggaggcgctgggaggaatcttcgacaagcatctgtaaatgacgtggaaatgtgttcagtatatgccagat

SEQ ID NO: 9719 - DNA, 422 bp, Gossypium hirsutum
  unsure (1)..(422): unsure at all n locations
  Clone ID: uC-gsronu33B125e10b1
ctggaatggtcagatggaaaacacattgttggtggtccaatagctttcagttggacataaccatgacaacaattaggttcatgatactaatactgggactttcaagtgccctcaaagcaccagagacctctcttatagtatatgaatccatctcgtactatctcatattacagcaacgcacaaagcagctccaactgtattcataaatgctctccaaaaacaattaggggacagtaaattgggtttaaaaaaaaaggtcagggccagctcggggaataattgtatagtggcctacctgtataaggaactagcatgttaatttaaactggattcctagttataagtcatgttttacaaannaaaaaaaaaaaaaaaaaaaaaaaaaaaaaaaaatttttaaaacacaaatttatttttggtta

SEQ ID NO: 9720 - DNA, 330 bp, Gossypium hirsutum
  Clone ID: LIB3148-057-Q1-K1-G10
ctatctcatattacagcaacgcacaaagcttctccaactgtattcataaatgctctccaaggacaattaggggacagtaaattgggtttaaaaaaaaaggtcagggccagctcggggaataattgtatagtggcctacctgtataaagaactagcatgttaatttaaactggattcctagttataagtcatgttttacaaatattgcatcttgcattcttccaatatccttgtctatcatagttcacactggtgagaaagataaaagagggttattgttattatgtttgaaaaaaatacacacaacgagaccggtatactttccaaaaca

SEQ ID NO: 9721 - DNA, 406 bp, Gossypium hirsutum
  Clone ID: LIB3148-056-Q1-K1-E8
ccgaccccgtgtctctgtctctgattaatccctaacctaacgccttcccttcccttttttcccccaaatcggaaacccacctcgcccgatccaccattccacctctggtgaccggccttccacgactccacctccgctctaacggtgcttccagcgaatctagccttcaacatcttctacctttgaatttcaaaggtcttctccgttataaactagatgctgatgaacggtgtaaaatattacatagaaatttttgggacctacctgatgatgcatgcaatattcttccagcattcaaattgagttattatcatctttcatcctatttaaagcgttgctttgcttattggtcatattttcctaaacattatgaatttcaaatagaaaaactcattcatttgtggat

SEQ ID NO: 9722 - DNA, 290 bp, Gossypium hirsutum
  Clone ID: uC-gsronu33B048g01b1
aacccaccttgcctgatccaccattccacctccggtgaccggccttccacgactccacctccgctctaacggtgcttccagcgaatctagccttcaacatcttctacctttgaatttcaaagaaacaagctattgaggcaaaaaaatagcaggcccagtcaggttgctatcacaaggctagcatagttaaataactagttttggtaattaattttatttggtactcaaaataagtaatttttaactacttttgtcttacttattaaattgagtatgaaatataatttgat

SEQ ID NO: 9723 - DNA, 407 bp, Gossypium hirsutum
  Clone ID: GOSHI-09MAY01-C46617_1
cgaagtgtaccttctttagatcaaacagcaataaccttcaatgcacgtggggatgtaatttatgctatcctgaggagaaatcttgaagatgtgatgtcagcagttaatacccgtcgcgtgaaacatcctttatttgctgctttccgcacattagatgccattaactactctgatattgcaactattccagtggatcgatgtgttcttgactttgcaactgaaccaactgattcctttgttgggttgattacaatggatgaccaagaagagatgttttcatcaagccagggtttatgaaattggtcgccgaaggccgactgatgatgattctgatcctgatgatgcagaaagtgacgaggacgaggatgacgacgacgatgatgctgatgtagacccaatacttgggc

SEQ ID NO: 9724 - DNA, 358 bp, Gossypium hirsutum
  unsure (1)..(358): unsure at all n locations
  Clone ID: LIB3148-056-Q1-K1-B4
cctacgtgattgttaattgatctgacacattttgatattgatgcaggaaattgatctgacaaactcatgcgaaattttagttgaagcacattgcattctagttatgtttatgttttctttatgtttgatgtgtataacaagttgggtgaaaatatagagttctgtaagataaaattcaatcttgactattacagtggatcgatgtgttcttgaactttgaaacatgaaccaacaaattcctttgttgggttgattacaatggatgaccaacaagagatgttttcatcagccagggtttatgaaattggtcgccgaatgccaactgatgatgattctgatcctgatgatgcanaaagtg

SEQ ID NO: 9725 - DNA, 570 bp, Gossypium hirsutum
  Clone ID: GOSHI-09MAY01-C46197_1
gggtcattgaagactttttgagatgaatctagatgagttgagaagcaagtccaaaggtgagaaaagtatagctttcaagtgacaacaccattccaattgaaggtaccactgctatcaaagacgtacaagagcaaatggtgctacttactcggaacttcaataaagtcttcaagaagttgtcaagaaagaacaaaaagtttgatgtagccaaaaacaagataaaaggagtggtaattagtgaagaatctaacaaggagaaaaagaaaagaattcaatgccattaatggcatggatttagccgcataaaagttaaatgtgccaataccctaaaaaatctgtgtaacctggagtgatagagattcttcaagtagctcagatccagatgaggagctcgtgagcaattacgtgacgtttacttctaaagtcagtaatcttgatgctactgattctgagattgatattgatttagatggtgaatcaaatgccgattttctataaacctacagactatgttgcaaaatgagagtagggtatgagggtaacgccaacaaaatcactatgcaacatttg

SEQ ID NO: 9726 - DNA, 546 bp, Gossypium hirsutum
  Clone ID: GOSHI-09MAY01-C46157_1
ttttactaatgccataaaatataagccattgaaacgagaacatttcgttagggtttagccgtggctagagagagatgggaaggaggatactgaacgatgcgttaaggtcaatagtgaatgctgagaggaggggcaaggccacggtggaactgaaaccaatctccaacgtcatatcttcctttctcaatatcatgaaatatcgaggatacataaagaacttcgaagttcatgatccacatagagtgggcaggataacagttgacctgcaaggaagggtaaacgattgccgggcactcacttacaggcaggacatcaaagcaaaggaaatcgaaaaatacaaaacacttaaacttccaactcatcagtggggttatgttgtgatttcaactccggatggtgttttggatcatgaagaagccattcgaaggaatgtaggtgggcaggttctgggttattttcattagacttggttatctttctgataggtggttgagctctgctttatctgtgaactttcaatcaaatatctatctgaaatttgtatcg

SEQ ID NO: 9727 - DNA, 488 bp, Gossypium hirsutum
  Clone ID: GOSHI-09MAY01-C46127_1
cccacgcgtccgaaagaggagccaccgaggaagaccacaaccaattcatctttgacaataacgactgtgagatatggggagtgtcaaaggaatcacgctgccagcagcggcggttatgtcgtcgacgggtgtagggaattcatggcaagtggagaggaaggaacgagtggtgcccttgcttgtgctgcttgtggttgccataggaattttcatagaagggaagttgaaactgaggtagtctctgagtgttcttcacctaataattcttccagtagagcataaataaataatatataggctttcatttattaattatatgatgttttggtaattggcttttagtttttgtgccaaaaacctcttccttatcaataatttgcgttgtgtttctttgatggtttttttttcttaaacttgtttctgtatgtaatgaagttgctaaaataatttgcattatgtatatattcttgataaaaacaaacatcaat

SEQ ID NO: 9728 - DNA, 923 bp, Gossypium hirsutum
  Clone ID: GOSHI-09MAY01-C46057_1
gatatatagatggattaatttacttatttttttagtagagggaaccaaatacaatttggctcatagtataggagcctcaatggtacttttgatatttgctttttgatctaacatacaaagactaaattccccatttgttgggtaggagtaaaatgtaatttgactcttagtacaggggactatacagtaattttaccaaattaaaggttgaaaatcaatcaacttgatatatatgtgtgtgtgtgtgtgtgtgtgcaggaatcagtgaataactcactgggaaatctactgacatatccatatgtgagagatgctatgacgagtggacaattggcactgagaggaggttattacgactttgttaatggacattttgagcaatggagggccttcacaccagctccaccattgccacccatgccccagcctttctaactgtcgtctcatttactttatctgctgcaactgagaacttgcttgtttgctctaaaataatcaaaataaataaacagtgtgttaagattgtcttcttttttcgagagagaactgattagattcttgaggttcgagtgagtgtggaagagatggatatcaaaataaaatttgatgtttgagcttcaactaattcatcccttacacacaaaattcgatgctttgagaaaataacagctctttttcatcctatgcattccctatgataataaatgggttttaagctatatatgggtgtgtctcccaacactgaaaattgtttgtgtttgattctctatccctacaccaaattctatgacaacaataaaatggtatctgctattaagaaattccatatccagtatgttaaaaaatcgtaagaaaaacatgctatgtatgttctttctgtacaataataataataaaggaattcgcaactcaagtgttttaac

SEQ ID NO: 9729 - DNA, 337 bp, Gossypium hirsutum
  unsure (1)..(337): unsure at all n locations
  Clone ID: LIB3148-048-Q1-K1-H2
gggagacccacgcgnngcggccacgcgtccgnccacgcgtccgttctcatacttatgacttcatagatgactggntgaagattggtttggctgcaaagaagaggggtcctggaataaaataatggcctgccttgcgaagaactattgaagctttgcgaaaaggaatcagtgaataactcactgggaaatctactgacatatccatatgtgagagatgctatgacgagtggacatttggcactgagaggaggttattatgacttcgttaatggacattttgagcaatggagggccttcacaccacctccaccagtaatgccacccatgccccagcctt

SEQ ID NO: 9730 - DNA, 424 bp, Gossypium hirsutum
  Clone ID: GOSHI-09MAY01-C46347_1
acggccacgcgttcggatggatcctcgtggttatcatctgtctattcgccttcgcttatggaaggtcttggggtcctctggggtggctagttcctagtgagctgctcccgttcgacactaggtcagctggccaaagcatggtggtctgtgtcaaccttctcttcacagctctgatagcacaatgcttcttgggctcactttgtcatctcaagtatggacttttctcgctttttgctggctcgatattcataatgagcagctttattttcttcctcttgccggaaacaaagagagttccgatcgaggaagtctatcttctctggaaggatcattggttctggaagaaatatgttgaagatgatgacgagaaggatatcaaaaagccaaccacgtcatattatctaaaatacgaaaaacctttggt

SEQ ID NO: 9731 - DNA, 557 bp, Gossypium hirsutum
  Clone ID: GOSHI-09MAY01-C47937_1
ccgaaaccgaatacatgttacagactctaagggaggagcagaggcttactatggatgactctaatatcttccctgacacaagtgttcatctggatggtggtagtcaccggtttatggctgcttccggttacaatgtgtcggaattggggaggtttggaagcggtgtatctctcactttaggattgcagcattacgaggatggtagcatatctatgtcgggtggaagccatcatcaaaattttgttgcaatgagaggggatgatatgtacaatcatataccaactggaaccggggatttcgaatgcatgaatcctagtaaccggcagcacaggttgagttcctctcagttggtgcatgattttgtagcatgatacgtgcttgaacatgaagcacaagagccagacattctcacctccctctccaacatggaaaactataaaaacacagttgtaatatatgaagaaattgattggccattctgcatatatgtaaaaattacatataatttttcttcatatggtgaaagagaaaatatgtacaattagtttagctttaag

SEQ ID NO: 9732 - DNA, 599 bp, Gossypium hirsutum
  Clone ID: uC-gsronu33B155e02b2
ccttctcgtccgcccacgcgtccgcacaagtgttcatctggatggtggtagtcaccggtttatggctgtttgcggttacaatgtgtcggaattggggagagcttgtttgctttttttttttcattttaggatacgggtataacatttttattaggtatctattcctggatgttatcttcacggtaatttgttttgactaataatcttttatatttacttttatattctaattttttttttttaattttaattttattatatttttcttcctttcctttttttttctcttttttatttaatatatttatttattttttttttttgtttttgcttttttcttttttttctatttttctatatatttcttcttcttttatttattatctttttttttattattttttattctttttatttttttttttctcttttctcacagccttgtatttctaattctcccgctttttccaatttttttttcttatttttttttcttttctcttctcttcttttttaattagcgctctcctcctttttcttttataaatatcatttttaaatgttattttttcctttttacatctattacttcttctttt

SEQ ID NO: 9733 - DNA, 797 bp, Gossypium hirsutum
  Clone ID: GOSHI-09MAY01-C47927_1
gaaaaccaaaggagaaaagcttgggttcatcattgtcgagaaaaggaggcattgtggtagtagaagaggaagacagccccaacagtgaagccactgcctcagctgcatcatcatttgagcgcaaggtttcgagatccaggtccgtaggctgcggaagccggagtttctccggtgatttcttcgaaaggatctcaaccgggttgggagattgcactctcagacgagttgaatcccaaagagaaggcaaaccaaaatcctccgccgtcggcgccgcctcatcatcatcagcaatgaaagaaagggtaaaatgcggtggcatattcggtggtttcataatcacatcatcatcgtcttcctcctcctcatcttcatactggttatcgtcatcagcggaggagcataacgggaatgggaaagcaacaggagcagcgctgatccatgggaggagcaggagttggggatgggcatttgcaagccccatgagagcattcaccaaaccatcctctggtaagaaagatgctaccaccgtcattagagaatcaaacaacaaaaacacaactcccaatctggctgccattccttccttattagctgttagaagctaaaaatgattccagttaatacgcattacattggcttaattattattacctgtttatttccatgtttattatcatctgttcttaagagactctattcctttagtaatgttacaccccttaatcccttccttaattgttactactactgcatcacatatatctgcgatttattatattttggactctcattaaaaa

SEQ ID NO: 9734 - DNA, 621 bp, Gossypium hirsutum
  Clone ID: GOSHI-09MAY01-C47467_1
gagctagtaatgcaatggctttagatgggataatctttgagggagcacctgtgaaggttcggagacccagtgactacaacccttcgcttgctgcaactcttggtccaagtcagcccagtcccaatcttaatcttgcagctgttggtctatctccagggtctgctggtgggcttgagggtccagaccgcatttttgtgggggggcttccatattactttactgaagcgcagatcagggagttgttagagtcttttggaccccttcgaggttttgatctagtaaaagatagagaaactggaaactcaaagggctatgccttctgcatatatcaagatctgtcagttacggacatcgcttgtgctgctttaaatggaattaaaatgggtgataaaactctcactgttaggcgagcaaaccaaggtgctacccaccctaaacctgagcaagagagcatccttcagcatgcacagcagcagattgctttgcagaggcttatgttgcaaccacaaggtgtgcccacaaaggttgtgtgcttgactcaagcaattagtgaagatgatcttagagatgatgaggagtatggggacattgttgaagacatgagacaagagggtggaaaac

SEQ ID NO: 9735 - DNA, 285 bp, Gossypium hirsutum
  Clone ID: GOSHI-09MAY01-C47797_1
acgcggaaaaattaaccagcttttctgctcattttcccagatgaaaacatgaaaacatgcagatgagaaaacttccaagcaggttcatcctcatattatgcattttggtctacttttttaaactagtgcaattttcctcacttgtgtagatttcgtaatacataaaactatttaaggttgtctaaagttgtactgactcatgcccactcattgccattttgaaatgtaattaggaagttgttccaaaacgcacaatacagatagaagaagccatacaagtttctc

SEQ ID NO: 9736 - DNA, 608 bp, Gossypium hirsutum
  unsure (1)..(608): unsure at all n locations
  Clone ID: LIB3543-002-Q1-K1-H9
agttaggccacatttgagtaaaggtgatgctatgtggtgtttacttatgagtgatcttcatgtaggtagggctagtacgatggagattccatcacttccttctcctaatgggtgtagtccggtttcaaataccctagagagtgttgataataacggggttggtgttgtttcaccagcactgtgtagatttcatggtggttgggggtttgggaatggaggtgactttgcagtgaatgggttgttttcctgtggtgctgaaatgactttgcagagggatattgagtgtcctaagaggttcaacctttcaccttcaatgaagtctttgttgaaaaagaacgttgctatctttgctgcaagttttcgagccaattcaaaacaaatgcagacacaaaatcaggcatgtgtgggcacattgtctagtggggatgcccctctggctgttgctggggatgaggtttctgctgagaaatcagaggagtcacagaatttgatgagccaggatggggttaattcagtattgagtaaatttcgtgatttgaatattgatgagaatttagagcgtgcntgggaagatcagaaaagtgagatgataatttctctgcttcatc

SEQ ID NO: 9737 - DNA, 263 bp, Gossypium hirsutum
  Clone ID: LIB3135-036-Q1-K1-F4
tgctgcaagttttcgagccaattcaaaacaaatgcagacacaaaatcaggcatgtgtgggcacattgtctagtggggatgcccctctggctttgctgggggtgaggactttgttgataaatcataggagtcacagatttggatcagccaggatcttctaatccagcatattcttgttcttaacatgtgagaagtcataagactcgagagtgtgctaattatgtttgggacactgctcattatagtttttggtgtcttcttgag

SEQ ID NO: 9738 - DNA, 959 bp, Gossypium hirsutum
  Clone ID: GOSHI-09MAY01-C47127_1
ctctcgcctcataatatctcccctcaactaaggatctcttcccactttatccccttcttcatttctctctgtcttcttcttcttcttcttcttcttcttttccttcttcctctcctcctcctcctcctcctccttacataactcaattaatcctttggacgaaaaaatggcgaacgcggcatctggaatggctgttgatgatgaatgtaagctgaaattcttggagctaaaagcgaagagaaactataggttcattgttttcaagattcaagagcagcaggtggtggttgagaaagttggaagccctcaagaaacctatgaagatttcactgcggctctacctgccgatgaatgtcgctatgccgtctttgatttcgacttcaccactgatgagaactgtcagaaaagcaaaattttcttcattgcatggtcaccggatacatcaagggtgagaagtaagatggtgtatgcaagctcaaaagatagattcaagagagaattggatggcattcaagttgagttgcaggcaacagaccctagtgaaatgagctttgacattataaaagcccgggcaatctgaatacgcaaagctattcttgcgttttactttcttctccaacattcaccctctctttatgcatattactaccatttgtaagcattgcttaattgcatttatgctaaaattatactttttcgatcatttctatttatactttttcttcttttgtcaaacatttttttctttttttttttttgaagtgtgggttttacaatggactcttgtagctttaatgtaatattatccatacatttatgctaaatctatactttttcgatcatacgtgtgcaggatgattttgctagtaaactctctggtcacaagtcagaggtttgtgggctgaagtggtcttatgacaaccgtgaactagcatcaggcggaaatgacaacaaacttt

SEQ ID NO: 9739 - DNA, 668 bp, Gossypium hirsutum
  Clone ID: GOSHI-09MAY01-C47027_1
gaattgtcattgcggacgcatccatttctgacaaagaaaagtccggtggtgaaagacactccaccgacgccaaccaatcagtcaccagaatattgataaagttggtcagagtgctagagtaacttcgcatttcaaagtcaaaacaaataattccactgaagcgataattaagaataccaccaattcccctggaaagtaagagatatggaaggagataaaggaacagtgtgcgtgactggagggaccggttacgttggctcctggttgatcaaactgcttcttgagctcggttactctgttcataccactgttagagctgacccaggtaacaatggtcgccttagcttcctcaccaacctaccaggagcaaatgaggggctgaaaatcttcacagccgatcttaatgatcccgagagttttggtactgccatcgagggatgcaaaggagttttccatgttgctgctcccatggatttccaggacaacgaacccgtagcaggtgtgacccaaaggtcaatcgatggaacattacgcatcttgaagacatgcttgacatctaacacagtgaagaaagttgtatacacttctagtattaccgccgtatatttcaacaagatcaagaatgtcgagatcatggacgagagttattggagtgatgtggatttcat

SEQ ID NO: 9740 - DNA, 727 bp, Gossypium hirsutum
  Clone ID: GOSHI-09MAY01-C47397_1
caatgcgtgcgtcctctgtcattgctatggatactttgtgtcacagtgcacgtggtgactctatggaaagtgttgagaattatcgcggagatgttgacgatattcattttccctcatctagtacatatggccaccttgacatgaatgaaacatcagagttgaattatagtaatcaagctcagcagagtatttgtttccaaccagctgcagaggaagttccaggtgaaatgggcatcagcagtacaaatgacggggaggaaatattcaatgctgaacctgaaactgtgacagctcaagctagggatgggctttagttttggaattagtggggggagggttggtatgtgtgccagccatgaagctgaaattcatggagcagatgtgtctgtgcatagaacagatagtgtagttggtgatgtggaacccagaatagaagatgttgattatcagggtctaactggtgaatctgctccagatcctgggttgatggatgaattttgtccctggcgaaataaatatggaggatacttaaggtgacaagctttaaatgttgtcacgctccttggggttgctgcagtgcttattatttgtggttctgtcaatcttagtatgttgaatttttattataatctatatttttatttatcttaattacgttgtgtttttctttgtctgcttgtaatttctttttgatatgaatcttattatgttaatatttcttgtaaag

SEQ ID NO: 9741 - DNA, 326 bp, Gossypium hirsutum
  Clone ID: GOSHI-09MAY01-C47367_1
caaattgtaggtatagttcttatatgtacaacaaagctgctggatttttgaaaattaagcggaacccatttcttgttgtggatgttatcaaagcttacaggatggaaaagtgttcagttaaccttaaaatgtttaaggttgttttgaatttgtgtaaagaagctaatattgccgatgaagctttgttgctattgaggaaaatgcctgaatttaatttacgtccggatactactgcttataatgtggttatcaggctgctttgtgagaaaggggatatggatatggctcataaattgatgaaagaaatttgcttgattgatctttat

SEQ ID NO: 9742 - DNA, 426 bp, Gossypium hirsutum
  Clone ID: LIB3147-035-Q1-K1-F10
gcttctcaatctgggttccaattcggaggcaatcaacttcctgttccttctggtggattcaattgcagttgaaggacacatggttggagtagtaggaaaggggattaaggtcgggtattttatctcggtgtttgttttcggtattcacatacagttgaagtgatgccaaagtgtgtgattaagaagtcatctcaataaagacgggtgaatgacacaccatcatggtaaaattgttcgaggagagagtgtctggtaaaaccgtttaaatacttattttacttctccatacggtaaataaaattctttcacagcatccttgttactggatgcaagggtgagtttatttttctttatatatatcatatacatatatgtttgtctttgttttcactgtagtgggtagttgtggtttctgatcataaagag

SEQ ID NO: 9743 - DNA, 278 bp, Gossypium hirsutum
  Clone ID: LIB3148-025-Q1-K1-F4
cccacgcgtccgcccacgcgtccgcccacgcgtccgcacatacagttgaagtgatgccaaagtgtgtgcctaagaagtcatctcaataaagacgggtgaatgacacaccatcatggtaaaatcgttcgaggagagtgtctggtaaaaccgtttaaatacttattttacttctccatacggtaattaaaattcttttgcagcatcctagttactggatgcaagggtgagtttatttttctttatatatatgatatacatatacgtttgtctttgttttc

SEQ ID NO: 9744 - DNA, 608 bp, Gossypium hirsutum
  Clone ID: GOSHI-09MAY01-C40517_1
atcatttgagattttgaccaacccagcaagagtggttcctgctcaggagaagttcattaagtttctagaagacagccgatatgcgcccgtgaagttggcaccatcagggtttgttcttcttagagacctgcgccctgatgaaccggaggcactgtccctaacagatgcgcctgcattagcagcatctccagcggctggatcagcagcaggtcaacagagttcctcatcagctatggctgttgatgatgaacctcagccccctcagcctttcgagttcacatcctgattttgcccggattttgggccggccatagtgtttagagacgaacagtgttttgtcacatttcctactttagctcaggaattatctagtaattggttgcattttttcttccaagagatgagagatgagagatgtttcctgttgtaatgattacccttttgtgcatgactctgcattttaattgctgctgctgctcccattgtttactcttctttactatttctagggaaaaaaacagttatatagatgctcaaccatgaaggtgaaaattgcagctgaaccaaatttcctccaaatcgacaatattgaatcgactttttttggc

SEQ ID NO: 9745 - DNA, 486 bp, Gossypium hirsutum
  Clone ID: LIB3147-028-Q1-K1-F11
taatctcttaaacctgttgatctttgcaaaaaaaaaaaaaaacaaaaacaaatggcaggtgcaaggggggaaatgatcaacggtgggaattattcgccgagaattgctggacgtccgatcccaaggaggggtcaagtgaaaattgctatcttaatggggattgcccattcttttgcttctattttctctgcaagtagtcgcaggcaatctgcatctcacttgtcctaggttgtttaatttctcccaaaaagtaagagaactgggagggtaaacgttttccgtcctagggaagatgtgagttgttttttttgccatgttcatatcaagtttggtcagagcttgtattatttgtttttcagattaatgaatttccagttcctttttttcttacagtttcagtgatttttttgttgaatttcatcctctaagaccttgaacttgaaaaaagggatttttaagtttaaaaaggtaaaataatttcattct

SEQ ID NO: 9746 - DNA, 355 bp, Gossypium hirsutum
  Clone ID: LIB3148-054-Q1-K1-F6
ggggggaaatgatcaacgatgggaattattcgccgaggattgctggacgtccgatcccaaggaggggtcaagtgaaaattgctatcttaatggggattgcccattcttttgcttctattttctctgcaagtagtcgcaggcaatctgcatctcacttgtcctaggttgtttaatttctcccaaaaagtaagagaactgggagggtaaacgttgcccagagaactgggagggtaaacgtttcccgtcctaggaaagatgtgagctgtttttttttttttgtcgatgttcatatcagttttgtacagagcttgtatttatagcttttcagatgaatgaattttcaatttattttttt

SEQ ID NO: 9747 - DNA, 745 bp, Gossypium hirsutum
  Clone ID: GOSHI-09MAY01-C40727_1
ggaattcagaaaacagtttctttctttatttttttctgtttggttgactggaaaaagattttgaaagtactttgctcctggagaaatgttaacatgtgtgagaggaacagtgtcagtgaagaaatttctgggctgtatttataagttacaggtgatttggccttgaatctgcaagttttgatatagttgtagtgaatttctatttgcgatatatgcatggaaacaaattcaggtgttacagtgataggagctgaagctccttcaacttatcatatggcgccgaggactgaaaatgctaaccagatcagcagtggtttaacaccagtcgatggtttaacaccagtcgatgttccggcagttagtgtaggattaactggtagtacagaaaagaagaagagaggtagacctagaaaatatggaccagatgggaaaatggcaagggcattgtcaccaatgcctatttcctcatctggcccacccggtacagctgagtttccaagtggaggaaagccagggagagggcgaggcagtgcttaccagattaagcatcataaaggaatggacatagataatttaggtgagttggccggcacttctattggaacaaattttatgccgcatgtcatcactgtcaatcccggcgaggatgtaacaatgaagggtgatatcgttttctcaacaaggaccacgagccatttgcatcctatccgctaacggagtgatttcaaatgttacacttcgtcag

SEQ ID NO: 9748 - DNA, 594 bp, Gossypium hirsutum
  unsure (1)..(594): unsure at all n locations
  Clone ID: AI725988.1
gttaacatgtgtgagaggaacagtgtcagtgaagaaatttctgggctgtatttataagttacaggtgatttggccttgaatctgaaagttttgatatagttgtagtgaatttctatttgcgatatatgcatggaaacaaattcaggtgttacagtgataggagctgaagctccatcaacttatcatatggcaccgaggactgaaaatgctaatcagatcagcagtggtttaacaccagtcgatgttccagcagttagtgtaggattaaccggtagtacagaaaagaagaagagaggtagacctagaaaatatggaccagatgggaaaatggcaaggtcattgtcaccaatgcctatttcctcatctgtcccacccggtacagctgagtttctgagtggaggaaagccagggagagggcgaggcantgcttaccaaattaagcatcataaaggaatggaaatagataatttaggtgagtcgcccggtacttctgtcggaacaaattttatgccgcatgtcatcactgtcaatcccggcgaggatgtaacaatgaaggtgatatcgttttgtcnacaaggaccacgagccatttgc

SEQ ID NO: 9749 - DNA, 508 bp, Gossypium hirsutum
  Clone ID: GOSHI-09MAY01-C40697_1
gtaaaattaggcggagtagatcttgaggattcagttagaaattcgaatgaagatgtgacgagtgataaggtagtggaagaccagggacaaaatgcatgtaaacgaccagaggcttgccgcatttccagtagggccgcggtcgcgcgggtccgaattcagggtatcgaaccggagtgagagatacccttctcttgggtagcaaacaatttattaaacccggactattttcttcacgtctgtgtttgtgtcaaagttgcacaataaaatcccacatgaaggggatggatatgtgtggatatgtttctcctgttgcgacagggaggttagggtctcttctttttattcatttgacactgtgaatatgttgattgcatcaatgtcttagcaaaaattgaaaagaaaaagccactgtgatacttagaggtaacactgagctgggctaggataggcttggcatgggtttattccagcccagttgatcacttagttatttttttttattaatatg

SEQ ID NO: 9750 - DNA, 606 bp, Gossypium hirsutum
  Clone ID: GOSHI-09MAY01-C40117_1
agaaagggaaccatcccaccatggattcggctggttcgtcataaaaggaaaagcatcaccagaaaccttcaccgaaccaccatacggcacagaaccatccaccactgccgcacccgaaccgttatcaaccgacctcgtgaagctcgcacccccgattccggaccaccatactcgcgattgaaacggtaatagcacagttgagccaagtgtccaaaccggccacatatctggcactgagcgcaagaccgaaacgctctcactcgactaacagacggtcgaccaccgcgcccagagtcaacaaccgctggcgtcgaaaaggcctctacgaaatgagcatggaccggcacctcttgaaccgctcgaacctgccgactttcaaattccaacagaacctccaccaaacgctgaaacggtagaggctcggatgagaatgacgcaagggtgagaacggtatcaaactccgacggcagtccggctaaaacgattccaaccttctccgtgtcagaaatccgagatccggccgcatctatcaaagcacacatgttctgaatcttcgcaatttaatccttaaccgacatcgctcccttcttgatcgaataagatcat

SEQ ID NO: 9751 - DNA, 754 bp, Gossypium hirsutum
  Clone ID: GOSHI-09MAY01-C40107_1
ctagctgcaagatatgatatgggtgccatatgcttgcaagagcattctgagaagcttcaacaccttgtagatgatgctgtagacaaaggagccgaaattgtagctcgtggaagttttggccatttaagtgaaggcgcagttgatcaatttttcccccctacggtgctcaaaaatgtaaaccatacaatgaagttgatgcaagaagagacttttggaccaatcatgccgataatgaaattcaactcagatgaagaggttgtcaagcttgcaaatgattcaagatatgggcttggctgtgctgttttctccggcagtcaaaggcgtgccaaggagatagcttcccaaatacattgtggagttgctgcagttaatgattttgcatcaacttatatgtgccagtccctgccttttggtggcacaaaagatagtggattcggccgatttgctggtgttgagggattgagagcttgctgtttggtaaaggcagtcgttgaggatagatggtggccttatataaagaccaagataccaaagcctattcagtatcctgttgctgaaaatgggtttgagtttcaagaatcgctggtggaggcactttacggcttgaacatttgggaccgtcttcgggcactggtcaatgctctaaagatcatttcggagcaaaacccttgtgccactagcaagataaatgactgagttcccacaccttcccaccctcaactagctagttctactttctcaacctttatatttt

SEQ ID NO: 9752 - DNA, 682 bp, Gossypium hirsutum
  Clone ID: GOSHI-09MAY01-C40317_1
ggagacttggtttacaaaattggggttagtgactcaggaaagatggttctttgcacagccggtcaggaaagataggcgataatgcatatcaaggaactacactggcaaatcaagtttgaactcgataatgttgatcggaatggtatctacaaattgcgagtggcacttgcatcagctactctagctgaattgcaggttcgggttaacgacccaaattcaaatcggcctctgtttacaactggactgatagggagggacaatgcaatagcgagacacgggattcatgggatctacaagctgtacaatgtggacatacctggtactcgatttgttaaaggggaaaataccatcttctttaaacaaccaagatgcaacagtcctttccaaggattcatgtatgactacatccggttagaaggtccctcaactccatgttaattcaggattctgttacacacttttctatatattcatcgttaccattcatatatgtaggatccgtataatgttatatttgtgaatgatgattagtgatgtattgaaaaggaataaactacaaattgatggaagagagccagatttgtccgtagctaaaatattttatacatatatgtaatgtacttgttttatgtaaaagaatagttccttttatcagaaaataagcaggtgctgtgtttctggc

SEQ ID NO: 9753 - DNA, 492 bp, Gossypium hirsutum
  Clone ID: GOSHI-09MAY01-C40337_1
cgcgtccgattttgagcattcaaaacacaccaaacgaagctttctaactacaacctaacaacaatggctaccagaatttggtccctccttgcgctgcttgcgctatttgccaccgcaacaaatgcatccattattccacaatgctcacttgctcctagttctcattattccacagttcctaccaccagatacttcaatggccttcgaacacccatctgtgcaagcctatatgctacaacaagcgattgcggcgagcgtcttacaacaaccaattgcccaattgcaacaacaatccttggcacatctaacaatacaaaccatcgcaacgcaacagcaacaacagttcctaccagcactgatccacctatccatggtgaaaccctgtcccctacttgcaacaacagctgcttgcattcaacccacttgctctagcaaacgtagttgcaaaccactcacaacaacaactgcaacagtttctgtcaacgcttaatt

SEQ ID NO: 9754 - DNA, 792 bp, Gossypium hirsutum
  Clone ID: GOSHI-09MAY01-C41987_1
gtcgacccagcgttttttgcgcgtgggcagaaggcttcctttgagagcttttgtcctcaatgctggacctgaaatagcagaatttttctttatggacactactccattcgtaaccaaatacttcactgacccagaagatcatgtttatgactggaaagccatattacccagagagaaataccttaacaatcttttgatggaagtggaatcggcattaggagaatccagggcaaaggggaagatagtagtaggtcaccatgcaatcaagagtgcaggacaccatgggaacgctaaggagctcaacattcatctccttccacttcttcagacatacgacgttgatctttatattaatgggcatgaccattgcttacagcacataagcagcagtgacagtggaacccaattcatgacaagtggagggggatcaaaggcatggaggggagacgtgagttggtggaatccacaagaactgaaattttatcatgatggacaaggtttcatgtcagtggaaatgactcccactgaagttagcattaaattctatgacgtttttggtaatgttttgcacaattggagcagttccaagcaactttcttttgctatctaagccaacgttttaagcctttaaaacaccttccattgcctgaccaaggagctgccatattcagaagcaggggaaatgaataggagacgaactctgttaatatgttttctttggtacaagaaagttagatttggaagtataagcgtatgttatttttaaaattatatgcaagaatcaagtaagct

SEQ ID NO: 9755 - DNA, 737 bp, Gossypium hirsutum
  Clone ID: GOSHI-09MAY01-C41957_1
attttacaagaccattatccagagcgtctgggcttggcaatactatacaacccacctaagttctttgaaccattctggaaggtggtgaaaccatttctagaacccaagactcagaacaaagtaaaatttgtttactctgatgatcccaatagcaagaaaataatggatgagctttttgatatggagaagctggagtctgcatttggtggaaatgatgattcgggtttcaacattagtaagtatgctgagaggatgagagaggatgacaagaggatgcctgctttttggacaaggggaaatcctcaatccgcagagccacctgttgatttgaattcgcttgatttgaactcggattctgatacttctgacaatggcaaggtagacagttcccctagtcatgtttctgactctgaaaccctctctcccagtgaaagtgtcatcgtcacaaagggaagtgataatgattccacagaagttcattagatatagaagagactcgaaacctgaacctgtcttgggtgaggtaataaggtatactataatctgaccatatgcagcgggtgtcgattgtttcactgttttagttaaaaaatatgaagccaaaagtaaatctgctctcaatttttatcattgtcgttttatactaaagtttaaatgaattacatcgttcaattgatgtaatgtatttgtatccctggacaagagattgccttgccaagttactgtttttacttctc

SEQ ID NO: 9756 - DNA, 691 bp, Gossypium hirsutum
  Clone ID: GOSHI-09MAY01-C41817_1
tgcagtgtcaagggttcctcagtcaggaaattaaaaggggttgatgttctctatgatcctgttggtggcaagcttactaaagaaagtatgaagctcttgaattggggtgctcaaattcttgtcattggttttgccagtggtgaaatccctgtcatcccagctaatatcactcttgttaagaactggactgtgcacggactctactggggtagctactcaatacatcgaccagctgtgctcgaggattccatccaggagagtatctcctggatggaaaagggattgattaccattcacatttctcatacttacagcatatcagaggccaaccttgcattctctgcactgagagatagaaaagccatagggaaagtgatgattgtatttgatgatatgggaaggtctaagctttaagcgattaggatttatataagcattccttgctgaagcgccgaatctagaaataatataatatggaaaataacgagggtgtcaatggatgacactttgtttactttcaggatgcagatgattggcatgtaaggtgttgataatgagggtttcaatgatgcactttgtttaccttcagttttgtacttgcgttgcgtttttattatttgtaatatgctggagtaccactataggttgttcataggtatgatagtaatacataaacccaaaatatgaattt

SEQ ID NO: 9757 - DNA, 514 bp, Gossypium hirsutum
  Clone ID: LIB3584-047-P1-K2-F10
cccacgcgtccgaaggggttgatgttctttatgatcctgttggtggcaagcttactaaagaaagtatgaagctcttgaattggggtgctcaaattcttgtcattggttttgccagtggtgaaatccccgtcatcccagctaatatcactcttgttaagaactggactgtgcacggactctactggggtagctactcaatacatcgaccagctgtgctcgaggattccatccaagagttactctcctggatggaaaagggattgattaccattcacatttctcatacttacagcatatcagaggtctggagctactaccagtattccattttcctcctttgttcttttattctgtgaagctataatttatcaaggaaaactataggtgaaagatatagagaaagtttttgaaaattcatgtcttaaacctcaaatctcttaacacaagctgagtgactctgttgaaagccaggttagcccatgtttagagttgcagcagagtgactgttgccttg

SEQ ID NO: 9758 - DNA, 422 bp, Gossypium hirsutum
  Clone ID: LIB3147-046-Q1-K1-C5
cccacgcgtccgcttacagcatatcagaggttagcccatgtttagagttgcagcagagtgactgttgccttgggtccggccagattctatccatcacattagatttgcatcttgacccaggagaggaagtactattcgtctgcattgctcattttggaactagtggaatatgttgtttccagtcctggtttcccagccaaccttgcattctctgcactgagagatagaaaagccatagggaaagtgatgattgtatttgatgatatgggaaggcctaagctttaagcgattaggatttaactgggaggagatatgcattccttgctcaagcgccgaatctagaaataatataatatggaaaataatgaggatgtcaatggatggcactcctttgtttactttcaggatgcagatgattggca

SEQ ID NO: 9759 - DNA, 411 bp, Gossypium hirsutum
  Clone ID: LIB3147-043-Q1-K1-B6
gggatattattctatttctttttcctcagagtcattctcaaggatgatatcttcatttgacagcacagcaagcttagctctgaccattttcatgatccctggcttgagtgctgagaagatcctcaggttgtatctattatggtaatatgaagagataaaagtaacatttagtccttgaacctggtagcatttttcagttttggtccatgtgatgactcacctaaaaattatcacagggatcgaaattgagaaaagttgtcaagtttcaagtctaatatgaaactgggaagatagtatgaattgcatgtttaatctattggatagtattgttgcagatgcagcggctggtggtactatatatactattctttgatagaatggttcatgggactgaccaccgcccgagagcct

SEQ ID NO: 9760 - DNA, 393 bp, Gossypium hirsutum
  Clone ID: LIB3149-018-Q1-K1-B1
tcatgatccctggcttgagtgcttaagagatcctcaggttgtatctattatggtaatatgaagagataaaagtaacatttagtccttgaacctggtagcatttttcagttttggtccatgtgtgactcacctaaaaatgataacttttaataaaaaaactaggtgatgatgtggtatattatcacagggatcaaaattgagaaaagttgtcaagtttcaagtctaatatggaataaaaaaagtttcgggactaatttgagaaaagttgttaacttctcatgatatgaaactgggaagatagtatgaattgcatgtttggtctgttggatagtattgttgcagatgcagcggctggtggtactatatatactattctttgatagaatggttcat

SEQ ID NO: 9761 - DNA, 565 bp, Gossypium hirsutum
  Clone ID: GOSHI-09MAY01-C41577_1
gtggttgaaaagttaaaactatcgaagacaaaaaaaaggaaaagaaaagaaaagaaaagaaagagatattgtttactcctgaactatcttcatataatctcagaaagcacgagctgtgtaaaatccgtcggctctacaaaagagtttaagatctaacattccgcctcttaaattctatcagatctgcgtcttgctgattccatcttacattttcattgatagactttttctttggttagatccgtgatggatttcatgaaggtctttgatcagacggttcgcgaaataaagagggaggttaatctaaaggtattgaaggttccggagatcgagcagaaggtactggatgctacagataatgaaccatggggtcctcatgggactgcattggcagaaatagcacaggccacaaagaaattctctgaattccagatggttatgaatgtgctctggacaagattgggtgagactggaaaagactggcgttatgtttacaaggcattgactgttattgaatatctgatttctcacggatctgaacgtgcggttgatgacataatagaac

SEQ ID NO: 9762 - DNA, 612 bp, Gossypium hirsutum
  Clone ID: GOSHI-09MAY01-C41497_1
ggtacaaaaagccttaagaaagagcttcaggcaatacataaccttcaagaaagactacgatggacttcttcttgtacttcttagggagcttgtgaataatgcagtgcgctttgaagaaatactttctggatcaacttcagggcttacccatgttgatgtgaaaatggcagatctacaagccaaggctgaagaatatgaaatcactaatttggaggccttcttttctagctccgaatttagagctcattatgagttggacgaacaaagaagagttattaggcatcaccttgtatatgatgacaaaccatagctgcagcatttctacatgagagataagctttagcggtggcaggcagcagattgcaagaagacataccccggtttcagcaatcctggtaggaattgttggccactagcagatggatatataatatgctaatttcttagcaccgaaatacttttgtactaggtagccatattttacttgatgaccaaatctaaattgacattttgtctaatttaaaaattgtattggaacaatggaactgtcagcgtggactttagctttcactgtcatgtaaatgaaacggtggtaagatcaagtgggattct

SEQ ID NO: 9763 - DNA, 518 bp, Gossypium hirsutum
  Clone ID: GOSHI-09MAY01-C41757_2
ccgcccttttttttttttttttttttttttttttttggatgccttaaaaagcttggtattattaagaaacagagaaagatacattcaaactttgctaaatgctagatacatacatacaacttcataactacacaattcttttttctatatatatatatatatattagccctttggattggatatttatggaccgttaatcataattctaaggcttatgattttgagtataaatataatccaaatgagcatctgccatcatcctccttttcacacattcttcatctttctcataacactcttctgctcccatcaactctgagaaatcatcttttctatcagcttgaatcatcatcatctcgtttgctttaagctccttttcaccatggttgttgatttgcagcagcaaacgagcagatactgaggaagaacaaagaagaagaaaagctaagaacaaaaaggttataaacccagaaaattttgccttcattgttttaaaaagaaaaagcggacgcgtggg

SEQ ID NO: 9764 - DNA, 596 bp, Gossypium hirsutum
  Clone ID: GOSHI-09MAY01-C41757_1
agttctagatcgcgacggccgccttttttttttttttttttttttttgtgccttaaaaagctttatattatttattttaaaaaagttataattaagaaacaaagaaagatacattcaaactttgctaaattaatgctagatacatacatacatgcatacatacaacttcataattacacaattcttttttctatattatatatatatatatattagccctttgtattgtatatttatggatcattaataataattctaaggcttatgattttgagtataaatataatccaaatgagcatctgccatcatcctccttttcacacattcttcatctttctcataacactcttctgctcccatcaactctgagaaatcatcttttgtatcagctagaatcatcccccccccgcctgctttaaactccttttcaccatggttgtggatttgcagcagcaaacgagcagattctgaggaacaacaaagaagaagaaaagcttagaacaaaaaggttataaacccggaaaattttgccttcattgttttaagaagaaacacacacccccccaccaagaagaagaagaagaagagaatagaca

SEQ ID NO: 9765 - DNA, 993 bp, Gossypium hirsutum
  Clone ID: GOSHI-09MAY01-C41777_1
caatttgagtgccccagtgtgattcctccaacacaaagttctgctattacaacaactacaacctcactcagcctcgtcacttttgcaagacttgccgtcggtattggaccaaaggaggagctctcagaaacgttcctattggtggtgggtgtaggaaaaacaaaagcctactggtgtttcaacatctctggggaaatcaacttcttccaagatgaaaacagtagtttctgaaattggaagatctgggttcgatcatgagcttcagtctactccaattctttggacttcagcggcccagacttcccatcttctatccaatctaacctcaatgagagctaccctaaaccctaaccctaacacattgtctaaccctgttagtattaaggaagaagtgagtttgcttggatctcaagtgatgaatgaaccagtggttgcagctgctgcactaaatgctcgaaccctaggcttggatctcgttaaccctttctggaaaaataatcaacaccacgctcaacaacaacagaataataatgggttccttgtaggtgaagttcaaaacacaggtattcaagaactgtatcaaaggctcaaatcatcatcaagttattactctgatacttcagcagtaattctaagcaatgtcgcttcttcttcatcaacatccattttggagtcagctccagttgctgggggagaattgggttactggaatccggcattttcatcatcgtggtctgatcttccaacaactaatggtgcatatccttaaaataaccctttacctttcgtttaatctcaccttttttttttatataagctaaaagtgttgtccatcggttcttctttcgtagtgcatcaggttgtttcttttctttctttttctttctcttttaggtgtgtttaattatttaactcatgagcgtgttccaaggatgtagaacaagtttctaaaagagatgaaaaatgttatatgttttgttacagttttcgatt

SEQ ID NO: 9766 - DNA, 411 bp, Gossypium hirsutum
  Clone ID: LIB3493-002-P1-M1-D7
gcgcggacgcgtgggcggacgcgaggggggacgcttgtgatcttaacttacatgtgatgctttggcaggaaggctaagcatggaagcttcagctatagcaacatgcatggagcagtcaggttcagctgctgggggagaattgataaactggaagccgggcttttcatcatcgtggtctgatcttacaacaaactaatggtgcatatacttaaaataaccctttacctttcgtttaatctcaccttttttttttatataagctaaaagtgttgtccatcggttcttctttcgtagtgcatcaggttgtttcttttctttctttttctttctcttttaggtgtgtttaattatttaactcatgagcgtgttccaaggatgtagaacaagtttctaaaagagatgaaaaatgtt

SEQ ID NO: 9767 - DNA, 860 bp, Gossypium hirsutum
  Clone ID: GOSHI-09MAY01-C41717_1
tgcaattaccataggggaccaaattatttggaaattgatgtcgatatctccagttcggcgattgctaacgcgattttgcacctcgctttgggatacgtgacaagtgtgacaatcgatatgggatttctggtggaagcgcagacggagaatgagttgccggaaaagttgatcggtgcggttagggtttgccagatggagatgtcctctgcgactgtggttgacgcacttactccacagattcaaccggcggcggcgcgtgtaatgggttgttcgaaggtaaatcaccataagtccggtgatgacgaggatgatgataaatgataactcttttttccccttaattttaaatttaatattttcagtatgtcaaatggttgtccctttttttagaggggattgatgggtatagaaaataaaaattagataacaaataacaaatgtgctctgattttccatatcctgttcatttattttttctttcggtttcttggggctttttgagtttgaaggaagtgggggaaagcaaaaagacagggaaagaaatgaatgaagtgatggttggttggatgtcattgttgcgttggggacaattgctttgtggtgtggggaatattgtgtcactgccggcaactgtgcgacgtgttgagattttggtgggtaaaagatacgtcaataaagttggaataggacggtggctgtgcggcggttcctgccaatcccgataacgccaataatgttttcatcatattatcactcacaaacctttactgaattgcaactgtatgtcctgtggattttattgaatcatatttctcatcattaggaactattaatagggaaatcgatacatattttgatgc

SEQ ID NO: 9768 - DNA, 666 bp, Gossypium hirsutum
  unsure (1)..(666): unsure at all n locations
  Clone ID: AW187774.1
ctgtcggggccaaaggctggagttgcgcgaaagggactctttagtcccattccaggtgaacccgaaaggccacgttctccaagctccgaaaataaaaaggtaaaagtccctctcttcctttttaggaaacgaccacggcgacggagatgagaactccgacgatgcggccacgaaataaatccggtaagtttcttctttttattttcgtttagagtagatttacataaaaaaataaaagtataaaacgaaaagacacgaaaatagaaatcgaaatcaacctttttttgtaacacgaaaatagaaatcgaaatcaaccttttttttgtattcttgcttttcgattgctagtgttcgtaaaaaaaactacaaagggatgtttcggcttttataaccaaattacatagattcattttttgttttttttttgcttgttgtctactattatttttgtttttttcttctttttttcttgtattttgcgtgttagtttcgtcttgcaggtgtcaaacttgtggaaggccggtggttgatgccctgaacgatggtggtggcgcgcgtgatggccaaggctgaaggggaatggcggctgaaaacttggttggctaggtttgctgaaaatnttaaccaagtgggctattanggttagtttaggtaataggctaatgc

SEQ ID NO: 9769 - DNA, 316 bp, Gossypium hirsutum
  Clone ID: LIB3147-044-Q1-K1-D6
cccacgcgtccgcttttaaactctctctccctctcctcttgtctccgaccgaaggaaccctcagcagtcccccgtgctgctgtcggggccaaaggctggagttgcgcgaaagggactctttagtcccattccaggtgaacccgaaaggccacgttctccaagctccgaaaataaaaaggtaaaagtccctctcttcctttttaggaaacgaccacggcgacggagatgagaactccgacgatgcggccacgagataaatccgacgtgtggaaggccggtggttgatgccctgagcgatggtggtggcgcgcgtgat

SEQ ID NO: 9770 - DNA, 561 bp, Gossypium hirsutum
  Clone ID: GOSHI-09MAY01-C41197_1
aaatggacctggaagcaaggagtttgcaaccaggggttaaggcttctcttcttgctaaattaagggaatacaaagctgatctgaacaaattgaagaaggaattcaagagaatttcttcacctaatgctcatgatgagttgttagaatcagggattgctgatatacactcggtttctgctgagcaaagggatcgattgtcaatgtcagtggagagactaaatcagtcaagtgagagaattaaggagagtagaagaactgttctggaaacagaagagctcggtatctcgatacttgaagatttgcatcaacagcgacaaactcttttacatgcccacaacaagctttatgatgtggatagcgccattgacaagagcaagaaagttttaacaaccatgtcaagaaggattaccaagaacaaatggatcgttatctcgataatcgtagcacttgtccttgcaatcatcttaatcctgtattacaagatttcacatggctgatgaaatcttttgaaccattaatggtctgcaatttgtatatgttgatccgcatttgatactttca

SEQ ID NO: 9771 - DNA, 436 bp, Gossypium hirsutum
  Clone ID: GOSHI-09MAY01-C41007_1
gccctctccaacatttcctttttgtttccttaaaaccctaacgcctccatggcatggctacccagactccgagttgccagcgcctctgttgcttcatccgccgtcatcccactccgacggttggatccgagatatcggctcagccgctgcgttggagctcgactacgactatgactactacgagtatgagcgagcctccccggggataggcgcctgcctcagcagaagcttgatgtggatggttcagtgccggagaggggaatccagtgggtgcttataggggagcctggagtgaaacgccatgcttacgccgagaggctttccaagcttctaggaatccctcatatttcaatgggttcccttattagacaagagcttgatccttactcctctctttacaaacaggtcgtaaatgctgtgaatgaagggaagcttg

SEQ ID NO: 9772 - DNA, 865 bp, Gossypium hirsutum
  Clone ID: GOSHI-09MAY01-C41327_1
cccacgcgtccggtccctttcttctcccatttggatgatcagctgcttgatgcaatatgttgaacgcctagtgtcgtccttgagcactgagggtacttatcttgttcgtgagggtgaccctgtgacagagatgctcttcattggtgggggtagattagagagtgctgcaacaaatggtggtcgaactggtttcttcaactcaattgtgttgagacctggagatttttgtggagaggaactgcttgcatgggctttgctaccaaaatccaccatgaacttaccctcttcaactagaacagtcagagctttagttgaggttgaagcatttgcactacgtgctgaacatctcaagtgcgtcccaaacctgtttagacggcttcatagcaagaacttacagcataccttccggttttactcccgccatatggaggacatggagctgcctgcttcatacaggctgcttggcgtcggtacaaaaggaggatgatggagaacagtctgatgacagaatcactttctttggatgagacacacgatgatgagatcggggcacgagaaacacaagaatttcctcgtaggctcctatccttctcgggcaacactgaaccttggagtctcaatatcagcatcgaggtttgcatctcacactaggagaggagctcaaaaaatcacacatgtttagatgcctacattgcttacaccacatgaacctgacttttctgccgacccctatcatgactgatctgatttcacgcgttatggtaaaacttatattttggctgagcttctccactgggggtcagacacttctaagtacaatagcctgtgagcagtgcaccaccttctggtgttgtcacgatctacc

SEQ ID NO: 9773 - DNA, 546 bp, Gossypium hirsutum
  Clone ID: GOSHI-09MAY01-C42957_1
cggccgcgtgggagaaaaataaccaatttactctctctgcgtcggctgtcctatgccattcaatttttgaaaggcagcccagagagagatcccccatttattttattcttttcatttattggggaaataaatatggcagttcttagattttgttttgtgcctgttcaagcggctctcgctattggtatgattgcctcgcctgttactgttcaagcccagtcccccgcccttgcccctacccttgcccccaccaccaacgacggaacatcgattgaccaaggggttgcatgtgtattgatgctggtggcattgttgcttacatacatgattcatgtcgctgacttatgcttcaacttttgagccatttgttagattatcaaatttctagggagagggggggatatgctggatgatttgtaactatgcttgtataagtttaggcaaactcttgttggctttttcccgtggataatttgatgacttcaattttattatgtttagtggcattctcaaaaaaaaaaaaaaaaaaaaaaaaaaaagggcggc

SEQ ID NO: 9774 - DNA, 300 bp, Gossypium hirsutum
  Clone ID: GOSHI-09MAY01-C42947_1
ggtatggggaagaaagcaggtggaggaatgtgctgataatggtgtgcttcatcttggtttacaggttcgtttcttatgtcattcttagatgtagatgctcacagaggggtctgagggcatcactttcatgacctctaattaattctctctcactcacgtgaatgtcgacaacatggttcacatgattttggaactacataagatagaaacgccaaaaggacaaaaacaaaactgtttgtattgtaatttgtaacagaatattattataaggaaaataaatgtattaatctacctgcaaat

SEQ ID NO: 9775 - DNA, 539 bp, Gossypium hirsutum
  Clone ID: GOSHI-09MAY01-C42917_1
cccacgcgtccgttttttttcttaatttcaaagaaatggccaacataactgttagcaactttgctgcagtgttgactaaggcaactttgaagggttcaaacaaagttcaatcatccaaagttcttggattgcctgtgatggcaacaaatggtagggctaggtgcagtctagagcagaagtctgcttcaaacgggctgagctcgaaccccagcatggtggcatcaatgatggcggcagcagcagcagcggtgacaacggctgctgcaccggcaacggcgttggtggatgagagactttccacggaaggaacaggacttccttttggctaaagtaacaaccttctgggatggatcctttttggagtgtttggtttgatttgggcattgtattttatctatgtttctagtcttaaagaggatgaagagtctggattgtcgctttgatgaatgatgtaagaatattgggctcatggtttttactttccgccatttcttactaaattaaccctttcattttatgaaagtaacaatcttggcttg

SEQ ID NO: 9776 - DNA, 516 bp, Gossypium hirsutum
  Clone ID: GOSHI-09MAY01-C42907_2
gcgtccggtgaaaccttggttttgtgagatactcaaggaaaacaaaagaatggcgtggagaagccaattatcgcgaggtctcaaagagctacgaattctgttttgccaaacttctccttccagtgcctccgctagatcattcgtggagcaaaattacaaggatctcaagactttaaaccccaaatttccgatcctcattcgtgaatgccgtgggattgagccccaaatttgggctagatatgatatgggtgttgagagggcattcgcttggaaggtttgactgaaccacagatattgaaggcactagaagaccttgtgaaagcaggtgcatccctcaaagcctaatacattgctggtattaaatcgaattagtcgaaataagttgatcttctctgaaaagttttccctttgaaggttttccttatattcagctatcatgatgatagtgttggatggttgttgaaagttcagaaattatgttgttcccttgccatttaaggttcaaagttaaaacac

SEQ ID NO: 9777 - DNA, 739 bp, Gossypium hirsutum
  Clone ID: GOSHI-09MAY01-C42907_1
ctttcacgaaccctaatcgttaaatttcttcatcaaagaactacgaatggcgtggaggaaccaattatctcgaaatctcaaagagctacggattctgttttgccaaacatctcctgccagtgcccccgctagatcgttcgtggagaagaattacaaggatctcaagactttaaaccctaagcttccaatcctcatccgtgaatgccgtgggattgagccccaaatgtgggctagatatgatatgggtgtcgagaagggcattcgcttggaaggtttgagcgagccacagattttgaaagcactagaagaccttgccaaagcaggggcatcgaccaaagcctaaccatattgctaccattgaatccaaaaggttcgaaataaaactcatgtcttttgaggaactgtttccttttaatggttgttgtgttcttccctctgttttcagccatcataactgattttgtgagatgattgttgaaagttgtcagtatttgtgttctttcccttgcattgcctttgccttgtaaggtttcaaatacccaagaaactacctcttgattacttgtttgctgttattttcctttgtccttgttagcaaacatgttaattataaacacttatcaatcaccaataagttccaatttttttttaaaaaaaaaaaaaaaatataaaaaaaaaaataaataaaaaaataattatattatatataaaaaaaaatattatttcaaatacacacccg

SEQ ID NO: 9778 - DNA, 586 bp, Gossypium hirsutum
  Clone ID: GOSHI-09MAY01-C42927_1
ttggaatcccaagaggaaaaatcttccattattaatccaaagggtgaggttgttgtgaaccgccgttgttgacacaaaatcttatagttctcttcacgctcttgtgcatggcatgtttccaccaatggcttctcatgagcaggaggattataattcgtggaatttctggaaactgccgcctcctggaattgatatatgaagttgtcagctagaatataatgcttgagcattcggatattgagatagatgaatgatgtctgccaccattctggagttatccaggttacatgtgacaatggctgttggcagagcttcttccgtcatatgcccttgaaagtgcagagctggctaactcttggcagtccaaaataatttaatattcatataaaaaaaagttttgttctctaagttacatttgcgttgtgagtagttgcatttgtaatttgtatagtggattcatctgattccatataaaacattcattaaaaatctcaagggaggaggggtagcgtaattaatttatatatattcattgtttatataaaatcaatcttcatcattagttcaatggagatagtttgtattc

SEQ ID NO: 9779 - DNA, 581 bp, Gossypium hirsutum
  Clone ID: uC-gsronu33B004b08b1
ttcctttcgtccgatcggctgtaatagccatgcattcccttcaacgttgaatagggatttcatccgccgtttctttcctattttccattttctgccctcagcttcatcttctcctacgttttcttctttcccaaattgcagagattgaatgcaaaacaacccaccccagaagctgacatgccgattccaaaaccaaggcctcgatccccaagaagcttccatcaaagtcattgaggatcttcaaaacgtggtgatgagggtcgtctcctccaactccaaacccaagaaagacaagttcttgatcgaaacttccagaaagattgacagtgtcaacaccaggcttgctgttgttgacatgaagctcgactccaagcctggttatttggagacttttgcaattggggttgcttctggtgctgcttttaatggaatttgcagtgttcttgctcatgtttttggagggtttcgctcagatttggtctttctgtaggactgctaccaagccttcttcttttcttaattcatttagattaattttcaagtaacaggtttttttatttggcttatcctggtttgggatt

SEQ ID NO: 9780 - DNA, 417 bp, Gossypium hirsutum
  unsure (1)..(417): unsure at all n locations
  Clone ID: LIB3148-004-Q1-K1-A1
cccacgcgtccgcggacgcgtgggtttgttaggtaaaatggaacaacctgcggcaccaagtgctgttcctcaaaaacttagtgacagagacagcagcagcaaagcgaagagaaaaattccaacaccccaggagctgatatcccattaccaaaaccaaggcctcgattcccaagaagcttccatcaaagtcattgaggatcttcaaaacgtggtgatgagggtcgtctcctccaactccaaacccaagaaagacaagttcttgatcgaaacttccagaaagattgacagtgtcaacaccaggcttgctgttgttgacatgaagctcgactccaagcctggttatttggagacttttgcaattggggtngcttctggtgctgcttttaatggaatttgcagtgttctgcctcatgtttt

SEQ ID NO: 9781 - DNA, 470 bp, Gossypium hirsutum
  Clone ID: GOSHI-09MAY01-C42507_1
gtttatgcagatccatgcggttgattgtgcaagaaagactcacgatagccttgaaaagttcacttctaaagcccttgccctcactctcaggaaggtgtttgatggtgtctatggaccggcatggcattgtattgtggggacgagttttgggtcttttgtaacacattcagttggtgggtttctctatttctcaatggatcaaaagttatatgtcctcttgtttaagacaagtgtccaaagagctgattgaagtgtggtgacaaacatagaacaatttggaagttaaaaggcatttgtagtatagcaaaacttttggaagcttaaagccagtgtttatccatttgtagcttgtacattgtttttcagaagaacaaaagagtaggaattgaagtctttggcaagtggtctagcctgtatgacattcttcttctaatgtatcgttttagaaatacagaatccattagcagctc

SEQ ID NO: 9782 - DNA, 662 bp, Gossypium hirsutum
  Clone ID: GOSHI-09MAY01-C42427_1
ccaaagaaagggaagatctattcagttaatgaaggaaatgccaagaattgggacggacctacggctaagtatgtcgaaaattgtaagttccctaaggatggttccccttcgaagtctctgagatatattggaagcatggtagcggatgtccatcgcacgttactttacggagggacctttatgtaccctgctgataagaagagccccagtggaaagctgcgtgttctctatgaagtctttccaatgtcctttttgatggaaaatgccggaggtcaagcgttcactggaaagcaacgggcacttgacttggttccaactaagatacatgataggtcaccaatatttcttggcagctatgatgatattgaagaaattaaagcactctatgctgctgaagggaaaaaggaatgagtgtacaattctcattcttctcccactctatctttactggattcaggtttcaatcatcaaagtatttaatccatttcaaagcttattctgtaatgggatactatatttatattgaacaatagttaagtttccccaaaagatatgggatgagaataaaaaaagaagttattttaactgttatgcttaaaaaaataataaaatttttaaaaataataataaatttaaaataataaaattttaaataatttttt

SEQ ID NO: 9783 - DNA, 500 bp, Gossypium hirsutum
  Clone ID: GOSHI-09MAY01-C42747_1
cccacgcgtccgagtttggtgacaagtcctctattgttcaagctaatccctgcgttacttcatctcggggtgctcttacgatggttctcccctgagagagaaagtcccattgaggttggaattaaaggagataacctccgttcagacagcggaaagcatcgcattactttgatggtgcaagaaccccatgattcctgattaataccatgtaagtaaactaatcgagaagaaacatctccattacatgtttgatcggccgtgtttttgtgacgctgcaggtgaagttaatgatctcgtgaaacacactttgcttcctgtttttgttttggtttactaaccctactatatttgattaacaaactgcattgttcctcttaaaaagatgccaacagcatgaggtaacctctagctggtgaagcaatgccttgtaatctttcatttctaactggttttacaccgttggtttggctgttctagcggttctcatactttcattttta

SEQ ID NO: 9784 - DNA, 654 bp, Gossypium hirsutum
  Clone ID: GOSHI-09MAY01-C42687_1
cggacgcgtgggcggacgcgtggggtttgatttcttctaattagtgaatcatatggccagcactgtggccctcaagcttgcatgtggtgtggtcttgtgcttggttgtgggtgcacccctggctgaaggggccataagttgtggccaagtcatatcagccttggcaccctgcattccttacgtgagaaacaacggtgctggtggcgtgcctgcatcttgctgcaatgggatcagatctctcaacgaggctgcccaatcaactccagagcgccaatcagcttgcaactgcgtcaaagctttagctgccagcatttctggcatcaactatgaccttacgaacaaactcccaggcatgtgtggggtgcacagccctttcaagatcagccccagcactaactgcaaaagtgtcaagtgaagtaggccatggaagctcgtcagcaaatgggaaaggaaataatgatatatagctacataataaaaatggatggcagcgctctttatctttgtcgtagttgtccctagaaatataataaaacctcaagctattgcatgagttttgagttaattgaatgacaacgtataacgaagaaataaaatattggcaaaaaaataaatctttctttttataaaaataatatttataaaataaaaatt

SEQ ID NO: 9785 - DNA, 333 bp, Gossypium hirsutum
  Clone ID: LIB3148-025-Q1-K1-A3
ggctatgatgtcttccttgggaattttcgtggcttagtctctagagagcatgtggataaaaatatctccttaaggcaatattggcgattctccataaatgaacacgggacagaggatattccagctatgatagagaagattcacgaggttaaaactgctgaattgaaacttagccatcccaatcaactccagagcgccaatcagcttgcaactgcgtcaaagctttagctgccagcatttctggcatcaactatgaccttacgaacaaactcccaggcatgtgtggggtgcacagccctttcaagatcagccccagcactaactgcaaaagtg

SEQ ID NO: 9786 - DNA, 836 bp, Gossypium hirsutum
  Clone ID: GOSHI-09MAY01-C42657_1
gtaacaaggaaatcagcagttactggcttgggttgaacgagtttgctgatttgacccacgaagagttcaagaacaagtatttaggactcaaaccagaggttttcaaaaagaaccgatcaccaccagaagagttcactttcagagacgacgttgatttgcccaagtctgtcgattggagacagaaaggagctgttacgccagtcaagaatcagcgttcttgcggtagctgttgggctttctcagcagtggcggctgtggagggcataaacaagattgtaacggggaacttaacttccttgtccgaacaagagctgattgattgcgatacaagtttcaacaatggttgcaatggaggtctaatggattatgcattcgagttcattgtcgccaatggtggacttcacaaagaggaagactacccgtaccttatggtgcatggtacctgtgaagaaaagaaggagggaatggatgtggtgacgattagtggttacaaagatgtgccggaaaatgatgagaaaagtctattgaaagcattggctcatcaacccctaagtgtagccattgaggcttctggcagagatttccaattctatagtgggggagtattcaacgggccatgtggaactgatctagaccatggagtagcagcagttgggtatggaacatggaaaggttcagattacatcattgtaaagaattcgtggggaccaaaatggggagaaaaagggtacataaggatgaataggaacactggaaaacctgagggtctcttgggtataaataaaataagctttttaccctaccaaaaacaagtgaagagctctaacctcaacata

SEQ ID NO: 9787 - DNA, 421 bp, Gossypium hirsutum
  Clone ID: GOSHI-09MAY01-C42677_1
atcatactggtaaacaatattcatctccggaagaaatgaagaaggttgctctagaaagatacaacaaaatgaaaggtaatgccccagagagattggtatcaggatctgatgactttaccatgttcctatgggaacctgctgtcagcaaacaccacaaagttcggatgactggtcatcaacagcttgtaaaccatgtttatttctcacctgatgggcaatgggtggctagtgcgtcatttgataaatcagtcaagctatggaatggtactactggagaatttgttgctgcattccgaggtcatgttgggcctgtttatcaaatcagctggtctgcagatagcatgcttcttttaagtggaagcaaagattccaccttgaaggtttgggatattcgaacaaaaaaattgaaacaagacctttc

SEQ ID NO: 9788 - DNA, 507 bp, Gossypium hirsutum
  Clone ID: GOSHI-09MAY01-C42667_1
gccagagtattttcttctagttttcgccttcttctagttttcgcctttcactgtttccggggattgaggtttgattcaatgggattgccaagtaatgaagttgagaatgtcatggaagatgatagcgatgttatggatgatgttagtgaggaagagtttgaatctgagtcggactcagaagaggaagatgtgaagttggccgagccttcgaagaactctatatacaatagagatgggctcattgagaagctggaagatatcagctggccggaaaatgttgaatggatgcacaagctttctcttgatattgatcaagagaaagaggtggatgtgaacgatgacctggctagagagctcgctgtctacacgcaggcattggaggggacaaggttggcatttgagaagtttgagtcgatgaagctacctttccttaggcctgcggattattatgcggagatggttaagacagatgcccatttgcagaaggtgaaaggcaggcttttgtac

SEQ ID NO: 9789 - DNA, 343 bp, Gossypium hirsutum
  Clone ID: LIB3148-010-Q1-K1-H12
attttatctcattgtccttcgctacgatatttttctcgactcatatttggtgttgaatgtttggtattggaatcatgtacactccctgtagagaaaatagaaagatctcgctttcggttaaaaaaaaaaaaaattaaaaaaaaaaaaaaaaaaaaaaaaaaaaaaaaaaaaaaaaaaaaaaaaaaaaaaaaaaaaaaaaaaaaaaaaaaaaaaaaaaaaaaaaaaaaaaaaaaaaaaaaaaaaaaaaaaaaaaaaaaaaaaaagggggcgcccttttaaagaaccaaagtttacttccccgggtttgcaagattatagtttttttatggggccccaaaaataa

SEQ ID NO: 9790 - DNA, 377 bp, Gossypium hirsutum
  Clone ID: LIB3148-012-Q1-K1-E1
cccacgcgttcgggaagagctggtaacatgtgaacctggatttgttttttcttttttacatggttggtttggtggctcacttgtttcttattttatctcatttgccttcgttagatatttttcttgactcatatttggtgttgaatgtttggtattggaatcatgtacactccctgtagagaaaatagaaagatctcgctttcgggttataggttgagtttatagatttgattctgtctctgtttttctcagacccatagaaatttttatttttatttctattttcattgggatcgagaaaacccttaaataaaaaattttatcagtctgaatcgtttctcttctctatttagctttcaatttatataacaaatttt

SEQ ID NO: 9791 - DNA, 280 bp, Gossypium hirsutum
  Clone ID: LIB3147-060-Q1-K1-B5
cttgtttcttattttatctcattgtccttcgttagatatttttctcgactcatatttggtgttgaatgtttggtattggaatcatgtacactccctgtagagaaaatagaaagatctcgctttcggttataggttgagtttatagatttgattctctctgtttttttcagacctgtggaaatttttattgtaataaataatataatgtacatgtcggaaaaaaaaaaaaaaaaaaaaaaaaaaaaaaaaaaaaaaaaaaaataaaaaaaaaataaacaaa

SEQ ID NO: 9792 - DNA, 445 bp, Gossypium hirsutum
  Clone ID: GOSHI-09MAY01-C42117_1
ggaaatgaacaagtggtggttctggctacagcgagtgttgacaagaaagtgagattgtgggcagcaccatcagtaatttcttcgtgagccaatgctttttccgttcattgtcaagaatttcatggagaagaccagggatacctgtggatgcactttagatcacatctgctcagcaatcttttaacatcaatagagaatacatacgtagctcttccggaatggtagaatagctgtatggtaggcatatctgactggagccgatacggaggaatgttccatatagttgcttggatggtcttttatgttactgaactttttttgcttacttgaaggatttaaaaaaagatgtagtgggctgtttgcgataactcgcacgagtagtatcaaggccattggcccatgtttatggattataattaattgagcaatgctcgattttgcgatt

SEQ ID NO: 9793 - DNA, 849 bp, Gossypium hirsutum
  Clone ID: GOSHI-09MAY01-C42127_1
aatttcacagtaacgtctcacaaaattcttcacagtaacgtctcacaaaattcttctcttttttttcttccatgattgagtaaaagatttttgtttcttctaagatcaatgtcggggacccgcttcccactatcctcctatcatgtaccaaacccaaatttctctcgtttttttatagattcaatttgatccccctttcttctctacaatcctttttacagttttaaaagataccgatcttaatttcctcttgattttcaatggcgggtatgctagctggtgttgaatgtgctcgaagaagacggttccatcaaagcggcggttcatctgattcggttcttgggttcacgaggagaccttctttttgtttgtatacaagcaaccatgaatcccttcatagctctgttttttctcagaggagggtaataattgaagggtatgaagatgatgatgagaagcttggtgaagtagcaagagaagctaaggaaagattagatgaaaggttgagatcacaaagaaaatcagaacccaaaaggcaaaatagcaaagaaactatgaaccacatgcatggaaaatgtttgattcaaggggagttacatagagaagtgttcggatcaaagaggaggttgggttgggtgaatttgagccgcaaggcattggagcatgatgagtgtctgatttgcttggaaaggttcaaggctggtgacaccctggttcgacccccatgtgcccatcggttccattctaggtgcttggtcccatggctagagaataatggccattgcccttgttgtaggttgggaaatttatcctagacttaaattatgggtcctttttctctttatttca

SEQ ID NO: 9794 - DNA, 447 bp, Gossypium hirsutum
  unsure (1)..(447): unsure at all n locations
  Clone ID: uC-gsflmaxxa046f08b1
cagttttaaaagatacctatcttaatttccttttgattttcaatggcgggtatgctagctggtgttgaatgtgctcgaagaagacggttccatcaaagcggtggttcatctgattcggttcttgggttcacgaggagaccctctttttgtttgtatacaagcaaccatgaatcccttcatagctctgttttttctcaggtaattcggtttcttttttttgttttatttcccagatttttatagtgattttaaactttgggtttatttggggaaattaattgaagcagaggagggtactaattgaagggtatgaagatgatgatgagaagcttggtgaagtagcaagagaagctaaggaaagattagatgaaaggttgagatcacaaagaaaatcagaacccaaaaggtactaaaatgggcaagacctgattggaatattngatagag

SEQ ID NO: 9795 - DNA, 548 bp, Gossypium hirsutum
  Clone ID: GOSHI-09MAY01-C42027_1
gcggccgctcgcgatctagagaagctaaaaaaactgaaaccgaaaattccaaagcaaagccagtgtcacaagagtccccacctttaaagaaagagagtgaagaagcttccaaaaatgaagtcgaagttcctgaagccaacccagcttcacaagaagttccaccattgaagaaagatagtgaagaagcttgcaaaactgaaataaaagattctgaagcaaagccaccatcacaagaagttgaaccagtaaagaaagatagtgaacaagctttgaaaactgtcgccaaggactcagaaactgtggcgcagtcttccgaagattctacaacaaacaaagataccgaagaagcagcaaaaacagagaattcggtcaagggttcggaaattagcactaatgaagattgaagatggtaacagggacttcaaatcatgatgtttggactttaaccagccatagacatgaaatgaagaaagctttcagcctctacaatatatgtgggttttttttcctatattctttcatttcggttgaatttttggattaatatt

SEQ ID NO: 9796 - DNA, 985 bp, Gossypium hirsutum
  Clone ID: GOSHI-09MAY01-C43937_1
cgaagaaatcaaagcagaaactgcttccttcctcttgaatttttagccttatatatctttatctttctccccagccaacggtttacttcgcaagttttcaaacaagaaaagcaacaatttcaatggctcctgaactcgttgttgtaaggcgtagtagcattaggcaaagggttgaggaaagtcaaatccccattggtggtctggggagcataggctgattcttgagaaccagggttgtatatcaacccgtttacccgccggtgaatcagactcagttcgccatggcttattacggcattaactattccaagctccgtctttgggagttcgtcgagtacagtaaaatgctatacctggacggcgacatacaattatatgacaacatcgatcacttatttgatttgcgaaacgggcatttctacgcagtgatggactgtttttgtgagaacaaacaaggagccacaccccacaatacaacctcgattactgtcaacaatgtcccgacaatatcaaatgacctgacgagatgggtcaacaactcccttccctatacttcaacgccggcatgttcatcttcgaacccaacctcaccacctataaaaaaccaagtaatagtgaaggggaggcggaaccggcaaatttgcaaccgttgctaatggcggcagaattctcagaagttggccaagttaaagacgtgacggcaccatcagccgcatagaaaaacttggatagctctcattttagaacaataaataaataaagtacaaagagagggttaaaacgaaagaaaagaaaaagcaacttcttatagatgttgtaaaaaaaatacagtaaaaaaagggggaataccccttttttttttcaaggaatgaaagcttctgagttttaccggagtgtttgttacacacttaaaaattaccaaaatttgtaacttatacaaaaaattttaaccctatatcaataataaataaaaattctttttttt

SEQ ID NO: 9797 - DNA, 496 bp, Gossypium hirsutum
  Clone ID: LIB3828-020-Q1-K6-C2
caaccgttgttaatggcggcagaattctcagaattggccaagttaaagacgtgacggcaccatcagccgcttagaaaaacttggatagctctctttttagaacaataaataaaaaagtcaaagagagggttaaaacgaaaaaaaagaaaaagcaacttcttatagatgttgtaaaaaaaaatacagtaaaaaaaggagaatacccccccccctttttttcaaggaatgaaagcttctgagttttaccagagcggctgttatttaccaaaatttgtaacttatacaaaaaattttaaccctatatcaataataaataaaatatgcttttttttagcacatggttgataataaaaaaaactataataacataataaaaaaaatggaaagaaaaaaaaagaaagaaatgtgaaaccaaaaaaaaaattctcaatcaaaaacaagcgttaatttaagatatatctattagggggggcctctttaaaaaaaaaaatattta

SEQ ID NO: 9798 - DNA, 702 bp, Gossypium hirsutum
  Clone ID: GOSHI-09MAY01-C43857_1
cttgatcgttgataagagacggcatggcagaacagcaattctttcccttaagaaatccggccctgaacttcctcagctcttgtcccaattctccgctggcattgctgggaccggtcttgctgttcttttatctgttatttggaaggtagcttgttggagagttccattttgtacacctaaactctttagcgccagcatcggttttgggctagtttggatctcatgggcagttaaccaattgagagacacggttgtacaaatcagcaaaaatactagcaagtctggtctgaaggaagaggagatggttgagagagtggagaaaagtgttaatcagatatatttcagagccgcgacattgatggctatagcagtgctgagatttgcatgaactctgaagatctagacagtcgaaagttagactcaattatattgatctgggatgtcaatatctgaagaacagagaggggttctgagggcaacaatggaactctgacttactatgctatatccatggggggtcctatgatgggcttgagagcacatactctggtgcttttgtacgctggtccttcggtatctataacaatcgtaaacatgtaaatggagagggtcagagtcaaagaggagggttactactgccttagggccaaaaggaacaaaccttttcatatatatataactacaattttggcattgcatttc

SEQ ID NO: 9799 - DNA, 353 bp, Gossypium hirsutum
  Clone ID: LIB3149-019-Q1-K1-B11
gcgacattgatggctatagcagtgctgagattcgcgtgaactctgaagatcgtgacagtcgaaagttaagactcaattatattgatctgggatgtcaatatctgaagaacagagaggggttctgagggcaacaatggaactctgacttctatgctatatccatggggggtcctatgattggcttgagagcacatatgagaaggatctaatactctggtgcttctgtatgtgtaacaatcgtaaacatgtaaatggagagggtcagtgtcaaagagaagggttactactgccttagggccaaaaggaacaaacctttcatatatatatatatataactacaattttggcatggc

SEQ ID NO: 9800 - DNA, 588 bp, Gossypium hirsutum
  Clone ID: GOSHI-09MAY01-C43877_1
cgatgattggatggacccagttggagctatcattctggctctatacactatccggacatggtcgatgacggtactagaaaacgtgaattcattagtcggaaaatcagcagctccggaataccttcagaaactaacatacctgtgttggaaccaccacaaggccataagacatatcgatactgtccgagcctacaccttcgggtctcactacttcgtggaagttgacattgtactcccagcaaacatggcattgcaagaagctcatgacattggggaatcattgcaagaaaagttggagttactgccagagattgagcgtgcctttgttcatctggattatgaattcagtcacaaacctgaacatgcacaagcacatgctttgtagacaaataaataacctaggatgtcttaagtgctatgtctatgatacctccccctcccccaccccccccccttttctttcctgggattttaccatcaaattctatgaagtatgtatgctgcgtgaattgagccatataaaagcaatttaaactttatggcaaacatttgtaaatgcaacatgtttaatttaatttagttggtgtc

SEQ ID NO: 9801 - DNA, 729 bp, Gossypium hirsutum
  Clone ID: GOSHI-09MAY01-C43597_1
tcagcaacggtcctggagatccatctgcagttccttatgctgtagaaacagtaaaggaaatactgggaaaagttcctgtttttggaatttgcatgggccatcagttacttgggcaggctttgggtggtaaaacctttaagatgaagtttggtcaccatggaggaaatcatcctgttcgcaaccttcgcaatggtcgtgttgagattagtgctcagtgtctttcgggttgtcatcaccttaggttttatgatatggcagaaccacaactatgcagttgatccggcatcactcccggagggagtagaagtgactcatgttaatcttaatgatggaagctgtgctggtttagcttatcctgctttaaatgttatgtctcttcaataccatcccgaagcatccccagggcctcatgattcagattgtgcttttagagaattcatagggcttatgaaatcaacaaaacaagctgcttgaaggaatctgtagtatcccattgttcgaaggatggcaacatcttagaatgggcttcttctgagctattgtttggtcggtatttgctttattttaaaaatgtcaaaatttatcacttttttaacttattaaaaatttatttaaaaatatgtgacacactatatatgagtgtggatccaaatgaatcaataaatgcatgacaatcattcaagagttgaaaaaaaaaaaaaaaatttattacaaaaaaaaaaaattaag

SEQ ID NO: 9802 - DNA, 667 bp, Gossypium hirsutum
  Clone ID: GOSHI-09MAY01-C43527_1
cccacgcgtccgcccacgcgtccgcccgctttcactttctcccaatagcacccccctcttgcctcatttgacaccaaaatggcgaactcagcatccggaatggcagttaacgatgaatgcaagatgcgattcttggaactaaaggccaaaagaagctacaggttcatcgttttcaaaatagaagagaacattcaacaggtcatggttgaaaaactcggtggacctaaagaaaaatacgacgacttcagtgcttgtttgcctcataacgagtgtcgttacgctgtctttgatttcgacttcactaccgacgaaaatgtccagaaaagcaaaatcttcttcattgcatggtctcctgatacatcaagggtgaggagcaaaatgttatatgcgagctctaaagatagattcagaagagagttggatggtgttcaagttgaattgcaagcaaccgatgcaagtgaaatgagtattgatattgtcaaagagcgagctttctaaactcttctttttttatcatcgttctaatctttctgcactttgctttggggagcctttttttttttcctcaattgccataaaatggtaaatttaattagtaaatttgggtgtcaaatgagggggatttgaaatatatattaaaatatataatttttgcttcttactcttc

SEQ ID NO: 9803 - DNA, 809 bp, Gossypium hirsutum
  Clone ID: GOSHI-09MAY01-C43757_1
gtgaaattgaaaatcctgctattactgctgttaaaaagcacgaggagggattacaaaggagatggtgctcttctttattcaattcgattcacttcctcctggtgcattcgagttcccaagtagcagtccggtcaatgagccaatgtacgttggagatacccgacagacccattctccagatatctctggagttataaagcagccgagcaacattgtaaatgtacataattccaagattagttctcaggattccgatatggagggtgccaaatttaacacagtgcaagggtctgaaagactggacagaaaatctcatcatcaactaaaacacaagtcttctttagatatctacaacgattctaccaaaaaaagtactctcactgattccaaacgaattaaaaccagctcaaagtttgctgttgaaaagatgggatcggattcttttcctaatcatcctagtccgtatggtatgaaaatttccgatgaacaacaaaagccttggctgcatgatgatgatagccatacctataaggcccttaagaatgaaaacttatctagaacttcaaatttgattcgagggtacaatgagtcctcgagtactgagagaggatcatctgcaaggatgggaaaggtggagaaacttcgtggagagtggaagacaaaaaaggagtgccctgttacagtaaaaaccgatctgaaaaacaaattgagagtctccaaacaagtcaatgttcaatatcctcaacaagaatttgcagcatatgcaccacatgctagattgcctttgtgacaaatcagactaaaggatc

SEQ ID NO: 9804 - DNA, 1279 bp, Gossypium hirsutum
  Clone ID: GOSHI-09MAY01-C43727_1
tcaaattacggcaaaaacggtaatggcgtccctaacgactttacaagttacggtaaagattcgaatgtgatggggtcggacttttctggctatggaaaaacggcgaatggagctaaagatactttcacttcgtatgcattcgattccaataatcctgtaaatggtttcaagagttatggagacggtggcaatgcggctgttgacagtttctcaagttaccgggaccaatccaatgtgggtgacagctctttccaatcttatgccaaaagttctaacggagcgaaagttgatttcgacaactatggccaatctttcaacgaaggaaccgaaaaattcactggatatgggcaaggagccgatgggcagtccataggattcaagatctcgggttgaaacaccactttcaaggattatacaaagaagggtgtcactttcagtagatacagcaatgagagttcaacagcttcaggtaaagttgtggtaagtaagtgggtggagccgggtaagttcttccgggaaaagatgttgaagccaggaatggtgattccaatgccggacattaaggataagatgccggcgaggtcgtttttgccacggactatcctttccaaaatacccttttcgtcttccgagattgatcaactgaaacggatattccacgcaggggacaactccacactggcgaccataatgctggatgctttaaaagagtgcgagcgaccgccgagcccgggcgagacgaagcgctgcgtgggctcggccgaggacatggtcgacttcgccacccccgcgcccgggcggaacgtggaggttcgtaccacccaaaacgttaatgggtcaaagaagaatataatgataggaaggtgttggaaaaatcattggtgggaaagtgactaaatcggtttcgtgtcaccagagtttgtacccgtatttactttactattgccactcggttcccaaggtccgggtctatgaagctgatattctggatccgaattcaatggagaagattaaccatggtgttgccatctgtcatttggacacatctagttggagttcgggtcatggagctttcttggctttaggttcgggtccgggtcgaatagaagtttgtcattggatatttgagaatgatatgacatggacaatagccgattcctgattagcaagaagggggttttatggttatagttcaagtttgggagggcaaattcctataaggatttcgctaccttcttaagattatcatatataatattattgaaaatgaagaataaag

SEQ ID NO: 9805 - DNA, 855 bp, Gossypium hirsutum
  Clone ID: GOSHI-09MAY01-C43677_1
tttcggcatacgtgggaacgctttagccgggtgcatttcttcttttcttcttaatgattctgttgcaagtgtgtgtgctagaccattcgctgatcttggagtatattattcaaaccttactctgctaggtctggactgtagttgttgaatatcatgaatatagacccctatttgcgggggatcttcccctttcaccttgcatttctttattaccgataaagagtcgccttcaataatgatttccttctcttgcatgtcgagtgctatttgggtcgcttttctacaagtgagtgcttcggctgggaaggcggaaagaactctgtagtgaatctctgtgcatgttaggaggacaaaaccttcgctatttctgactactatcccgaaagccgattgtcagatgcgctcattatatgctccgtcaaagtttatttttactatttgaccagagcatttctctccccccatatggcacataacgtacaacaaaacagtctgcaaagggaagttggctggtcaacgaggatcctggacaatcccaaaagaggtggtccattgtttctgctccttcaccacaacaaggacatgttggactatttactagtttcctacaagacatatttacccgagtaggcaaatagttccaagaaattttccagcatgtaattataatttttttttttggtagatctaggctccatagttttttgtagaaagctttgtagtcaggatgtaaagcataaattctaggttccatactttgtaatagtttataggctcttcaaactgaggatttgcagctctaaaccctaaaatcagcgtgaggttattttttcaaataggaaagcatagaatttt

SEQ ID NO: 9806 - DNA, 365 bp, Gossypium hirsutum
  Clone ID: LIB3196-056-P1-M1-F1
cccacgcgtccgccccccttcttcaatccggttctctttcgtagtcgatattcctctgattttcggcatacgtgggaacgctttcaaccggtgctatttgggtcgcttttctacaagtgagtgcttcggctgggaaggcggaaagaactctgtagtgaatctctgtgcatgttaggaggacaaaaccttcgctatttctgactactatcccgaaagccgattgtcagatgcgctcattatatgctccgtcaaagtttatttttactatttgaccaggtgggtgtttccatttagtattctcctttgaaactatggaagtagtgctctccaaaccatccacttcttttaagtatctatgtacaaag

SEQ ID NO: 9807 - DNA, 927 bp, Gossypium hirsutum
  Clone ID: GOSHI-09MAY01-C43197_1
ccggtcgacccagcgttcggtccactcttattttcctggagaaacttgtgtggtggagctcaagaaatggagaagaaagtgtgccttttgtagtttgcagcgatccttccatagatggggcacttgcttctcaagcctcaattcagtcatctttcgatgaaacggctcaaaatgaagcgaaccatgaagctattgtccggaatttgaggcacaaaagagtgttccttgagcagtctggtgctagctgcatagttatgccgtgccatatctcaaatgcatggcatcaacagatatcagagggctgctcactgccattttttcatattggtgaatgtgctgcgaaggagctcgttcacgcgtccgtgaagccacatggtactgggagtaatgtgcggattggggtgctggctgccactgaaactatagctgctgcttcttaccaggatcaactagggaatcaggggtttgaggtagttttgccagacaaagcaaccatggaacacattctaattccagcgatcgaatcattgaacaaacgagacaccgaaggggctcggaatctattaagaatagcaatccaggtgcttttgatcggggccgtcaatgttgtcatccttgcttctgatgagcttcagaatatattacctagagaagatcctcttctgaagaaatggatggatccgatggacgccttagcccgatcaaccataaaatgggctaaaactggaaaacaaggtatgcagaagaatacttgctagtattacacacccaaaacttgtgaaaacaaatggtgtactgtcttgtaaggatattattatttgtgtatcaagtaatgcacaggcgtatatgattataccagatattaactgtgagacacgttctcatgtacaatatctcccttgttggttccatttgctgagccaacat

SEQ ID NO: 9808 - DNA, 1183 bp, Gossypium hirsutum
  Clone ID: GOSHI-09MAY01-C43147_1
tgaacattcctgccttacacacaaacctttatttgtttgtttgctctatttcttgggtttgtgtgtaaattttgttactctccattttcgttcaattcgaagtttttctcagataccatttgttgaagaatcaacagcttataggtccctagaaaagacaagtttacacttgacaaaatgtttgggtttatgaaaccaaagcagaaaggggactcaccagctgactctgacacaatgacacctgctcgaaggactacttctgagccggcaatgttggtcccagagtcaatcgaagatgacaatgtgggaagaaaaaagcaaagctcagcatccactagggcatcaccagcaagaaacaatagagacaaatacaaggacgatttccgtgactccggcggactagaaaaccagaccatggaagaccttgaggggtatgctgtctacaaggccgaggagacaacaagtactgtcaacaactgcttgaagattgctgagaacatcagatcggatgctacaaagactcttgatactttgcatgcacaaggagagcaaattgaaaggacccaccaaatggctgttaatattgacaaggatttgaataagggtgagaagcttttaaataatctagggggcatgttttctatgccctggaaaccgaagaaaaccaaagaaattaccgggcctgtgatcacttcagatgataacaagaaaggcaaagccgccacaaaggagcagagagagaagttgggtgtggctcctgtacctaagtctaaggctggaagtaagacacctacgccggagccaaccgacgccatacagaaagttgagcttgagaagcaaaagcaagatgatggactttcagatttaagtgatatcttgggtgatctaaagggcatggctcttgatatgggaagtgaacttgatagacaaaacaaagctcttgatcatctgggtgaagatattgatgaactgaattctcgagtgaaaggtgccaatcaacgtgcacgtcatttgcttaagtaaaaaaagttgcagagcttaccaaatttactttcacatacctgtattttaacaagttttaactaattttttttgttctctatatttggttttctatcctgcccaacatttgtcattactgatatactcgttttacgtggaatataacaaagtttttgcccat

SEQ ID NO: 9809 - DNA, 485 bp, Gossypium hirsutum
  Clone ID: LIB3829-036-Q1-N6-G10
gaacttggacgaaaataatcattttatcgaaccagtaatgtaacgtttgagctcttccaagttacaacttataacagggattatatcatgtgaaacatcaaaatcttacattttcttggatctttgcttgtttagttgtttctgcaaatgcgttgggtgggaaatgaaccagatattatatcagcaaaaggcaacataccttccatctaaagaaacgccattaaagcccaaagatacttgatttctaatggagtacccatgggtgatgagcatttttctctgctttttgggtcactcccttgggtttccctgcatgttttcttaaaaaaatttgttgtttgaagtggctgcacttgtgaatacttcaactgcttcagttataccttctctgcatgttccaagtattcattgttattgctaaatgaaaaaaccttttgattttccttcaactctggaactcggggagggccccattcacacctcct

SEQ ID NO: 9810 - DNA, 386 bp, Gossypium hirsutum
  Clone ID: LIB3148-006-Q1-K1-G9
gtcagctaagagtgagatgctctgttgatttgcctgttaaattggataaagggtggctgattgaaactcttgctgtttccatccatacagctcatcaaccatggctactacattagaaatcaagtatctctgggctttaatggcgtttcttttgatggaaggtatgttgccttttgctgatatgatatctggttcatttcacacacaacgcatttgcagaaacaactaaacaagcaaagatacaagaaaatgtaagattttgatgtttgacatgatataatacttgttataagttgtaacttggaagagctcaaacgttacattactggttcgataaaatgattattatcgtacaagttcaaaattacgaagtaatgttctgattt

SEQ ID NO: 9811 - DNA, 537 bp, Gossypium hirsutum
  Clone ID: GOSHI-09MAY01-C43017_1
cccacgcgtccggttcatccgaaccccagatatggccgttcggaacggcgagtggcaacacattgcaagcacccttacattttgtaccaagaattaaccttcaaggggacctagagtcccaaggtggtagagccagccctctgcaattaggttccatgttattgcaacaacaacatcaaccgtctcaacacctcgggttagggttatcggaatctaatttaggaatgttggccgctcttaacgcctattctagaggcggtccgaacattaattccgaccaaaataatcccatggagcatcatcaacaacaaggtacaaatagtggagatgaaaacccaaataattctcaatgatgtggttagtaggcaaaaactttaattcccatagttgagatgcttttcaatttttgttcccttcaagaaaatacatttagttttataaatatggggagaaattaaggttctaattagctactatacccttcttttgtgtttttgttttgatttggttaatttatggttttcattcttctaccct

SEQ ID NO: 9812 - DNA, 422 bp, Gossypium hirsutum
  Clone ID: uC-gsronu33B116a09b1
acgagtcctttccattattatcccatggaacatcatcaacggcaaggttcaaattgtggagatgattacccaaataattctcaatgatgtggttagtaggcaaaaactttaattcccatagttgagatgcttttgaatttttttttcccttcaagaaaatacatttagttttattaaaaaaaaaaaaatcaaaagactaaacaatacggaagaaaaaaaaaaaagtaaaaaaaacaaaaggaaaagtaaataagcataaaatagatttataagaaaaaaactagggggggccctttttaaggacccaagttttcttccccttggttgcaacgtctaaccttttttttagggggccctaattttaattacctggccccggttttacaaaaccggtactggaaaaacccgggggttccccaaat

SEQ ID NO: 9813 - DNA, 635 bp, Gossypium hirsutum
  Clone ID: GOSHI-09MAY01-C43387_1
cgaatttatccttgatctttcacggccaggcctctgccaccgccaccaccaccacgatggccttgaccaccatgctccgccgccgactcttctcccggtccttctcctcccacgacggtccaagccggtggacgacgcccggtcaccaagaacggcccaatggttacctcttcaataggacaccaccaccaccaggtcaatcccgtaaatgggaagattgggagttgccttgctacgtcacgagcttcctcaccatcgttatcctcggtgtcggtctcaacgccaagcccgatctcactatcgagacttgggcacatcaaaaagcccttgaaaaactcgccgccgaggcgtcgtcatcttcttctgactgagatgttgtgaaacaaacttcaatctggatctgtagggggtacggatctttgtgaacgcttttggttttctgttgataaaatgtgtagttcgaataaaaagatggattccttttttttttttcaacagttgaagggcttgtagctgttgaaattttatgggttttttaaatttgatttaccttttcgatgatgatgatgatgatgatgaagtcgtttggcttatttgggatcgtaatctaatatttacttatcaagtttcaatgg

SEQ ID NO: 9814 - DNA, 453 bp, Gossypium hirsutum
  Clone ID: LIB3584-025-P1-K1-C5
aaacatgttcgtttaaacagtgatgtttcccttagtgtttaaaacccaagctttgcagcagcaaatttccaactcgtaacccatttttgaaggtcttggaaaaaacacagcaaccccctgccttaaaaaaaaacatgaagtttgagatagcactgagtttactacttgtggttcttgtcggaatcaccatcattcaaggttgtaatggcaaggccgtacaattcattttcggagattccttgtccgataacggtaacaacaatcgcctttcgatgacattggctaaggcaaacttgccttattacggcattgattttggcaatggtctgcctaatggaaggttcactaatggccgaaccgttgctgatataataggtgacagcacaggtctcccaaggccaccagctttcttggatccatctataaatgaggatgttatattggaaaatgggg

SEQ ID NO: 9815 - DNA, 530 bp, Gossypium hirsutum
  unsure (1)..(530): unsure at all n locations
  Clone ID: uC-gsflnu33B081c08b1
cttctctagaaactcaatgtgagatggagttgtttactgtgtttggtccttataggaatcgccattgaaggtgttcaatgcaaggtggttcagtttattttcggggattcattgtcggatgtgggcaacaacatgtacctttcaaagagcttggctcaggctaacttgcctttttatggaatcgattttggcaatggcttgcctaatggaaggttcactaatggccgaaccgtcgccgatatcataggtgacagcactggtctcccaaggccaccagcatttttggatccatcattgaccgaggatgtgatattagaaagtggagtaaattatgcctctggaggaggtgggattttgaatgaaacaggaggttactttattcagaggttttccctttggaagcaaattgagttattccgtggaacgtcagaattgattactaacaaacttggcaaacaagcgaacgacaagtttatttggagaggctaactttgtggtggcattagggagcaatgatntcatcaacaatt

SEQ ID NO: 9816 - DNA, 401 bp, Gossypium hirsutum
  Clone ID: uC-gsflnu33B012a02b1
tgacggtccaagccggtggacgacgcccggtcaccaggaacgacccaatggttacctcttcaacaggaccccaaggccaccagctttcttggatccatctataaatgaggatgttatattggaaaatggggtaaattatgcctctgggggtggtgggattttgaatgaaacaggaacttactttattcaaaggttgtcactttggaaacaaattgaactatttcatgggacaactgaatcgataacaaagaaaggctcaacagtagtggatgaaacatgcaaagcaaatcaaactctcaaatgtgtaatttatatgtttcttgtttaagacggtgtgtattattattataagcttccaaagcatagaccagatgtcatattgaaaccttgaactgatacat

SEQ ID NO: 9817 - DNA, 205 bp, Gossypium hirsutum
  Clone ID: uC-gsronu33B148d03b1
accaaattttgttataaggcgtcgtgctcaccgtaagatctacccaacattgagatggcatgtagtggatgaaacatgcaaagcaaatcaaactctcaaatgtgtaatttatatgtttcttgtttaagacggtgtgtattattattataagctttcaaagcatagacagtatgtcatattgaaaccttgaactgatacattccac

SEQ ID NO: 9818 - DNA, 431 bp, Gossypium hirsutum
  Clone ID: GOSHI-09MAY01-C43307_1
acgctggctcaaacggagttaataatcggaatggagatcggttcccgcattacaatctatgacatggaaaacataaaagtgctgattagccggttggaaattgagatggaatctttattgcataatgctgattttgcagttagagaagaagatgcagtgaagcttgcaatcaatgagatcaagggaaaattagaagcatttatgaaaaccattgaggaattgggtcgacaggccgaaaattgtagccgtgatattaggatggcgaggacggtagttttgcagaagatgatgaaacgttctgggaattcatcaacgggtgacagcccgtgggaagtgtagcaatgaggtaaatttcagtgtgttaatgttgtaataattttatgctgtattcaaggtaatgaagttgctccactggatttgatcttatacgt

SEQ ID NO: 9819 - DNA, 414 bp, Gossypium hirsutum
  unsure (1)..(414): unsure at all n locations
  Clone ID: LIB3148-010-Q1-K1-H9
aaaatcctacctcaggcaataacaatgcacatgttgagctatgctggtaaggctgaaatgcaaagtctagtagctaaagatagtcatgcctgatccagagtttcttgctaaatgctttgaagatgccttgcttgaaatgaaaaaggctctattaaggaccaagggagcgtgtgcaaaacacaatttcttctttgaaaaaacccctttccctgggcgctcgaaaaaaacaccacgcgtttccatacataattacgtttagggagagtttagtattgcttttaagaaacacttttgagacaaaaagtatttttttgacaaaaatattccttaaaaaaatactttntgagaggaaaagtgtttttctcgagccaaaaatcaaactctttcttttatcctttgtctaaaaanaaaaat

SEQ ID NO: 9820 - DNA, 400 bp, Gossypium hirsutum
  unsure (1)..(400): unsure at all n locations
  Clone ID: LIB3148-010-Q1-K1-H3
agcctacctcaggcaataacaatgcacatgttgagctatgctggtaaggctgaaatgcaaagttctagtagctaaagatatcatccctgatccagagtttcttgctaaatgctttgaagatgccttgcttgaaatgaaggaggctgtattaaggaccaataaagcataggcaaaacaataattatttttttaaaactttaattaattagtgtacaagaaaaattcattacgaattttccatacataattacgtttagggtgtgtttagtattgcttttaagaaacacttttgagacaaaaagtatttttttgacaaaaatattccttaaaaaaatactntttgagaggaaaagtgtttttctcgagccaaaaatcaaactctttcttttatccttgttct

SEQ ID NO: 9821 - DNA, 576 bp, Gossypium hirsutum
  Clone ID: GOSHI-09MAY01-C43297_1
ttcttaacttcttgtaacgcagttccagttggaagacctcacatggctgctgtcgctgacttgtcagataccccgaaccagtgggaattcagctgtgatttggaggtagattttgagtctgaagagaatgcttcaatagtctatgctgcattgggtgttgataaagagttgcaaccagataaagtgaagaggcaaatgtggatctctgatgggaaactttctgtgcactttgaagcagttgaagctaggtttctccgtgcatcattttcagctttcgttgatgtactcacacttgcctcaaaaaccatcgaagaacttgggccaggaatggtattgtgatctttgattattgcaattttacaataaatgctgtgggattctggcattaatgcattctttttcgttattcttgtacttcgtcttttgtattcttaataatacacatgtaattttaattaggatgtaagcttagcttctagcacaccgttatcttccaggtttttttctttatgtatgttgatcagggttaaacatgtggaactatcactaagttatgccgattcttctttttacgac

SEQ ID NO: 9822 - DNA, 745 bp, Gossypium hirsutum
  Clone ID: GOSHI-09MAY01-C43217_1
cccacagtagcgtttagcctgccttgacccacagagatggcaactaagcagagggtaacaattgttgttgccaccgtctttgtgctaacattctgcagggtggcgacgggacaggaaccggcagcggtggggttggggttgggaccatcagcagaggcaccgacggcggattgttttacgaacttgttgaacttatcggattgcttgacgttcgtggaggcagggagcaatctaacgaagccggtgaaggcatgctgtccggagctggcggggttagtggaaagcagtccacaatgtttgtgcaatctattgggtaaaaacgcaaccgcagtggttgggatggacattgatatgaagagagctctgaatcttccccacggtttgtaatgtttccactcctcctgtgactctctgttcagtcatcaatcgtgccccagttgcaggtccaccacaaagcgaagaatctgtgtcaccaggtggcagcccttcaaatggaaacagaaatggagcagtcattggcttggcattcgctactgccattttgcacgcactttttgggatctattaatttcttttccccattactaatcatgtactacattattttaacattcaaatattctgtgtgtcctatgtatgcctttgtttctctggtaatggggggtaaaatacaatacaatacaacagatgaaacaaagaaaaacagcaaatccataagggacaaaaaatatggttctgattgcag

SEQ ID NO: 9823 - DNA, 256 bp, Gossypium hirsutum
  Clone ID: GOSHI-09MAY01-C43227_1
gatttgtaatattagctgactttcatttctttctttgttcctctgcccattggatgtggggggcaatggaaagccactccatttgagcattgaggaaagtatagatttgttcagagaaaaagaaaaaagaaaaaagaactacaccatgaatttagataccgatgtattttctgatgtcggaaattgtagagttaagatgatagggcgaaaagcctattgaattgaaaatgaaattcttttacttttcgttttcttc

SEQ ID NO: 9824 - DNA, 656 bp, Gossypium hirsutum
  Clone ID: GOSHI-09MAY01-C78907_1
cccacgcgtccgcccacgcgtccgcccacgcgtccgaaaatggtggttctctctccctctcttctttcgctcccaaccctcccttccttcaggcatgaaccgggtagtaatggcagtggaatgctaagtcataattatagtaattacagtacaaaatttcatcagaaaactacactatgttgcagtgttgcttcaaaacccacttccccaaacgtgttatggagaagggatttgctgctcttggctctttcttcttcgctctccacacattttccatcttcaggatgtcttgctgcggaagatgtaagaatgacttcattagttgatgaaataaatgcctatacctattcatacccagtggaattgccatccaagaagttcctttttaaatgggtggaatctagaaagccagaacgctattcatctgcagcaccattgtctcctgatgcacgcctacgcattgtgtctgaacgtgtggacattgttgataatctcatcatttctgtttcgataggtccaccgaatgttcagtttttgaagtcaaaggataagaagacatgggcagcaaaagatgttgctgattctgtattgtctgacaagtctgcactgcgtgtcacctcgagtcacggatgagtgagagttcagttcttgatgcc

SEQ ID NO: 9825 - DNA, 648 bp, Gossypium hirsutum
  Clone ID: GOSHI-09MAY01-C78867_1
gttaacttttccttatcaggttgtgccccaaaacataaaattggagactgatgcttggcctcgcagcagtacccgcaattgccattggaattggtgtcacagcaatgccagaatcacctcgttggctggtgatgaaaggtagaaccgatgaagcaaaagggtattgatcaaagtctcggatactgttcaagaagctgaatttagactcagtgaaataatgaaagccgctgccatggatttaggcgaagcaacctcatcaaaccacagcgattggcgcggtcagggggtatggaaggagcttctattaaatccatcaagacccgtttgtagaattataattgcagccattgggattaactgtttcatgcaagcatcaggtaatgatgctggtatatactatcgtcccgaagtgttcaaagatgctgggattcaagataatgagacagctctgcggtgtgaatgtgataatgggagtagccaaggctatttgggggtgatttcagctgcttatttggacagattcggaagacggcctttgttgttgctagggtcaattgggatggccgtatcgttggctgttttgggcatgggttccaagtttctccaatactcagaaaccaaaccattgtgggcaatcattgtgtgcat

SEQ ID NO: 9826 - DNA, 861 bp, Gossypium hirsutum
  Clone ID: GOSHI-09MAY01-C78827_1
tttttcttcttatcttccaagcgccggcgccatacccatctcccccactccccatcccaatcctgcagccaaccagtgccccgacgcggccgtacgtccgcagcctctcgtttggttgaggccgtgagttgacaagatccgtcgaggatctctcaggacccggcgatttctccaacattgcctgaatttattggacttgtcaaagatcggaacagtttagctgtttaggaagtcggaaatggcatcgcctccaattttatccttggctcttccatcaaataccggtagagttctcagcattcaatctcacacagttcagggatatgttggtaacaagtcagcagtttttcctcttcaactattaggatatgatgtggatccaatcaattcagtacagttttcgaatcatacagggtacccaacttttaagggtcaaggtctaaacgggcaacaattattggatttagtagaaggccttgaagcaaataatttattggactacacccatttactaacaggttattttggctctggttctttcctaaaatctgtactggaggttgtagaccagcttcgctctattaatccaaatcttacttatgtttgtgatccagtgatgggtgatgaaggaaagctttatgttcctgaagatctaggatcagtatatcgtgaataggttgtcccagtggcttcaatgttgactcctaaccagtttgaagcaaaactgttgactaaattgaagaatggttctgaaacagatggtcggaaagcatgcaacattcttcatgctgctgggcccttcaaggttgtgattactacatcaatataaatggtaatcttcttctcattggcagtcatcac

SEQ ID NO: 9827 - DNA, 352 bp, Gossypium hirsutum
  unsure (1)..(352): unsure at all n locations
  Clone ID: LIB3582-009-P1-K1-A6
cttccctttacaacttactttgcctttttatgattttaattttttttcaaataattaataaatatctaaatttggatttgggaattttatttatgacaaaaactcaatatttcactgcaaagataataataatttcattggaaaattttaatttatttaatttataatttatccttttttgttttagtgatttgtatgatgttgaattgatttcagaatttattggacttgtcaaagatcggaacagtttagctgtttaggaagtcggaaatggcatcgcctccaattntatccttggctcttccatcaaataccggtagagttctcagcattcaatctcacacagttcagg

SEQ ID NO: 9828 - DNA, 473 bp, Gossypium hirsutum
  Clone ID: GOSHI-09MAY01-C78597_1
ttctctcattcccctaagaaacaccccaaccacaggcgccattgtcgcctaatgctccgctcttctttcagcttcagcaaccccacccaccacgagcccgtggcttttgatcctctcgtcgccgacatcgagcgccgccgtgaagatcgacaatgggagaagcagtacttggagcacacccatcctgagcttgtaaatgaccacgctccgggtcacgagtcgcagcccgagtgggaggatttcatgaacgctgaggattacttgaatgatgaggataagttcaacgttaccaataggttggtaatgctgttccccaagattgatgcggaccctgcagatggttttgtgacggagaatgaattgaccgagtggcatctacaacaagcagcataggaagtcttgcacaggtctatgagggagatggaagttcatgacagaaccatgatggatttgtttcattggcagagtatgag

SEQ ID NO: 9829 - DNA, 673 bp, Gossypium hirsutum
  Clone ID: GOSHI-09MAY01-C78447_1
gcctcttggtgccatcacttctggtagtcagttcttggagccagacggtttgtttccaaatcatattccaaaccctgaggataaagctgcgatgaaagctattacacaagcagttctagacaacaaggccaacttggggatcatctttgatacagatgtagataggtctgctgctgtggattctaccggacgtgaactcaatcgaaatcgcttgattgctttaatgtccgccattgttcttgaggaacatccaggaacgaccatcgttacggacagtgtgacttcagacgggcttacttcattcattgaaaagaaacttgggggaaagcaccatagattcaaaagaggctataagaatgtcattgacgaggcgattcgattgaactctataggagaggaatcacatctagctatagaaaccagtggccatggagctctcaaagagaatcactggcttgatgatggggcatacttgatggtcaaactcctcaataaacttgcttcagcatgggcttccggcaaaggtgctggaatgccaagttttaacccgatctggtcgagggtctggaggaaccagctattgctgtggagctgcgactaaagattaatcagaatcatcccgatcttaaaggacgatccttccgggaatacggagaagcagtgctgcaacact

SEQ ID NO: 9830 - DNA, 692 bp, Gossypium hirsutum
  Clone ID: GOSHI-09MAY01-C78687_1
cccacgcgtccgcccacgcgtccggagaaaaccctagatttttgggggacataggggccatttgcgtcatttcacgctatgaatcggcgataacggtggcgattaatatcaccagcaaataagaagaagaggagggggaggaggagaagagatattagtaacatgtacagaggagagagagcggccggtggctccaagggagagttggggtctgtagatcggaaacgaatcaacgaggcgcttgataagcagttggaacgatcgtcaccgtcgacttcgagggcgaccaacggcaaggataagtccgcacattcccttctcgtgggaaaacatccacccgatcatcatcgcgactctcgctccacttctctacccaaagcaaacgcctcgcatgtcacagatgaatccgaaaccgacactgaagagtcagatgttagtggttctgatggggatgacacgtcctggatctcatggttctgcaacctacgaggaaacgaattcttttgtgaaggtgatgatgactatatacaagatgattttaacctttgtggtctaagcagccaagttccttattacgattatgcgcttgacttgattttggatattgaatcttctcatggagatatgttttacgaggagcaaaatgacttagttgactctgcggctgaatgctttacggtctgatccatgcc

SEQ ID NO: 9831 - DNA, 960 bp, Gossypium hirsutum
  Clone ID: GOSHI-09MAY01-C78157_1
attaatctgtgcattaattcccattctgatggcaagaaattctacattatttcctgacaagaactatatgtatgaggtttgtatacattttctaaatattagttcttttattgtatttcttgtggggctactaccttgtggttttcatattatctacagtatgtaccaccctctagatactcccttacattaattatttgggtccatactaaagtgcttatgttaggtaagtgaaatggttttgtatggattcaaagcttttcttgtaaatgtccatgtaataggatatcaatttagatgctgagattggaatggcttgtatttctgagaggcctttttggggcaggttcgtagaaggctcctagagttcatgcttgcttcatttcagcgttctccagattttattgcacttttgaagaagcctatagttgacagactcggggaagcatatgacagcccagaaaagacagaattggcgttacaattgtgttgggctgtagagagcatggtgggggtggtggatctcacaaagatgcagctagggaactttttgaaagtttagagctacttttgtatgaaaacctttcatctattcgtctaggtctgaggcaggagtctatcaattctgacagcaggaacttcagaaagtcatcacagtcgaggcttctgtgttttgttatcacagctattgccaagcttgctacatatcaccgtgaactattgccaagggcacgtgtacattgggcaaggttgctcgatctcgaatatcaaattcaagggtttggaggcgagctcgtgattatctgggattaatggatgaccccgctatctgtctgtctgtcttgggaccttcccaccttcacatgggcacccacacaatccagcaccgtcaactggaatgatggaggcacaaaaatgattgcgcatattccattttacattcttggtgagcaggataga

SEQ ID NO: 9832 - DNA, 903 bp, Gossypium hirsutum
  Clone ID: GOSHI-09MAY01-C78097_1
cggacgcgtgggtcccacgcccccggagagaagtgagagattttttggggactgactgcccttccaagttcaaagctttgctgaaggaattgtttctttcattttcgctattctttttgcaaaattaatggctactgaagaggtcaataaccctccctcacttccttcttacccacagctaattattaatgccatagaagcattaaacgacaaggatggttcaaacaagacctcaatatccaaatacatagagtccaagtacggagatttggctgctggccattccactctcctttctcaccaccttaatataatgaaagaaagtggggaacttgtgttttggaaaaacaattacatgaaagctgatccgagcgctccaccaaggcgtggccgtggtaggcctccaaaacccaaggtcccattgccacctggtatggttttaagctctgcaaggcctaggggccgccctcctaagaaccccaacgctccccttaggttccccaagccttctgggagtgggaaaccacgtggaaggccaaggaagatggctcgacccgaagggggaatagctgccagctccacaactatgatgtcggcctccgttaggcctaggggacgtccgcctaaggtgaagacttccgcattcactgaagtcagtgttggacattaaacagtattctcttcaacggtttttaacttgtagtggtgatttactatttactttatgtttatttgtttgttttgttgtagaatttgcacggtgtttgttagtttgataatcgtgtgtgtttttaagtgtcttctagaaaatttaatgtagttgtacttgaggctttgacttttttcttcttctttatttcttttaaattgaaagtccttgtaaaaaggatgagtttgacgacc

SEQ ID NO: 9833 - DNA, 520 bp, Gossypium hirsutum
  Clone ID: LIB3585-043-P1-K1-E8
gaaatcctagatcgatatcttgatgtggttctaaagggaaataaggatggggtgaagaaacgtgcgactgaggattgaggatccaccacgaagaaagcatatggtgtatcttggtggagctgtacttgccgggattatgaaggatgcacctgagttttggattagcagggaagattatttggaagagggagttgcctgtctaagcaagtgtggcccggcttgacttctaacatcagtttgcaattcttgttggatgttcagtgtgttcaccctgtgattgcatgcatttattagccaagaaaacacacacaaggctgtccagggcaagctgtctcatgtcggttgacttggttatatcgtatcctaccatgtattagcctctcggaccaagcagcctgttgagtgattccctcttatgttattactatcagaaagagaaaaaaaaaaaagcttccttgtaggagctacatatatacatttaccagaccacaaattttggttttgatgtgtactcttatag

SEQ ID NO: 9834 - DNA, 398 bp, Gossypium hirsutum
  Clone ID: LIB3585-037-P1-K1-B6
cccacgcgtccggcgactgaggattgatgatccaccacgaagaaagcatatggtgtatcttggtggagctgtactggccgggattatgaaggatgcacctgagttttggatcagcagggaagattatttgaaagagggagttggctgtataaacaagtgtagtctggatagacttctaacatcagcaagcaatgcttgttggatgatcactgacttcacgctgtgatagaatgcatttattagccaataaaacacacactaggctgaccacagcatgctgactcatgtcagatgacttgagaatatctgatactaccatctatttgtctcatataccaatgagcctgatgagagattcaatctaatgttactactatcagggcgagaagaaatcccag

SEQ ID NO: 9835 - DNA, 815 bp, Gossypium hirsutum
  Clone ID: GOSHI-09MAY01-C79467_1
tttgctctctttgttcttcgttctctttattcttcgctctacatttattcaaataaagataatgttgtaaagtatacaccagatcagattaggaaaatggaagaatcagataagattcgaagagctagtgaacctatagagcttgttaaattgattaagcgaataaagcatgaattttcaagtgatgaatcgttggccgaattgccacgggcggttaagcataagataactgatgaaatcttacagagattgagaagtttgagaccaaatgccagtatcagtgaccagcaagaagcggttgaaacctggcgcaaggagaaactaaaagaagccaaaacgttggccctcggaggagaggggttgaattcaactcttttgcaagaggaagcggggatgttagtaaaagccttgcagtccaattgggctgcactatcggaagaaatcggcctctggatacccactgaagtcattaatcaagaacatgatgataagcctgagggtgtggaagatacagaagaggaggaccaaattttagctgggaggccgcttccaccacaatgccatgctgaacttcacacagattatgatggtgcagccgttagatggggtcttacccaccacaaagaaagtgcagccgattgctgccaagcttgtttagatcaagtgaaaaatgcaaagccaggtgaaaagaaatgcaacatatgggtttattgtccgtcggaagacgggtgctattccccagatttatttcaacacaaacacatggaatgctggctgaaattttcaaagaagccaagactgaactttaaaaaccg

SEQ ID NO: 9836 - DNA, 1264 bp, Gossypium hirsutum
  Clone ID: GOSHI-09MAY01-C79727_1
ctcttttgtagggacctcttacttggggtgcggggggggtaacggtcatctcttgaattttcaagtgaacatgagtaatggtgagggaacagatagaaaaaaggtttctcttgggactcaacccataacgcttcgtactttctcctccaagagtaccgcccatgtttttgcctcttcaggggggccaactgtcatttatagtagtaacaagaaattactctacagcaatgtcaatttgaaggaagtcggtcacatgtgcccttttaactctgctgcttttccagacagcctcgcaattgcaaaagaaggtgaacttactataggcacgattgatgatattcagaagcttcatatccgcactatcccacttggggagcatgcgcgtcgcatctgccatcaagaacagtctcggacctttgcaatatgttgtttgaaaaaccagtctagtgctgacgaatctgaaatgcattttattcgcctgttagatgatcaaaccttggaatgtatctcgacttaccctcttgatacttttgagtatggttgctccattcttagctgttcattctcagatgacactaatgtatattactgtgtggggactgcatatgttttgccacaagaaaatgagccaactaagggccgtatactggtttttattgttgaagacgggaagttacagcttattgctgaaaaggaaactaagggagcagtttactctttaaatgctttcaatggcaaactcctggctgctattaatcaaaaaattcaactatataagtggatgcttcgagaggatggctcccgtgaaatacaaactgaatgcggacatcatggccacatccttgctctctacgtgaaaactcgtggggattttattgttgttggtgatttgatgaaatcaatttcattgttaatctacaaccatgaagaaggtgcgataaaagaacgagcccgtgactacaatgcaaactggatgtcagcagttgaaattcttgatgatgatacttatttaggtgctgaaaacaacttcaatctgttcactgttcggaagaacagtgaaggtgccactgatgaagaacggggccgtcttgaagtgattggtgagtatcaccttggggaaattgtgaataggttccgtcatggttcccttgtgatgcgttgccaaattccaaattggccagaatcaccgttatttggcacctcatggtgcattggcgtgattcttctctccgcatgatcatatggtttctggagaactgcatct

SEQ ID NO: 9837 - DNA, 357 bp, Gossypium hirsutum
  Clone ID: GOSHI-09MAY01-C79127_1
aaagatttttcatttacttgctatcttgactactccatttcttcatcaccaacagtctcaatctgggtttcggctccatcttcctttcggagccaggtctctgtggtttagcgcttcgcccactaggacattgtctgaaggcatgatggttttcttcttctttggagcaacagcaaggacatgtgacatttgtaatcactcacttatgtctaaggtcgactagtgtggggatatagttccaggaaatccgccatattggtaatgcaattttttatggtagctacaaatcccataattttctgtagaagtcttaaatttcctccctgtaataaataaatattaggatccgagctagca

SEQ ID NO: 9838 - DNA, 626 bp, Gossypium hirsutum
  Clone ID: GOSHI-09MAY01-C79057_1
cccacgcgtccgcaaatagcagtcaacaaaaagttagaaacagtttacagggaccagctagaaggagcatggctgctccctcacgtcaccgacacaatggaacttcaaatgttgtttcgaatactgctcaggcttggcctgcagtgagccttcaacctaacatgtccgctgctggtgcgcaccggtccagacctgtgacaaaattttcgcatctatcaactactaataactcatctggctcttccaaaagtaagcctactaggattagggaatctttacccaaggtggaagattttcaatctgctaacaaagctctagtggaaaagatccgtgtttctttggaatttgatcaggacaagttttctgcattcacaggaataaccggtgaatatcggcagggttttattagcaccgaggagtatcttgcctatgtgcaccagtttggtttatcgcatcttgttcttgagctagctaggttatgccccaacgttgagaaacaaagagaacttgtggagatatacaattttaacataagtaacagctattcttgcaatgatgacactggtcaatggaaaaacgataaaaggtcaaagaaaggaaaggagaagtgtgaagactatggcagt

SEQ ID NO: 9839 - DNA, 518 bp, Gossypium hirsutum
  Clone ID: LIB3584-020-P1-K1-C4
aaaaaaatatgttttctctgtttatcaacaaggcatttctttttattttcaagaaaaagatgtctcttttaatcatgtttataaatgtggcatatgtaacagattagctaatgccttaatgcagggtatacacatagccggtgcatccgatgctggttattttggactgtctggaactgtaaactcagggattacttcatttgagatggaatacaggcactgggttgaagagcaaaatagactgatctgtgaacttagaactgcagtccaggcacacgttactgatatagagctccgtatactcgtagaaagtggcttgaaccactattacaatctgttctgcatgaaagctgatgctgctaaggcagatgtcttctatttgatctcgggtatatggagaacttcagccgagcgttttttccactggatcggaggattccgcccatcggcgcttttaaatgtaatgctcaatctcatattactcttatttttctggaaggctgccaattcggtcgatt

SEQ ID NO: 9840 - DNA, 488 bp, Gossypium hirsutum
  Clone ID: uC-gsflnu33B058e03b1
ttttatttcaaatattggatcatccacaattgttccagcagatgtcaggctaaagaacaaggctgaatgtataccttgtgagcaagtggaaccatccattagtgatcaagaaaccaacaaaccctccgataagatacagagacgtttggctcaaaatcgtgaagctgctcgtaaaagccgaatgcggaaaaaggcctatgttcaacaactagaatcaagtcgtttgaaactagctcaattggagcaagagcttgaaagagctaggcagcatggtatacacatagccggtgcatcagaggctggttattttggactgtctggaactgtaaactcagggattacttcatttgagatggaatacagacactgggttgaagagcaaaatagactgatttgtgaacttagaactgcagtccaggcacacattactgatatagagctccatatactcgtagaaagtggcttgaaccactattacaatctggtcc

SEQ ID NO: 9841 - DNA, 444 bp, Gossypium hirsutum
  Clone ID: GOSHI-09MAY01-C79317_1
cgttcttgcacttatgagctttacttcttctttgatagccagtcttggtgtggatgcgcctgtcactgagacggccttcacttacttcgctttagctgtggtttatggtagcatcttgctctataggggtcaaaagctaaggattccttggtattggtatctcgccctcggctttgttgatgttcaagggaattatcttgttaacaaagccttccagttctcctcaatcactagtgtgacactgttggactgctggaccatcgtatgggcaatatttctcacatatttcttcataggcactagatattctttattgcagctaggaggtgctgctctttgtgtgcttggccttggtctagtgctcctctcccatgcaagggtgggtggtggaggtggttccaaaccaaatcttggagatgcactagtaattgctggcactctctt

SEQ ID NO: 9842 - DNA, 924 bp, Gossypium hirsutum
  Clone ID: GOSHI-09MAY01-C79287_1
cccacgcgtccgcaagtctctccaagtcataatgagcagagacctcctagtgttcaagttccaaattatgataaggggcctcctggtgttcaagatacaaaatacatggagaaaaatgacgtgcctacaagcttttctgagtacagctcaagatcatcgcctaatcctaagaattttggttattcgatgtcttctggtactggaaatcaagggtttatgcattcatattcggggaacgagagtgcctactcttcaccaaggcagcattggaatatggaattcaaggatgctactactgctgctcaggcagctgcagaatctgcagagctagctagtatggctgcccgagctgctgctgaactttcaagccgtggaaatttctccccacggtattcaatgtcaccttcccatcgtatgagagatgaggaaccatggaaatatactggctcggcatctcaacatgaacatgttggcagggatccagttaatgtttcccttcacggaaggaattctaggaattacgaacgagttgacagcaatgaacaatatgcccgagcaggaaacggtgataaatctaccaacagttccttcaagtcaactgcatcttcctacaatgaagaaacatcaccgaaaaaccaaaccgcagatgcatattctcgaagagactcgtttgaaggcatgcatatggagccatttgctggttctaagagaaattctagtgaaaatggagatccttcatatggttgggtcagggaacaatcaaaattttcttcttctcggttctctatctaacagttttactgatgatcatgattgtgtctctgattcaactggtgtaatcggaaattatttgataactcttgtgcaactggattccattttgatgaactgattatcataatattctatttgtggtatacaatg

SEQ ID NO: 9843 - DNA, 742 bp, Gossypium hirsutum
  Clone ID: GOSHI-09MAY01-C74907_1
cccacgcgtccgtaactggtgaccacaaattaagtgcatggagagtagctaatgctgtaggcataaatgaagtctactgcagcctaaagccagaggataaactcaatcatgtgaagaggatttcaggggatatgggaggaggtttgatcatggtaggtgaaggtatcaatgatgcaccagctctggctgccgcaactgttggaattgtattagcacatcgtgctagtgcaactgctatagcagttgcagatgtcctattgcttcaggacaacatttctggtgttccattcagtatagccaaggctcgccaaacaacttcactggtcaagcaaaatgtggcccttgccttaacgtgtataatcttggcctctctcccatcagtcttggggtttcttccgctttggctgacggttctcctgcacgaagggggtactcttcttgtttgcctcaactctatccgtgcactaaatgacccgtcatggtcctgggggcaggatctaaggaatttgatcggtaaactcaaatcaaaacttgcatttttgagacataacgccacttcaagccccatccagactgcacctttgtaaactaatacttagcttagacttggtgagaaatttttccttaaattctttttttgtagttaagagatggctcattctcatattgttgtttataagcaagagtccaaaactgtaaaaagttgatacatcaatgaatcaatgaataatatttggttgtt

SEQ ID NO: 9844 - DNA, 588 bp, Gossypium hirsutum
  Clone ID: GOSHI-09MAY01-C74857_1
gtttgattttgcctgaggccacatcaaaagagtgtctgccagacgtaaaacttgaactcaactccgggaaaaaggattcttttgagggtgttcgagacattaatgctacagtcatacttccaagtggtgtacatagcctgccaaataaaggcgaaccttcatcactgatccaacgatggaaatctggtggagcatgtgattgcggtggctgggatttgggttgcaaacttaggattctgtctaataagagccaatgcaaccagcgccctagttctttgagaggttcttcaatttctaatcaatttgaacttttcttccagggaggtgcacaagacaacatgccttttttcagcttggcctctttcaatgacggtatctattcagttgagttcaattcatcactttctcttatgcaagcattttcgatttgtatagctgtttgggatagtggaaagcactgtgagctttcagaatcagttcccttgtatgaagaaagaactttaggggaaaccatattaaatgatggaacaaatgaacctaatcaaattgagggagagggccctgctaggtatgtctcatatccaccca

SEQ ID NO: 9845 - DNA, 872 bp, Gossypium hirsutum
  Clone ID: GOSHI-09MAY01-C74527_1
cccacgcgtccgcccacgcgtccgcaatcttcctcctcctttgcttcgaactgtattgactttgggtgattcaagtaagataaaagaagaaaatatgggaaccgcagcagctcctggcccttacatgaccaacattaaaccttgtatttcttcttctcgtaaaattgttgtctcgaccatggtgaacatcatcgctcagcataaagaggcatcatggtcagggcttgcaagtgcctctcacatctcgtcaaggcagccgttcctccataggatcacttcaaagcctgtcaagtttgaaaagtttgttacaagagccatgtctgaaccaagtgacaacaagcctttgtctggacttcctattgatttgagaggtaaaagagcatttatagctggtgttgctgatgacaatggatatggttgggcaatagcaaaatctcttgctgctgctggagctgaaattcttgttggaacatgggtgcctgcactcaacatattcgagagcagtctaagacgtgggaaatttgatgaatcacgcgtattgccagatgggtcattaatggagatcaccaaagtttatcccatggatgctgtttatgactctcccgaggatgtacctgtagatgtgaaaacaaacaaacgttacgccgggtcttcaaactggacagttcaggagcttgttgaatgtgtgaaaaaggattttggcagcattgacattcttgttcactcccttgcaaatggaccagaggtaagcaaacctcctttagagacatcaagaaatggatatcttgctgccctatctgcatcaagttactcctatatttctctactcaagcatttccttccaataatgaatccaggaggtgcttctattt

SEQ ID NO: 9846 - DNA, 703 bp, Gossypium hirsutum
  Clone ID: GOSHI-09MAY01-C74667_1
gcaatttcttacaatgggcatgtgatcaaggaaattgtttcgggcaaaggaacacctttgatgccgaaccgcactttcgagacatatatgtttgcattgtttaacgagaatcaaaaaccaggtccattggttgagaaatactggggaatgtttaatcccgacttgacccctatttatgatgtcgggcttctacgaagagggcagtcggcaccaacaccagcaactccagcaccatcatccagcaagaatttctgtgttccgaaagtcgatgttagcaacacccagctgcaatcgaacctggattatgcatgcggtcaagacggcattgattgcacaccgattcagcccggaggagcatgctatgaacccaacactctccgggctcatgctgccttcgcgatgaatacttactatcgaaccaaaggtgagagctatttcagctgcgatttcgccggcactggtcaaatcaccaccgtcgatccaagttatcccacctgccgtttcgtctgaaaattccgaagcgaagaatgtgtgtaaagatggttgattgcaaagcttggatgtcactatttatcagcagaatgttgcaaaatttcattttatatggatgggtccaacctctgcccttgtttaaactctgtgactatgctaatgccttgattgttagtaaattaagtatttgaatgaaatgttttcttatact

SEQ ID NO: 9847 - DNA, 672 bp, Gossypium hirsutum
  Clone ID: GOSHI-09MAY01-C74277_1
atggaaggtggcttagttttacttggtggcggagccaacggcggcggaagcggtggttcttctgggttttcaacaaacgagtcagcaatgtcagaggcaagctcgtatccagccgagactgagcttgagctaggactagggctgagcattggtggtcctacagggaagattaataaggctagtggtagaatcttgactgccaaagacttccctgttcctcgtcgagcttccatgaacggcggcactcctccttcagttaccgtttcagggaccaaaagagccgccgatcaatctgtcccccatgacggtggctctcctactgctaccagtcaagttgtcggatggccacccataaggtcttacaggatgaacagcttggttaataataaccaagctaaagctccaagagctgaagaagaacacagagggatgaatgtagaagaagaagaagaagaagataaagctattaaagatggttcaaagctgaaaaaacccaatgaaaatttagggcatattgggtttattaaagtcaatatggatggcattcgaataggaaggaaagtgaatttgaatgctcattcttcttatcatatttggcttcagcactcgataatatgttcctcagatccgccggtgcagagaaacaacaattaacaatgccctcttagcttt

SEQ ID NO: 9848 - DNA, 522 bp, Gossypium hirsutum
  unsure (1)..(522): unsure at all n locations
  Clone ID: uC-gsflnu33B108d01b1
ctcacgcgtccgcccacgcgtccgntttttttttttttttttttttttttgaagaagacaggagaaggagaagataaagctataaaagatggttcaaagcaagnaaaaacccaatgaaaatttagggcatattgggtttattaaagtcaatatggatggcattcgaataggaaggaaagtggatttgaatgctcattcttcttatcatagtttggcttcagcactcgaaaatatgttcgtcagatccgccggtgcagagaagcaacaattaacaatgccatctaagcttttggatggatcctctgaatttgttttgacttatgaagacaaagagggagattggatgcttgtaggagatgttccatggatgatgtttctcacctcagttcgaaggctccgaatcatgaagacctccgaggttaatggacttgctccgagattccacgaaaggaaccgaactcaaagaagtaaactgatataacattatcgaccgacattacaattcgccatttaattttccgt

SEQ ID NO: 9849 - DNA, 787 bp, Gossypium hirsutum
  Clone ID: GOSHI-09MAY01-C75507_1
aaaaaaggaagaaaaaaaatcgaagctttgagccatgaaaaacattatatgaatgctctaaagtcaattcccatgtcgagatcattgattcaacgcattactccatttttcatagctcgaatcaagcaaaaccataagcttctaagctcttctttttcttcatcttcttcagctattcatgaggcttcttctgaatctccatctccttccctcgatgcagttcacatgactgataattgcataaagagaatgaaagaattgcaagcaagtgagcaatcatctgatcataagatgcttcgattgagtgtagaaactggtggatgttcggggtttcaatacgtgtttgatttggatgacaaaacaaacccagatgacagagtttttgtgagggaaggggtaaagttggtagtcgatgatatttcctatgatcctgtaaaaggagcaaccatcgattatgtcgaggagttaattcgttctgcattcgtggtgacgacaaatcctagtgcagttggagggtgcagttgtaaaagttcattcatggtgaaacagcccatgtttcaagcgcatcgctcataccaaatcaaatttttttctttgtcataacatttatttagatgcaaaataatatgcacactttggtctcgtagttctatggtgtttggattcgggatgaatatcataatgtaacgaatggctgctgattatctggtaacgaggaatttcctctcaatgagattggttactctttttacaaaaaaaaaaaacaaaaaattctccttgttattcc

SEQ ID NO: 9850 - DNA, 472 bp, Gossypium hirsutum
  Clone ID: LIB3543-022-Q1-K1-F12
gaaaacccttacaggtttttttcttcagtggttggtggcaaatatccttgccaactcctcagaaaatccacatttgttttttttttcactgacattaagcatggcttgcagagaatgaaagaattgtaagcaagtgagcaatcatttgatcagatgcttcgattgagtgtagaaaccggaggatgttcggggtttcaatacgtgtttgatttggatgacaaaacaaacccagatgacaggtttctttgttctcttttgtttttcattttggttttgcaaaaagtatgcttaatttctctctctctcttcctacttctttaaccattttcattttcttgttgtataatatttcctatgattttgtaaaaggattgaactgactgacactctcactagtcactgcaatctatcgaaaattccaattttgtattgctcaatctgttttctttcaccttctaatactataatttca

SEQ ID NO: 9851 - DNA, 721 bp, Gossypium hirsutum
  Clone ID: GOSHI-09MAY01-C75407_1
ttcgcaatcggcgacaaagcgagtgacctccgcattagtcaactcgtcccaattcaactcagcctgcgactcagtctacagtcaatgcctctcccttacccaagaagcctaccccggagtcttcccttatcagctcttgaacgccgccgctaacctccatcaacacctcacttcccttcgccctcaccctctcatcctccgttgggttcctcatcctcccgctcgctcccaagtcgattctgcgttccggttcgtaactcgccaccaggataatccccggagcgatgaagaagcacttctcctggattcctccgacttcagggaatgggcagtggttttattcagcgatgccgtcgtgggaaacgctggaaaggcagttttgcagcgagtgccgcttggggttttgggtattgcggggattggcgcggcggcgaggagggggaaagaggttgttggggcagcgattggagtgtacgcgcttggtatggctacttcaatttaccttagcttgtctgggttagtttcttaattggcttttcaattaaagtagaaaaagtaaatgtttagcatgaagtaaactagattagataatgtaattgttgggtggagaaattgtagcatctgtgaagtaactgtcccttcatctttatttcgagagaaaaacaagaggagtgataagctttctcaagtaattcaatttttttaagtagaattttatttg

SEQ ID NO: 9852 - DNA, 593 bp, Gossypium hirsutum
  Clone ID: LIB3825-011-Q1-K6-B5
atttgaaaccggagcgtagtgggggatttagtaatagtttacataaatatatatacatatccgaattatttaacgttcggaagttggaacacatggctgctgctaagctgcttatccccactctctcccacttccggccgctaacatgcgctgcggccgtctccgctacaaacccagcgcggctggtccctcacccaccggacctcctcaagtggatcaagagggaaggtgggttcgtgcacgaggctgtaacaattacccaggatacaacttacgggctaggtcttgtcgcctctggaggaatccccaagggttctgatcttatcgtcctccctgaacactttcccttgaagtttcaatcagacaaagacgatgaggctgactctgttttgctccctttgtctaaccgagttccaggaacttgatgctctttcctaggaagcaaatttcaacgtgtttctcttagcattttatacttgcttaatgcttattgtggttatgcgtgtattattttgctcctatgcttgattcaaccccaagattctcccagagcccacttatagttaactagaatggtttgtttaccagtggtc

SEQ ID NO: 9853 - DNA, 336 bp, Gossypium hirsutum
  Clone ID: LIB3493-008-P1-M1-A7
tcgcttccggccgctaacatgcgctgccgccgtcttcgcctcaaacccagcgcggctggtccctcgcccaccggaccttctcaagtggatcaagagggaaggtggcttcgtgcacgaggctgtaacaattacccaggataccacctaccggctaggtcttgtcggctctggaggaatccccaagggttctgatcttatcgtcctccctgaacacgttcccttgaagtttcaatcagacaaagacgatgaggctgactctgtctcgctccctttgtctaaccgcgttccaaaggaactatgggcaatgaagctgggtctgaagcttctacaagaaag

SEQ ID NO: 9854 - DNA, 463 bp, Gossypium hirsutum
  Clone ID: GOSHI-09MAY01-C75637_1
gaaaaaggaaagttcaagctaagctaaaactctgaactgggcacttctcagactgctcagggactgaaaagattaaacgaaaggaaaagaaaaagacttcttctttttttccctaaaagaaaagtcgatctttgttagtgttggtgcgattctctttagccatttcctttttgcatgtagatgctctttggtagccttaactcgccacttcgactcacttcaatccatggcttataaccccaacgagtcccccgctgatgatttcctcgagcaaatcctcggactctcccactttgcgcctactgagactggcttagcggggcccgacggtagattgtctggaaacgccacgacggctggagcgccaatgcttctgcagctcagctccggcggtggcaccggacacatcggcgctataggcggcggtggaggcggtgcgtttcacggacaggtttttccattg

SEQ ID NO: 9855 - DNA, 677 bp, Gossypium hirsutum
  Clone ID: GOSHI-09MAY01-C75197_1
cctcgtgccggcacgaggtggcagtccactggttaccccttggtcctccattgtcaacgtggggataggctttgtcatgttcgtctacatcattatccctctttgttattggaagtttaacaccttcgatgctcgaaaattcccgatattctctaatcagctctttactcacagtggccataaatatgatacaactaagatcttgacaccgcagtatgatctgaatatttctgcatataacagttatagcaaactctaccttagcccactttttgccttatctattggatcaggattcgctaggttcacagcaaccctcactcatgtggcattgtttaatggcagtgatattctgaagcagagcagatcagcaatgaagaatgtgaagctggacatccatgcaaagctgatgaaaaaatacaaacaagttcctgaatggtggttttacattttactaatcggaagtatcgttctgtcacttatgatgtcctttgtatataagaaggaggtacagctgccatggtggggtatgctccttgcctttgctttggcctggattgtcacccttcctattggagtcattcaggcaactacgaaccagcaacctgaatatgacattataacccacttcataattggttatatcttgcccggagagcccatttgcaaactgcttt

SEQ ID NO: 9856 - DNA, 455 bp, Gossypium hirsutum
  Clone ID: GOSHI-09MAY01-C75167_1
gctcgggtcgaccccatcgccgtcgccgaaaggacgatggcatatagctgatataatgttcaacaaatcgtttctcttatatgtccaaacaaattctaatagtacaaaaacgcctctcaaacgtcccctcatttgcttcatcaagccccactctttaaactatcataaacccaagggttttgaagacaaacttgaaaagggttcattttcattaagtgaaacattttcaaaagctggcttgcttgctcttgtttcagcttccattctattggtagatcctagcacttgctctcaagggaggagggccttatggatctgaagtaacacggggacaagacttaaccggcaaagattttagtggcaagacattgatcaaacaagatttcaagacgtccatattacgacaagccaatttcaaaggcgcaaagttgcttggtgctagctctttgatgccg

SEQ ID NO: 9857 - DNA, 652 bp, Gossypium hirsutum
  Clone ID: GOSHI-09MAY01-C75117_2
tttcccatttctcccctaaatcgaacgttgtttttactttcctaaaagaagatggggatcaaacgttctatcctcctcatctccatcttctccctcgcagctatctcagcttgtgctagacctccttcagacattactgatacgcccgagtcacccgattccacacccgaatcacctgattccacacccgaatcacctgattccacacccgaatcacctgatgatgactattcacctaatgcaccagatgaagcagcagacggttatgcacctccacctgaagcaccaaccccatctgcaacctttacaatattgccaggcggtagttaccctgagctcgatcaaatttgtggagcaaccgactaccccaccgaatgcgtaagattcatttctccgtacttgaacgacggtatcaaaatcgacccactcaacgtccttaaagtcgggattcacgtagcgactaacatgaccatagaagccctcaatctcgctaggaagattagggacggccccagaacctcaccaaatgctcaatcatgccttagcgtatgcgccgaaaactacgacttaatccccgacggcaacgaactcgcgctacgtgccatcgaggaacgcaactggagcgattgagaaaccagctgagcggcgatct

SEQ ID NO: 9858 - DNA, 686 bp, Gossypium hirsutum
  Clone ID: GOSHI-09MAY01-C75117_1
aagcaatcgaatcaccattcccatttctccccgaaatcgaacgttgtttttactttcctaaaagaagatggggatcaaacgttccctcctcctcatctccatcttctccctcgtggctatctcagcttgtgctagacctccttcagacattactgatacgcccgagtcacccgattccacacccgaatcacctgattccacacccgaggcacctgatgatgactattcacctaatgcaccagatgaagcagcagacggttatgcacctccacctgaagcaccaaccccatctacaacctttacaatattgcccggcggtagttaccctgagctcgatcaaatttgtggagcaaccgactaccccatcgaatgcgtaagattcatttctccgtacttgaacgacagtatcaaaatcgacccactcaacgtccttaaagtcgggattcacgtagcgactaacatgaccatagaagccctcaatctcgctataaagattagggacgaccccaaaacctcaccaaatgctcaatcatgccttcgcgtatgcaccgaaaactacgacttaatccccgacggcaacgaactcgcgctacgtgccatcggggaacgcaactggagcgatttgagaaaccagctgagcggcggtccgaccagcgtaaacacctgcatcgacgtgtaccatgaag

SEQ ID NO: 9859 - DNA, 563 bp, Gossypium hirsutum
  Clone ID: GOSHI-09MAY01-C75077_1
gcgtttgtgggtttatttgaagtttttttgcctctcgtttgctttctgcttctctactgcttaagaggtaagtatcatggacctccaaagagtttcccacttgttgggatgataccacagtttctcttcaacattcctcgactgcacgactggtttaccgacacactcgagatatgtcactgcacttttcttttcaaagggtttgctaagatgaacgtactggttacctgcgatccttccaacattcactacattatgagttccaactttaacaacttccccaaaggacctggattcaaacagatttttgacatcttgggagacgggattttcaatgtggatatggatttgtggagaaaacaaaggatagctgctcaagggttcatgaggcatcagctgttctacccgtttttgtcaaggactaccggagccaaggtggaagaggggctcattcctcttcttgaccatgttgccaaacgaggtttagttgttaacttagaagatcgttttcagaggttcgcatttgatgctacctgcatcttggttactggctatgaccccga

SEQ ID NO: 9860 - DNA, 522 bp, Gossypium hirsutum
  Clone ID: GOSHI-09MAY01-C75327_1
ttaacgtcgtaaggggattgcttggacagaggatgagcacaggttatttcttcttggtttggaaaaatatgggaaaggtgactggcgaagcatatcccggaactttgtggtcacaagaacgccaacacaagttgcaagtcacgcgcaaaaatatttcattcgcttaaactccattaacaaagataggaggcgatctagcatccatgatattactagcgtgggcaatggagagattctagcaacccaaggaccaatcaccggtgaaccgaatggtgcggcaactggaggttcctccgcaaaatcagccaaacaaccctctcagcttcctgctgcaccaccaggtgttagcatgtattcttctccaactatagggcagccaataggagggccccttgtctcaacagttggcacgccagttaatcttcctgccccgccacatttaagcttatggagcagtggttcctactgcaccgatgaaacatgggcctgtcaattcctctgccgcttcataatctgatcata

SEQ ID NO: 9861 - DNA, 487 bp, Gossypium hirsutum
  Clone ID: GOSHI-09MAY01-C75267_1
cccacgcgtccgcccacgcgtccgccctcgcctcccattctcaatctctttccaaatgtactttttgggggctttggtttcgaagtaactgaacatggatatttcagctttcacgagcctcccaaactcatccaaagcaaaagcataaaacggaaactacgacatccacagttctttgtgtatctccttgtccttgcgctctgctgccaatacgctcaagagagaggaggaagattcatgtcattctcagcgactcttttatgtctctggggattgtcaaatcgtgcaagtcgtttagatcaatgatattagtcttgtgaacggtggtgctgaaccatgattctcggaagtaactctctccgagaaacccactatgatgttctctttgttaaggaagatgcgagttatgaagaaattcgtgcgagttatcgtacagctatccttaattctcatcctgataagttgaattctgaccatgagactggag

SEQ ID NO: 9862 - DNA, 1113 bp, Gossypium hirsutum
  Clone ID: GOSHI-09MAY01-C76527_1
gctgctgtcgctctcgtttgtttgcaggtacggagaaggccagctggcgtgcggtgctgcgtacggaggtacggagaggccttggaggctgctggaggcttgttgcggcgcaagggaaaccctagggtttctggtggtgttttaattttgggccattcgggccttgtattttttgggctaatgtttgggttataatgtttggattttatattttggcttatttttttgtattttcattttgtttttattttcatacggccccggcataatttgggccttacaactagtatggattaaaacaaggaagtggccattagaggtaaagagattgctgagaaggatgttgctggggcaaaaagatttgttttgatggctgaaaacctgtatcctgtgctcggtggtcttcctcagttgatttttgctcttgaccggtcccgtgcggccgatgaaaagatcaatggagaagttgactggtacagagtgcttggtgttcagccatatgccgatgaggacaccatttggaaacattacatgaagctggcttttattcttcatccggacgaaaacaaattcgcaggtgcaggagctttcaaacttctattagaagcttggagtttgttgtctgataaagcaagaagattttcttatgaccagaagctgaacttaaggggtagctttacgaatgttctacatgggaaatcatcaatggcaacaacaagctctaatggtttccataattcctacagtgttaaaaactcaaacatcggtgatcagcacggtgctacttattccaattctgctcctccttgctcaacaagaactgatacattttggacaacctgcagttcctgtcaagaaggtctaaagtcttgtaagggctgtttgaaacttgatccagcggctactccttcagaactgcttcaagttttcactgaagctcaagtggtgatcatgaaaagagctcgagaagatgtaccgtttgtggattcaaaaagatccgaagaaaaagagctggttgagaatgaccaagaaatgaaaccaaatactaccaaagaaggtgttcgagaaggtttgttatagaagaagatatcaagagggaaagggggggggggg

SEQ ID NO: 9863 - DNA, 452 bp, Gossypium hirsutum
  Clone ID: GOSHI-09MAY01-C76487_1
ctcaatttcaagaagcacgaaaaaaaaatcaaaatcttccaaaagagaaaattttaaagatggtttgtatagcttgcctattgccactcttcctcgtaccgatcgtcaatattttgcctctcctcttctatttcatcatgggtaaagtttactggcttcttggatgggaataccggaaaccggagagggcacctgcggcgtgtccgtataagccgcctgcgaaaacggaaaactctagcaaagttgggccagaaactgaacctgctgtaccagagtctagttcgaaaccaatgggagtaacagataacaagcaggactgataactgaagtttgtaagtgggtttccatggaacaaaatccaggcataaaatgtatgatctttttgaagattaacttcttaagcttggtggtctgatctgaacaaagaaaaaagaatttttgttgatttccag

SEQ ID NO: 9864 - DNA, 891 bp, Gossypium hirsutum
  Clone ID: GOSHI-09MAY01-C76197_1
cccacgcgtccgcttgttttggatttgtgggatataggggaactttcacttggtgcttcaaggatgaaagaaatcgacttctgtcccgaggagtctgagaatcatattccttgctttaacatttcagagaatcttgctttgggttattctgatggtagcgagtatgaccggcaatgtggacaaggctcaaggcaaagttgtttagttcttccacccgtgaactataaaattccacttagatggccaactgggagagatgtcatttgggttgcaaatgtcaaaattactggtcaagaggtgttcacctctggcagtttaaccaagagaatgatgatgctggaggaagagcagatttcattccgatcagcatcacttatgtttgatggtgtggaagactattcccatcagattgctgaaatgattggattgagaaatgaatctaacttcatacaagctggggtcagaaccatcttggatataggatgtggttatggaagctttggagcacatcttttttccaaacagctcttaaccatgtgcattgcaaattatgagtcatcaggcagtcaagtccaactcactctagaaaggggccttcctgcaatgatcggttctttcaatgcaaaacaattgccatatccatctctttcatttgatatgctgcattgtgcacgctgcggtattgactgggatgaaaaagatggtattttcttgattgaagttgatagagttctaaagcctggtggatactttgtatggacttcacctcttaccaatgttcagagttttcttcgtaacaaagagaagcagaaaaggtggaactttgttcgtgattttgcagaaaacctctgctgggaagtgatgtcacaacaagaggaaactgtgttgtgg

SEQ ID NO: 9865 - DNA, 949 bp, Gossypium hirsutum
  Clone ID: GOSHI-09MAY01-C76187_1
cggacccgcgcgtgaaaatggcatggtcaaatactctgcttcagattcacatcaaatccccttcgagcccttctctccatttcccacattccctcccaaaaagctccccattccttcttaatcctaaccctataaatcccattcccagatccctcagaatgcaattccttcacagacccaacgctgtcccactcgtatcaagagccatggacatcatccaatcgtctcctcccacgtggcaatccgcagtcctcagtaacctcttgatcttcgtcgtcggcaccccacttttagtggcggggctttctctctccggaatttgtgctgcgttcttgcttggcactctcacttggcgcgcttttggctcccctgggtttctcctcgttgcttcgtacttcgttattggaaccgcagtaacaaaagtgaaaatggctcaaaaggaggcccaagggattgctgagaagaggaaaggaagaagaggaccggggagtgtaattgggtccagtgctgctggttgtgtatggtgctgttctaacaatatatggagttggcgggagaggcatttacacgtctttggcgacttggttttatggctagtttctgtactaagttgagtgataccagtgtccagtgagattgggagagcatttggcaaaaaaacgtacctggtgacaaacttcagattgttcctaggggaacagaaggagctgtagtgttgaaggaactgttgctggacttctagcatctatactggcttgcacctattgttgcctattgggtgaaataatgtccctgagtatggtatggtatagcaatccagatgctaaacttgtagagcatatggtctgattcaaggaaagaaggatcttgctgaccaatgagccgtatgcataacttcatagctgcttttgagtaatgacactactcaattggcaatgtatacctctcc

SEQ ID NO: 9866 - DNA, 640 bp, Gossypium hirsutum
  Clone ID: GOSHI-09MAY01-C76217_1
cgttggctttaaaatctgcagattttgggtaccttttccctggggtcagcattgctttcttggtgtagcaatagacaaccactatttcctttcatccactgaagagagactgtcaggccatcaactctttctggtggtttcaatcagcaaggctatcgacctcggggaaacagcggtccacctcagtggggtccccgggggcatcctcctcagacatcatatgattatcagcaacgaggaccatatccatctcacaactctcattatcaacctccgtatggcggctacccttctcaccaaatggctccaaggagcaactttggttctagttgggagcagaggcctcatagcatgcagggaacctcctcagagtggcaggttatgattactacagcaggcagggggggggtctctaacccacatttgacttcaattcccggtcatggaccgggttcctcacctgctccagctatggggccggctccatctcagtcgagttataattatggacagcttctggtcagcagatatgcgcatcaccaccctttcgaagctgctcccacatgatacgactggtatgagagagttgaatatcccagttagatctatgaggctgattgtagcagaatccatcagtcta

SEQ ID NO: 9867 - DNA, 488 bp, Gossypium hirsutum
  Clone ID: uC-gsflmaxxa067d05b1
tgatcgggatgctcctacaagacctgtagaaattatggggactttgagtagcataatcaaggctgagaagcttataaatgctgtcatagcagaggctgatgctgggggttctccttccctagtagctaggggccttgctaccacacaggctgctggtgctgccgatcaaattgagatacaagttccaaatgagaaggttggtttaatcattggtagaggtggggaaactataaaaggactgcagacgaggtcaggggctcgaattcagttgatacctcaacatctcccagaaggggatggatcaaaagaaaggacagtgagggtaactggggataagaagcaaattgagattgccagagaaatgataaaagatgttatgaatcagactgtcaggccatcacctctttctggtggtttcaatcagcaaggctatcgacctcggggaaacagtggtccacctcagtggggtccccggtggcatcctcctc

SEQ ID NO: 9868 - DNA, 717 bp, Gossypium hirsutum
  Clone ID: GOSHI-09MAY01-C76227_1
gcagccattaacccccaattgatagggtttcacgtggctagcagccgacatgcaaatagctccatcaaaggccgacgacaggcgattaacggccaaatccttcccacgcaagtcgcaaccatggagatccggtaagcccccctttctccttcgttttttttttttgttttaaaacaacctcaaatcatattttacttcttcgaaaaccaaaaaaaaaatagataaacaaagatcgaagaaaatgttcgaccctccccgagtctcttcattcctgagacgtgtgggttttcatcggtatcgacttatttcttaacaaaaaacatgccaactaaagagataaatcgaaaaagaaaagaaagggaaaaaaaaaacacctgagatcacctttgatatctctgatttttctatattctgtgtatttgcataaacgtatagtatgcatacagtgtacgtaatctcttcgtaaaaatttgcaggtacaatcatcggcttttatagccaaatttatagagaaaaaataaaaatacattttattggctgtcatctgttgtattctgttatcttggcctcttctcgtgtattccttttgcagggaggggcgtacggaggagcaaagagacgagcgaaggagaccgtgcaaggagcctctcacgggagcccaactctctggtcgttccagaagcttctggtgctctcgactgctatgtttccttttgg

SEQ ID NO: 9869 - DNA, 620 bp, Gossypium hirsutum
  Clone ID: GOSHI-09MAY01-C77977_1
ggcccggacgaccgacgcgaccgcagcgttcgagggagagcatccgcggatcatcgagccaagctctcacgcgcaacacaagcatctcatatggagacttaccgagctacaaaagttacttcgagatggcgcctcccacgctattcaaactctggagcatcataaaaacgacgctaaagattggacgtgtgtgagaaaagaagcattcccatccaacaaaaacgagtacggtcatttgttggttcaggacttctccgacacggttcaaactcttccccccgataatcttcagaactttatggttgacatgagggaccccgctcatcttggcggtcaggttgccaatcctcctgctggtggtcaggctccagcgctacgtgatgttgctaatcgcaatccattggccgttttgttcgagtcgctgctaccgtgggttaattacggaggtccagaagatggcatagttgatgaaaaccgagttaacgagcaaggccaaggcaatgaagatctctgagctgcaatgtatcaaagatttgatgaaaaacatttaggccaaataatcaagttctcaataatgtctcttgacacattctgtaatatcagtttaacgtgtaggaagt

SEQ ID NO: 9870 - DNA, 573 bp, Gossypium hirsutum
  Clone ID: GOSHI-09MAY01-C77967_1
attaaaagatgtttacaatttaaaaaaaaaaaaaagggcggccctcgcggctggagggggagaaagggagatcggtggaagagaaatacactcaatggaagtctttagtccctgtcctctacgattggctcgctaatcacaacctcgtttggccttctctctcttgccgatgggggccgcaactagagcaagctacttacaagacccgtcagcgtctttacctttcagaacagactgatggaagtgttccaaacacacttgtaatagccaactgtgaggttgttaaacctagggttgctgctgctgagcacatatctcagttcaatgaagaagcccgctctccctttgtgaagaaatataaaactattattcatcctggagaggtgaacagaatcagagaactcccacagaacagcaagatagttgcgacacatactgacagtcctgatgtcctcatttgggatgtagaggcccagcctaatcgccatgctgtgctgggagctgcagattctcgtccagatctgatattgactggacatcaagaaaatgctgaatttgctcttgctatgtgtc

SEQ ID NO: 9871 - DNA, 722 bp, Gossypium hirsutum
  Clone ID: GOSHI-09MAY01-C77557_1
cccacgcgtcgccacgcgtcgcccacgcgtccgcccacgcgtccggtctttaattacaccggaactccaccaaagaatttgcaaacaagaaatgggaccaaggttttcaggctggcttataactctacggtacaacttgttttgcaagatactggaatcatagcacctgagaaccacccaatccacgtacatggattcaatttctttgccgttggtaagggacttggaaactataatcccaaaaccgatcctcagaaatttaaccttgtcgatcctgtcgagaggaacacaattggggtaccatctggtggatgggtggctattagattccgtgcagataacccaggagtttggtttatgcactgccatttggaagtgcatacaacatggggacttaagatggcatttttggtggacaatggaaaagggcctaatcagtcacttcttcctcctccaagtgatcttccaaagtgttgaaccaggcaactatggacaccagcaccgagattttacgatgaaaggaaacgtgaaaagagaatgaaagaatttctttcatgtgcagaagatgaggctgcgaacctgtgctatctaataagcaaaagacgagttgagattgaatttttgttcttggggaaatggcgaataacatttgcatacgcattattatttttggaatgaaagcatgaataaatattttattcaaaaaaaaaaaaaaagggcgg

SEQ ID NO: 9872 - DNA, 915 bp, Gossypium hirsutum
  Clone ID: GOSHI-09MAY01-C77537_1
aaaatctctctcactgcaaatcatagagagagaactttttttttttttttttcactctttttctctctctaaacattcaagctttagccttcaacacatatatatttatatagagaaagagagggggagatagttcttgttttaaggatttgaaattattattatgggggatgggaagagatttgctgtacttctgtgtgcggaggattccgattatgttaagaggtacggaggatattacggggtgttcgtcgaaatgctggcagaggaaggcgaggcgtgggaagttttcaaggtggccaatggcgagttccctgacgatgatgagatcgcgaactttgacggcttcgttataaccgggagttgcaatgatgcgcatgggaacgatgtttggatctgcaaattgattgctcttttgaaaaaattggattccctgaacaaaaaagttctcgggatttgcttcggtcatcagattctcagtcgagcactgggaggaaaaacagggcgagccatctcagggtgggatattggagtgacagccattcatttgtcatcgtctacatctacactcttctcatctctgaatattccgaccactctttcggtgattgagtgccaccaagatgaggttcgagaacttccaccagaggcagaggtgatagcatggtccgaaaaaactggtgtcgagatgtttaggtatggggatcatatgatgggcatacaaggccaccctgaatacaccaaagacattcttcttcacctgattgaccgtctgatgcagctcactttatcgaagattcatatgctgatgagctgaaagcaaatctggggaaagtaaacctgataaggatgcatggaagaaattgtgcaccattttcctcaagggtagattatgatcgaacttatgaaaattta

SEQ ID NO: 9873 - DNA, 931 bp, Gossypium hirsutum
  Clone ID: GOSHI-09MAY01-C77457_1
tatggcaacgctggcacgcctgcatgagccggtatgcaatagaggggccgacctacgcgtccgctcaacttgagccttggtttcaactccattggcttctatcagatgaccaagcttgcaatcataccatccaccgaattattggaaaccatcttcctaaagacccagcgcccccggccgcgtgggttggcactcggcgctttactagttggagttgggattgcctccataactgatctccaactcacctctgttggcacaatccgttctctccttgccatcggcaccacctgtgttggccaaattctgacaaacaccatacaaaagaggttgaatggggcggcgagcgccagttgctgtaccaatcagctccatttcaggcagccagtctttttggctctggtcctttggttgaccagtttctcaccaaacaaaatgtgtttgccttcaaatattcctctattgtctcggcatttatcatcctctcatgcataatatcagtatcagtaaactttagcacatttctggttattgggaaaacatccccagtgacataccaagtgcttggccacctcaagacttgcctggttcttacatttggctacacactgttgcatgacccgttcactgaaaggaacatcattggcatcttgattgccatttttgggatggtcttgtattcatatttttgcacccaagagaacaaaaagaagcaggctgatccattggtgtctcagatgaaagataaagaaggggcaccatttctgggtctagagaaagaaggccaagaagataaaaatgcagacaaggattctcatgtctaaaaacaaaacaggatttttgtcataaagaaccttttgtcttttaaggtgttctttcaaacatattctttaaataagtcactcattttctaaatcatcttctttctttt

SEQ ID NO: 9874 - DNA, 708 bp, Gossypium hirsutum
  Clone ID: GOSHI-09MAY01-C77697_1
ccccgcgtccgccccgcgtccgccccgcgtccgcccacgcgttccgattacccccaacaaggaaaaagaaccctaaattccctttttctttttccaaaaatctttaagtaaatctttcctcttcgcaaaaaacccagaactcgaagccatagaatttgattaattttacgagttaaatggaagagtattggcgaatgtgcgttggagtatcaataacccaaaatttcccacatcgaaaatccatggaaaacactggtttttttcaaaaaaactcctccgttttcatggctgatgatcatgatttctccgacgtcttcggtggtccaccgcggagtgtgctttgcagggagttcactgatgatttcacccaatcggcgtcgttttacgatgaggctttcgggccattggatttcagttcgtgttattcgattaagggtgggaggagtttgccggcgtttaggattccggccaaagtggaatggtcgttctccactgacattttcgagtcagatgatgatctccggcgatctagctgggaacgaaccgagtcggattcatcttcggtgatgagttggcaggaaatgagcggcctccggcgaccggacggtgatgatttcggactgtcgtcgtattttgcgccaaagctcacatggaactcagcaacaatggtgacaaatcaaggacctgcaaaacaacaacacagatgcc

SEQ ID NO: 9875 - DNA, 641 bp, Gossypium hirsutum
  Clone ID: GOSHI-09MAY01-C77657_1
cccagcgtccgctctctctaaaatctcacttcaaaacaagtcttttttttttaaactaagttcaagctggcgatcgaaaatcaagaatccactgtccgtgaaatcaagcctaagaacagaagaatcatgggaggtggtggacctgatgaagaagacaacaataacgagaagtggccgccatggttgaaacctttattgaaagaacaattctttgttcaatgcaagcttcatattgagtctcataagagtgaatgcaatatgtattgcttggattgtatgaatggttctctttgttctttttgccttgcttatcacagggatcataattacattcagataaggagatcttcgtaccatgatgtaataagggtatctgagatacaaaaatatttggacatatctggtgttcaaacttatgtaataaacagtgctaaggtagtcttcctcaatgaaaggcctcaaccaaggcctggtaaaggtgttatcaatacttgtgaagtctgtgatcgtagccttgttgataactttcggttttgctcccttggttgcaagattgttgggacgtcaaaggattttcaaaagaagaaaaggcaactagcgatggtatcgtcggactctgaggattcatacagtagtagtag

SEQ ID NO: 9876 - DNA, 632 bp, Gossypium hirsutum
  Clone ID: GOSHI-09MAY01-C77157_1
gtaaaccaacatagctaaacaagataagaagcaaacacacaaaaaggctgctccacactggggaggaaaactgtgagcagagccacaagccaaagcaaattaagctatttctctttctttctttttttttttgtttaatttcttgaagaattatggaggaggtttggcagtggtttgaacctggttggcatatgtctgatgttgctaatgatggtgttaaaaatggtagtgttgctttggtggaggcctaggaagattgaagagcatttctcaaggcaagggatcagaggacccccttaccatttcttcattggaaatgtgaaggagcttgtgggcatgatgttaaaggcttcttctcaacccatgcctttctctcacaatattctccccagagttctctctttctaccatcattggaagaaaatctatggtgcaacatttatagtttggtttggtccaacggttcggctgacggtgtcggacccagatatcatacgggaaatcttcacatccaagtcagaactgtacgaaaaaaatgaagcccaccctctgattaaacagcttgaaggtgatggactccttagtctcaaaggtgaaaaatgggctcatcatagaaaaatcatttctcccac

SEQ ID NO: 9877 - DNA, 635 bp, Gossypium hirsutum
  Clone ID: GOSHI-09MAY01-C77297_1
cttatacgtagcctgggaggtctggtggtcaagcagatgctatttaaagcaaaggcagaaaatatggatgaccttgtgaacaacactgttggagttgtgttctatagctgtccacacgtttgggagcaagcttgctgatatgccctggcgaatgggccttgtgttacgtccggctccaactataggagaattgagaagtggctctccacgactagtgcaacttaatgacttccttcgtcgccttcataagagacagacgctcccagtccttactttctgtgagaccaaggtcactccaatagttgaaggttatggaggatgggcgttccgtatggaaattgtgccaattgaattaaccttacctggattttgggaaaattggtggaaggtggtaattaatttcacatagatccatgtttttcctttaaataataataatggttttatgaaagtttaataatctaaataggtaacatccacaaatagaaaatgctacgctaaatgggtctattctgcaaaatttattcttcttcgaatgtgaaacaggttttagaatcaacagatcatataaattcatgcaaaccatcaatcgatccgatcttattcacagaacattagaatcttggcgaaatgag

SEQ ID NO: 9878 - DNA, 536 bp, Gossypium hirsutum
  Clone ID: LIB3825-031-Q6-N6-C10
attcgtaaatgtgtatacaatgtatttagagaacccattcattgtatgggtttctatttcctacagatacaaacaaataaatgaaggaagctgaaatacagtgtagaggataaacagagatgatgtacagaaagatgctatacaaatgtttgagcatatgaaagtatatacagggaggttctaacttttacctaatggttagttacctgatccactcctaaccgtaaaacttcaattccgccagttctcttcatgtatactgagctttcagtttacgcaagaattctaatgtttctgtgtatgaaggatcggatcggctgagtggtttgcatgaatttatatgatctgttgattctaatacaacgagttcaccaaatccagggtaggctgattcaattggcacaatttccatacggaacgcccatcctccataaccttcaactattggagtgaccttggtctcacagaaactaaggacttggagcatctgtctcttatgaaggcgacgaaggaagtcattaagttgcactagtcgt

SEQ ID NO: 9879 - DNA, 394 bp, Gossypium hirsutum
  Clone ID: LIB3582-002-P1-K1-H7
caaagaatgctgggtacttttgctcctacgagaaccgatgtgcatgttttggatgaagagactacaccatctggggtgctggcaaggggaatttactctgaaccttagtcaggatataccgaagatgtaatggaactcaaattgcgttcagataaaaaacagctagccaagttcgtagtgttctgttcttgttcactctcttattgttgcttctgtttacgacttggtacattcttgtgggactgggatatgaatgaccttattgatgctgcttagcagttgcttaaaaaaataaaaaaaaaagggcggcgtttaaagattcagcttactaccgtgcatgcgacgtcttattctttatattggccctaagttaattaattggtcgtttctttaa

SEQ ID NO: 9880 - DNA, 322 bp, Gossypium hirsutum
  unsure (1)..(322): unsure at all n locations
  Clone ID: LIB3543-027-Q6-K6-E3
gnaccgtatgtgcatgttttggatgaagnacctacaccatctggggtgctggcaaggggaatttactctgcaaaccttaagttcgaggatgatgaccgaagatgtcacatggnaactcaaatatgcgttcgagataaagaagaacagctagccaaggtttcgtagtgttctgtttcttgttcactctccttattgcttgtcttctgttttacgaacttggtacattcttgtgggactggggattatgaattggactctatttgcatgcctccttagcagttctgcttaaatattgagaagtaatcccggcaatttcccttgt

SEQ ID NO: 9881 - DNA, 528 bp, Gossypium hirsutum
  Clone ID: GOSHI-09MAY01-C70897_2
aaattctaggtcattcttcttcttattcttcttcgtcttcgtcatcttctggaatggcccactttgggggtccatctgagaatccacggcggttatcaccgtcaccagcaccgcctggtggtggagtgaagcaaggtggagggtggggtttggttgaagctcctggtgagaacgataccgatgagtacgactgtgaaagtgaggagggtattgaagcactggtggatgaggcactaccaaagccagctccacctcgtagttcctcaaaaagaagcagagctgcggaggttcacaatttgtctgaaaagaggaggagaagtaggattaatgagaaaatgaaagcattgcaaaaccttattccaaattctaacaagactgataaggcttcgatgcttgatgaagctatcgagtacttaaagcagcttcagcttcaagttcagatgctatcaatgagaaatggattaagcttgcatccaatgtgcttgcctggagttttgcaaccactacagttttcccaaacaagaatga

SEQ ID NO: 9882 - DNA, 563 bp, Gossypium hirsutum
  Clone ID: LIB3583-007-P1-K1-D4
cccacgcgtccgcggacgcgtgggctggaatggcccactttgggggtccatctgagaatccacggcggttatcaccgtcaccagcaccgcctggtggtggagtgaagcaaggtggagggtggggtttggttgaagctcctggtgagaacgataccgatgagtacgactgtgaaagtgagtttgaaatttgtcataagcaggagggtattgaagcactggtggatgaggcactaccaaagccagctccacctcgtagttcctcaaaaagaagcagagctgcggaggttcacaatttgtctgaaaagaggaggagaagtaggattaatgagaaaatgaaagcattgcaaaaccttattccaaattctaacaagactgataaggcttcgatgcttgatgaagctatcgagtacttaaagcagcttcagcttcaagttcagatgctatcaatgagaaatggattaagcttgcatccaatgtgcttgcctggagttttgcaaccactacagttttcccaaacaagaatgaactttcgtgaagaaaatggatctctacctatgaacatg

SEQ ID NO: 9883 - DNA, 941 bp, Gossypium hirsutum
  Clone ID: GOSHI-09MAY01-C70887_1
acctggttgtcttacacaagaagaggaacttgaggtcgcttttagttcattcccggattccatttcgcagcaccagaaccgttccagcatccacgattgcatcttctttttccgattccaaaggcataaacattccaaacagggtaatgggacttcttctgaaataagtgaaatcgatgataaagaaacaagttcaaccccggacgaggtgaaatcaattcggagatcaagaagtacggatattagtaaaagttcaaaatacttgtatggttatgtattcaataggcaaaggcacgacgagaggctaaaacgacccgcgcgtccgccctcgcgtccgccctcgcctccgggaccttactctagcgtgtttagacctttgttacaaatcatgggtcctctgtactttgatataggaagaaaagctattgaacatattgctggttatgtttcgttgtggcctagtccagtacctggtaaattaatggagcttccgattgggaatgcaatgctcaaagtcaacttgccaccggctcacagcttgcctttggaaagtggaatatcttatgaagaatctgcttcttctatggctccttttcttcccagtaatccatcggtgccacaaggtctatttcacgattcagatattttcggaacattcagaggacttttactgcaactttggttattgtgggagttgttacttatcggcgagccaattcttatcatagcaccaactcctccacaatgctgcgaggctgtagcaagtctcgtcagcttagttgcacctttactttgtagtgttgactttagaccatattttaccatccatgatcctgactttgctcaattgaatgcacttcaagaaggggacaaatatccacctatggttttgggtgtcacaaatctctttttccttaaagctcttcggtatatcccacaca

SEQ ID NO: 9884 - DNA, 622 bp, Gossypium hirsutum
  Clone ID: GOSHI-09MAY01-C70707_1
gtccgactgaccaggttcgaatgaaggtccacatagaacttctaatcttaatctcgatgaacaaagaactcagataactgtatgggctatggccaaatcgcctctcatgtttggaggagatgtaagaaagctggatgaaaccacatacaatctgatcacgaatcctacactgcttgagataaactctttcagcttaaacaatatggagtttccttatatcacgagcagaagaagatgtagaagtaaggaaaaggttctctcgcaggatttggccgaagggggcatgttaggtatacgagctttgggtcttattacctgcaaggatcccaaagcaaatggttggtcaactaaagctcttgatcaagatcttgaacaaatctgctggaaagagaaatcggagagcaaatttgaggaacctccatgcctttacaagagaaaacctcttatagcttcgtaattagctttttatctagtttgtttcctgttgattatttttacacatgcaatttttcattcgttgctggataacttgtacaggggtgtggagatgatctacaagaaacaatacgaggggaaacttcatttattagaaagtgatggtatggaattatgcttggatgct

SEQ ID NO: 9885 - DNA, 549 bp, Gossypium hirsutum
  Clone ID: GOSHI-09MAY01-C70107_1
ccctccactccatcgcagacaccaaccgacagggaagaacaggcaacagggcccccaaagggccaaggcaccacaggggcacaagagccgcacacagaagcaaaccccaacactttcgcccccacaccacgggacgcgagaaaaaccgggcaccaacggaagaggaacgcacgcgggacacacgaaaacaaagagccacaaaagaccgggagcggagccaaaggcccagcaggaagcaccggcacccggcaaccaagacaacaaggaaaagcaacaagcaggcacaccgcccggggaaaacccggacaacgaggaaccccagcggaagccaacgccccagcagaacccgagccgagcggaaacgagccgcccaaacacgaaggagcagcagacgagcggggggaggcaaagccgcgaaggcagcagggacagggaagccgaaagccagccaggaacaaaaagggcagagccaagaagcaccaccaagggagaaaagggcgagagaaacgcccaaccaaaagagccaaacccccgcgacccaaccaaaac

SEQ ID NO: 9886 - DNA, 849 bp, Gossypium hirsutum
  Clone ID: GOSHI-09MAY01-C70317_1
cccacgcgtccgggtggtttaagctgtctttgcaaaattggatgggtaaattaaagtccgattctcccctctctcgtcgcatcgttcgatcctttttggatttcctcgactcagttgaacccgccccaggggttgatcttgaaggccttgaagttgctagggaatgtttggtggaggtgtttaaacttgactcagcttctataaattatgtcaaacctgatctattaattgacatattcagttcactggatgaaagtgaggataagaaaattaaatcagatctaagacacaggggtacttctgataatgccactgcttcactttctgcccatgatatcggggataactggactaaagaatctcagtctacaggagtctcaaaggatgaactctttgggcaattctttgctgcattagagaaaattcactttctgagggccatgcctgatgggaatgatgatcctgcccaactggataaagctactcgtttatttgaagacgccgtaaatgaaatggaaaggtctggttgtcaggcatttgaccgtaaaaacctgcccgagacattcaaatgtcaaggtaacaggaccatgcattcaaagcaatattctgatgcgatagagctgtattctattgctgtttctctttgtgatgataatgcagtttattattgtaatcgggctgctgcttacactcaaattcaaaagtacaatgaagccattagagactgtcataaatccattgaaattgacccaaattacagcaaggcatacagtcgtcttggtttagcatattatgctcaaggcaactatgctgatgcaattgagaaaggatttaagaaagccttgcaac

SEQ ID NO: 9887 - DNA, 1401 bp, Gossypium hirsutum
  Clone ID: GOSHI-09MAY01-C71987_1
atcatcagttcttcccatctgcctgctcgagtcttggtttagggtttccggagttcacttcgtatccagtccttgacatggcgggtggctggaatccacccttatcaccagcaatggcctccggtaccagctcctccgccccctccagcagcagcatcagctgcccctccgccgcctcctgtccaccatcctcctccacctgctccttctcatgacgaggttcggactatcttcattacgggtcttcctgaagatgtcaaagagagagagctgcagaatttactcagatggcttccaggttatgaagcttcgcaagtgaactacaagggagaaaagcctatgggttttgctctcttctcaagtgcacgacttgcaggtgctgccaaagatgcccttcaggaaatggttttttgatgccgagtcaaagtcccttttgcatgtagagatggccaagaagaatctatttgttaaaagaggaatagtaacagattctgacgcatatgatcaaaccaaacgattgcgaactggtgggaattattcacacagtccttacacgagtccatctccatttcaccctcctgctcctgtttggggaccacatgggtatatggctccaactcctccatatgatccatatggatgttatccagttcctccagtgccaatgcctactccggctcctgtaccagctcctagcagttatgtgcctgttcagaacaccaaagataaccctccttgcaataccttatttattggcaatcttggagagaatattaatgaggaagaactacggggcctattcagcgctcaacctggttttaagcacatgaagatcttgagacaagagaggcatactgtttgctttatagagtttgaagatgtgagtactgcaaccaatgtgcaccacagtttacagggtgctgtgatccctagttctggttctattggcatgcgaatacaatattccaagaatccttttggtaaaaggaaggactctggtcatcttgttccttcccctggtgccaatgggcctccaccagctctgacttaccagtagatcatggggatcttctctgttttctgtgctccaacaaatacaactgctacattctaggatgcatcttgcagctgttgcatgcatccatttcattatcaacattggcattagcatctcttctcatgtgcttgaattcacatagtggtatcatgagtgcaccatttgctcatgctaatatcattttgcctaagacatgcatttgttatgccaatttaactttgtaggcttagataacttttatatttctagaagtagctcatcgtccacagttttggttaatttgtgtgctactccatctcgtgttgaacattgacaaaatcatgatgttggactactattgttct

SEQ ID NO: 9888 - DNA, 614 bp, Gossypium hirsutum
  unsure (1)..(614): unsure at all n locations
  Clone ID: LIB3825-009-Q1-K6-D9
nganagtcaaanananagagctgcagaatttactgagatggcttccaggttatgaagcttcgcaagtgaactacanagggagaaaagcctatgggttttgctctcttctcaagtgcacgacttgcagttgctgccaaagatgcccttcaggaaatggtttttgatgccgagtcaaagtcccttttgcatgtagagatggccaagaagaatctatttgttaaaagagcttactcattgaatctggctccagcaaagtggaatatttattctgaaacagctatcatctttcaggaacattagttctgaagttggaaaacttctattcagataagctaaatttatggaacttatggatgaaatgctggaaagaagttcttcagtggtcacttgtttaaattttcattaggctgtttctttttgttgttgaaatttggttttttgattaaggtctggacagcttgaagtttccatggaatggttctaattccaggaatagtaacagattctgatgcatatgatcaaaccaaacgattgagaactggtgggaattattcacacagtccttatacgagtccatctccatttcaccctcctgctcctgtttggggaccaca

SEQ ID NO: 9889 - DNA, 875 bp, Gossypium hirsutum
  Clone ID: GOSHI-09MAY01-C71957_1
ctgaaattcacaatcatggctaagggggtgatcatggcggttcttgtgattttggggacgatggtaacctcagcttatgcgcaagcaagttgtgcgcagaaccttgtgtcctgttatccttacctgaacaacgccacggccaaacctgaagacgactgctgtaacccgatcagacaaaccgtcgccaaagatcttccttgcctttgcaacctctataacgaccctaatacacttgcttccttcaacgtcactgtcccggaagctctcaggatctctcgtgaatgcggggtcagtactgatctcagcgcttgcaacgccacttctcccacctctgctccatccccgccaggacaatctggaggtgctgacaggatagcattgactggagttatcaccttattcttagtattggtctctatagcaccgtattaaaagtgatatttctttatttggaatagtcccgtcagagtgaataatacagagatgcttcagactaggcaccccagtttgaatatctctagagatttttaactgtttgcttgtaatttaattgcttgatgtaatatcagtggttggccagtgtttctactttctatcacaaacccttttttaaactcatctcgttggttggttaaaaaaaaaaaaaaaaaaaaaaaaaaaaaaaaaaaaaaaaaaaaaaaaaaaaaaaaaaaaaaaaaaaaaaaaaaaaaaaaaaaaaaaaaaaaaaaaaaaaaaaaaaaaaaaaaataaaaaaaaaaaaaaaagaggggggggccctttttaaaaaaaccaaattttactccccctggttggcaaagtaaaaaattttttttttggggcccccaaaaataaaataaaggggcccgtgttttaaa

SEQ ID NO: 9890 - DNA, 637 bp, Gossypium hirsutum
  Clone ID: GOSHI-09MAY01-C71587_2
gcgcgcgtcttctgaaatattgttcttttcgcagactgtctgggagttaaaagggaattcaaattccaaagagaaaagcgcgagaaatcccatatatttatctacacagcaaaaagaagagaataaaaagggaattcaaattccgaaagagaagaaaaaaaaatcgatggatttggatcagcggatagcaaaggctaaagaaggccagcatctttcggaagacgagcttcagctcctttgcgaatacgtaaaagaaattctcattgaggagtcgaatgtgcaacctgtcaacaggccggtaaccgtctgtggtgatatccatggccagtttcatgacctgatgaaactctttcagacaggaggtcaagtgccagaaacaaattacatccccatgggagattttgttgatcgaggttataatatcttgaagttttcactattcttttgcttcttaaggcaaggcacccactaatatcactctcttgcgggggaatcatgaaagcaaacaattaactcaggtttatggtttctatgatgagtgccagaggaagtatggaaatgctaatgcatggcggtattgtacaaatgtttttgattatcttacactttcagcaattataaatgggactgtactctc

SEQ ID NO: 9891 - DNA, 735 bp, Gossypium hirsutum
  Clone ID: GOSHI-09MAY01-C71587_1
agctaatttaaaaaaaaaaaaagagagcggtaatggaaaattacgatcttctcgtatctccccctctgcttaaaaaccctagatacagggagaaaaagcgagaattttcatatttattcagattctttttcccctctttttcttacaaaactaagagaaaaaagaaaagggattcaaggtccggagacgagaaaacaaatcgatggatttggatcaatggatatcgaaggttaaagaaggccagcatcttttggaagacgagcttcagctactttgcgaatatgtaaaagaaatcctcatcgaggagtcgaatgtgcaacctgtcaacagtccagtaaccgtctgtggtgatatccatggccagttccatgatccaatgaagctttttcagacaggaggtcatgtaccggatacaaattacatttttatgggagattttgttgatcgaggttataatagtcttgaagttttcactattcttttgcttctcaaggcaaggtatcctgctaatatcacgctcttgcgggggaatcatgaaagcagacaactaactcaggtttacggcttctatgatgagtgccagagaaagtatggaaatgctaatgcatggcggtattgtacagatgtttttgactatcttacactttcagcaattatagatgggactgtactttgtgtacacggtggcctttctcctgacattcgaacaattgatcagataagggtaattgaccg

SEQ ID NO: 9892 - DNA, 569 bp, Gossypium hirsutum
  Clone ID: uC-gsflmaxxa061g11b1
tcggtctcgtgggccgggacaaaaaagaagaagaagagcggccattgaaattttcttcgtcaagctgcttttctcctctggttaaaaccccagaattcgagttttccgaggagaaggaatcgatggatttagatcaatggatatcaaaggttaaagaagggcagcatctcttggaagacgagctccagcttctttgtgaatacgtaaaagaaatcctcatcgaggagtcaaatgtgcaacctgtcaacagtccagttactgtttgcggtgatatccatggtcagtttcatgatctaatgaaactttttcggactggaggtcatgtaccagagacaaattacatttttatgggagattttgttgatcgaggttataatagtcttgaagttttcactattcttttgcttcttaaggcaagatacccagcgaatatcactctcttgcgtgggaatcatgaaagcagacagcttactcaggtttatggtttctatgatgaatgccataggatgtatggaaatgctaatgcatggcggtattgtacagatgttattgactatcttacactttca

SEQ ID NO: 9893 - DNA, 246 bp, Gossypium hirsutum
  Clone ID: uC-gsflmaxxa028b12b1
ttgtttacgcgaccgcttttctcctatggttaaaaccccaggtacagggagaagagcgtgaaatttacttatttttttctattcatattattattaaaaaaatttcgcccacactcaaaagtgaaagaattcgagctttccgaggagaaggaatcgatggatttagatcaatggatatcaaaggttaaagaaaggcagcatctcttggaagacgagctccagcttctttgtgaacacataaaagaa

SEQ ID NO: 9894 - DNA, 801 bp, Gossypium hirsutum
  Clone ID: GOSHI-09MAY01-C71577_1
cgaaaatttaaaaagattgtaaacaatgtctgtgttcaagctgaggaaactagttcgaatgcagataagtattgaagttgtatttatgccttttggttgtaactcttccattttatcacattagagttgtattgtcgatgtccaagtactgaagaaaatttatcagctcaatgtttggggggatctgctagcaaaaagactgctttttgcactaggaatttttttaattaagtagatgggtagaatattatatctgcctaatccttaaacttcatactctaaacgaatccggttaactgaagaattggattttatgagaaatcaaatcaattatcctttttcatctaattcgtccatgcctgtaatggtgcattctggctttaggaatatgggcataaggcagcattttaccatggtaatatggatcctgcacaacgtgcctttattcagaagcagtggagcaaagatgaaatcaacattaatttgtgctacagtggcatttggaatgggtatcaacaaaccagatgttcgctttgtcattcatcattctcttccaaaatcaattgaaggttatcatcaggagtgtggtcgtgctggtcgagatggtcaacgctcatcttgcttattgtattatagctacagcgattatatacgagtcaagcatatgattagtcaaggagctgcagagcaaagccccttaattactggacatagtcgctttaataattcagggaggatattggaaacaaatactgaaaatctcctacgcatggtcggttattgtgaaaatgatgttgattg

SEQ ID NO: 9895 - DNA, 605 bp, Gossypium hirsutum
  Clone ID: GOSHI-09MAY01-C71567_1
cccacgcgtccgccgatttttaactcactctcgactcagagagtccaattgtagcaaatcgcaaaaaggtttatagttttccttatcactgccggtaatgctttccggcagcaaagcgtgaacagaaaatcaagctttctcgttgtcgctttctaaagttttttttccctctgttgttttcgcgcggagaggaagtgcctgaaaatggagctgagtaaggtgactttggagatcttcacgaaactggagcagaaatggctatcgcactgtgagaaaagtggtaagaaggttcgaatcttgagcattgacggtggtggaaccaccggcattgtagctggtgctgctcttatccacttagaagaccagatccgtctcaaaaccagtgacgcacatgctcatattgctgatttcttcgatttgatcgctggcactggcgtcggtgctgttcttgctgccatgatctctgccgacgatggaaccggtcatcctcttttcagtgctagggatgctggtgagtttattactcaaaataactccgagcttttcaaaggtaataagctcgccggagttcttcgtcggcgggaaaagttcagtggtaagagcat

SEQ ID NO: 9896 - DNA, 297 bp, Gossypium hirsutum
  Clone ID: LIB3493-041-P1-M1-B7
atttttaactcactctcgactcagagagtccaattgtagcaaagcgtaaaaaggtttatagttttccttatcactgccggtaatgctttccggcagcaaagcgtgaacagaaaatcaagctttctcgatgccgctctctaaagattttttccctctgttgtcttcgcacggagaggaagtgcctgaaaatggatctgaataaggcgactttacagactcttacgaaacttgaacatgacatggcctattcacagagagatcagaggttccgacgttatcatttctaccgatgacaca

SEQ ID NO: 9897 - DNA, 448 bp, Gossypium hirsutum
  Clone ID: GOSHI-09MAY01-C71507_1
cccacgcgtccgctttgcagctagggggtcgagagccatcctcgctgccgtcgcccttgctccaccacggacggtggtaaaaaccgtataggatgggctttttcagccccgtttcgaagcgactcgagagccacttcctttttagcccaaaaacgaaggagaagaagatcctttgtgggggggggttttgaagtcgacgccgtgaatggagatgaggctcccatagtgcgactccggggcgatccaggtgagtgttttcttcttattggtatttaaaacagattttgcaaacaaaaaaataaaaaaaataatgaagaaccaagaaatcgaaaaaagagaagggggagaagaggaaatcaaatcaacccttacttttttgcttctattctgcttgtgccattggttaatggctgaaaaaatagcaaaaaaacgagaaaggttttataga

SEQ ID NO: 9898 - DNA, 406 bp, Gossypium hirsutum
  Clone ID: GOSHI-09MAY01-C71477_1
acccacgcgtcgtctaaggactctaataacataccaaacctccctcttttctggacctctcgggggctggtgtgattggatcggaccccgtaattttcctggtttttgattttggtagtgaggatagtattttgttgttttcatggcgaagggacggcggttgaccaccagcagaagcgaacggtttctaggaagttacagctacggtcacagtcatggggatgccctcacaggcgaatcggaacttggggaagaagatgcatggtcgatggttgatgacgtcacagaccgagatgaccggagagagtggagtccacgcgctgagtccgagagtaacgaaaccggtagcttcgacgtgagaggcggccgccggcggatcccgcgaggtgacgcaagtcacgtaggc

SEQ ID NO: 9899 - DNA, 742 bp, Gossypium hirsutum
  Clone ID: GOSHI-09MAY01-C71707_1
ctcatctcagtcgtctcctctttcctcttttctccagcgttcgatcccctctctttcttcccctcaagtaatccaatccccatctctcccgccctttttttttcctttttatttttttatatataatatatatatttcaattttcatttctactaagggttttgtccatggcggaagcaccggcaccggcgagtcccggcggaggaagccacgagagtggcgagcagagcccgagatcgaatgtgcgagaacaggatcggtttctacctatagctaatatcagccgtattatgaagaaggctcttcctgctaacggcaagatcgctaaagatgctaaggagactgtacaagagtgcgtctctgagtttatcagcttcatcactagcgaagctagtgataagtgtctgagagagaagaggaagactattaatggggatgatctgctctgggctatggcgactttagggtttgaggattacattgatccccttaggatttacctttcccgatacagagagatggagggtgatgctaagggctcggctaaaggtggagatgcctctgctaaaaagatgtccaccaggcccaaatggccagcttgttcatcaaggttcattctcaccaggtgttttttatgggaattctcaagcccctctgatgcttcccattcaaggcgctgattaatgaatcctgatcaccgttctccaattcccttatctataccccgtaattatcctgttcc

SEQ ID NO: 9900 - DNA, 739 bp, Gossypium hirsutum
  Clone ID: GOSHI-09MAY01-C71077_2
cgggacgccgtgggcgggacgcgtgggtcaacactgttccacttactagaaacaaagcaagcaaaatccaaaatcagtgagatatggcgtcagaacaacttagtcgtagagaaaacaccacatccgagagagacattcatttggaggagaacagagtccctaagatggctactcatttcgaatctctggccgagaaatccaggcagtccgatgtgggtgctgctgctgccaagcacaatcctattcatggtgagcgccatgaatttcactcccttgaagggaaagtcggtgacgtgaatgtttccgctaccataatcgccaaaacggaagcaggtgatcaggccagagaaggaagagggaaacagcttcaggagaggaagggagaaccttacgcgatagggaaattccaagcgactgctcctggagctggagctggagctggagctggacaggagagaggtacttcaatggcgtctaaggccgaacacgagagtgataaacagaaaggacgacggagctatgctgctgctgctgctggacatcgacaagagagaggtgcttcaatggagtccaagggcagaaaacacgagagtgataaagagcaaggacactgcactcacatggctagtagcgaagaaagggttaatacgggagctaacacagagggtggtgagaaacaagagcagacatctgtagaagagatatctaagctcacaacatcagctcaacagaattcaat

SEQ ID NO: 9901 - DNA, 2191 bp, Gossypium hirsutum
  Clone ID: GOSHI-09MAY01-C71077_1
ccggtttcgacccacgcgtttcttcccgcgtccggttccacttattagaagcaaagcaagcaaaatccaaaatcagtgagatatggcgtcagaacaacttagtcgtagagaaaacaccacatccgagagagacattcatttggaggagaacagagtccctaagatggctactcatttcgaatctcttgccgagaaatccaggcagtccgatgtgggtgctgctgctgccaagcacaatcctattcatggtgagcgccatgaatttcactcccttgaagggaaagtcggtgacgtgaatgtttccgctaccataatcgccaaaacggaagcaggtgatcaggccagagaaggaagagggaaacagcttcaggagagaaagggagaaccttacgcgatagggaaattccaagtgactgctcctggagctggggctggagctggagctggacaggagagaggtacttcaatggcgtctaaggccgaacacgagagtgataaagagaaaggacgacggagttatgctgctggaactggacaggagagaggtacttcagtggcgtctaaggccgaacacgagagtgataaagagaaaggacgacggagttatgctgctgctgctgctggacatcgacaagagagaggtgcttcaatggagtccaagggcagcaaacacgagagtgataaagagcaaggacgccgcactcaaatggctagtagcgaagaaggggttaataagggagctaaaacagagagtggtgagaaacaagagcagttatctgtagaagagatatctaagctcagagcatcagctcaacagaattcaatggagactctaagggctgccgaagaacggtataaccaggccaaggaatcggctgcccaagcgcttaataccgccgctgattacaccaaagaaaagggccagcaagccaaggaaaccgctgttcaaagcgcccagtacgccacagagaaaggcggacaagcaaaggacaccatcattgaaggtgcaaaaaggactacacaatacattgcagagaaaggaacccagacaaaagacactgcagctgaaaccctagcaagtgccggcaactacacagcgcctagagtagaacaggcgaaagactatgccttgcaaacggcagtgaaagcaaaagacaccgcagttgatgtcagcaaaaacattgcgagttatgctggggaaaaagcagtggtgaccaaggatgtgacggtagagaaaagcaaggaggccgctgaagtagcgcggacgcgggcggtcgatgtgaaggacaaggccgtcgtagctggatggagtgcggcacactatacgactgagaaagcagtggaaggaacaaaggtggcggcgaggatggtggagggagcaggggagtatgctggtaaaaaaatcaatggagcttgctgccaagccaataagggcggccaagggatgctgcttcagctgctggcgagactctgaaagagtataccgccaggaaaaaggaagaggcagcgagagaattagaagctaagagagctactgaaacacagggtgatatcagtagttaccgagaagaagaaacccaagaaagatcgagcgagagccaacaacaaatggaggatttggccataaaacccaaagagaaattcgagaaaactgcaaagccaattggaaatgccccgacgcaaacctttcaggggtcatcagagcctaacaaaaccggtgaattaacacaggaaactgagaagagaagccaggtggaagaagagagaatcaaaaaagtgccgatggagggcgtagagagaagaatggagagtggggcagagaaaacagttgagggttcaggcgttagagaagaggaggaggaggaaaaccaaacaggtgtattgggagccattgctgaaaccatagtggaaattgcccaaaacaccaaggaccttgttatcggacccgacgaccaaacccaatactcagagcgccaaccgttgtgactgacggtaataagcacccagcacgccacaacatacaacgtggaacccaaaccaatatatatgatgtgattggcttagatattgtgttttatatttgctagccttttaaataaataggaattctaaattccgacggctgtcttcccttcttttggtttaatgacacgtggatcttttcacgtaaaaaagctcctctttccttgtg

SEQ ID NO: 9902 - DNA, 509 bp, Gossypium hirsutum
  Clone ID: GOSHI-09MAY01-C71307_1
gcaatatttaacctatgcattatccatgagaataaagcaagagccgtaagggatggtgcagtaagtgtcattttgaaaaagatcatggatggtgtgcttgtaaatgagttattggctatccttgcaatgctttcgactcatcaaagggctgttgaagaaatgggggagctgggggctgttccttgcttgattcgcattgtaagggaaagcacttgtgaacgaaacaaggaaaattgcattgcggtcctccacactgtatgccttaatgatcgaaccaaattgaaggcactaagggaagaagaaaattcccatggaacaatatctaagcttgctctagatggaacaagtagagccaagagaaaggctagtggcatccttgaccgattgagaaagggtgttaatattactcataccgcatgagccatgcatcataatctgtaaattctgtcaccaaaatccttgtgatcgcaacaacttatataataacaacatttaatatttctgaatat

SEQ ID NO: 9903 - DNA, 629 bp, Gossypium hirsutum
  Clone ID: GOSHI-09MAY01-C72537_1
actatctttgttattgtactctctctcttttctctctcttctctcacatacacacactcgcatcccccaggttgtggtcctccttacctctttatatctctcttatcactttctccaattcttcatatcttatatctaactcttctccctcctctttctttctttcttcttcttcttcttcttcttcttgccttttccaaaccataaccatttttctacaccatatatacttatttttccttctgcatttccatatcttgggggtattattttggaacttactgaatattttagaacaattcttggtttttggtcattagggtgttattattactttaaatcccccacaagatgtctagcagaaggtcgagacagtcaacagcaggtgtttcgaggatttcagatgatcaaatcattgaacttgtatcaaagttacgacagcttctgcctgagattcgtgataggcgatctgataaggtatccgcttcctgggtctcacgtgtctcctgctgtttcatctgaagcttgcatagggaggtggacgacctaagtgaacggctctcacagttgttggccaccattgatgctgatagtgccgaggctgctattattaggagtttaattatgta

SEQ ID NO: 9904 - DNA, 560 bp, Gossypium hirsutum
  Clone ID: GOSHI-09MAY01-C72447_1
gcaagttttagtcttcaccattttctgacagtggagttgttagggatgagtccgatgaggaccaaaatgaccaggatagtcacagtcctcttggtgggttttatattgggtgtaagaagtggtgaggccaggaaaggaaaggtgacagagtcctttgcgtacactgggataagttgcagacgacacactgcatcaatcacagactttggaggagttggtgatgggaaaacatccaatactaaagcattccaggatgcagttaatcatctcagcaagtatgcatctgatggaggggctcagctttatgttcctgctggaaaatggctgaccgggagttttagcctaaccagccacttcactctctatcttcaaaaacacgctcttcttcttgcttctcaggatatgaaagaatggcctgttttgaagcctttgccatcctatggtccgggaagggatgcagctggtggaaggtttaccagcctcatatatggcactaatctcactgacgtcatcgttacaggggccaatggtactatcgatggtcaaagttcattctggtg

SEQ ID NO: 9905 - DNA, 595 bp, Gossypium hirsutum
  Clone ID: GOSHI-09MAY01-C72417_1
cggacgcgtggggaaaatttcgatcatttcaccgtttaaatacagaaaattcttaaaaaaattcagttttctttctccctttccattgtttaattttcccggaaatcaaaatgagaaacgacgaaggtggaaccatggttatggagcagcaaaccggtctccatagccgaccaaatatggggactctgttccaacaatcagaacctccgtcgttttctgacgacgatgacttccataatcggaaaagcaatgcttcattgtctagtccgaggtattccaccacaacaagcggcgacggtgaagtctctccttatatgatgtcaccatggaacagccaaccttcttcatggcatcttcaacatcatcagccatgtccatcggagaacgattttggtcaagacggactcattgggtctatcgtaaaagaagaaggtcatatttattcattggctgcttccggtgatatgttatataccggaactgatagtaaaaacatccgtgtatggaagaatttgaaggaattttcgggttttaaagctaaaagtggattggttaaagctattattatactgggtgatcgagtattcaccggtca

SEQ ID NO: 9906 - DNA, 1188 bp, Gossypium hirsutum
  Clone ID: GOSHI-09MAY01-C72687_1
ctttttccctttgttttggtgaggtacaaatagtggaaacctaatagccatggagtattagagccaccccatacaaatagaaagaggaacagcttcttgccctaaagaaaagaaaaaaaggaagggaacttgcgtgaagagggtggaaaaagaaaaagaaaaaaagggtttctgaaaaataccataggtgatagttttttcttttcacttttataataataagaatatatagtaatggggagaggaagagtggagttgaagaggatcgagaacaagataaatcgacaggtgacgtttgcaaagaggaggaatggtttgctaaagaaggcttatgagctttcaattctttgtgatgctgaggttgctcttatcattttttctaatcgtggcaagctctatgagttttgcagcacttctagcatggctaagacacttgagaagtacaacagttacacctatggagcattggaacctgctcaaacagaaattgacgcacagagcaattaccaggaatatttaaagctcaaatcaaaagttgaggtccttcagcaatcacagagacattttcttggggaagagatagcggacctgggcactaaggaactggagcagcttgagcatcagttggacttctcattgaagaaaatcaggtccacaaagatgcagttgatgattgaccaactttctgaactgcaaacaaaggaagaagtcctactggaaaccaacagaaacttgagaatgaagttggatgaaagtggtccatcaatgagatcatcatgggaaacgggggagcaaagcattccatacaaccatccaccacctcctcctcagtcagagggattttttgagcctttacactgcaacaattcactgcaaattggatacaaccctagtagtgtaacagttgaggacactgcaacagcctctgcacttgcaccaagtggattcatccctggttggatgctttgattgtttcaactttaattacaaagaattccatattttctcatataaactgattagaaattaagaataggcaataattaaagcaaattccaggttccaacctatattttgttgcatctgttacggaggatgcatgcatggttttaagtgtggggcgaagctccaatatttgtaaaaatttggatgacatatatattttactcatatactatgtctttagtt

SEQ ID NO: 9907 - DNA, 681 bp, Gossypium hirsutum
  Clone ID: GOSHI-09MAY01-C72107_1
gtgaattttaccttcatttgtttttttactgtgttttagttgtagaaattaaaatatttgaaaaaaaattgtttattcatcaatttatatttgagataaccttgattctaaaaccatggttttgaatatttttcagcttattaaaagtaagatttggctggtagagaactagtagaaaattcccgttatctatttttgtgaataatgaggattaactggtagaaaactagaagaattgtaaaatgctttggctggatcttctcgttgcggtgcctatacaaagggatcaacaactccagacaccataaaacatttcattagcatgtctctcaataaagcatctttttttggtattcctttgaggtttttcaattgtatcctacaatcttgacaggttggctttttactttgttttttactgagttgttcatttattactttgttctacaaaaatgatgttggtagagctgagcagttcatacttgcttgtgaagcagtcagcaatagttttaaattattttctagatcaaatttcagttttattttctaaattattaggctctaatcttgtagcattgtcgtctatttgggcatcatggtgttgttttttttttgggtgagcattatgcatatgtctatctatcaagaatgcatgaaaaaagttaggtatatgctttgagc

SEQ ID NO: 9908 - DNA, 771 bp, Gossypium hirsutum
  Clone ID: GOSHI-09MAY01-C72097_1
gttgctttgattggtttagatttgcttgctttcggtatatttgatacgcttctttgcttttcaattcatctacccatttattgcttcaccttctctaattttctcgggaaccaaacaggggaaatttgggttcttgttctgaaaattcaatgactttcaatgatgataacaatgatgatgagggaggagaagtggtgccggagctgaaattacgagttgagggtgatgatgatgttaatgagaaaagggtaagtttgagacagagattattagaagaatgtgaagcggaagagaataattctttaagtttgagacagagattattagaagaatgtgaagcggaagagaataattctttgttaaaagagccaggtttttcttctcaatcgagaaggtctatttggtactggatcaagttgggaattttacttacctttctagggttgctggctgctgtttttctcaaatgggttggcccttttttccatggataaggagctaatgcctttaattaagtgggagatggcaacctttagtactccaatgctggcagttctaatctttgcttctgtggcattattccccacgatatttctaccctcgtcaccatctatgtgggttgccgggatggcattcggttatggttttggatttctactaatcatctccgcactgctgtgggtgtatcattgccattctttatcagctctcttttccttcacaggattcaaagcttgttagaaaaatatcctaaaaaaactacctttctta

SEQ ID NO: 9909 - DNA, 488 bp, Gossypium hirsutum
  Clone ID: GOSHI-09MAY01-C72327_1
ctatatttgcggatatacaaatagggatgaaccccatggacatgatcattggaggtggatctccggtgggaacggacccagctaaggtacctagaatcggaatcatccctcgatatgcaaaagacgagtcggaaatcaggtggtttgatgtgcctggtttcaacctcatacaggccatcaatgcatgggatgaagatgatggcaacgccatagtcttgctggcacccaacattctatcagtagagcacaccctggagagaatggacctggtccatgccttagtggagaaggttagaatcgacttaagaacagggctagtaacaaggcaccccatttcagcaagaaatctggatttcgcagtattaaatccagcttatgttgcaaagaagaacaaatatgtgtacgctgcgggtggggacccaatgccaaaaatagcaggagtggtgaaactggatgtgtctaaaggagagccggatgagtgtaataga

SEQ ID NO: 9910 - DNA, 576 bp, Gossypium hirsutum
  Clone ID: GOSHI-09MAY01-C73807_1
gaaaaatgtgttattcgatctgtttaacattggccgctaccgctggtaataacataggcaaagttctacaaaagaagggcaccggtattctccctcctctctccttcaagttcaaggtgataagagcatatgctgttaataaatcatggctgattgggtttctgatcgatatatccggtgccttgttgatgctgagagctttatcgttggctccggtatctatcattcaaccagtttctggatgtggacttgccattctttcaatcttttcacacttctatctacaagaagtcatgaatgttattgactggttggggattacattagctggcattggcaccataggagttggtgctggtggagaggagcaagtggcttcttcagtatctattttacagttaccatggttggcattctttgccgcaatcttgtttgtaggtactcctgaatgggtggctccgcatctgcatgcgtcagcggagagagcaagaactgatggagtatgaggttgttgaagagatcatatatggcttggaatcaggaattttgtttggaatggcatcggtgatatcaaag

SEQ ID NO: 9911 - DNA, 540 bp, Gossypium hirsutum
  Clone ID: GOSHI-09MAY01-C73567_1
cgccacatgatggctgcacacttgatgctgaaggagagaaagaaagagtcattaaatgtctagaagcttcaattcatcgaagagtaagcgagggtctaagtctggagctttgtgcaaaggatagagttggtttgttgtctgaagtaacgaggattctccgagagaacggattgtcagtaagaagagcagggatctctacaattggggaggaagcagtgaatgttttttacgtgagagacacttacgggaacccagtagaatcgaagaaaatcgaagcactccgcagggaaatcgggcacacgatgatgcttaatgtaaagaaggatccaggcagtgccaaagcacccgaggctgaggctattagtactggatgggccaagacaagttttttctttggaaacttactggataagttgctggcatgatcaaagaaaatgaaatatctccatgtttgactgtaacagaaactctgaactgtctacaataaattcaagcttttgcatacccaccatgctaagaacttgatgtccctgctttgtt

SEQ ID NO: 9912 - DNA, 878 bp, Gossypium hirsutum
  Clone ID: GOSHI-09MAY01-C73537_1
ctttgaatggcggtggagtatagttgttgtgaatgggagttggttattcacatattaatagtagtgttgttggtattgttcgcgggtttgatgtcggggcttactttgggccttatgtcgatgagtctcgtcgatcttgaggttcttgccaagtccggaactcccaaggatcgtaaacatgctgcaaaaatattgccggttgtcaaaaaacagcatttgttgctttgtacactacttatatgcaatgctgctgcgatggaggcacttcccattttccttgatggtttggtcactgcttggggtgctatcttgatttcagtgaccttgattcttctgtttggtgagataataccgcaatccgtctgttctcgatatggtttggcaattggtgcaactgtagctccatttgctcaagttcttgtttgggtcctgttttcctgttgcatacccaataagcaagctgttagactttttactaggccatggacatgtagcactttttcgaagagccgagttgaaaaccctagtaaatttgcacgggaatgaggctggaaaaggtggagaactgacgcacgatgagacaacaattatagctggagcacttgagctctccgagaaaacagctaaagatgccatgactcctatatccgaaacatttgcaattgacattaacgccaagcttgacagggaattgatgagtttaattttagagaaaggacatagcagagttccagtttattatgagcactctacaaacattattggacttgttttggtcaagaatttattaacagtccaccctgaagatgaagttcctgtgaagagtgtcactatacgaaggattccaagggttcaagaaactctaccattgtacgata

SEQ ID NO: 9913 - DNA, 942 bp, Gossypium hirsutum
  Clone ID: GOSHI-09MAY01-C73407_1
cctttgccaaccaattagctcgccaaggccttaaccttatactcgtcagtaggaacctaaacaagctgaaaacagtttcagctgaaatccgagcccgatttccccatctaaagatcaaggtcgtggcccaggatttctccggcaatatatcggctggtgccgggttgatagaagaggcggtgaagggggtggaagttggtgtgttgatcaacaacgtggggataacgtaccccagagccatgtatttccatgaggtggaggaggaatggtgaaggggattattaaagtgaatttgaaagggacgacctgggttaccaaaacggtgctgccggggatgttaaatagaacgcggtgcgattgtcaacgtcggttctggtgcttccattgttgtcccttcgcatcctctttacacaatctatgccgctacaaaagcgtacatagataagttatcgagatctctgtatgtggaatataagctaagagggattgacgtgcaatgccaggtaccgctatatgtggcaacaaatttagcatccaaagtagcatcaatcgagaaatcatctatgtttgtcccatcgcctgaagattaccccaaagcggcgatccgccaaataggctatgagccacggtgcacgccgtactggtctcacgctgttcagtggtgtttcgcacggttgctacccgatgtccttcttgatgcttggcgtctctctatcgccctccgaaggcgagcagaggtccttgcgtaactttctttgttcttcacattaattcaataatagattataggttcgataacaaatgctctttgttttccctctcttaatacttcatagatttgcttcgaaggcataaaaatacagttgttcaagtcattagcacgcaatatacaatatgatacgtacatgtgaatgttgtatgataaaatttgctgttgtgagc

SEQ ID NO: 9914 - DNA, 446 bp, Gossypium hirsutum
  Clone ID: GOSHI-09MAY01-C73427_1
gcgccctcgcgtccgccctcgcgtccggaccatatacattctgaggtttgatagtggtttgctttcttctttgggagaagaagctttgctaggttaccttgcgtcgtccgtagttatccctgattctggccaattcgcatcccaacacggtttccaacacatcgatgtcgtcaatgtcatcatgtgcctccatggtttccgctacatcgatgctcaagacattaaaagggagagttgggtcctcactgatgaaggcatgtagtatgccgccgatggctcccctgaagttcaactcttcttagccgtccctcaagaaggctctatttctaaagacgaattacagaaaaagttagagccttcggttttcaatattggttgctcacaagctgggttattcttatgggtcgtcttgggttagctagtttcgagaaaagttcaacatgtgg

SEQ ID NO: 9915 - DNA, 607 bp, Gossypium hirsutum
  Clone ID: GOSHI-09MAY01-C73617_1
ttaacatatggcaagctcaaagatggtggtctgagggcttgtcaggatcaaggggcgtgtacaatgttcagaggttaaaccgcaatgcatttgcactacccacaccacctatgtccgaagatgagagctcgaaaatggaatcggcagaagcaagccctgtaacaccgccattgaccagagaacgcgtacctcgtaacttataccgtccagcggggatgggggtgggctactcatcctcagattcacttgatcagcacccaatgcaggcccggcattattgtgactcccggtcttacctcaaccccaaaactttccagcattagtggtgccaagacagagatatcatcaatggatgcctctatgaggagtagctcatcaagagaggctgatcgctccggggagctgtctatcagcaacgccagtgacctcgagactgagtgggttgaacaagatgagccaggcgtttacattactatcagagccttgccagggggcaaaagggagcttaggccgggtagattcagccgagaaatatttggagaaatgcatgctaaactgtggtgggaagagaaccgagccaggatacatgaacaatacttgtaatttg

SEQ ID NO: 9916 - DNA, 1022 bp, Gossypium hirsutum
  Clone ID: GOSHI-09MAY01-C73097_1
gcgttcgcacgcctttcatttcatttcagtgcagactcggaatctgtcgcccccccgcctccgctccaacaaagaagctaagagatctcaccgtactggaaaaatgggattagggttgttagcttcaagaacccttaagacctccagggttctctcttctcagtactctcgattccgacccatcgtcaccaaacctggcctccaatcccccgatgcatcagctgccgcaccagcaacgcagccggagcccactccgcctctgcctaagaaacctgtgggcggtgcccgggtccacttcaccaacccagatgatgctctcgaggtgttcgttgatggataccctgtgaaaatccctaagggcatgactgttcttcaggcctgcgagatcgctggagttgacattcctaggttttgttatcatagccgactttcgatcgcgggaaactgccgtatgtgccttgttgaggttgaaaaatcccccaagcccgtcgcctcttgcgccatgcctgcccttcctggaatgaagattaagacagatacgccattggcaaagaaggcacgtgaaggagtgatggagtttttgctgatgaaccatccactggattggccaatttgtgatcagggtggagaatgtgatctccaggatcagtctatggcatttggatctgatcgtggccgttttactgaaatgaagagatctggtgttgacaagaatcttggtcctttggggaagactgtcatgactcggggcattcagggtactaggtgtgtcaggtttgcaacagaagttgctgggggttcaggaccttggcatgttgggtcgtggtagtggagaagaaattgggacttacgttgaaaagcttatgacaagtgagctttctggaaatataattgatatctgccctgttggagctcttacctctaggccctttgcatttaaggcccgaaactgggagttgaaaggaacaggactcattgatgtgaactgatgctagttggatccaacattctgaattgatagc

SEQ ID NO: 9917 - DNA, 1237 bp, Gossypium hirsutum
  Clone ID: GOSHI-09MAY01-C73067_1
ccgggtcgacccagcgttcgccccgcgtccgggcaacattggggggggggaggttgggcataaaacgcagaagcagtttcatggactgctcatatgatgattctctgtgtagtgttactgaacggcaaaaattcctagtgaagccaaaccttagagcttttgttaataaaataagggagcagtctcaaaggggcggggcgactgatctgctatggtggaaaggtcttgctcgaatcatggaagctaaaggatatatcagagagggggatgataagatccatgttcagataaaatttccggaaccaacagaaaggggactggaatttcttcagtctgagagtgataagggtttccatggttacccagaagcagatatgctttactcaatgagaaaaccgagagcttattccagtttctccgattggggaaagggctgggctaatcctgagatccgtcgtcagcgtttagacaaaattcggtcttcaaacaggaaaccacgaaagccaagaataaggaaatcaagaaaacatttctcggatactagtacttctcggggtagaatatctgcaaaaatctcgcaaaagaagtgagctagcatatttattcctttcattttcccagtataggatggttaaagtttagagatttaaaccatttcatgaagcaaaccatggaggaagagtaacacaaaagcaaccaagaacttgttaatggaaagaagcaaggaatctccaccctttacataaactagactttcatttcccattctccaaataaacagaagcttattgatggactatgttcggataattttcgcggttatcggcttttccacttcgttcattttcgtcctaccgagtttgaagaaatggcaaaggcagcaagtttcgatagagaagctaaggatcattacccaggcattggaacatgctgaaaaaagagttgtgaggttccaaaaaaggcatgatcgtatacttggccaaatatgttcgtattacatggttaatcaagaccttgaggacgccttggccggtcctcgagctgccatgaacgaggctttggagttcgctgttgggctgaggaagatgcaattgcagattttgaggtccttaactgaagttgatgcttttcatgttggatagatgacaattgagaactactaattaagagaattaaagtaattttcgtttcacctttttttaattctctaataaaattttaagtttttttatataat

SEQ ID NO: 9918 - DNA, 572 bp, Gossypium hirsutum
  Clone ID: GOSHI-09MAY01-C68467_1
gcgaagcgctatacgacagagacatgtctagagtggcgggtagaatgcatgtactagagagaaaatggtggcagcatgtggggaaccactccaacgatgggccgcttatgttcttgaaggagcttcactagcgaggtcagtgaatcatcggcagagtaatacctacaaagcctcaaaacgtcacgaacctacaagctcggaactaatgtcttacatgcatattctctttcgaatctgcccgtactacaagtttgcatacacatcacctaacagctgtcatcaaggaagtcatggaatacgagcagagaattcatatcattgattcccaaatagcacagggtacccaatggatgtaccctattgcagctctttcaaaacggccctggtgggcccccatttatccgtgtaactggtattgatgattctcagtcaaatcatgctcgatgcggaggacttagtattgtggggcagaaactatcagaatttgctaagtcgtacaatgtgccattcgagtttcatgatactagcgtgtctacttccgagattcaagtacagaatctcaacatttgtcc

SEQ ID NO: 9919 - DNA, 401 bp, Gossypium hirsutum
  Clone ID: uC-gsronu33B029b04b1
ccgtactgttagtttgcatacacatcagctaatgctgtcatcaaggaagtcatggaatacgagcagagaattcatatcattgatttccaaatagcacagggtacccaatggatgtaccttattgcagctctttcaaaacgccctggtggccctccatttatccgatttattgttattgatgcttatcttttaaattattctttcattttttttctattatttttctcatttcatttatttttttattttcttttactttttcttttattttcttccttttttcttatttatttttctttttttttctatcttattttcttatatttcattcattttcattatctcttttatttctctaaatattttttttttaaatatcttatttttttattcttcatttt

SEQ ID NO: 9920 - DNA, 579 bp, Gossypium hirsutum
  Clone ID: GOSHI-09MAY01-C68647_1
ccaacctctttgtcccttttagcattagatttttgggttctggattgggggcttatagaatggccaatgcggtgtcgcaccaaacagttgggactcttcaacttcatggcagttctggaattcatttccaaggtggaaataattcagtgagattggttcccaaaggtttcaaggtggaagttggcgcctgcacgacagggatttgtagttccggagagaagaaattcagtattattcaagcctcagcttctcaaacctctgttttttatcctgtgctatctccctctaacaatggcacgcatgaatctctcaagaaatcaaatgaagcagctttgatactgattcgccatggggagtctttatggaatgaaaagaacctgtttacaggttgcgttgatgtgcctttaaccaaaaagggagtggaagaggcaattgaagccggcaaaagaatcagcaacatacctgtcgacatgatatttacatcagcactaattcgtgcacagatgaccgctatgctagccatgacacagcaacgaagaaagaaatgccaattatcatgcataatgagaatgagcaacc

SEQ ID NO: 9921 - DNA, 293 bp, Gossypium hirsutum
  Clone ID: LIB3189-014-P1-K1-A3
ggccaatgctatgttgcaccaaacagttgggactcttctacttcatggcagttctggaattcatttccaaggtggaaataattcagagagattggttcccaaaggtttcaaggtggaagttgggttctgcgagagagggatttagtcttcctcaacagtagcatttaatatcttttttcctccatcagaggttataattcttgagtacatttgtccttgatgtgatagattttctcttatactaaccattaacgtttctctatacatttgttggattgtaatttaggtcttat

SEQ ID NO: 9922 - DNA, 658 bp, Gossypium hirsutum
  Clone ID: GOSHI-09MAY01-C68187_1
gttctttgctataccctaggactatagtcttctcttccgatccatccattactttcaaattttcttcttagatcaaacaaaacaatgtccggcgtttgggttttcaagaatggtgtggttcgcttggttgagaatccagcggctgagtcattagacggaagccgacagagttcgaacactcgccgcaaagtgcttgtgcacactccttctaatgaagtgatcacttcttatgcggttctcgaacataagctatggtctcttgggtgggaacggtattacgaggaccccagtcttcttcaattccataagcgatcaactgtccatttgatctctctcccaaaagattttaatacgttcaagtcggttcacatgtatgacatcgtcgttgaaaaccgcaacgtgtgtgaagttagggatggttagttgtatagtttagaggagctaattggacgtcttggtgatttccttcttcttcttcttcttcttcttttttttttgtatgtgatgatggatttattttatgattttgagattatggtattgggttgcaaattggtagaatacattcgctatgttgggggtggtttttgaaaaaagctctatgttaagggcttctgttttggtttcagttacttacgtttctgcactttttattttt

SEQ ID NO: 9923 - DNA, 429 bp, Gossypium hirsutum
  Clone ID: GOSHI-09MAY01-C68027_1
ttctcatcccagtcttcaaactcaagttcttctcccctttctcccgttctttccctctcctaaactaacgtttcaaaccacactccctttacctcaaaagctctctccttttcttgttttggcggaaagaaaatgaatcccgctgataacactgaccaccctcagcttccaactatcaagatccaccacccatcatcccctcaccaccctacctctgctgctacccccaccccaacatccggtgcccgacgtaagatcggggtagccgtcgacctctccgatgagtctgcttttgccgtgcgttgggctgtccagaactacctcagacccggtgacaccgtcatccttctccacgtgtcccccactttagtactctttggagctgactggggtccactccctcaaacccccgcaaaccccggaacccca

SEQ ID NO: 9924 - DNA, 402 bp, Gossypium hirsutum
  Clone ID: GOSHI-09MAY01-C68217_1
ctcacttctctttcttttctctttactcacccaattcttcactcttttgcttaaaagaatatatatcaattatagagctgatgggtggcataatatcaaaacgatcgaccacatcacagtcctcatctgtagcttctaattcatattcatgggattctcatagatatgcacagccatcaaatgctccctcaggccaagactatgttccagagcagcgttatgcccctccacatcacagttatggcagtcatgccccagagtcgaagaggaggttggagagaaaattttcgaagatagatgataactacaacagcttggagcaggtcaccgatgccctggcccgtgctggcctggagtcttcgaaccttatttgtggcattgatttcactaagagcaatgagt

SEQ ID NO: 9925 - DNA, 629 bp, Gossypium hirsutum
  unsure (1)..(629): unsure at all n locations
  Clone ID: LIB3583-046-P1-K1-A3
cggaaccggaccttcccgggttcgnnacccacgcgttcgcactttntgttgattcagntgatcaggtngtctttatgagctccaatttagtagtcagtggcataaagatccaaaacagtcctcagtttcatatgaaattcgatgggtgcgaaggggttttgatagaaaaactagtgatatcaacccctaaacttagcccgaacaccgatggaatccacattggaaacacaaaatctgttggtatatacaattcaatgataagcaacggagatgattgcatttcgatcggtccaggatgcttggatgtgcacattgaaggtgttacttgtggtccaagtcacgggatcagcattgggagccttggggtgcataattcgcaggcatgtgtttcgaacataaccgttcgaaacacagtgataagagaatcagacaatggggtaaggatcaagacatggcaagggggcacaggttctgtatcaggcatatcatttgagaacatccagatggagaatgttagaaactgcataaacatagaccaatactactgtttgcaaaaggcatgcctaaaccaaacatctgctgnttatgtaagagatgtgcaatattggaacattaaaggctgctatgac

SEQ ID NO: 9926 - DNA, 463 bp, Gossypium hirsutum
  Clone ID: uC-gsronu33B021d10b1
tccacgcgtccgcccacgcgtccgccagcgggttcgtttacacgtccgttggttttttatgagctccaatttagtagtcagtggcataaagatccaaaacagtcctcagtttcatatgaaattcgatgggtgcgaaggggttttgatagaaaaactagtgatatcaacccctaaacttagcccgaacaccgatggaatccacattggaaacacaaaatctgttggtatatacaattcaatgataagcaacggagatgattgcatttcgatcggtccaggatgcttggatgtgcacattgaaggtgttacttgtggtccaagtcacgggatcagcattgggagccttggggtgcataattcgcaggcatgtgtttcgaacataaccgttcgaaacacagtgataagagaatcagacaatggggtaaggatcaagacatggcaagggggcacaggttctgtatca

SEQ ID NO: 9927 - DNA, 1420 bp, Gossypium hirsutum
  Clone ID: GOSHI-09MAY01-C69897_1
atccaacaaggtcatcaaaacactaacatgtctattggtgcatcatcctcccagaagcatttgcagaacctgcagcaaaggcctcatggaagtggtgccagtagtggcagtggaaccttgcaaggctttcctgcccccaaaaaccagtcgtctcatcccttgccactacagcaacggcagcaacaaccaagtcagcatgcttcttatcaagcccggcaccttgaaggtgaattaagtggcaaagatagcccatcaacttctgacagccgagtatctcgtgcaaatatgaatatttattgtcagaattttgccatgcctttacaacctcccaacttcaccttgatgactgctgcatcattgggtggttccaccagttctggctgtaaccagggggaaaagaaacaacatatccaacagccaggttcaaaggctggagttgagtctcttacatctcagtcatttgccatgtcgattgcctccattaatggtactactactcctggcgttgatatttcctcctttggacgagatcatgcaattcttcaaagccttccggagagtacaaggcaaggcttcctgccgatcatggcagctgctgtagctgcccaaacagcccaacagaagaagaagaattatcttgcttccgaagaagggaatcatggaactaatgatgcatctagtgtggaagaagggaggaatgccatggcaggaaagagctcagcttctgctgggcagtccattgccttctccagggcggatctgtctgattcgtctgtttccactattcctggcagcaatgttattgatagttctgcccgtacaactaatcctggctctgctcccacaacttcaggttctgttatgcctgcttcaatcagttgtgtaaatgctcctagtggtcagcagcaacttcagcgggaatcaacagcagcagcaacagcagatgcttcagcttcagaagccgcaccaatttggggctgcttctgcttctcgaagcaaggtgccggtgacaagtaatggaaatgcttattctgatcaccttccttcatcttctatggctacaaaattccaaaatgccttgtctcctttccctcaaaatcttgtgcaaaccagcagcagtccagctcaatctcctcaatggaagaattctgtaaggacaactggccctcaagtttcttctccatctctatcttcaacttcatcaagcctaaaaaattttcccagcaacaagcccggccacagcaaaaccacaccgagatttctttcacagctaatcctaactcaacacaaaatcaacagcctcctagtagcaccccatccccctctactccgattgtggttggctctcccacaacttcaatctccagaagtgctggtggtagtcccaggacaaccagttccacttctactggcaacaaag

SEQ ID NO: 9928 - DNA, 617 bp, Gossypium hirsutum
  Clone ID: AI055715.1
ctccagggcagatctgtctgattcgtctgtttccactattcctggcagcaatgttattgatagttctgcccgtacaactaatcctggctctgctcccagaacttcaggttcttttatgcctgcttcaatcagttgtgtaaatgctcctagtggtcagcagcaacggcagatgcttcagcttcagaagccgcaccaatttggggctgcttctgcttctcaaagcaaggtgcaagtaacaagtaatggaaatgcttattctgatcacattccttcatcttctatggctacaaaatttccaaatgccccgtctccttttcctcaaaatcttgtgcaaaccaacagcagtccagctcaatctcctcaatggaagaattctgtaaagacaactggctctcaaagttctttttcaattctaatttcaacttataaagcctaaaaatatttccagcacaaccccgccgagcaaaccccacgagaatttttacagtaatcttactcacacaaggtcacagctctaaagcaccattcactttatccatggggtggctttcaaactcaatctcgaatgcggggtatccagacacggttcattactgcacaaggtgcagcttagtatt

SEQ ID NO: 9929 - DNA, 557 bp, Gossypium hirsutum
  Clone ID: GOSHI-09MAY01-C69867_1
cccagcgtccgccccgcgtccggccacttcaaggcttttgatcataaattattttaccaactaaattcatggtcatggcagccacttcctctactaccactaactgctcacatttcttcaatctccgatcaaacgacgacgaacccaagctggtccgtccgtcacccaccgctcacggctcaccagctgcttctgggtctgggtgtggaaagctcgacggtgttatcatgtggttcgtcaatggcgtggcgactgtattctttgcatcgttagaacggtgttcttgcgtccgtataaccacggcggatgacggccaggaagcgaatgacgtgccgttgattcacggtgacgggaacgtcaggcttgacgccggaaccacgaggaggagaactgcagggaaaggaccgtttcttcaagactaaggggttttaagaaatatatttcgtttgttacttaatttggtaagctaaatatgatgatggagttctctttgaatgttttagtgggattatattgttgtttggaagtatatttttacttttgttctttatgattat

SEQ ID NO: 9930 - DNA, 557 bp, Gossypium hirsutum
  unsure (1)..(557): unsure at all n locations
  Clone ID: uC-gsflnu33B036a02b1
cggttttattctcagaaaaagccttatcctccccaaaagtacacagaatacaactttcctcccaaaagacttccaaaacagttcgcccttctttaatctggttccctcgtcttctccgcaacaaaatgacttcttgcaaaggactgaacactccccactagctttctcaggtacaatctttctttcatggactctggtatttctatcacgccaaattacccaaagtgcacaacaaagaagacaccgttgaggagtacagctcaccccaaaagctcgagtaagccattgatcgaacgccagatccaaattatttgagaatatgcaaaagtataaactctgaccaaacctccactgaaacaacactcattcgaaagaggtgatcaatattttcttctgcccatccacaacgaggacaacaagctgtattaatcaatttttttgtatttcatattagccagaataggtagatagttccaagagcacctctaaattgtaattntaatttccccagtacgggtaaggccccatagctttttttagaaatcactagttttcga

SEQ ID NO: 9931 - DNA, 519 bp, Gossypium hirsutum
  Clone ID: LIB3583-043-Q6-K1-D6
cggacgcgtgggcggacgcgtgggctcgtcttctttgcagcaaaaggactccttgtagaggatgcaacactccccaccagccgttctctaacctcaatcgcatcgctcgatgactagcgatggcttcagcagcgaaagctgggggaaacccctcgtggttctccgactttgaaaccagtacttccctctcagcatctctcgcaacaatacatgaggccgacctattcctctgtctgtcataagttccatcgaaattaattttgatgatagttcccatgggttgcttccattctaccgcctcttttgccttgatttctcagatacaaactttctttcatggactctggtatttctatcacgccaaattacccaaagtgcacaacaaagaagacaccgttgaagagtagagctcaccccataagctcgagtaaaccactgaccaaatgctcagattcaaattattgagaatatgacagagtattaactttgacctaacctctcactgaatacaacacaata

SEQ ID NO: 9932 - DNA, 587 bp, Gossypium hirsutum
  Clone ID: LIB3543-051-Q6-K6-C11
aggcctctactgcaaacagggggtggggtgcggtgcgactactgttttgaatgagatgacctgtcccgaacattgctagccaccacccctgagactgattttggtcaagattcatcaaagtggcgtcgaaattaagtttgaaaacggaaccagctggtgggcaccaacccgggggctggtgcctcgtgcaaaacactcgacattgtatgctggaactattcttgaacactcagcagcatttccacatctggaacatactaccactgagagcaatctcttacaccgaagattaacaaagtaaggaataaaattccaagaaatttccagattaggattttgattttccctagaatgtgaatattccacagttttttgtaaaatattttagcctcagtctgtaaataattaggaaaaatgtcatgtaatagtttataagcacttcgcacagaaaattctccagaggcctcctcttttcttaccataagtccgcataggttcattgttaagggacttcgcacaattctgtctgccttttctctagagaaggcagaataaattaagtcaaccttttattctctcttttgttc

SEQ ID NO: 9933 - DNA, 545 bp, Gossypium hirsutum
  Clone ID: LIB3584-056-P1-K2-E12
cccacgcgtccgcaactatcccactttccttttctcttctcactcaaagaccacctatcgaacaacactcagccaggttctctccttcgcagatccacatccgatgttctttgctcaaggacccttccgatcagtgcttggaggcacgtaagggcctctactgcaaacaaagaggtcacctccctgcgaactactgttttgaatgagatgacctgtcccgaaacattgctagccaccacccctgagactgattttggtcaagattcatcaaaagtggcgtcgaaattaagtttgaaaacggaaccagctggtgggcaccaacccatggactcgtgcctcgtgcaaaacactcgacattgtatgctggaactattcttgaacactcagccttatagggcaatctctgaagatatgatcaatgttttcagcagcatttccacatctggaacatactaccactgagagcaatctcttacaccgaagattaacaaagtaaggaataaaattccaagaaatttccagattaggattttgattttccctag

SEQ ID NO: 9934 - DNA, 892 bp, Gossypium hirsutum
  Clone ID: GOSHI-09MAY01-C69087_1
gctcccttctttgtcgggttttggctcagatcgactgccgggtatttcatcttgggttggtggtgacatgggtgattttccaatccaaattagcaccaggcttatcgaccgactaactgaagatgatgagaaggtgaagaaaagaacaaagaaaactaaaaccagggtgccacgagagcctcgactgccagaaactaaggtagatcagccgcaaatatctgatggttctgaacaacagaaagggactagtacaggcaccggctgggctgttccgcctcccttgtttatgcctgtaaaccaacctccttactctgtcagtgcagaattggatgcaattcgatctgtcgttaaagagagcgagaacgtagtagaaaagctgcggaagcaggaaaagaacatggtgcaggaagtaacacaaaaagccaaggatcttcatgataaggagttcaagataccagaaccaaagcctatgccttgttcggttgagagtaatgcttggatgacatgctacaaggagaatactaatgaccttactaaatgcgctcctctggcgcaaaattttgcagaatgtgctcgcagagtcaggcagcttgcaaaaccagctgataagtagtctttgataggggcaaattttcaagtcatagaaggagtgcaagccacttgccattgcaaataaaccagcagacgagaaaatctaccaatttgttttaacacccttgtagggttacagtttgtgccattttggcatctatcgtctcatactttttgttaacatcttctacttctccctaaaggctttgttttgttacttaatatgttgaaagcgacttgaaatgattgacatgattttccaccattttaattttggtgctttaacaccaaatatgttttc

SEQ ID NO: 9935 - DNA, 684 bp, Gossypium hirsutum
  Clone ID: GOSHI-09MAY01-C69247_1
agaacatcttgagaatgttgctgctggtgaaccgaaaaaagaatatgaagaaatagaagaattgaagatggagaccagtgcggagctgcctgttctgaatgcaagatcggttgaagatattgatttggcttttaagcaacttcatgaaggtgtagatgttgaggaagtagttcttgcaagcatgattgaggatcagctggatcatgaagatttcacttcaaagttacctgttgtcgaggcaagatctctggaggatatacataatgtccggctttcctatatggtccagaacctaatctggccgagctgccactttccacagactggagaaatggatcatcagaaatggagcagcatgatgtggtttctaataaagagattgaagttggccgtgccgtctctggcattcaagaaaatagtcagaattctgccggtgaaccaaaaaatgaccatgaagaaacagaggaaatgaagatggagaccaatgcagagctgcctgttcttgaagcaagatcattggaagacattgatttggcttttaagcaatttcatgaaggagttgatgttgaggaaataattcttccaagcatgattgtgaatcatcagggtgatgcatgttccaattcggatttaccagttgttgatgcgagatcttttggagatatacagagtgctttttaacat

SEQ ID NO: 9936 - DNA, 601 bp, Gossypium hirsutum
  Clone ID: GOSHI-09MAY01-C69267_1
gataaactttctaaaacaatctcttttcctcgtctaaaacctaaaaccaccatagccatggcggtgatgtcaaagcaagatccatcaccagcttttgtagaaacggtacaagaaatcatgagactttacagatcacttccaccaaggccttcaattgaagacgttgcagcagccaaattccgttctcaaaactgttagaaaatgaagaaaaaatcaagcttgaggagatctcaatggaacgaccacctgaagatgtccctgaggaactcttctccgttctgcatcaggtgaggaagaccatggtgttgtttcaaagccaccaacaaaaaaaagaggccctttacttggttgaagctgacaagatgtttgagacgtttgatgggttgattcaaagggcttcttttctggtttctggggatacccaagatgaaaaggtgactacttttagggaacaagtaaggaaatttgatagagaagctgttatcagtgatgacagtttggtgaagagaaaggaagatggtgatttggataaagatgatgtaaagggtttggttagatgttcttcttcaaaggcttctttcttttcaggtgaaaatagcag

SEQ ID NO: 9937 - DNA, 573 bp, Gossypium hirsutum
  Clone ID: GOSHI-09MAY01-C64987_1
gattattactactagtttagtttaaagcaagttagggccgtccaactcagttgtagcgaaacgctggttgaagtttgcagtgagtctatgtgcctaatttgtttgtttgcaataataaatccaaacaatcacacactcaactctttcatctttctattgtctcccgcattttcgtaagtgaacgacgctgttcaagcttaaggagagaagggcatcatggtagactcgctgaagaagaacagcatggaagagagtttgattcccaagttgggagaacgaggagaaaagcactcggcggctaagttgggctgctctcgttgaagatataaaaagggcgggttaccttgcggggcctatggtagccgtcaccttatcacagtacctattgcaagttatatcaacgatgatggtgggtcatctgggtgagcttgctctctctagctctgccattgccatatctctcgccggagtcaccggttttagtcttcttctaggaatggcatgtgcattggaaacgctgtgtggacaagcttatggtgcacaacaataccgaaaattgggaatccataccta

SEQ ID NO: 9938 - DNA, 411 bp, Gossypium hirsutum
  Clone ID: GOSHI-09MAY01-C64957_1
ctgattttctctttctaaaaaacgcagcggtgagcgaccggcgagaaaccaaatctcgccggaatttcgctctcttgatcgccggaaatttcatttcctttttcttttcacctctccggaatcaagctgccccaaagagagcggatatatatatatttgaatttcgggtatgattttgtaatcatgtttttgtagaagaaaacaaagagaaaaaggagaacaaagatcttctctctcttttggatatggcgattaaatggagccttgagtgataaattttgagcttttagtttttgagattttctgggtgttgaagctgtacaatgccatctgagatcatggatcaaaagaatgcatcggcatcatcccatttttcggaagacgtttgtttcccagctgagagacaaattg

SEQ ID NO: 9939 - DNA, 466 bp, Gossypium hirsutum
  Clone ID: GOSHI-09MAY01-C64967_1
cttcacttcttttcattttccttcagacttcaccaaagtgagaaaatgacttccccgttttccttgccttgacttctccatctttctactttaaaacccaaagccccaaaagagtttttaattttcttttcttataaccctcaaaaaaaattttcttattggagagagcttttgataggatatgaatatggaggcaagagttggggtggtggtagaaggagggcaaagggctttgaattcagcccacggagctgttgttgatgctggggctagaaagtttttacagcagcagcagcaacaacaacatgagcattcttcaaagcagggcttgaatccgcagattgggactgttcaacagcttcttgctggtggtattgctggtgcttttagcaagacttgtacggctcctcttgcttcgttaaccatcttatttcaagtccaaggaatgcaatcagatttatcagca

SEQ ID NO: 9940 - DNA, 527 bp, Gossypium hirsutum
  Clone ID: GOSHI-09MAY01-C64937_1
cccacgcgtccggttgatattggttggctgtgaatccaagttaaaaagagtatatggggggtggaagtggacgtctcgtggacggtgttcgtcgctggtttcaacgtcgccatttgattccttcttcttcgaatcaacaaaataataacattatcatcgatcatcatgatacttcttcttcatcctctactactctaaccctcactcaaaaacaatcacaagaatcaacggctgatattgtcgttcaggattttgatttttcttccttgaggcttgttaaagttcctaagcgtcattactttcctgtttcttccatggattctcacaaaaagggtgcacttgaaaaggaatttttcacacagtatggagaggcaagtcgatatcaagttcaggaggtcattggaaagggaagttatggggttgttgcttctgcaattgacacccacactagtgaaaaggttgcaataaaaaagattaatgaggtctttgagcatgtctctgatgcgacacgaattttgagagaaatc

SEQ ID NO: 9941 - DNA, 698 bp, Gossypium hirsutum
  Clone ID: GOSHI-09MAY01-C64807_1
cccaaacttaccaaacctcaaataaacagtttacagtatcgcagtgattgaaggttaacctctggtttgagggtctccaaggccaaaagatgagtcttgcatgcctggtgtgccacagtgtggaaagtccgtcacactctttccggagttactctgtttcaagctcagataacgagggaagatgttcagctgttgctaactgcttagcaaggaagacatctctaccatctgcaagaccagctataacaacgacctccaaagtggccccacaaccaaattttcaaaacagtgttggaatggcaggtccgccacgtctggtgcgtagtcgtgctgttaggagggatcttgtgagagactggaactttgaagaggttgtgatggaacgctagtttgcttagtatgaggtgcaagactgtgggggctctctccatttgggctctctattttgtattagtatgcaaaaactgaacttttcagcatatgtaacacactgagtaaagattattgaatgtgaagaacatatcacatgtcctatgtctcctgccttatttgtttaggtgtctttggtacagcatgggcgtggctgacaatgtgtacagcttccttaacccacttgaaatttgggttagacaggtggaagccagcaagattggctctgctcagccttgttagacagcattcgaagtagttttattatt

SEQ ID NO: 9942 - DNA, 616 bp, Gossypium hirsutum
  Clone ID: GOSHI-09MAY01-C64367_1
cccgcgcgtccgaagaaccctaatcctaaaacatctgcagcgcagatactccattttggtgcctccatgtcttctctacaaacaattcgtcatttcagtgctccggaggatgcccaaatcttctccatgaaatcaacagagaatgccccttcagataagtatttgaacttgtaatttcagatcctagcaacaagatttcgtggatctaaggtttcatggatagaagactaaacccctgcatttccccctgtctccgcagtccgttcctctacaatgaccagaacccagacaagttttactcctatctttaagcccctctttagccaagggtctatcttatgcctagactggtccaaacatcaacagcaaaagggcactccctaaagacatgctcagtgtctcaagacagtcggagcattgtatgcagttagttgagttcccaagtcgtcgctggtaaagattaaacaaagtagggataaagttattaagagttttccaaattaggattttaatttttgaaggtagatccaccgcctagagcttcttgtacatggttttgtaaaagtcgatgttagcttgtaaagtaattgggttatcatatgtaataattttttgt

SEQ ID NO: 9943 - DNA, 429 bp, Gossypium hirsutum
  Clone ID: LIB3272-004-P1-K1-A4
gtctgaaacaacacacaccaagaacgagagaaggccttcaaaaaacaaaaaaacaaaaaagaaaaacaattagaacatcaaacatgattggtccaggcagacctctcttcgtcctctttggatcttccatcgttcagtttagttacagcaacgaaggttggggtgcaattcttgctcatgcatatgctcgcaaggcagacataatactgcgaggatacgcagggtggaactcgaggcgtgctttggaagttctagataaagttttccccaaggatgctgctgtacaaccttcattagtgatagtttattttggtggcaatgactcaattaaaccccacgcatctggccttggtccccatgtacctcttccagaatatgttgagaacatgaagaagattgctatgcatctcaagggcctatcggagaaca

SEQ ID NO: 9944 - DNA, 325 bp, Gossypium hirsutum
  Clone ID: uC-gsflnu33B070g06b1
aaacattatcacgtagatgtcactacttttgtctgaaacaacacacaccaagagcgagagaaagccttcaaaacaaaagaaaaattagaacatcaaacatgattggtccaggcagacctctcttcgtcctctttggatcttccatcgttcagttgagttacagccacgaaggttggggtgcaattcttgcacatgcatatgctcgcaaggcagacataattctgcgaggatacagagggtggaactcgaggcgtgctttggaagttctagataaagtttttcccatggatgctgctgttcaacctttcattggtgatagtttatt

SEQ ID NO: 9945 - DNA, 650 bp, Gossypium hirsutum
  Clone ID: GOSHI-09MAY01-C64207_1
atcgaatacgacgctagctatcgagtgatccgaaacgatgtgtacactttttacacctacccttttcgcctttgcttctataataccactcctgatgcttacatttttgccatgcgagctggcattcccaacgacgaaagcctaatgagatgggtgtgggacgctaaccggaacgatccggttcatgaaaatgccaccctcaaatttggcgaggacgggaatttcgtgttggcggatgcggatggtcgtgttgtgtggcaaaccaatacggctaacaaaggtgtcactgggattaggttactaccaaatggtaacttggtactgtttgataaaaatgggaaattcatttggcaaagctttgattaccctactgatactttgttggtgggtcaatcggttaaaatcaacggtcggaacaggctcgttagccggaaatctgacatggacggctctgatggaccgtatagtctgatactagaccataatgggttcattatgtatctaaataatttgggccagcaacttatttatgggggctggcctacaaggattttgctgacattgtgacatttgctgccgagcctgagacgttataaacaaatacccttacgagtggtgtagttacacattacagctcaacgagacttccg

SEQ ID NO: 9946 - DNA, 714 bp, Gossypium hirsutum
  Clone ID: GOSHI-09MAY01-C65937_1
caaatttacaaccttgtaaatgtgtggtcaataaaggaacccattttccctttaaaaatcacttcttttaagctcaagttcacttgataacaaactccattaatggctgcttttatcccattcaagctatcacttcttttgagtctgctctcaaacattggtttctggccggaaaccagcaagaacgatgttgggatatttccacctacatgtaatcggattgaatgcccaagtttcgatttgattgaagtcggcaatggctatgagattcgtagatacaattccaccatctgggtgactacttcaccaattcaggatatttctctcgttgaggccaccaggactggttttcttcagctatttgactacattcaagggaagaacaaatacaagcaacaaatagagatgacagctccagtcatcactgaagttttaccaagcgatggacccttctgcgagtcatcatttaggattagcttttaccttccaaaggtgaaccagcaaatccgccaccagctgaaggcctccatatccaaaaatggaaatcaacatatttagcagtaaggcaattcattggatttgtcacagactataacgtcggagtggaagctgctgctttggaagccagtcttgcggacactgtttggtctcctgcaatcaaaaagtctcaaaaagaaaaaaccacttcgggtttatctgggttgctcaatatct

SEQ ID NO: 9947 - DNA, 703 bp, Gossypium hirsutum
  Clone ID: GOSHI-09MAY01-C65587_1
ctgggagggtttatgccactggtcttaatgattttgggcagctagggtcatcagatcttataaagtactctagagagccggttgaagtttcgggtcttgcaaaaggaattgtgcaaattgcagctggttatcatcattcatgtgctattacagtggatggagaactttacatgtgggggaagaactcaagcgggcaacttggccttggaaaaaaggctgcgaaagcagttcataggccaaccaaagtggaatgcttgagcgggcttacaattaaattggctgctttgggttcagagcacacagttgctgttactgatggaggtgaggctttaagttggggagcagttgcatctggaagacttggtcatggccttgagtcgagcatttttggttttttaacaagcaacagtatcctgtttatttcgcttttgagaatgatgaaattgatactgtcttggcggatatcaagaagaatgatgcgattggtcaacctgctactgcaactactggagggtcagttcatagttttttggcttaaaattgatactacctctcccattgttgtataaggatgctcgtttgatgtcagggaacagatctagcctgaactgctacctgttttcaacgagggataaaatattttacctgtttttcttgttttatttctccaaaatattgttgaacgatcattttctaaaaaccc

SEQ ID NO: 9948 - DNA, 395 bp, Gossypium hirsutum
  Clone ID: GOSHI-09MAY01-C65567_1
ctcttcccatttctctctcttttcttggcagggaaaaaagtgagtgacttgtgggaaagcaaaaataaaggccatatctttgatgtgaaaagagagcaataccagttacaaggaacaaagattttgtagatattttttccttcacagttagtttaacataatggaaggaatcaaaggtggaggaggaggtagagttggtgttggtgttggtgttgaagaagatatgggagatggtatgcaatgcagtaatcatccttatagaaataaccctggtgggatctgtgctttttgccttcaagagaagctaggcaagttgggttcttcttcttttcctttacctattcgtgcttcaccttcttcttcttcttccccgccttcttttagatctgatactg

SEQ ID NO: 9949 - DNA, 563 bp, Gossypium hirsutum
  Clone ID: GOSHI-09MAY01-C65497_1
ctttttctttcacctttcgattctccacggtgccgccaggcactgttttctctgttctagatgacaacgcaatcggatccatcggcttccgatccacaagggattgggaatgcctttgtcaaacagtactacactgttcttcacaatgacccttcacatgcttataaattttatcttgacttgagcgtgttaagccgccccggtactgatggtgcgatgaagtccgtgactaccctgaaagagataaatgagttgattctctcattggactaccagagttataaggctgagatttcttttgctgatgcccagttctcattagcaaacgggtgtgattgttttggttactggctctttgatcggaaaagatgatgtgaggaggaaggttacgcagtcattctttcttgctccacaagagggtggatattatgtcttgaatgatgtgtttaggtatgttgatgacaaagagccagtggacgtggcatataatgatatcgatgagtgtaatcaagctgatttgtctcaagataccgaggtaactcctgtgccgaagaatgctgtgt

SEQ ID NO: 9950 - DNA, 483 bp, Gossypium hirsutum
  Clone ID: GOSHI-09MAY01-C65127_2
gaagaaatggcttccgcggatagcaatctccttatcctcaatttcctaaccttggctgcgttggccctattctatgccgacaaagctttttgtattcggattccagatcgggcctccaccacgcctcgggaactgtcagatcagtctctgaaaaccgcggtttttgccctcggtagtttctggagatcggaagctgtcttcgggtgcttaaacggtgtcgttcgaactacttctggttatgctggcggatccaaaatcaatcccgaatacagaagcttaggtgaccacgccgagtctgtgatggttgaatatgatcccaaggagattaatttcaggctacttctggaggttttttggtctagccatgacccaagacaggtttttggccaaggtcctgatgtaggtccccagtacaggtctattatccttacgaatgggactgctgaggctagattagctgacatgagcaaagaaagggagcat

SEQ ID NO: 9951 - DNA, 583 bp, Gossypium hirsutum
  unsure (1)..(583): unsure at all n locations
  Clone ID: uC-gsflnu33B107h05b1
tttacgcgtccgatggcttccgcggatagcaatctccttatcctcaatttcctaaccttggcttcattgtccctattctatgccgacaaagctttttgtattcggattccagatcgggcctccaccacgcctcgggaactgtcagatcagtctctgaaaaccgcggtttttgccctcggtagtttctggagatcggaagctgtcttcgggtgcttaaacggtgtcgttcgaactacttctggttatgctggcggatccaaaatcaatcccgaatacagaagcttaggtgaccacgccgagtctgtaatggagattaatttcaggctacttctggaggttttttggtctagccatgacccaagacaggtttttggccaaggtcctgatgtaggtccccagtacaggtctattatttttacgaatgggactgaagaggctagattagctgccatgagcaaagaaagggagcaaaccaagtcgcggagcagcattttgacaacccaaatcaacaacttgaatcatnttatccggcagaancctgacatcagaaattngagctcanacgccacccgatgcttctaca

SEQ ID NO: 9952 - DNA, 522 bp, Gossypium hirsutum
  Clone ID: GOSHI-09MAY01-C65287_1
gccaaagcctcttcatttaaaaaatatataaatttctgcaaaaaaaaaaaacttacaaaaagatagaccaaaaagaagaagagcccgcggggagtatgacagaggtctgtttcgggggtgagctttctatcactgctccaacggacttcttcttttgtggtgctctttacccagatccaggcaatctaagaggactaagatgaatcctttgatgcgcttttaagattatgatgttttggggttactgttcacaccttagtatcatcttgtcatgatttcggatatcgtgatcttcgaggtgagtgttgctgtcaaagttcaacaactacccatgaaagtcttatgtttgaagggtctggatctcaaatttggatttgataagagctttgtgaacggagagatatatatatcaaaacttttgacatttaaatttgacaaactgggttttttggggaggattctaagtttgtacaaactgccaaaaggcaaaaacctaaaaccatttttgatcggttggacttg

SEQ ID NO: 9953 - DNA, 605 bp, Gossypium hirsutum
  Clone ID: GOSHI-09MAY01-C66497_1
aaactcttcatttagcaaaaatgagtaccagttcttcggctgtttcaacccaaaaaaggcttgaagggaaggttgcattgataactggaggtgccggtggcataggtgaggctacagcaaggttatttgttcaacatggtgctaagggttgtcattgcagacattcaagatgatttaggacaagctatttctcaagaacttggagaagaaaacatctcatatgttcattgcggatgttacattagactctgatgtcggaaccgccgttgattccgcccgtttcgaagcatgggaagcttgatattaatgttcaacaacgccggtatatccagtcccgataagaacataagttccttcaaacgatgagagatccaaaaggggtcttgatatcatatcttgaaggtgtttgggtcctaaacatgctgctaggttgatgatcccgccgagaaggtcatttctgtttacaaaagcgttggtcatgatcggtatgccgtgtgtggcatgcttttgtgaatcgagcacctttgtgggtgctctaaaactagggtgattgggcttggatagataactggtttcgcgacgtgtgcgactcatgtacagacgtg

SEQ ID NO: 9954 - DNA, 611 bp, Gossypium hirsutum
  Clone ID: GOSHI-09MAY01-C66647_1
tatgaatcgacgtttctctttcatttgcaacttgtttgtttactaaggggcccaaaaaaaaaaaaaaacagcctgcacataccactgccgcctttggtttatagcttctaaatccaactagagaactaggttgtcttcatttcctcagctaattcactacaagtaaaatcacatggattggtatctctgtaatggtatggaggatcttgttgtccccagaaatcaagaattagaagataatatcccttccccagaaagttggtcaaaatgggaattcagccctcctgcaaatgttaacggtgaatgctttggcgtggacacgaatttaagtggtgataaacccaagtttagcggcaaattatgccatgatgtagctgatgttaaggatccatcaatctgttcgagtgtatatggaggtttcttgaatcagggtcacatttttcaacagcagacggattaccagctccacgatttcggcagattcgagcagctcgatgacatattcttgggttccttattggaagatcctacttggagtgaagatcttcaaaaatcgttttgcttttctcctgagtacgagtgcgagacgatggcaactgatcatcttctgg

SEQ ID NO: 9955 - DNA, 829 bp, Gossypium hirsutum
  Clone ID: GOSHI-09MAY01-C66007_1
cccactcgtccgcaacaatcggaaatatgagaaaatttttttcgatgtcttcgcttctgaataagggatctattcaacgaagagtttcaaataagtatcttatcaatgcaattcgtccatattcagaggatctatcctccccgaaatctccagggcctctactgcaatatcgcaagttagtggagcaaggaaggctgcagcatgatccttaccaagaaagggttgctttggcattggaaaatttgcttgggaggttggaacagtatgaaaaagagatggaggactatcatattaagctagctgagtgggagaaaaacagggagactgagcgtcggaagcttttgatggaggaagctgagctcaatcaccgtggggacctttggacatcggttaataagcggaagagtgaacttttagaaagatggtcattcaggagaaaatctgaagatatagaacctggagttggtaagtgggtttcatacctcaatcgtgagaagaagttggattcacttgttggtcgccgtcctactgctcctccagccccaaaaggactctatatatatgggaatgttggaagtgggaagacaatgcttatggatatgttttatagtgccactgacggaatagttaaacatagacaaaggttccattttcatgaggcaatgctccaaataaatgaagctatgcataaattgtggaaaaatcaagttgaggaaaagtctattcagtcaagcatatcttcttggattatgaatctttcctttgatatcaaagccaaggagtggttagctgctgaagaaagatataaacaagaggttcagatgaaaaa

SEQ ID NO: 9956 - DNA, 465 bp, Gossypium hirsutum
  Clone ID: GOSHI-09MAY01-C67937_1
ttcattcgtccgctcttgttcagatagtttttctctgtttcgagtgtttaaaattttgcagacgatgtcaaacttaatactttttgaggatatttttgttgttgataagcttgacccagatgggaaaaagtttgataaagttacccgcattgaagcacggagccagaactgtgatatgttcatgcacctcgatgtaaatacagagatatatcctatgcatgttggtgataaattcacaatggcgttagctcacacgttgaatttggatgggacgcctgatactggctatttcaatccggggaggaagtctcttgcagataagtatgagtatgtcatgcatgggaagttatacaagatatccgatgattcttcagggaaaggacttaaagcggagatctatgtatcatatggtgggcttttaatgctattgagaggagaagcttctcatgtttcccactttgaact

SEQ ID NO: 9957 - DNA, 826 bp, Gossypium hirsutum
  Clone ID: GOSHI-09MAY01-C67197_1
attttctaatcaaaagcttaaaaaccctcaaagcctcgacctttccctagaaaaccaaacggtagaaaacaactagagctgatcactgctatggttgtgatataaaccaaagcgggcctgttttgtttattgtttttagctaaacaaacaatggcggggatagcaatattgctagatctatacaggaaaaacccaagcttttgctctcaagaaagcttccactcttctgggttcttctctgcctcagctgccgccgcatcagccgctgccaccgtcgttgctggaaccccttttgcctccaggttcctttttggtaatcccaaggtttctcattgtgatgctgctgcggcattcccagaagattacctttcaaatgtacaaaggttatctgaagatattgttaagaatgtcaagaacttaaaaaatgatgctctcaaatacgctgtgaaggagtataaggttgaattgaagcctctttattcagcttttgagttgaggccatttgctatgacaactttgaggtcatttctgatgttctatttgcctctgttggagcctgccacaaatgtagaagaggatgatgaagatttcctgcaggacactcctaaagaacaacatgtggatttagttgttccctttaaaaagtcggtgaagcaaataatccgtgagaccactgttgtaacgacaaaacgggttcttgaaagacttgctgttatttatgtttcacagcgcatggcatggaaactccttaaagatgttccgaaatcagctgtccggaagtcccaaagggattgcctacaacagtctacttcttcagagttagcag

SEQ ID NO: 9958 - DNA, 302 bp, Gossypium hirsutum
  Clone ID: LIB3272-042-P1-K1-C5
atcaaaagcttaaaaaccctgaaagcctcgacctttccctagaaaaccaaacggcagaaaacgaactagagctgatcactgctatggttgtgatataaaccaaagcgggcctgttatgggtattgtgtgtagctaaacaaacaatggcggggagggcactagtggtagctgtatacaggaaaaggcgaagcttctggtctaaagagacgttgctctttaacttgagcggagcaatgtctactaccatgaaatcagttgtgggggacaaaggtcttgtgctcgtcttatgggtcaggatcctg

SEQ ID NO: 9959 - DNA, 364 bp, Gossypium hirsutum
  Clone ID: GOSHI-09MAY01-C60447_1
ctgcctttggatcggagaagcgaatgtcgactaggtcgacaccaaattaacaggtgagagagccttcttctcttttttttaatatattagtatgacagatcaaagaaaaaataaataaataagaaatgaaagagaaaaataagagagcaaaaatagtgaatgaaccaccttgaagtatttacatcttctatttgattgctttgtatgcgtatgcgtaaaaaaaaaaggatacattgatgtttcttggctttttatagccacaacaaaagagaaaaaaaaaacaaaggttctgcttggttttttgctcttggtgctgtgtccgtcccttgtttgtcttcttttgcaggtacggaggcaacgtggc

SEQ ID NO: 9960 - DNA, 381 bp, Gossypium hirsutum
  Clone ID: LIB3196-018-P1-M1-H10
atcttgtagttctgacctgggatggcaagatgtcggcggtcagtcaggattctattgaagacagcagactggcccagactgagaccgtggttgatgactgggatgaagagtttgaccgagggaaggaaaagaaaattaaaaaatttaagagagagaagaggagaaacttcaacgcctttcagaaacttcagactcgacggaacttctggtctgtgactcacccagcgaaggctgccagcctcagctatcgccgttgactgtgcctctgtggaaggagccttctggagacaaggcatcccttcctgggagctgtccgtctggacctgagggagctctctgtgtgggctctgctgcgctgtgagcctgcaacggtaggagccc

SEQ ID NO: 9961 - DNA, 385 bp, Gossypium hirsutum
  Clone ID: LIB3196-018-P1-M1-H6
atctggtagttctgacctgggatggcaagatgtcggcggtcagtcaggattctattgaagacagcagactggcccagactgagaccgtggttgatgactgggatgaagagtttgaccgagggaaggaatagaaaattaataaatttaagagagagaagaggagaaacttcaacgcctttcacaaacttcagactcggcggaacttctggtctgagaattagccatcgaaggctgccatgcttatgtatcgccgttgactgagccttatttgaaagaaccttcttgaaacaatgtaaacctttctgggagttgatcttattgttctttgggagctctctgggttgagcgctttgatactgtattgggcgctcttaggattatatta

SEQ ID NO: 9962 - DNA, 371 bp, Gossypium hirsutum
  Clone ID: LIB3196-011-P1-M1-H9
cccacgcgtccgcggacgcgtgggcacagcctaaaaccctccacgcggtctgacacacaatcgtgtctcctctgtagcttaagtttgcatgttccacacggccatagtctattatacggcctagccacacgactgtgtaacccttccacatggcttaaagcattgcacacgaccatgtgcccttattttacagttttgtccagaattgtaaactattcaatttagtccctacattattcttaaattatttttagaatttttctctttcaattagttctatgatattatgaaaaatgtagaatctgtgatttgattgattagattattactatttgtacgtgatatgtgattaagtacatgtcttttatgac

SEQ ID NO: 9963 - DNA, 324 bp, Gossypium hirsutum
  Clone ID: LIB3196-011-P1-M1-H3
gcgcccacacgtccgcggacgcgtgggcacagcctaaaaccctccacgcggtctgacacacaatcgtgtcttctctgtagatgaagaaggcatgttgcacacggccatagtctattatacggcctagccacacgactgtgtaacccttccacatggcttaaagcattgcacacgacgatgaggggcccttatacaacagtgtgcagcatagttgactactcaatcaagtccctacattattattaaaatatttttagaataattctctttcaattagttctatgatattatgaaaaatgtagaatctgtgatttgatggatgaa

SEQ ID NO: 9964 - DNA, 512 bp, Gossypium hirsutum
  Clone ID: LIB3582-005-P1-K1-C6
cccacgcgtccggtggttgggatgcatctggatggaataaaaatgctgaggatgttgacaaatttgctgcagctacgaccagttcggagaagcaaaatgagtggtctggttggggtgcaagcaaatctaactcacaagatgttggttgggatgctttgtctggatggaataaaaatgcagaggatggtgacaaatttgcagctgctgcaaccagttcgaagaagcaaaatgagtgttctgattggggggcgagcaaatctaaatcacaagatgttgtctctccaaaagtggatgttggttgggatgccttgtctgcatggcataaaaatgcagaggatggtgacaattttgcagcagctgcatccggttcaaagaagcaaagcgagtggtctgattgggggatgagcaaatctaaatcacaagatgtctctccaaaaacggatggaacttgtatgaaagagcaaactgaattgtctggttgggggatgaaaaagtttgatacacgagatgtc

SEQ ID NO: 9965 - DNA, 385 bp, Gossypium hirsutum
  Clone ID: LIB3196-010-P1-M1-E4
ggacaaggtgtcagatgttggttgggatgcatctggatggaataaaaatgttgaggatgttgacaaatttgctgcagctgcgaccagttcggagaagcaaaatgagtggtctggttggggtgcgagcaaatctaactctcaagttgtctctccaaaagtggatgttggttgggatgctttgtctggatggaataaaaatgcggaggaaggtgacaaatttgcagctgctgcaaccagttcgaagaagaaaaatgagtgttctgattggggggcgaggaaatctaaatcacaagatgttgtctctccaaaagtggatgttggttgggatgccttgtctgcatggaataaaaatgcagaggatggtgacaattttgcagcagctgca

SEQ ID NO: 9966 - DNA, 686 bp, Gossypium hirsutum
  Clone ID: GOSHI-09MAY01-C60047_1
tttatttttctgaaggtgggagaaaagataaaacttattattaatttaatccaaattagagtttgaaactcatgtaattaaccccttttggttaacccgagacaaatcaatagatctatgagaaatctcattcaattggatatatggtagggtaaaaaaatgggataccaaaagaattgactgccgagccgtatgaggtaggaaactctcaagtacggttctaagggaaggaattgaaccgcctatttcgaccggggagaacaggccattcgacagggggattctgaaatagcggaggcttggttcgatcaagccgctgagtattggaaacaggctatagcgcttactcctggtaattatattgaagcgcagaattggttaaagatcacgcggcgtttcgaataagaacaagagctctctgtttatttattattattttagttttaggattcgaaattcgaattagaaattagagaattctatttaattctatttctatttaatttctattaaatccatttatttaatatttaatttaattaaataaattacggtactatttaaattattaaattcgattttctagtcaatttgaatatttaaattaaatagtaaaaaatattaatttaattggaattgttaattgtgtaatggtttggtttcgtggacccatgggtcaaataaaa

SEQ ID NO: 9967 - DNA, 401 bp, Gossypium hirsutum
  Clone ID: GOSHI-09MAY01-C60017_1
atcagctgagcaatgcacggagtggacctgtaggcgacttgcatcatcttcaacatgaagatagccacagtgtcagtgcttctgcccttggctctttgcctcatacaagatgctgccagtgagaatgaagatcaggaaatatgccatgaatttcaggcatttatgaaaaatggaaaactgttctgtccccaggataagaaattttttctaagtcttgatggaataatgttcatcaataaatgtgccacatgcaaaatgatactggaaaaagaagcaaaatcacagaagagggtcaggcatttagcaagagctaccaaggctactgctccaacagagctgaattgtgatgattttaaaaaaggagaaagagatggggattttatctgtcccgaattttatga

SEQ ID NO: 9968 - DNA, 399 bp, Gossypium hirsutum
  Clone ID: GOSHI-09MAY01-C61997_1
atagttgatgtcccgctgcggggagatgctccacatccgccaccggctgctccgccaggcgctggccgaatgcctggggaccctcatcctcgtgatgtttggctgtggctccgtggcccaggttgtgctcagccggggcacccatggtggtttcctcaccatcaacctggcctttggctttgctgtcactctgggcatcctcattgctggccaggtctctggggcccacctgaaccctgccgtgacctttgccatgtgcttcctggctcgtgagccctggatcaagctgcccgtctataccctggcacagacgctgggagccttcttgggtgctggaatcgtttttgggttgtattatgatgcaatctggggctttgccgacaaccagctttttgtttc

SEQ ID NO: 9969 - DNA, 769 bp, Gossypium hirsutum
  Clone ID: GOSHI-09MAY01-C61947_1
gggcaatcttggaggatagtgctgccaagaaagaagcagaactcatcttcctgattagaagcagagagggactccatagccatggaagacttggaacatctcgagtttggaacatgcgctatagattctggccaaacaataaaagcaggatgtatcttcttgaaaatacaggggatttcgtgagaacaaatggactccaagaaggagatttcatagtgatatattcagatgtaaaatgtggcaaatatttgatacgaggagtaaaagtccggcagtcggggacaaaatcggagaccaaaagaccaggaaaatcccagaaaaaccaccatacgaattctccatctgccgccgtcagtggttcattacccacacccatcacacagacagtaaagtaatagagaagaaaacaaaacaaaacaaaacaaaaaaagggtgcatgcatttgcaaaccattgccatatttccttgttgcatggacaagtggacgatgaaaaatcaagtttggagaccctcagctgtgcccgcgttggtttctccgtcaaatggtagtgcttggaatcccaggtgccgaggccgagacaatatctctctttgcttctatctcttatttactacagagaattccggtatcagtatgtttgtcaaactgtagtgttttacttcatactcttaccactgtaaagtttgtttacaagatactactactacgtattactaatatatgtaagactatgaaatggagatagccagctatttgttgttcattagc

SEQ ID NO: 9970 - DNA, 380 bp, Gossypium hirsutum
  Clone ID: GOSHI-09MAY01-C61537_1
atccactagctccatctagtctattggggaatgcaggtggggggtgtcaccatattttttctgagctgccctttttttctcattagattgtctacgctatataccacctgcctcttttgccctgttgaatagagttgcacacagcacacgggcaactgacgcagggttgagggactctctctctgtctctctctgcctctgctgatgggacccttttccctcaccctctgcccttctaggtcatagactaggtaggaaggccctgtattggtctgcagcatctactgaggcagacctgcaacagatgtggcattcatgtccccagcagacatgagtgagctcaccccagcactgctgttgggaaggtgactgcaggaaac

SEQ ID NO: 9971 - DNA, 704 bp, Gossypium hirsutum
  Clone ID: GOSHI-09MAY01-C61767_1
cgcccgcgggccttggcacttgtcctgtgccttggcttcggcatcatcagtcaacccggcacggacgccaaagcgaaacaccctccaatcccatctcctctcttccttcttccctccaaataccctaaatgctgcccccccacatttttatttgaaaccgaattattgaaaaacaaagtcaaccccagatcattaaaaaggaaaaaaaatcattggtctttctcgattgttgggtctttgagatatgtcgtcggagatcgaggtggtggaggagactgtacctttgaagcaattgagtggcgctgtagcgaatggaaatgaatatgggggagggcatcatggggttgtcggtgatgttgctgatgatgagagcttgaagaacgatgtctataccgctgctgcttatggggatttggagaaacttcagaggttggttgagtccgagggttgctctctttccgagcctgatggccttggttactatgccctccagtgggctgctttgaataatagaaccgcagctgctcagtacatcatcgagcatggtggagatgtgcatgccggggatcataatggacagacagccttgcactggaggccgcgtggcatacagttgagttactcccaaggtgcttgtaacctctagaactgtccaaaaactgtgttgccaatgggaacattttctttagtgtgtaagggacggc

SEQ ID NO: 9972 - DNA, 637 bp, Gossypium hirsutum
  Clone ID: AI054512.1
ggcaaagtggccttggcacttgtcctgtgccttggcttcggcatcatcagtcaacccggcacggacgccaaagcgaaacaccctccaatcccatctcctctcttccttcttccctccaaataccctaaatgctgcccccccacatttttatttgaaaccgaattattgaaaaacaaagtcaaccccagatcattaaaaatgaaaaaaaatcattggtctttctcgattgttgggtctttgagatatgtcgtcggagatcgatgttgtggaggatactgtacctttgaagcaattgaatgtcccttatctaatggaaattatttgggggaaggcattatggagttgttgtgtaaattccttattaataaaaactttaaataacgtagtttattcggttggtgccttatggggattttggaaaaactttctatgagttggttgatctctatggttgtttctttttaggtatcctgagcccttggttactatgcctatagggggtctgtttataataataatccttattgttgattacttcttatcttggtgcatttttcttccttttatatgggtaaatctctatgtgtgaatatttctgtttaaaagtatgttagtttccttaaatgtctttgtttat

SEQ ID NO: 9973 - DNA, 1381 bp, Gossypium hirsutum
  Clone ID: GOSHI-09MAY01-C61187_1
gtgctctaaaatctaaataaactaaaactaccatttcttttatttgtctcttttgcttttgcatacaaagatgatagcttacttggggcgaatcgtacacgacaacgacgccgagtccaagctcgacgacgatgtttccagcatatctaaatccctcgacctacaaggcagcatcgaaaagggtgatgttagcagtttagccagtaaagatttcggtggtctttattcggttaagcccttgttcttaatcaaaccctctggagcggaagatataagtcgggtcgttaagctcgcatcgaggacctccaatttgacggtggcggcaaggggtaacggccactcaattaacggtcaggcgatggccgagggggggctcgtgatagacatgtcttcgacggagaaaaaccatttcgaattcttgccaatcaatggctctcattatatcgatgtttccggcggggcattatgggaagacgtcttgacacggtgcgtctcgaggtacggctatgctccaaggtcgtggaccgattacctcaccttaacggtgggtgggactttatctaacgctggcgttagtggacaagctttccgttatggtccgcaaacgtcgaacgtcacggaattggaagttgtaactggaaaaggagaaataacggtttgctccgaaacgctaaactccgaactctttttcggagtcctcggcgggcttggtcagttcggtgttattacccgagcaagaattaagctccaacaagctccagacatggtaagatggatcagggtagtgtattctgagtttgaggaatttactcgggatgctgagtttctggtgactcaaaaagaaggcgagtcgtttgattacgtggaagggttcgtattctgtaacaacgatgacccgttcaatggttggccatccgtgccattggactcgggccatgagttcaacccgactcatatctctcaaaccgccggctcagtcctctactgcctcgaagtggctttccgttaccgcaacagtgaccacccaactgtagatacggccgtaaacgggcttcttggacggctacgattcgttgaagggttgaaatcccaggtggacgtaagctacacgaagttcttactgcgtgtaaaccgagctgaggaacaagtgaaagccaatggcacttgggatggtcctcacccttggttgaacctcttcgtgtctaaatcggacgtcgttaattttgatcggacggtgtttaaaacgatgttgaaagatggagtcggtgggcccatgctgatctaccctcttctgcgtagcaaatgggatgatcgaacgtctgtggtgttacccgaaggtgaaatcttctacatcgtggctttgctacgcttcgttcccaat

SEQ ID NO: 9974 - DNA, 615 bp, Gossypium hirsutum
  Clone ID: GOSHI-09MAY01-C61027_1
cccacgcgtccgcccacgcgtccgcccacgcgtccgcccacgcgtccgcaaacccaccccagccatagagctcctcgaccgggcgggcgaggtccctgtggacctcctcgggccagctgaatccatgtcctatcctgatcatgagccgccacctcctcctccctttccagcagcactgaaaccaccgcttccgctttataagcagcgatcctggtcacccgacatcatccgtaacgaagcatggcttagaagaaaaggaaagagcaagaaccggcgaagcaagagtgtaacagacgaagaccttgatgaactcagggcttgtattgagttaggatttgggtttgattccctagagatagatcaacgcttgtcgaatactttgccagctcttggtctttaccaagcagttaacaagaactacaaccacaccatctcaaagtatgcctcgtctccttcggctgcatcggattgtgatagcatttcatcagctataggtagcccccacgccatctttggccctggtgataaaccacagatagtgaagacaaagctgaggcaatgggcgcaggtggttgcttgtaccgtgaggcaaagttcatgagtatgtcatggatg

SEQ ID NO: 9975 - DNA, 384 bp, Gossypium hirsutum
  Clone ID: LIB3196-025-P1-M1-B7
gaaactctcagcatagagcaaaattctagaacactttcttcagccccttcatttcttctccacctctcctcacccactacctccgtccacctcctgtcttcagccaccgcctctaccgcactaggagataccaggtttgtcagataagtagattctcttttcttgagtccttcttgtgctaaacaataggcaactctgttagcctccctgtttgcaaaaggaaaaacacaaagattaaattgacagctgagattctgagcatctttgatatacacagaaatctcaaatctgtcatccttttcctcttgcagcttccggatgatcgttcgagaatcaccttcaacctcaatctccctcaacccaagttgtaaccccaacttcagt

SEQ ID NO: 9976 - DNA, 291 bp, Gossypium hirsutum
  Clone ID: uC-gsronu33B027a04b1
ctctatttacctggcatatcaatcccatcagaccttttcattaccccagtgcacattgaaaaatcaaaacccattgaaactctcagcataatcaaaattctagaacactttcttcagccccttcatttcttctccacctctcctcacccactacctccgtccacctcctgtcttcagccaccgtctctaccgcactaggagataccagctttcggatgatcgttcgagaatcaccttcaaccttaatctccctcaaccctagttgttaccccaactttagcgcctgaagac

SEQ ID NO: 9977 - DNA, 391 bp, Gossypium hirsutum
  Clone ID: GOSHI-09MAY01-C62257_1
atgaaatgtggggccaaacctgcggggtccggcctggtctcctgccttctgggcccagccctggggcctgtgcccccagaggcctacaggggcaccatgctgcactgcccgctgaacttcactggcaccccaggccccttgaagggccaggctgcactccccttcagccccctggtcatcccagccttcccagcccacttcctggccactgcgggcccctcacccatggctgctggcttgatgcacttcccgcccacgtccttcgacagtgctctccgccacagactttgcccggcctcatctgcctggcatgcaccaccagtcacaacctatgcagcgccccacttcttccacctcaacaccaagctgtaggccagcacatgtggagtcg

SEQ ID NO: 9978 - DNA, 731 bp, Gossypium hirsutum
  Clone ID: GOSHI-09MAY01-C62217_1
atgcaagaattccctggattgtgaaatagtcagtgccaaatcttccgagatgaatgtcctcattcctacagaaggcggtgactttaatgaattcccagttcctgagcagttcaagaccctctggaatgggcagaagttggtcaccacagtgacagaaattgctggataagcgaagtgccactgggttctttgccctcccttcacaccatgggataaatctgtatcaagacggttcttttctagatttcctctacctttctgctcttaaaactgcttctctgctctgagaagcacagctacctgccttcactgaaatatacctcaggctgaaatttggggtgggatagcaggtcagttgatcttctgcaggaaggtgcagcttttccatatcagctcaaccacgccgccagtccattcttaaggaactgccgactaggactgatgatgcattttagctttgagcttttgggggttattctaccaacaaacaaacagtccattggaaagaaaacagtcccaggaattaacagatcagaatgttcacactggttaatctttttctaacagtgagcatgaaggtagcagaagctggtgtgtttccagatggttcttctaaccaaactaattttcactgttgacaagtgaggcaagggttgcactggaccgaaggctgaggcttggccatctagcattccatgcagaatggtttcccataagcattccttttattc

SEQ ID NO: 9979 - DNA, 624 bp, Gossypium hirsutum
  Clone ID: GOSHI-09MAY01-C63967_1
cgagtcatgaccgccggttgcacctatatccgactcattgagtcggtcactcggttcgtcttccattaacgacatgttaaggaatttacagcttgggaaagttaagttcatgcctattggtctttgttcatcaccttctccttccatgttcgggtcacccagagattcaatgatcctacacggattttgtagccttctcaacactccgacccagaacttgacccgtcatgggatcggcggatacttggatttatttgaaaaacggtgtgaagaagatgaaccagccatggaaagagctgaatccggaagggatttacgtgcacaattatttgagaaattgagtaaagagaattgttcgggaaggggtaatccgggtcagggttctggagatccgaatttggattgggtttcggatttggtgaactgaaatatttaatttttttccattatatttctggattcattttgaagctctttctggtttttattttcttctcactaggaaaaaggagaggaaaatatctgaaaatatattaatattatttttatttagatgatcagattgtaaaatcttatagctttttttgtatgttcatgtaatgcaaaatcatttagtattaatgt

SEQ ID NO: 9980 - DNA, 465 bp, Gossypium hirsutum
  Clone ID: GOSHI-09MAY01-C63897_1
gttaatccatggatttcgaagcactgctgaggcaatgaacgaggcaatctcgatggctgatgctgagaagcagttacgacacgagaagcattataggtacattagttcacatgatgtagcgttttggtctcgtagtttctttcaagatatggaaaggacgtgtaaagatcattttagaagacgatgctggggaattggtttgagcttcgggtttagagttgtagcactggaccctaacttcagaaagttgtctatcgatcacatagaatccgtgtatgtaaggtccaaaaatcgggctatattattagactatgatggaacggtaatgcctcaaacatcgcataataagaccccaaatgcagaggtaatcccgatcgtgaacagactcttgggtgataccaagaatacagtctttgttgtaagtggaagaggaaaagaagtttagacaagtggttttctccatgt

SEQ ID NO: 9981 - DNA, 408 bp, Gossypium hirsutum
  Clone ID: GOSHI-09MAY01-C63627_1
atctgatggttgtttttagttgataggggtgtcctggtggatgtaaatgtattaggcttggttggaaggcaatcccacattaaaattcccatcagtagtagccatatcgaattttctggggcttcaaaggtgaactagtaagagtactttccagaatctagtgagtatatttttctgtttgtcagtcggtcaaaatagcgccttttgttttagcttctctctgttaaggggaaagaaggaaagctgtaattgccatacaattgctgagcctccactgccttaaggatcccctctgctctgattatgtctccttttgggtttcaacagccaagcaggttgagtatctgatcaatgaaaagcacatctacctgctgccaagtggtcgaatcaacgtgagtggcttaacca

SEQ ID NO: 9982 - DNA, 533 bp, Gossypium hirsutum
  Clone ID: GOSHI-09MAY01-C63197_1
aaactaggccataaagagggggcacaaatattgaatacagcagagcaaaaccccgtacttcaactcctataacccttatgctctaaaccaacatttcttcttcatcttcatcttcttcttctctttgttgtattttctctgtacttagaagggtattttcagttttcagttttcagttttcacttcaagttcctacctctcactttcttttcttgaagcttaacaacacagtagaaaaattttgttttgtttttttggctatggattttctcaggaatgtgtcagtctcgggtgaatatcatcaaccagagcaagtcctttcatcaccatgctctaaactgggcgcctctattgatgaccttttccccactcaaaatacggaagtggatgtgagtttggaggggttgtctatatttgtagaagactgtttatcaagcactgggaactgcatcccagttgctgccacagcagctccaaatgttaccacaactgcaacaacaacaacaaagcctacaaattcttcaaagaaacca

SEQ ID NO: 9983 - DNA, 484 bp, Gossypium hirsutum
  Clone ID: uC-gsronu33B124d05b1
ctctgtacttagaagggtgttttcagttttcagttttcacttcaagttcctacctctcactttcttttcttgaagcttaacaacacagtagaaaaattttgttttgtttttttggctatggattttctcaggaatgtgtcagtctcgggtgaatatcatcaaccagagcaagtcctttcatcaccatgctctaaactgggcgcctctattgatgaccttttccctactcaaaatacggaagtggatgtgagtttggagtggttgtctatatttgtagaagatggcaaagctgtcagtgttgatacgcctctgtttgtgattgaaccttgaaataagactgtcgagtagcagagtaaaaggtaggaaggacaggcaggcaagcaggttgagttggtgggatttttcttcctggtaatgtagtttggattcattaaatgggcagtattatatactcctagtcttacagctatagtaaatagtcttt

SEQ ID NO: 9984 - DNA, 778 bp, Gossypium hirsutum
  Clone ID: GOSHI-09MAY01-C63307_1
tggcaagccgacagggccttagaaaaatcgataagcacttgacgtcgaagcggaaacctttttcagtttcgtcttctctcctgtttaagttcaaaacccttgattattcgcaacttctacctaatattttctgatataataaaataattttatatgcgaaagatgggttcatcttcgtcggagacgaagctactgcaagaattgatcttatacgccgccagcgctgcccttagttgcttggtcctcttcgcggggctccgacacctcgacccaaaccgggaagcttctaaaaaggctttggagcacaagaaagaaattgccaagcgtttgggtcgtcctctaatcaatactaatccctacgaggatgtaatagcatgtgatgtcataaatcctgatcacattgacgtggaatttgagtctattggaggattagaagccatcaagcaagctctgtatgaactagtgatccttccattacggagaccggagttgttttcacatggaaagcttcttggtcctcaaaaaggggttttgttatatggaccccctggtactggaaagaccatgctcgctaaagccattgcaaaggagtctggagctgtttttatcaatgtgaggatatcaaatctaatgagcaagtggtttggtgatgcacagaaacttgtggctgcagtgtttagcttggcatataaacttcagcctgccatcatatttattgacgaggtcgatagttttctaggacagcgtcgtaatacagatcatgaagcaatgacgaaca

SEQ ID NO: 9985 - DNA, 817 bp, Gossypium hirsutum
  Clone ID: GOSHI-09MAY01-C18997_1
ggacttctcaatctagatcttaacaataagatagtcttaaatgccgtgaaagctttttcaccattgaagattagattgggaggctcattgcaagataaggtcatatatggtacagatgacaatcaggaaccctgtacttcatttgttaaagacccttctgagatgtttggttttactaaaggatgtttacccatgaaaagatgggatgaacttaatgccttctttgcaaaagcaggggctaagattattgttggactaaatgctcttgctggaaaatctataaagcctggtggttcagctgtaggagcttggaactacaccaatgcagaatcttttatacgttacaccgttgaaaagaactataaaatccatggttgggagctaggaaacgaattgtccgggaatggggttggaactaggatcgcagttaatcagtatgcagctgatacagcagctctacaaagaatagtgcaaaagatatacaaggatgttgatttgaaacccttgatcatagcacccggtgggttctacgagtcaaaatggttcaaagaattcatcgataaaacaaccacatccttagatgtagtcactcaccacatatacaatcttgggccaggagtcgatacccaccttattgaaaagattcttaacccttctgttcttgatggcatctctggaacattcagcggccttcataacgtcatcaagagttctgcaactaaagcaattgcctgggtgggagaggcaggaggagcttacaatagcggccgtaatcttgttacaaatgcgtgtgtgttcagtttctggtatttagatc

SEQ ID NO: 9986 - DNA, 558 bp, Gossypium hirsutum
  unsure (1)..(558): unsure at all n locations
  Clone ID: LIB3584-010-P1-K1-B11
ctggtggttcaactgaaagaggggttaacgcnccagggcagaaaacatatttatacgttacaccgttngaaaagaactataaaatcatggttgggagctaggaaacgaattgtccgggaatggggttggaactaggatcgcagttaatcattatgcagctgatacagcagctctacaaagggggggggggggtttttttttatgnggannngaaacccttgatcatagcacccggggggttctacgagtcaaaatggttcaaagaattcatcgataaaacaaccacatccttagatgtagtcactcaccacatatacaatcttgggccaggagtcgatacccaccttattgaaaagattcttaacccttctgttcttgatggcatctctggaacattcagcggccttcataacgtcatcaagagttctgcaactaaagcaattgcctgggtgggagaggcaggaggagcttacaatagcggccgtaatcttggtacaaatgcgtttgggttcagtttctgggatttagatcagctcgggatggcgtcaaagtttgata

SEQ ID NO: 9987 - DNA, 1656 bp, Gossypium hirsutum
  Clone ID: GOSHI-09MAY01-C18947_1
ggcgatggtcggtactttaaccggaacttacagatattatcaaaattgctgctggaaatggagttggaaaaatcttggttggcagggaaggtattctgtccccacccgcccgccctcccgtccgcccacgcggccgggccaatggtggatttattatgagtgcaagccataatccaggaggccccgaatacgactggggtatcaagtttaattacaacagtggccaacctgcacctgaatccatcactgacaagatatatgggaatactctttctatttccaagattaaaatggctgagattcctgatgttgacctttctcgccttggagttaccaagtacggaaacttcactgtcgaggttatagacccggtttccgactatttggaattaatggagagtgtgttcgatttccagatgatcaaaaatcttctctcaagatcagacttcagttttgcatttgatgccatgcatgctgttactggtgcttatgcaaaacccatcttcgtggacaagcttggggctcgcccggattctatatcgaatggagtgcctcttgaggattttggacatggtcatcctgatcctaatcttacgtatgcaaaggatttggtcaatatcatgtatagtgagaatggacctgattttggagcagcaagtgatggagacggcgacagaaacatgattctaggtaaaaagttttttgttaccccttcggactccgtcgcaattattgctgcgaatgcacaagcagcaataccatatttccggagtggccctaagggtttagctcgatccatgccaactagtggtgctctcgatagagttgctgaaaaattgggtcttaccttttttgaggttcctactggctggaaattttttgggaatcttatggatgctggaaagttgtcaatttgtggggaagaaagttttggtacgggttcagatcacattcgtgagaaggatggcatatgggctgttttagcatggctctcgattattgcatatcgaaacaaagacaagaaaccaggggagaaattggtatctatctctgatgttgtcaaagaacactgggcaacttatggaagaaattccttttctagatatgagtacgaagaatgtgaatctgaaggtgccaataaaatgatcgaataccttagaggtctaatctcaaagagtaaggcaggtgaaaagtatggaaattatgtccttcaatttgctgatgacttttcatataccgatcccgtggatggaagtgtggcctcaaagcagggtgttcgatttgttttcacagatggttcaaggattatattccgtttatctggaactggctcagctggtgcaacggttcgaatctacattgagcaatttgaaccagatgcttctaaacatgacatggacgcccaagtggcattaaaaccattaatagacttggcatcgtctgtatcgaagcttgaaggccttcccaggcagggagaaacctccagtcatcacataaaaaagcgaccctcatattgagcccctcccctatgaattcccccttttattgagtcatctttcagttttgtttttaatgctaaagttagcttggcattatgtaaatttatgtaaaaaacttggaaggaataaattaaaagcatttagattttagggctat

SEQ ID NO: 9988 - DNA, 924 bp, Gossypium hirsutum
  Clone ID: GOSHI-09MAY01-C18977_1
tatcttttaacttctcttccataatcatgggggcttaccgttgtttcgaaccgatttccaaatgtagcagcgacggaagatcgaatcagacagtggctgcggatttagatgggacccttctcgtgtcacgaagtgcttttccttatttcatgcttgttgctcttgaagctggtagccttgttagagcacttgttctgttaacatccgttccatttgtgtactttacgtacttgttcatctctgagtccgtagccattaataccttcattttcatcaccttctccgggctaaaagttagagacattgagcttgtttcggggtcggtcttgcccaagttttatgccgaggatgttcatccagacacctggagagttttcagctcctttggcaaacgatacattattacagcgagtcctaggatcatggtggaaccctttgccaagacatatttaggagctgacaaggttattggaacagagttagaagtgacgaaatctggcagggcaactggttttgccattaaacctggagttctcgtcggagaacacaaaagggctgccgttttgaaagaattcggcaccaacttgccagatttggggctaggagacagagaaaccgaccatgatttcatgtcattatgcaaggaaggatacatggtgccaagaaccaaatgcgaaccattgccaaggaacaagcttctaagccatgttatatttcatgagggccgcctagtccaaaggccaacccctttggctgctctgctgaccttcctatggcttcctataggcttcatcctctccctactcagggtctacaccaacatcccgttaccggagcgaattgctcgatacaattacaggttgctggggatcaaattgattgttaagggtacccctccaccagcacctaggaaaggccaaagtg

SEQ ID NO: 9989 - DNA, 642 bp, Gossypium hirsutum
  Clone ID: GOSHI-09MAY01-C18967_1
cgttgatgcaactgactttattggtcatgcctgggcgctccacaatgaaggtcggcacttggctcacccagctttgaactttgttaagagaacgaagctctatgcagagtcttcggcacgatttccaggaggatctccttatatctatccactatatggacttggagaattgcctcacgcatttgcacgtctaagtgctgtttatggtggtacttacatgctcaacaagcccgaatgtaaggtagaatttgacggtgatgggaaagtcattggagtaacttctgaaggcgaaactgctaagtgcaacaaagttgtttgcgatccatcttatttgtctgataaggttaagaaggttgggaaagttgctcgtgctgtatgtgtaatgagccaccctatccctgataccaacgattctcactcagctcaggttattctgcctcagaagcaactcggtcgtaaatcagacatgtacgtcttttgttgctcctatgctcataatgtagctcccaagggaaaatacatcgcttttgtttcagctgaagccgagactgacaaccctgagcaagagttgaagcctggggttgacctactgggatctgtagatgagatattttatgacacttatgacagatatgtgcccac

SEQ ID NO: 9990 - DNA, 749 bp, Gossypium hirsutum
  Clone ID: GOSHI-09MAY01-C18917_1
ctcaagtaagggagacaatggtttcatcagagagtgaagataatctgatcacctatgatgcagccaactttaagtttgaggcatgccagccatcttcctcgtcagtaacggatgattctgaacaacctcaaattgacagtgcaattaaatctgatctgaaagagacctctcccgagatgaactcacaaggtcaaacaatgcaaatcagtgcacattctcaaatagaggtccattgtctttctaacaagcctgaaactgggagtgaacaacccaaacattctatggaaagatttgcttctgaacatttggaaacagaggcaaaaaaatttgtatttggttcaaaaaggacaagtaatcctgcatttattgctgcacaaaccaaatttgaggagttgagttcaacagccaattcaagtagatcaattgattcatcctaccaagatgttagtgttgaatcaaacttggacactgtgccttctggggcagatatgataagcaggtcaaaggagccaagcatctcagaaaatccagtcctcaacaattggagggttcaacatggtggctccgaatgtggaactgagctttctattacttccactcttgattcacctgatagatcagaagctggaaccttagaatatgaaagtgcaaccaaagtttctgagcaagaaaactgtacttctaagagtacaaaggacttggatgttaaaaacaatgatacagttgcaatcccagtgcccgattcttct

SEQ ID NO: 9991 - DNA, 864 bp, Gossypium hirsutum
  Clone ID: GOSHI-09MAY01-C18937_1
ctggaccaaattctcgcgttgtatacatcgatggggcattcgagctctttcagtgcagggcatgtggagatccttaagaaggctaggcagcttggagactttttgcttgttggtatccatactgaccatattgcgagggagcacagggggatgccttacccagttatgcatgttcatgagcgcagtcttagtgtgttagcttgccgctatgttgatgaagttatcattggtgctccttgggaagttactaaggacatgattacgaccttcaacatttctattgttgtgcatggaactgttgcagagagtaattctctgttgcctggtgaaactgatccatatgcatttccgaagagcatgggaatttttcggttgcttgaaagcccaaaaagtttaaccactagttctgtatcccaaaggatagttgccaatcatgaggcttatgtgaaacgcaatgcgaagaaggcacagagtgaaatgaaatactatgaagagaagacttatgtcgcaggggagtagctgatttaggtttctaatgttagcgagtttggtacagctcttcatgctgccttaacaattcatattgatgtagatgattatatcagcctgtggaagacccagacagtattattggaagatagaaagagtgcaaggcatggcatcaataccagaaacttccaagccaacgcttaatttatataatttttgttattccaattttttttaccccagttttctgagattttgaagaaccctttaataatttgtttactacggatgcttgtaaacaatgtaatcactgattactctacccctcccttgggtggggcgcatgatttttgtgtgcttttaattcaaaagcaa

SEQ ID NO: 9992 - DNA, 426 bp, Gossypium hirsutum
  Clone ID: LIB3147-015-Q1-K1-B7
ggatttagaaatcccccctccctctcaggcctgaaaaaaatacaagaaatatgttgttcttttctttaagaattacttatttttgtttgttgttaactggttgtgcatttctgtactctctacagcaattctattggtaatttgcattacattattgctgctgctgctactactaatatcaccattgctatttctctctcactcttcaaaattggaaagctgtcatggctcatgatatttctttgttttaacagattacgaccttcaacatttctattgttgtgcatggaactgttgcagagagtaattctttgttgcctgtaagttttcagaccctctttggatttaattcatcgttatgaccccttgtgtctatggatttggaagaattgctgattttgctttgtacagggtgaaactgatcca

SEQ ID NO: 9993 - DNA, 525 bp, Gossypium hirsutum
  Clone ID: GOSHI-09MAY01-C18897_1
agcttatcatcaacaaacaaagagatgaactctggagaccgagaattcagattgatgaaatattcaaacgaggaatttaatgcattttgaaaagtcttgtcatttctaaatgctgaagtgataatcttgtcgtatttgtcctttaaatccaacagatgttgcacaaaatcgacaggatccttcagcctttcgggatcagtgagtaactgcttaccagtatcacgaatgtatgaagtcatgacatctctgattaaaacaagcccattggatactcgacgaaacaagcaatacatccttcctaagtcctcatatttttcatcgacaatcatattaatcaaccccgagttctccatttgcacaagcctgtgcatatgactttcaatcatctccgtttctaccacatttgttatcttgacttcacttctggtgtccaagtaatgcgagactctctctatttcttcatttaggcgtctctcggctttctttagatactccccacaatcacaggactctatgaactctgag

SEQ ID NO: 9994 - DNA, 780 bp, Gossypium hirsutum
  Clone ID: GOSHI-09MAY01-C18847_1
agaaataacaaaaccagaaatgctgttgaaacttggtctcgcccgtttagttgaaaagcgtttgttggcagtttatcactctagttttattgatgaggaaggaattactaaagcttgtggcttccctttacttcctttgaaaagtcatataaagggtcctgctcctgtttcagatcaaggtaaaactgatattgttgatgaagcgatcacattctttcgtgccaatgtgttctttagaaactttgatgttaagagccctgcagataagctccttatatatttgactttctacataaatgtggctttgaagaggcttgagggctgtaggaccttggctgaagggaccaaggcaatcattaacttgggcttggaaaacgttcctgtacctggagaatctggttttccttttccggggctttttgtgctcccacagtctcaaaaggaagcagaactactcaggaattatctgaagcaaatcagagaagaaacgagtgggagattgttgagtgttgcctataggcccaatggaactccaaataaatggtggttagcttttgcgaaaagaaaatttatgaatataattattccatgaaatgaaaaacgttgtatattgaatcaaaagtagaatgtaaaagcctaccaaagattatatgttttgaaatgcctgtaaaataattaacatgtatatttcatcacttccttttgatggaaattcatgtgtttgtcatcttgaatgcttcatgagacaagggagcagaaaaggatcattttaagcttctt

SEQ ID NO: 9995 - DNA, 658 bp, Gossypium hirsutum
  unsure (1)..(658): unsure at all n locations
  Clone ID: AI054490.1
gaaatcaagcaaaaccagaaattgctgttgaaacttggtctcgcccgtttagttgaaaagcgtttgttggcaaaacatttggttgccctctttcttttgagggaaaatctgattgcctcgtttggttgtttgggaaaagtagtcaaggaaaatggtttatcactctagttttattgatgaggaaggaattactaaagcttgtggcttccctttacttcctttgaaaagtcatataaagggtcctgctcctgtttcagatcaaggtaaaactgatattgttgatgaagcgatcacattctttcgtgccaatgtgttctttagaactttgatgttaagagccctgcagataagctccttatatatttgactntctactaaatgtggctttgaagaggcttgagngctgtaggaccttggctgaagggaccaaggcaatcattaacttgggcttgaaaacgttcctgtacctggagaatctggtttncttttccgggctttttgtgctcccacagtctcaaaagaagcagactactanggaatatctgaagcanatcgagaagaacgagtgggagattgtgatgntgcctatagccccatggactncaaataatgtggtagctttgcaanagaaaattatgatatatattctgaaaggaag

SEQ ID NO: 9996 - DNA, 418 bp, Gossypium hirsutum
  Clone ID: uC-gsflmaxxa074h09b1
tcgcctacgcgtccggttgaaacttggtctcgcccgtttagatgaaaagcatttgttggcagttatatttttcggatctcaggtcttgctcacttccataaacatttggttgccctctttcttttgagggaaaatctgattgcctcgtttggttgtttgggaaaagaaatcaaggaaaatggtttatcactctagttttgttggtgaggaaggaattactaaagcttgtggcttccctttacttcctttgaaaagccatataaagggtcctgctcctgtttcagatcaaggtaaaactgatattgttgatgaagcgatcacattctttcgtgccaatgtgttctttagaaactttgatgttaagagccctgcagataagctccttatatatttgactttctacataaaagtggctttg

SEQ ID NO: 9997 - DNA, 393 bp, Gossypium hirsutum
  Clone ID: LIB3083-002-Q1-L1-G2
atattccccctccccccttttatctacccttaaacgtttctctttgctcatacagaattgaatgaatttcttcttactataatgggtttgccttgattgttcatttaatggcgtctgtgatttgatgggtttaggttatatttctcggatctcaggtcttgctcactttcataaacatctggttgccctctttcttttgagggaaaatctgatcgcctcgtttggttgtttgggaaaagaaatcaaggaaaatggcttatcactctagttttgacggagaggaaggaattactaaagcttgcggctcacctttacttcctttgaaaagccatataaagggtcctgctcctgtatcagatcaaggtaaaactgatatagccgatgaagcgatca

SEQ ID NO: 9998 - DNA, 642 bp, Gossypium hirsutum
  Clone ID: GOSHI-09MAY01-C18587_1
cccacgcgtccgcccgtacaccattgtttgcatggattgtgggttattcatctggatgtgtagcaaccctccctcttctgtattggcgttatcgtcatcgtaaccaggcttctgagcaagactcagctcaaaatcgccatgcttcacacaataatgcccctgccagatccttttctctctctgttactaggacttctgatgggggtgatcatcgaactgcaactacatcacctagaggtggccaaaacatggcaataacaagtgccataataaaagctctagtggaatacttcagaacgatcttagattgcttctttgctgtttggtttgtggttggcaacgtctggatctttggtgggcactcatctgccagtgaggctcctaacttgtacaggttgtgtatagtttttcttacaattagttgtatcggatatgcaataccctttattctatgtgccacgatctgctgttgcctgccttgtattatttctgtccttggatttagagaggatctatcacatgcaagaggggccacacctgaatccatcgaggctttgccaacttacaagttcaaggtgaagaaaaatagaaatagtgatggtaaggatgtcaactcagcgccagtgagggtggggttgtggc

SEQ ID NO: 9999 - DNA, 577 bp, Gossypium hirsutum
  Clone ID: GOSHI-09MAY01-C18497_1
ccccgcgtccgccccgaaaaagaaaaaatgatgcttggagaaactcatcgtccaaatccaaccgtccacgtaccaccttggcctgatcttgacgatgatcagacggatgtagtttactctcctatccattacaatgcaaccgacaacaacttgagcagtaacggcaacccgttttacctccatgaagcgttatcagctttacaacgttatttgccatcgaacggcccggatgttgagttggattccgagtttccgggtttggatagtccggattcaccggtcgatgcttattcctgtgaccatttcaggatgtacgagttcaaaatccggaggtgtgctcgtgggcggtctcatgactggaccgagtgtccgtacgcccatcccggtgaaaaagctcgtcggagggatccgaggaagtatcattattcgggtactgcatgcccggattttcgtaaagggaactgccggaaaggagattcatgtgagttcgctcatggggtttttgagtgttggcttcacccggctcgttaccggactcaaccgtgtaaagatgggtcgggttgtcgtcgtcgggttt

SEQ ID NO: 10000 - DNA, 711 bp, Gossypium hirsutum
  Clone ID: GOSHI-09MAY01-C18767_1
aagtacccgacataaatttagaaatctatatgagactataaccatccaaaatataaggaaaaagttgagcatacgcactattatttagcgctcttaatccgcggttaacctcactttcaagtacaaattacacatatataattccacatgaaataggatagctaccaagaaaagcttagtaccttcaacttttgaatggttagttaggatttcttacttagtttcctcttgccttttccaaatctggaagatacagcaatccttcatcatcactgctttcttcttcttgaccaacatacgtggcatcatcatcatcagaggccaaatcagaatttggatcttcatcgtcttcatcgcaccatttgttccaatcaaccttgatgtaaggcgcgggtttctcttctgactttaacaatcttttccaccaccctgtttcttctttcatgattgagcatattatattccttaacccaacattagttttgcaaccctcaggaactattttcccaaaaagctccaaactgaaatcgaaggattctccttgcactcccatggcagagaagctaaacagcccctgagggtcacatttaacagaaatgtctttcgcatcaggcaaagaaatcgtaagatataccttatcagagcgctgagcccaaagaacttccgggtgacgactcatatctgggtacttgaaacaagcccacgcgtccg

SEQ ID NO: 10001 - DNA, 674 bp, Gossypium hirsutum
  Clone ID: GOSHI-09MAY01-C18697_1
gaatagtggtgtgcctacagttttttacttctgcaattgcgagaagaaacgagacggtcaaaatccaatggatttggaaacggtgaagaaatacttggagaaaggagttggggctgacggcgatgacaagaacgcctcaaccatcaatggcatgccttctagattcttcgaaaacttcatcatgcaaggtctccatgttgaccaaatcgaaaagggtcgagtcctttgctccatgaaagtccctcctcgtttgctgaacgctggtaatttcttgcacggtggagctactgcatcactggtggatttggttggatcagcggttatttacacctacggagttagcaccagtggagtttctgtcgaaatcagtatcacttacttggatgctgcttatgttggcgaggaaatcgagatagaggctaaggcattgcgtgttgggaagactgttgccgttgtcacggttgagtttcggaagaaaaaaactgggaaaatcattgcgcaggggcgtcataccaagtacctcaccgcccagagtaaaatgtaaatgatatttctatctgagctgtcttcatacgcaattcctctcctgtgccttgtataagtatttggttgtggtaaaactgggtggtagcatttttttttaaaccttgattcaactccaaaaggactttgac

SEQ ID NO: 10002 - DNA, 1040 bp, Gossypium hirsutum
  Clone ID: GOSHI-09MAY01-C18627_1
caacccccaaataaattgattaattgatccttctgatttgagatttctattgtcttctaaaatcctcttcattttcatcaatggcgactcaagggcaagtcataacttgcaaagcggcggtggcttatgaaccgaacaagccactggtcattgaggatgtccaggtggctccgccacaagccggtgaggttcggatcaagattctcttcactgctctctgccacactgatgcctacacttggagcggaaaggatcctgagggtctattcccgtgcattcttggacatgaagctgctggaattgtaaaaagtgttggggaaggtgtaactgaagttcaaccaggtgaccatgtcatcccttgttaccaggcagagtgcagagaatgcaagttctgcaaatcaggtaagactaacctatgcggcaaagttaggacagccactggagctggagtcatgatgaatgatcgcaagagccgcttctcaattaatgggaaacctatctaccacttcatgggcacctcaacatttagccagtacacggttgtacatgatgttagtgttgcaaagattgatccacaggctcctttggacaaagtgtgccttcttggttgtggtgttccaactggacttggagcagtttggaacacagccaaagttgaaccaggggccattgttgctatttttggccttgggactgttggtcttgctgtcgcagagggtgcaaagtcagctggtgcttcaagaataattggcgttgatattgatagcaaaaagtttgatgtagcaaagaattttggagttacagagtttgtgaatccaaaggactatgataagccaattcagctggtccttgttgatctcacagatggtggtgttgattacagcttcgagtgtatcggaaatgtctctgtcatgagggctgctttggaatgctgtcacaagggctggggaacatcagttatcataggtgttgccgcatcaggtcaggagatatctacacgacctttccaattggtgactggccgtgtttggaaagggaca

SEQ ID NO: 10003 - DNA, 534 bp, Gossypium hirsutum
  Clone ID: GOSHI-09MAY01-C18197_1
agcgttctttcctttcactcgggcgcccaccatgactctagaaatcgaagctcgagacgttattaagattgtgctccaattttgcaaagaaaattccctgcatcaaacgtttcaaacgctacagaacgagtgtcaggtttctctgaatactgtagatagcatcgagacgtttgttgctgatattaacagtggaagatgggatgccattttgccccaagtggctcaactgaagctcccaaggaataaactggaggacttatatgagcagattgtattagaaatgattgaactaagagagttggacaccgcacgtgctattttgaggcaaacccaggcaatgggtggtatgaagcaggagcaacctgaaagatacttgaggcttgaacatcttcttgtcagaacttattttgatccaaatgaggcttaccaggattcaacaaaagagaaacgccgtgcacagattgctcaagccattgctgcagaagtgagtgtcgtgccaccttcacgtttaatggccttgattggtcaggctct

SEQ ID NO: 10004 - DNA, 616 bp, Gossypium hirsutum
  Clone ID: GOSHI-09MAY01-C18187_1
cggacgcgtgggctctgtgggaaatttacagaattgtcaaaattgtcggatctttgtccgccaaactctacaaaccttggatattgtttagttctgaaaatcccacaaacttccctgctcttgtgagggagtgttcttctgtgtggtcaagttcaggacttgaagaagcccttcaaaatctgactgatttgacagatttaaaatatgatgttcaagctttacttggttccattcagagtattcatgatcctgatgcgcatgaactctataaacaagttttcttggagcaagaatctacatgttgtctgtcaggtttaactgcaggagcagtgccaggcatgaaaatggtgctttgggatggacggcattactttgtaaccattgtcaacttgtgggcaaatttaataagtcgcaatccaccaaatttgccgctcatacatgctcgaaaggaatgctgtcatgaaaagacgtacattttccaggagtttcacagcataggtcgcactgaatgaagtttctggattgtaatcagggttgccccagtactagaattttacgttggaaagaaaatgcagtaactctttgggttatccagaatccgatgtggtgcaaggtg

SEQ ID NO: 10005 - DNA, 370 bp, Gossypium hirsutum
  Clone ID: LIB3197-053-Q1-M1-B4
ggggctgcttgctggacttggtcctcgtgttggtcgcactggtccgtccgtggggattgttgtttcattttatgaagttgtcaagttcgctttacattacagacacgaagatcatgagtgaaagacttggatttgtgccacaactatggttgatttaatgattcaagtatagtcacccttaaaaaattccatcatgtcgcttcaaaccactttggcaaagcttttcagtggatacccatgctcatgactcaattgattccagaatctggaaatccaagcctgatctttccaatctttttttctttttttccataaggcaaacatattgttccaagttgaaccagatttatggaacttttttttttttttt

SEQ ID NO: 10006 - DNA, 368 bp, Gossypium hirsutum
  Clone ID: LIB3145-025-Q1-K1-E11
attagagatgactacaagaaaaactctacgtgaaatttggagggatggagggatgaagggactgtttgctggacttggtcctcgtgttggtcgcactggtccgtctgtggggattgttgtttcattttatgaagttgtcaagttcgctttacattacagacacgaagatcatgagtgaaagacttggatttgtgccacaactatggttgatttaatgattcaagtatagtcacccgactcaatgatgtaaataaaagaattaacacacttctggtcccccataaaaaattccatcatgtcgcttcaaaccactttggcaaagcttttttcgtggatacccatgctcatgactcaaatgattccaagat

SEQ ID NO: 10007 - DNA, 596 bp, Gossypium hirsutum
  Clone ID: GOSHI-09MAY01-C18087_1
ttcgctcgctttcttatttcttccttttcactaccttggcactcagtctcgaaattcttcatttctcctaaatcccctccccccttttgtatatatacctcccgggttccctttgttaaatcatcagttaatattacaaattcatctaagcaatcgattcaaccagacaagctctcttaaaaatccctttattttccctgtataattcttgtttcttgtctaacgcataagaatggcggccaaagctgaaggcaaggcaattgggattgatctcgggacgacatacagttgtgttggtgtatggcagaatgatcgagtggagattattgccaacgatcaaggcaaccgaacgacaccgtcttacgttgctttcaccgacaccgagcgtctcatcggtgatgctgctaaaaaccaagtcgctatgaacccacagaacactgttttcgacgctaaacgtctgatcggtcgtcgattctctgacccagcggtgcaagccgatatgaagcattggcctttcaaggttgttgccggccctggtgataagccgatgatcgtcgttaattacaagggtgaggagaagcagttcgctcctgaaa

SEQ ID NO: 10008 - DNA, 586 bp, Gossypium hirsutum
  Clone ID: GOSHI-09MAY01-C18077_1
cgggaagggattgtcggaagatgccaaagcacaaaaattggcttttcaacattggattgaagctattgatccacgccatcgttacgggcataatttgcatatttactatgaagagtggtgtaaagctgatgctggtcaaccatttttctactggttggatttaggtgatggcaaagatattaatcttaacgagtgcccgagatcgaagcttcgacaacaatgcatcaagtatctcggaccccaagagagggtaaattatgagtacattgttgttgaaggaaagattatccataaacaaaccagaaacgtactcgatacaatcgaaggattgaaagaagggaaatggatattcgttatgagcacctcgaagaaattgtatgccggcaagaagaagaaaggaatgtttcatcattcgagtttcttagccgggggagcgacgttagccgctggtaggctggtggttgaacacggagatcttaagtccatttctgcgtatagcggacattatcggccgacagatgatagtcttgacagttttctatcgtttcttaaagagaacggagtgaacctcaatgaagttgagata

SEQ ID NO: 10009 - DNA, 568 bp, Gossypium hirsutum
  Clone ID: GOSHI-09MAY01-C18337_1
cttgcaactcctgcttgagtttgcagatgcccggttgcgttggaaaaaaacaactgtaagatttcatctttttgagaaaaaaatatgggatcctgaacttcaagtgcttttcatttcgattgcatggtttatatactgatgctgctaatttgggttacttagctttactttgtcgttcatttctgaattctgattagaagttggctagttctttatggtaatcagtgtacatttccgaaaagatagctgagatgttgggtaattttgaggttgaacagtgttcatttagcaagttgagacaatttcatgaaagggttttgagttttagtgacagatttgtaaagattcactgtaagcattgtgtttctgaatcaatcagtgcacttattgttattggtttatttttatcgttccttttagcaatgatatgcacatattttcatgtctttccaatatatcagccagctgttcgtacttatacagttcatgagtctgatgatttagttgccaaatgcaatgttttttatggcaatggatccctgatgaaagttaccctttatataatgct

SEQ ID NO: 10010 - DNA, 967 bp, Gossypium hirsutum
  Clone ID: GOSHI-09MAY01-C18327_1
gaaagaatatatcaaacaaaaagtcacaagcctgcctaaaccctaagaacactgtcggcggcaatggcaacttacgatctaaccccgcgtatcggcccgaacctagacaggcacttagtgtttccattgctggagttcttgcaagagcgacaactatacccagatgaacagatcttgaaagcaaagatcgagcttttgaacaagacaaatatggtcgattacgctatggatatccataagagcctttaccacaccgatgatgtccctcaggacatggtcgagaggagagtcgaggttgtcgctcgtctcaaagctttggaagatgccgccgctcctctcgtcactttcttgcaaaaccctaacgctgttcaggaattgcgtgctgataaacagtataatctccagatgcttaatgaccgctaccagattggtccagatcaaatagaggcattgtatcagtatgcaaaattccaatttgagtgtggcaactactctggtgctgctgactatctgtatcagtatcgggctttatgtactaacagcgaaaggagtttgagtgcattgtgggggaagcttgctgccgagatactgatgcaaaactgggatattgctcttgaagaacttaatcgtttgaaagaaataatcgattccaagagcttctcatcaccttttgaccaagctcagagtagaatatggctcatgcattggagcctcttcatctttttcaaccatgaccatggaagaacacagatcatcgacctatttaatcaagacaagtatctaaacgccattcaaaccagtgctccccttcttctaaggtacttagccactgcttttattgtcaacaaaaggagaagacctcaattcaaagaatttatcaaggttatccagcaagatcaatgctcttacaaagatcccatcacggagtttttggcatgtgtttatgtcaactatgaatttgatggag

SEQ ID NO: 10011 - DNA, 639 bp, Gossypium hirsutum
  unsure (1)..(639): unsure at all n locations
  Clone ID: AI055666.1
attaagagagtggagcaagaaagaatatatcaaacaaaaagtcacaaaccagagtaaaccctaagaacactgtcggcggcaatggcaacttacgatctaaccccgcgtatcggcccgaacctagacaggcacttagtgtttccattgctggagttcttgcaagagcgacaactatacccagatgaacagatcttgaaagcaaagatcgagcttttgaacaagacaaatatggtcgattacgctatggatatccataagagcctttaccacaccgatgatgtccctcaggacatggtcgagaggagagtcgaagttgtcgctcgtctcaaagctttggaagatgccgtcgctcctcttgtaactttcttgcaaaaccctaacgctgttcaggaattgcgtgctgataaacaggttaatctccagatgcttaatggaccgntccagattggtccaatcaaatagaggcattatatcagtatgcaaaattccatttgagtgtgcaactactttggggctgctgacaattgatcatatcggcattatgactaacgcgaaaggagttgatggatggggggaaacttctgccagaactgggccaatgggatatgccttgaaaactaatggttgaagaatatcaag

SEQ ID NO: 10012 - DNA, 916 bp, Gossypium hirsutum
  Clone ID: GOSHI-09MAY01-C18257_1
cttaaaagacagaaaactaagatagctaaaaactatatagctctaccttcggtgtagtttttaatttctatatgatttcctttcaagcccccctctccccttcagatatgatcggaaagacaatcccagagttcgacaattcctccaagaagagaaagttggaagaagattcacaaggtgatcatgaagaaacttctgagaagcgatctaaagctaaaagcataaaatcggtgttcgatatggagctacacctcgagactccattacctttggagtggcaaagatgtttagacattcagtcagggcagatacacttttacaatacaaggacccatacgagaacatcaaaggatccaaggagaagccctgaacccccaagccccgttcacatgagcttagaccttgagctaaacctaccatgcgattcatcagtaaggaaagttgatgcaacagatcaccaattattcaacaagcacaactccatcggccccacgagggccggttcagttgataagaagatcaactcatcgggaggattaactcgcaacctttcgtggttggcagtggaggagaatgatcagcaagagcaagagatggtagcaacagtgtgcatgagatgccacatgttggtgatgctttgcaagtcatcacctgcatgccctaactgcaaattcatgcacccaccagaccaaggccctccgaaactattcaagcaggggcttagcctcttgtgctagtaaggacaatcaagttttttatgtttaggataacaaattcaccccaacgtgtgttgattaaatctgtatttcttaattcgtcttggaaagctaaatagtggtgctctaaaggttttagctgatttttatatatatacatacattctatatttaagcccaccaaaaaaaaaaaaactcga

SEQ ID NO: 10013 - DNA, 397 bp, Gossypium hirsutum
  Clone ID: LIB3145-052-Q1-K1-G7
gacgtggtttaaagtgaatgttattcaaatgattttttactgtttgccttttgattctagaactttgtttgttggtcctacaccaaacaaagttatatataatttttttagtgtttaatttaagttttaagattgatttttagtgtatcgaataagaaagatgatgcaacagatcaccaattaattaacaaagcacaactccatcggacccacgagggtcggttcagttgataagaagatcaactcattgggaggattaactcgcaacctttcgtggttggcagtggaggagaatgatcagtaagagcaagagatggtagcaacagtgtgcatgagatgccacatgttggtgatgctttgcaagtcattacctgcatgctctaactgctaatttatg

SEQ ID NO: 10014 - DNA, 690 bp, Gossypium hirsutum
  Clone ID: GOSHI-09MAY01-C18227_1
ttttgaaaagcggtccttatttttcccaccctttgaatcccttcttctctgttttcacaaaaccatctcagaaaattttattattactatcacttcaaatcaaccaataatcctcactcttgaattgtaatttacaagttgatcaaataggagatactcattagagctgtgatagaaaggatcaataaagatcgttttgggaatggcttgtcgaggatgcttagagtgcttgttgaagctcttgaactttttgatgactcttgctggtctggcaatggttggatacgggatctatttgtttgttgagtacaaaaatgctgccgatactgcaatgcttttgtcacctgttggtagtgatcgagatttgatacagtttggtcgccccatgctcatggctgtgtctctttcgtctagtatttttgataatctgccaaaagcatggtttatatatttatttattggagtaggggcggttctctttgttatctcttgttttggttgtattggagctgcaacacggaatatatgctgcttgacttgttattcagttttggtgatcttgctgatcttggtggagctgggatgtgcagctttcatattctttgacaaaaactggaaagatgaacttcctacggataaaactcggagatttcgatttgatttacggactttctggaagacaaactggag

SEQ ID NO: 10015 - DNA, 687 bp, Gossypium hirsutum
  Clone ID: GOSHI-09MAY01-C19967_1
ggcggtgcctgtctcagaatcagcggactttttgggtcgtaggaacctggtatgagctcgaccctctgcaattagaggttcgcctcgctctaaaggtccctacccttcgtaagaagaacttacggggacggctccgcgaagagtatcgactctaaatacctttaagagaaaagtctaaaaatctacgttttcctccttaacggactagtctgcccgagctactttaataggtgtgcacttacttacgccgacataaagttggtaaacgtaaacggcggcggagtcctcctcagagggttgagcccagtacccccgttcagtaacaagttggtaaagctcggcttcggaaacatggtcgtcaagtttctcctactacttgaactagccgacctaaagttaacagtagtcataacgtagagtaaagaggatgacgacgtttaccttatcatcctcgttattctctgcagtatcaggaggagcagcgggctaggacctattcctaggccggaggaatgcgtcgaaaagaggaaggagccctccctaaagtcagaagagaagacttacgtcaaggaagctgaaaagaacaattcgtaggtaaaactaaaggagaattaggaggtggaaactaagtaaccaacgaagagtccgatccccaaagtcatattgacgttgaaccctcataaggaa

SEQ ID NO: 10016 - DNA, 634 bp, Gossypium hirsutum
  Clone ID: LIB3828-021-Q1-K6-B6
gtcataagatttttttgattttgcattcttttttgaaggtgtagtttgcaaatggcaaaaggtggcaaaggacggcgtagaacagcaagccagcaaaccccattcttgttgcattgtcgccgccaaggcatctctggagatttacaccccaaaaaatgttccaaagctttggataatagggattgggaagatgcaacatgttctgtttgcatggagtgccctcacaatgctgttcttcttctctgttcatcccatgacaagggctgtcgtccatacatgtgtggaactagcttcagatactcgaactgccttgaccagtacaagaagttccacactaaagtagttccattcaatcatgaagaacggttgcatacttctattgataattcagttctggctgccggttctagtcggcctgttgataagtgtgaagtaacagaaatatcatgtccactttgcaggggtcaggtaaaaggatggactgtggtggaacctgcaagggaatatttaaatgccaaaaagagaaattgcatgcaggatgactgcacctttgttggtacttttaaggaattaaggaaacacatgaaagcagaccatccatgtgctcagccacgtgaagcggatcctaccattg

SEQ ID NO: 10017 - DNA, 438 bp, Gossypium hirsutum
  Clone ID: LIB3083-024-Q1-L1-F8
gtcaggaccatcttcttcttctgtctctaaaccacgaggatttcgttctatcacgtaagcaccaaaaaccattgcccctggcatagctgatcttattgtgcttatcacgtcctctctttcacgctctcgttcaagccttctccatttctgttcaagagtaggatccacttcgcgtggcttggcacacggatgattggctttcatgtgtttccttagttccttaaaagtcccaacaaaggtacagtcatcctgcatgcagcttctctttttagcatttaaatattcccttgcaggttccaccacagtccatcctttcacttgacccctgcaaagtggacatgcaagttccgtcacttcacacttctcaacacttgacgctagaaccagattatcaatggaaccatgcaaagattcttcgtgactggatgagactacttt

SEQ ID NO: 10018 - DNA, 297 bp, Gossypium hirsutum
  unsure (1)..(297): unsure at all n locations
  Clone ID: LIB3585-004-P1-K1-E3
cgcgtccggaactagcttcagatactcgaactgccttgactagttcaagaagttccacactaaagtaggtcgattcaatcatgaagaaccgttgcatacttctattgataattcagttctggccgccggttctagttggcctgttgagaagtgtgaatcaacanattattcatgtctactttgcaagggtctggttaatggttactctttgttctctcttgtcttggcctattaattgtgctctttttgtttgttttgtttatttggtccactttttttttttatttggatttttcc

SEQ ID NO: 10019 - DNA, 438 bp, Gossypium hirsutum
  Clone ID: GOSHI-09MAY01-C19587_1
ctgtttcttcgagagggccggatcgcctgggacgcggggtcttgctatccgccggggactagcatgtttccaaggtacgactgggtcgttacgccgtctgaatcgaagtgaagaagcgatccccctggtacgactgcttgctacacaccctgtattttgaagctccggcgatcggcgagctattctttcggtgcccggggtggccccctttcaataacagtcaaaccggaagaaagcagcgctcgccgcaaagcgcagctctctggatgtagatggagccgttctctacctatgtatagccctggtaagaggggaaactatacatctttttcctttcgcgcgagaaagaaggacttttgggatcgtccttcggatgtccaatcaccagaaatgggaagatgggccgaagacgaaacttaaaagaactgtctcatagca

SEQ ID NO: 10020 - DNA, 583 bp, Gossypium hirsutum
  Clone ID: GOSHI-09MAY01-C19557_1
tctttatctacacaggattgatatacaatgaatttttttcggtcccatttgaacggtggtgggccctctgcttatggatgtcgtgatcctgcttgcagagatgcttctacagcaggcttagtaaaagtacgtgccacttatccttttggtgtggatcctaagtggcatggtactcggagtgagctaccatttctcaactcactgaagatgaagatgtcaattttgcttggagtagctcagatgaatcttggaatcattttgagttacttcaatgcaaagttttcgggaaatgaactcaacattcggtaccaattccttccccaaatgatctttctgaacagtctgttcggatacttgtcactcctcatagttgtgaaatggtgcattggttctcaagctgatctttatcacgtgatgatatacatgttcttgagtcctacagatgatcttggtgaaaatcaactttctttggtcagaagtttctccagatggtattactgctagcagctctagttgctgtaccgtggatgttattttcaaagccttttctctaaagaagcatcatgaggaaaggcaccgtggt

SEQ ID NO: 10021 - DNA, 446 bp, Gossypium hirsutum
  Clone ID: GOSHI-09MAY01-C19757_2
ctcaaaacggcccgcccttttattttttttttttttttttttgatcatccaaatctataaacttattttcttctattgataagccttagaaaagtggataccatcatccacgattatattacattcatatataaaatttagagcttgttcaagcaaagaccacacggattacataaatattttttttttaattgtagtaaagttcgagacccataccgtcgtggatttcgtaatctttgagggtaatatgatccttgtaaaccgtgtaccacttctggataccgatcttggctgctcgagttccagtttgggccccgaccagcttcttaaggtctccgatcgtgtcgtcgtccttgcacttcacgcgcactttctttcctaaccgatcgttcaacaccacctcgatcatcttcgattttttttcaaaaagactatttgcagggggg

SEQ ID NO: 10022 - DNA, 544 bp, Gossypium hirsutum
  unsure (1)..(544): unsure at all n locations
  Clone ID: LIB3828-022-Q1-K6-F11
ggggattagggttttctctgaatagtcttttaaaaaaaatcgaagatgatcgaggtggtgttgaatgatcggctagggaagaaagtgcgcgtgaagtgcaacgacgacgacacgattggagaccttaagaagctggtcgcggcccaaactggaactcgagcagacaagatccgtatccagaagtggtacacggtttacaaggatcatattaccctcaaagattacgaaatccacgacggtatgggtctcgaactttactacaanttaaaaaaaatatatttatgtaatccgtgtggtctttgcttgaacaagctctaaattttatatatgaatgtaatataatcgtggatgatggtnaaaaaaaaaaaaaaaaaaaaaaaaaaaaaaaaaaaaaaaaaaaaaaaaaaaaaaaaaaaaaaaaaaaaaaaaaaagannnannnaaaaaaaaaaaaaaaaaaaaaaaaaaaaaaaaattgggggggccgtttttaaagaatcaagttttacaaacccgttcttgggacggtatattttttttttggg

SEQ ID NO: 10023 - DNA, 1074 bp, Gossypium hirsutum
  Clone ID: GOSHI-09MAY01-C19707_1
gttttgtctttccagaaaattcacgcctccggggatggtcatgagtttattgttggagctgaagatttgagttgatggcgaggatcataccacaagctttgctacaacaaagcaaaaagaagaaagggccagctcgaatcagtgttataacaattatactctatagtttgattgttgctgtgactgtgttttttctctatgctacgtacagacattggtctcaaaggtcaagaactcaaattgagtacaggcaatcagtttttaagggtgacactgacaactctttcgtggatttgaagaaatctgatctccctggatatgctattttagatactgcaaaaggctctataactgtggagctcttcaaggacaattttcctgaggttgttgatcaattccttgatttatgtcacaaagggcacttcaatggaatgctttttcgccatgttataaagcactatgttattcaagctggggatagtgacaagctggaagcagccgaggactggactttgaaaggaaagcattacagccaacttgataccagtttgaagcatgaagcattcatgcttggaacttctaagaagaagcatgataatggagcatttgagcttttcatcacaactgcaccaatcccagatctaaatgagaagcttattgtgtttgggaaggtcgttaagggagaggatattgttcaggaaatcgaagaagtggatacagatgagcattataggcctaaatcttcaatagcgatccgcagtgtgactctgaaacaaagcgtctaaaatcaaacacaagcaaagaagtttttcaccactgtcattccaaacatagtttcagcgccatcagtaaaaatgggtcagaagaaatatagtgcattccttcttgtactttatacattattgtggctggcattactcaaggtccattggccaggcttcttggaaattagtctggttacacttttggttttcctttttctgctatcatactatattgttttcatttcttctcttggaatttgtttgtaagtctgttttaatatgctaatggacattgtatttgtaatctagt

SEQ ID NO: 10024 - DNA, 935 bp, Gossypium hirsutum
  Clone ID: GOSHI-09MAY01-C19737_1
ggcttttacagatctcgaatcatccaaattatcctaactcattctcgatcttattactctccttaccgctacgttgaaatattggaattaattcaaatccttacaatccattttcaaccaacctaaaaccctagcatttggcgagatccgaattcccaaaaaatggatgctccgcaaggcggatccgacggcgacaaaaccaatccttcctcttctcctgtctccgttgtctccaatttctggaaagaatttgatctggaaaaagagaaaagtgtgcttgatgaacaaggactcagaatagctgaaaatcaggataacagccagaaaaataggcggaagcttgctgagagtacaagagatttcaagaaagctgcgccagaggaaaaattaagtttatttaattcattacttaagggctaccaagaagaagttgataatcttaccaagagggcaaaatttggcgagaatgcttttctgaacatctatcaaaagctttatgaggctcctgatccttatcctgctcttgcttcaatttctgagcaagatctaaaaatctctgaattggaatctgagaaccggaaggtgaaagttgagcttgaagagttcagaacagaatcaatgcacttaaaaaatcagcaggcaacgataagaagacttgaagagcggaatagacaattagagcagcagatggaggaaaaagtgaaagaaattgtggagatgaagcagcgcagtttagcagaagaaaaccagaaaactctagaagtcttaaaagacagggagcaatctttgcaagatcaattacggcaagctaaagaaagtgtatcaaacatgcaaaaactgcatgaacttgcacagagccagctgtttgaacttcgcgctcagtcagaggaagattgggcagcaaagcaatctgaggtcaaccttttgatggatga

SEQ ID NO: 10025 - DNA, 955 bp, Gossypium hirsutum
  Clone ID: GOSHI-09MAY01-C19657_1
cccacgcgtccgcccacgcgtccggctatatccaaatgtccaagacttggtgaaaataacgcttcttgaggctacagatcatattttgaacatgtttgacaaaagaatcacaaatttcgcggaacagaaatttggaagagatggcattgatgtgaaattggggtcaatggtcaccggcataaatgaaaatgaaatatctacaaaagttagaggtaatggcgaaaaaacttcaacgccatatggaatggctctctggtcaactggcattggacctcgtcctctcataaaggagttcatgaagcaaattggtcagggtaataggcgtgcttttagcaacggatgaatggctgcgagttgaagggatttggtaacatttatgcacttggcgactgtgctactgttaaccagcggaaagtcatggaagatatatcagaaatatttagagaggcagacaaggacaactcgggaacacttacagtgaaagaatttcaagagatcattgatgatatctgtgaaagataccctcaagtggagctttatctgaagaacaagcaggtgcgtaacatggttgatcttttgaaggaagccaaaggggacgctgcaaaggaatccatggagctgaatattgaagaatttaaatcagctctttctgaggtcgattctcagatgaagaatcttccagcaacagcacaggttgcaaatcagcaaggcgcctatcttgcgaagtgcttcaaccgtatggaggagtgcgaaaagaaccctgaacgtccccctaggttcaggggaacaggtcgtcatcgattccatcccttcaggtacaggcacttgggacaatttgctcctttgggaggggaacaaacagctgcacaacttccaggtgattgggtgtctatcggacacagtgagcaatggctctggtattctgtctacgcaagcaagcaagtcaattggcgca

SEQ ID NO: 10026 - DNA, 1003 bp, Gossypium hirsutum
  Clone ID: GOSHI-09MAY01-C19677_1
gttgaaggtttcacagtcggcccagcggtctgtgttttcttatttccttgtgggccagccatggggtgttgctgattcttagaagcgtattttttctgggtcggggaattgagagagaaagtgaaagaaaaggttgaagcttaagctacagttgggttgcttggtggaaaaaaaggacaagctttggagtcactgagtcgtaaagcctcgagcagagggtattgaccattggagaataattggtggctgtaaatggtggagactagagtgtgcttgtgaattacaaggaaagtcaaagcaattttgagctctaatgatcatttggatcaaaatccatatctgaatcatgggagaaggtactggaaatggggttttggcgcgtgcgccctccgcccgggggtggttgtggcgtgctcaagaacttgttcccatggcacttgataaggcaaggaaggtgaaggggttccccggtaggtggaagattataattttcaaattggagcaggtcccgtcacggttatcggacttgtcgagccatcctttcttttcgaaaaatgctctttgtaaggagcaactgcaggctgtgtcaaagacattgaaggaagccattgaattggcagatttatgtctgaaggagaagtatgaggggaagcttaagatgcatgagtgagctcgatgcgttggctgggaaactggatctgaatttaagggattgtggacttttgatcaagactggtgtacttggtgaagctactttgcctgtatctttagttggttcgtcatcggaatcggggactgctacacacggccatctaaaggaattgcttgcacgtcttcagattgggcacttggaagcaaagcacaaagctcttgacagccttgttgagattatgaaggaggatgaaaagggtgtgttgtctgttatgggacggagtaacatcgctgctttagtcgagttgttaacagcaacttctcatcgtatccgggaaaagactctgactgt

SEQ ID NO: 10027 - DNA, 337 bp, Gossypium hirsutum
  Clone ID: LIB3582-002-P1-K1-B4
aaaaaatgggttctgggttttttttattcttttaaagaaatctgattgtgcgttgcaggatggacagttggagtaaaggaaagagttttcttatttccttgtttggaagccatggtgtgttgctgattcttagaagcgtattttttctgggtcggggaattgagagagaaagtgaaagaaaagtttgaagcttaagctacagttgggttgcttggtggaaaaaaaggaacaagctttgtagtctctgagtctttaagcctcgagctcatgtgattgaccattggtgaattttttgtcgggtggggggggggggggtatctctatttttttctttctt

SEQ ID NO: 10028 - DNA, 542 bp, Gossypium hirsutum
  Clone ID: GOSHI-09MAY01-C19667_1
aatcagaaagaaaaaaagaatgttaagttgaagtagcaaccaaattaagataacttgagtttgtacaaattctcattcaagactcccaatctgatcaaattctttgtgtaccacaaactcatctgtcagctattgttcccttcaatcggaatctattcattatttggataaaacaaattcattgatcaaatttcgttatcatctgtttcattctattcgaacctttgatccattcaatagtcaacttgtgatgcttctttttcttggattgacacagacaaacccacccatatcttccaatcaaatatatattcacttactacttggctcaacactatccactgccgcacaaatcatgaattctctctcattgccccatgtaggaattgctaattgttcaaatactacatcctggttcttaaacaagcaaagaaaaaagctttcttatcatagttccccttttgtcaactacaacaccacccggacgcgtgggtgcagtcgtcagctcagtttctcatttaagccatctgaaaatgaatcaa

SEQ ID NO: 10029 - DNA, 520 bp, Gossypium hirsutum
  Clone ID: GOSHI-09MAY01-C19157_1
gttctcggtagtagtgcttgaagatatcgatgaagcagatatgctggttagaggcagcattaaacgagcaatggagagaggtcgacttgctgattctcacggtcgtgagatcagtctaggaaatgttatcttcatccttactgcaaattggttaccagggaatcttaatctctcatcaaatggtattattaccctggatgaaaagaagcttgtcggtttagctagcggaggttggcagttaaagttatctcttagtgagaaaaccgcaaagcgtcaagccagttggctccatgatgaagacagagcaacgaaacctaggacggaaaccggttcgttatcgttggatcttaatgaagccgctgatgtggaagacgacaaagccgatggatcacacaattccagtgatctcacgggggatcatgaagaaggacaaggcctcacaaacagactatgttccatctcaacatcatcatcagagccccatgagctactcaattccgtcgacgatgccattcatttt

SEQ ID NO: 10030 - DNA, 333 bp, Gossypium hirsutum
  Clone ID: LIB3083-011-Q1-L1-E9
gaaatgttatcttcatccttactgcaaattggttaccatggaatcttaatttctcatcaaatggtattattaccctggatgaaaagaagcttgccagtttagctagcggaggttggcagttaaagttatctcttagtgtgaaatcatcatagcgtctagcctgttatcttcttttctttatactgtttttctttttttttttttgtttctatttttatttttttttatttatttttttttttttttttttctttttttctttttattatttttttttttttcttattttttttgttgttttatttatttattattattttctttttatttttt

SEQ ID NO: 10031 - DNA, 781 bp, Gossypium hirsutum
  Clone ID: GOSHI-09MAY01-C19177_1
tttcttatcaaaaaaaaacttctgtctccagagtttcaaccttctatagagcagttgatacgatttcttccagcaaatcgtcaaatggtgatgttttcagccacattccctgttactgtcaaggacttcaaagacaaatacctaaaaaaaccttatattattaatctaatggatgagcttactctgaagggtattacacaatattatgcttttgtggaagaaagacagaaagtccattgcctgaatacccttttctctaagctgcaaataaaccaatcaatcattttctgcaactcggtcaatcgagtggagctgttggccaagaaaattacggaacttggctattcttgcttttatattcatgcgaaaatgctccaagaccatcgtaacagagtatttcatgatttccgcaacggcgcatgcaggaaccttgtttgtactgatctttttacaaggggtatagatatccaagctgtgaatgttgttattaacttcgacttccccaagaactcagaaacatacctccatagagttggtcgatcaggaaggtttggtcatcttggattggctgtgaatttgatcacttatgaggaccgctttaacttgtataggattgaacaagaacttgggactgaaattaagcaaattccttcacacatcgatcaggctatttactgccgatgatatatgcaggatatttcctgctttgcctatggtggtgaacaacgggtcaatggagctgatctatcaaggtgtttgccctggcaaatgggtgtgcgtt

SEQ ID NO: 10032 - DNA, 636 bp, Gossypium hirsutum
  Clone ID: GOSHI-09MAY01-C19107_1
tgctttctttctagtcatctatgcttctcttctattgcgaccatcttcttctctttatttccaaaatgcagcatctcttgttagatgctcatttcgtgagtgccatcacaagttgggaaaaggggtgaaaatggagaaaattttggagccaattaagaagaatttgaccatgttagaggtaccaagttttgttgatgtatttggtggagggttgaagattgggatggtgaactttgaaggtgatcaagatcttagccaatggagaaaacaaggtgagacgatcccagtccatttcgatcgagttcccgaggctctcaaatggcaagacttgttccctgaatggattgatgaagaggaagaatctgaggtaccaaagtgtcccgagttcccaatgccaaatttcgataagtaccctagcatggacttgatggtagctaagctaccatgcaggtaccccattaatggatggtctagggatgtttttaggctccaagttcatctaataacagcaaaaatggctgtcaaaaatgggaagaagaagaatgatcaatgtggtgttcacgtgcaaatgcaggccaatgttggagctgtctaggtgcaatgatttggtgaaacacgaaggggattggtggtact

SEQ ID NO: 10033 - DNA, 1010 bp, Gossypium hirsutum
  Clone ID: GOSHI-09MAY01-C19127_1
cctcgtgccggcacgaggtgttggaacaaaacacgacaatgatcagtacgagaaagatgaagtgtacgggcgttattgcaacaacatttaacaaaaacattacgaagaaactacaaatagaagctaaagtaacaatatcagcttgtggggcacttcatacgccacttttgatgtattcgagcggacttaaaaacccgaacggcgcccgaaatctccggctccacccggttttgatgtcgtggggttatttcccggattccgattccgacatcgaaggtaaagctgtcgatggtgggatcatcacatcggttcataaagtgttgggaccaaacaacatggtacaagccattattgaaacaccatcattaggaccaggacagtacactgctctatgcccttgggtatccggtttggacttcaaacaaaggatgttaaaattttcaagaaccgctcatttgataacaattgtgaaagaccgagggtccggtgaagttcatatggggggacgggtaacgtacaagttcgatgcgaccgaccgagagaatctccgagccgggttgagacggtcgttgagggttttggttgcggccggtgcggtcgaggtcgggactcatcgtagcgatgggcaaaagttgaagtgcaaaggggtgagcaaagaggagctggaggagtttttggacacggttttctcggtaggcggaccgttgttctggggcgacaaatggatggttcacaccacagcgcaccaaatggggagttgtaagatggggagaaatgaaaaagatgggggtgttgatgaaaatggggagagttgggaagctgaaggattgtacgtttgtgatgcaagtgtgttgcctactgctattggtgttaatcctatgagtactgttatgtctactgcttattgtctctctaagagaatagcagctaaaatacaaaacttatagggttaaaatgtgtcataagtacttacacttttcataaatttggaatttaatccttttgttttt

SEQ ID NO: 10034 - DNA, 885 bp, Gossypium hirsutum
  Clone ID: GOSHI-09MAY01-C19007_1
cccacgcgtccgaaagaatatttgcagctgaaccaactgttttacagctgagggctcctattaagatttttgggggtctacatggacagtttggagatcttatgcgcctttttgatgaatatgggtcaccttctacagctggagacatcgcatatatagattatctcttcttaggagattatgtggaccggggccagcacagcttggaaaccattagtcttctgcttgctttgaagattgagtatcccaataatgtacatttaattagggggaatcatgaggctgcagatatcaatgcactttttggcttccggattgagtgtatcgagcgcatgggtgagagagatggaatatgggcttggcatcgcataaaccgtttattcaactggcttccactggcagctctaattgaaaagaaaatcatttgtatgcatggtggcattggtcgatctataaatcatgtggaacagattgagagcctacagcgtcctattacaatggaagcaggctcgattgttctaatggatttattatggtctgatccaacagaaaatgatagtgtggaagggttgcgaccgaatgctcgaggtcctgggttggttacttttcgggcctgatcgtgtcatggagttctgcaataacaatgatcttcagttgatcgttcgtgctcacgagtgtgttatggatggctttgagcgctttgcccagggacatttgatcacccttttctcggcaaccaattattgtggcaccgctaataacgctggcgctatcttagttttgggtagagatctcgtggtagttccgaagctcattcatcctttaccccctgcaatgtcatccccaggagcatcaccggaacgtcatatagaggatacatggatg

SEQ ID NO: 10035 - DNA, 895 bp, Gossypium hirsutum
  Clone ID: GOSHI-09MAY01-C19347_1
agggctaaccaagagtcactgggaggggagggacacggttgtcctccttttgccaggagatttagccataaagtaaccattcaggagcagctaacctttctgatttaacaacaaagttgagtaaagaggaaacagaaccttggcagaggaccttcacagaaacatttaaagaggggggggggggggagcttagttccagtttctatcattcaggtccattgtgttctgaacttggtggtagcaaacatttacagattaaagccatgggtttggtagatgcaaataataatggctctaaatcagagagatctcaatctgtaccttgtgcagcaaaggtagaaatttgttcttccagaagcagaaatcttgaggaaaaaattattcatgcaacaaacacaagttctgctacaaatgaggcttgcaaaggattggagacagaagtacccaaggttgcatctgaaaaagttagaagcacttcacctttccgtcgttttagcttcagcatgggtaagataggcaaaagttctggcctcaaagagggctcttctatgcctcagatgagctcaacatgtagttctgccaaaaccaagccagagaatcttgttgcttctggtgttgatacttcttgtggtgataaactcaatgctaaaagcagagcaaggtccaagccttttgagaagactaatagagccgcttctgaaaccaaaggcagtgaattgtcgcagttttaccaatcaattacaggagtcaattgtaacagaaggtggcttgaagtcatcagaacggacaggacattcaactatgactatgcaaccagcaaaagtgaaatcagacacaaccagcacaacagtaaatgattcagcactgaacaaaaagtgcggatcttcagcagttc

SEQ ID NO: 10036 - DNA, 579 bp, Gossypium hirsutum
  Clone ID: GOSHI-09MAY01-C19367_1
ttttttttttttttttcatagtaaagaatcccttgttattctacttctttcacctttcagaatacaaaaccaaaaaaaaaaaaaccttttaccaattaaccctatagactagtatgaatgtgcactccaacaaccaaaaagaatgacaaaaacaatggtttctttgtccctccttacaaactaaaaacgacaactccccaacttcggaatacatatttacaaaaacacaacagtaaatatgaacattttcaggtaggaggtaagtcaaggggattacaaaaaatagtcgggggttctgcgtgtggtctcaggctcaatctgacgtggagctgggtcaaactgaagaaaactttgctccatattctctccaatctcaagtattgcagccatatttccacagcgatagcagtagtttggggcactgaacacggttaccacattcttttcctgggaccaattatatccttccataacaagctggtgagctctagaaatcagggtcagcccatttgtgtggttgaactgcccaaaaatatcctgcccaaaggtatacccagctcctcgaggagatattcccac

SEQ ID NO: 10037 - DNA, 509 bp, Gossypium hirsutum
  Clone ID: LIB3829-035-Q1-N6-B4
accacaaagaaacatctctcacatataatcaacattttacaaaatggaacatgcactttaatcaccccagatgatttaaactcgaaacacagaaaaaaattaaaggaaaaaaaacttattctacaaatgaaacctatagagactcatatgaatgcagcagcagcagaacaaccaaaagaatgataaaaaaagaaaagaaaaaacagcaatggtttcttttgtccttccctcaactagatgccagaactctctgattgttgtaaaacacatctacaaaaacacaacaggaaatatgaaattttagctggtcggacgtacgttacgggaattataaaaaataatcaggggttctacgcgtggtctctggttcgatctgacgtggagctgggtcaaactgaagaaaactttgctccatattctccccaatctcaagtattgcagccatattcccacaacggtagcagtaatttggtgcactgaacactgttaccacattcttgtcctgggac

SEQ ID NO: 10038 - DNA, 466 bp, Gossypium hirsutum
  Clone ID: GOSHI-09MAY01-C19327_1
aagcagctcagtagccgtaaaatctcaccttctgctagaatttctgggcaggcgactcatttgaaggccagcgatgaaatgatgatgagttttccggttcccagaaaagctcgctcagcttcagtgaaaaggtcacatgagaattgggtggctggaaatggtggtttcgtcgatgaacaaaaccatctgcgaggttcggtgtcaccggctcgtcggagcgttgagtctgaccgtgtttcaccgtcttcatcaaatggttcagtcaggaagaagatgaagacgaatcgacccaagactcggcttccaaaggcgaccaagtcttcgagctcagctcaagaggatattgagattgaaattgcagaggttctttacggattgatgaagcaatcgcatagctccaagaaggaagatagcgctggaaacccttcgtcaaagcttgaatctgaagatgcgaatgttttctcta

SEQ ID NO: 10039 - DNA, 652 bp, Gossypium hirsutum
  Clone ID: GOSHI-09MAY01-C19257_1
ccgtaacccttcccgctcgctatttggactctcccgatgattcaagagtttcattatttttcaactctgactgtcattaagaccagaggctggagccgaagaagaaaaagataatctatgggggaagacgcaagaagaggtttagaatgcccgaagcttatggatgggaaggtgaatagtggtaatggctcagagaaggttatcccttcttgttggttgaaggccagggcttcagcccctgagcttgaggcaaaatgccattctactgttgtttctgggtggttctcggaatctcagtcttccactgatgatgctggtaaaatggtctacttcaacaatcctatgtggccgggagaagcgcattctctgaaagttgaaagcattttgtacaaagcaaggtcagactatcaagaggttcttgtttttgagtcatcaagctatgggaaagtgcttgttcttgatggtatagttcagctgactgagaaggatgaatgtgcatatcaggagatgataactcatcttcccctttgctcaattccatcccccaaaactgttctggttgtgggaagtggtgatggtggggttcttgcagagatttctcggcacagctctgttgagctcattgatatatgtgaaatagatacgatggtta

SEQ ID NO: 10040 - DNA, 335 bp, Gossypium hirsutum
  Clone ID: GOSHI-09MAY01-C19237_1
aaaagaaaagatagaatcaatggatggaataatgaataagataaggaatttagatgcgtacgcctaagataaacgaggatttctgcagccgcacgctttccggtggcgttatcactgtcgtctcctccgttgctatgttcttgctcttcttctccgagctccgattatatcttcatgctgcaaccgaaacaaaactcgtggttgacacttcaaggggggaaactctacgcatcaattttgatggtacatttcctgctcttgcatgctcaatcgttagcgttgatgcaatggatataagtggagagcaacaccttgatgtgaaacatgacataatc

SEQ ID NO: 10041 - DNA, 661 bp, Gossypium hirsutum
  Clone ID: GOSHI-09MAY01-C14997_1
ctctttgtttcgcagagagagaaaagagggacaacacctaccattcttaaaaccgtgtttaccagccaaaagaaaaagcctctgtaaaacaaacagagctactaatgcatagttaaactcaagtagctttactgtcggaaaatttgatgaattttttgtttgtaagaacaattacatgaggattcaaaaactgggtcttaacctaaatggaacaatctttaccaaaacaaccccaaggggtcatcatcgccattgacgttgttgatgaaggaacagagcaacaagaaggaaacctgacaggtaacgaggaacaagaagatagcaaccgtcacggttcttcttcttctctggaactggatcttgagtctggggtagtgtctgaaaccaagtcacatttagcaaaagaactggaaagagattgcaggatttgtcatctcactttggacccgaccaaccatgaatctggtgttcctattaagttaggttgttcttgtaaggatgatttggctgctgctcataaacattgtgctgaagcttggttcaaatcaaaggaaacagaacttgtgagatttgcggatcaacagctcagaatgttgttgctgctgcaaacgaaaccgacacaatggagccatggaacgaaacgaatgattctgcaacaact

SEQ ID NO: 10042 - DNA, 420 bp, Gossypium hirsutum
  Clone ID: GOSHI-09MAY01-C14957_1
gcgtagatactcacaaaacaagtctctgtagctttaacaagaaatggcgaaagaattcacggtgccgccggtggtctgcccctccggcagcggagtcaacccttccgttggaaacatcaaccaacgccgcgtacccactgctccattccaaccctcacgccctccttcctcctcttccgctttacccttcatgtctttcgatatgggttcggccacatcgtcgtcggtatccttaggcggttcaatctcctcctccgcagcaaccggatccgcttcattcgaagacgaagagccccttctcgatgaactcggtatccacccggatcaaatctggtacaaaaccagatccatcctcaaccctctgcgggggaactcgacggcccataaagactccgacttatcaggccctatctttctcta

SEQ ID NO: 10043 - DNA, 435 bp, Gossypium hirsutum
  unsure (1)..(435): unsure at all n locations
  Clone ID: LIB3189-048-P1-K1-F5
gcgcccacgcgtccggcaatagtactactactccaagcaagcattttccttacaagtttgtttttcttgtgattaatcgatatggctagctcaatgtcccttaagcttgcatgtgtggcggcgttgtccatggngcgctgctccattccaaccctaacgccctccttcctgctggtacgctttacccttcatgtctctcgatatgggttccgccacatcggcgtcggcatccttaggcggttcaatctgctcctccgcagcaaccggatccgattcattcgaagacgaagagccccttctcgatgaactctgcatccacccggatcaaatctgcgcaataccagattcatcctcaaccctctccgggtgaactcgaccgcccataaagactccgacttatcaggccctatcttctcttcttatccctctgcttat

SEQ ID NO: 10044 - DNA, 739 bp, Gossypium hirsutum
  Clone ID: GOSHI-09MAY01-C14887_1
gtaactgccgctgcacgattgcctcttctgctacggtagccattttcattataatataccttatttgcatgtcctcaaaacccacgtctgccccggtttttattctacaaaccacaaccaagtttcggctttaccttcaaagccaaatccccaccgtctacataacacacttgttccggttctgggttcttttgcttttctgctgttttttctactctgaaaatggaggaagcgtcgaaacagcagatttacctacacggtgacttggatttaaccattgttgaagccaggagattgcccaacatggattttatggtcaatcatctccgcagttgcttaacctgtgagccttgcaagtctcccgcacagactgctgctaaagaaggggactccaaaatccgcggccaccgtaagatcatcaccagcgatccctacgtcaccgtttgcctcccccaagccaccgtggctcgcacacgcgtcttgaaaaactcccagaatcccaagtggaacgagcatttcattatccctttggctcatcctgtcactgagctcgatattaacgtcaaagacaacgacctcttcggcgctgacgcaatcggcactgccaaaatccctgcctcgaggatcgccacgggggagcatatcaccggatggttcccgctcattggcccctcgggaagcctcctaagccggactcggcgatctacctcgattgaaattacgccctggagataacccc

SEQ ID NO: 10045 - DNA, 754 bp, Gossypium hirsutum
  Clone ID: GOSHI-09MAY01-C14807_1
attaaaattagaaaaagaaaaaaagaggaagaagaagatgaagtttgcattggctttttacttttctagtttgggtttctttcctactccgggggcgtccacactaatttctacaatataaaaattaagaaaaatccaatttttttcaatatttgttatttttcctctataaataatcgtcttcctttgttcacttgctcattaactagcttcacacacactctctctccctctttttctggttcaaagttgggttctcagttgccctgattcagggattaaaaagaaaaaaaagctaagttctatattcgggtgtggcaatggctactaataacaataatagcaagttagagaagttggcttccattgatgcacagctacgtgctttggttcctgctaaagtgagtgaagatgataaactggtggagtatgatgctttgcttttggaccggttcctcgatattcttcaagacttacacggcgaggatcttagggaaacggttcaagaatgttatgaactttctgctgagtatgaagggaagagtacccccaagaaacttgaggagctggggaatgttttgactagtttggatccaggggactccattgttatagctaaggctttctcccacatgcttaacttggctaacttggctgaggaagttcagattgcttaccggcgaaggatcaagttgaagaaaggtgattttgccgatgagaactctgcaacaactgaatcggatatcgaagaaac

SEQ ID NO: 10046 - DNA, 498 bp, Gossypium hirsutum
  Clone ID: GOSHI-09MAY01-C14557_1
cacctgtttctgcatatgattatgtgaagttgatcaggccaagggtgcgtttagctgcttcccaatggcaggctgttgaagagttctactatcttaaaatgaggaaggctggcttccacagctacatgatggatttaattttaagaacttcagacttgtcacctgcacgagaccttgtgacttatgatgatggttcagtagtggtggtaacagaagctgatctcgatggatacgaccagagtcttgaatcaggtgccacgggaagtacaatatgggcagatcttagcatggtttatcgagttagagttgtcggtcaggcagcactagcaagaatctcgtgcttgtggctaacctgccaagcacatcaaaagatttcagcaaagaaactcgctacagaaagcaggtgccttggaagtaccatcagtgtggacattcatgtctactgaaaacctgcttttacaacacaagagatgtttgatgttacatcatgccttttta

SEQ ID NO: 10047 - DNA, 822 bp, Gossypium hirsutum
  Clone ID: GOSHI-09MAY01-C14577_1
gcgaacagcggattcattcaacctctatcccagacttcttgtacttcgactgcatctttagactttgaaattgctatttctcaacttcccctcagagatttcactcatcagatttgtgcttggggttttcctcatctcttagttaaaaccatggattttagccatttaaatcgtgggcagatgactctgatgggatctgcgttttgtgtggtgctttcgttgcatttcacactgcagcttgtgtcacagcatcttttttactggaaaaaccccaaggagcagaaagctatacttattattattcttatggctcctatatatgctgctgtctcctttgtgggtttatcggatattagaggaagcaaagccttcttcatgtttctggaatctgtcaaggaatgttacgaggcttttgtgatcgctaagttcatggctttgatgtatagttacttgaatatatctattagcaaaaatattgtacctgatgaaattaaaggtagagagattcaccattcatttcctatgaccctttttcagcctcgaacagttaggctgaaccaccatacactaaagcttctcaagtattggacatggcaattcgttgtcatccgcccagtgtgttctgtcttgatgataaccctgcaacttcttcagttttatccatcttggttgagctggacattcacaatcatcctcaatgtgtctggttcattagcattatactctttggtagccttttaccatgtctttgccaaagagttggaacctcataagccacttgcgaagttcttgtgcatcagggaattgttttcttttgttttg

SEQ ID NO: 10048 - DNA, 563 bp, Gossypium hirsutum
  Clone ID: uC-gsronu33B077h03b1
cccacttctttgcccacgcgtccgcccacgcgtccgcccacgcgtccttccacgcgttctcgaacagttaggctgaaccaccatacactaaagcttctcaagtattggacatggcaattcgttgtcatccgcccagtgtgttctgtcttgatgataaccctgcaacttcttcagttttatccatcttggttgagctggacattcacaatcatcctcaatgtgtctgtttcattagcattatactctttggtagccttttaccatgtctttgccaaagagttggaacctcataagccacttgcgaagttcttgtgcatcaagggaattgctttcttctgcttttggcagggagtggtgcttgacatacttgttgctgtgggcatcattcgagcaaatcatttctggttggatgtggagcaccttgaggaagctcttcagaacgtattggtgtgtctcgagatggttgtattcgctgttctccagcagtatgcataccatgtttatccgtatagtggagaaactgaagctaagttgaagctaggcaagaaacttgaatgattttg

SEQ ID NO: 10049 - DNA, 283 bp, Gossypium hirsutum
  Clone ID: uC-gsronu33B055a09b1
tcgcccactcgtccgcccacgcgtccgcttaattgccgtttcaagaaataactattaagtttgattttcggaccatgtctttgccaaagagttggaacctcataagccacttgcgaagttcttgtgcatcaagggaattgttttcttctgcttttggcagggagtggcgcttgacatacttgttgctgtgggcatcattcgagcaaatcatttctggttggatgtggagcaccttgaggatgttaattgagacttttacgcgtcttttgagattttatttttc

SEQ ID NO: 10050 - DNA, 881 bp, Gossypium hirsutum
  Clone ID: GOSHI-09MAY01-C14517_1
cggacgcgtgggatattactttcgctctcttcctttggtactcaagaaaaagcaagagatgggtttttcaaggaaagagtacgagttcttgagcgagatcggattgagttctggcaatttgggatgttttgtgaatggcacctggaaaggaagtggccctgtggtttctactcttaatcctgcccataatcagaaaattgccgaagttagtgaggcttccatccaagactatgaggaagggatgcaagcttgcagtgaagcagcaaagatttggatgcaggttccagcccctaagagaggtgacatagttcgacaaataggtgatgcattgagatccaaactacagcagcttggccgccttgtttctcttgagatgggaaaaattcttcccgaaggaattggggaagttcaagaaatcattgacatgtgtgactttgctgtgggtttaagcaggcaattgaatgggtctgtaataccttcagaacgtccaaatcatatgatgttggagatgtggaatccccttggaattgttggtgtaattacggcatttaatttcccatgtgctgttcttggatggaatgcctgcattgcactggtgtgtggaaactgtgttgtttggaaaggtgctccaaccactcctctggttacaatagcaacaacaaaattagtggctgaagttttggaaaagaataacttacctggtgcaattttcacatcattttgtggcggtgctgaaattggggaagcaattgcaaaagatcgacgcattaatctagtttcatttacagggagttcgaaggtgggtgtaaaagtacaacaaacagtaaatgagaggtttggtaaatgcttgcttgaccttaattagtacttcgctattattt

SEQ ID NO: 10051 - DNA, 401 bp, Gossypium hirsutum
  Clone ID: LIB3048-001-Q1-L1-B10
accaggaatggattgggccggtattcccttagaaccgtccaaggattttaaggtggaaaagggggaatcccttggaaatggtggggtaaataccggatttaaattcccaatggcctgtcctggaatggaatgcctgcttggaattgtggtgtgaaaactgggtggttgggaaaggggctccaaccattcttttggttccaatagcaccaccaaaattagtggctgaagttttggaaaagaataacttacctggtgcaattttcacatcattttgtggcggtgctgaaattggggaagcaattgcaaaagatcgacgcattaatctagtttcatttacagggagttcgaaggtgggtgtaaaagtacaacaaacagtaaatgagaggtttggtaaatgcttg

SEQ ID NO: 10052 - DNA, 454 bp, Gossypium hirsutum
  Clone ID: GOSHI-09MAY01-C14507_1
acgctcaattatagctttttgtgctttattgttgttccccttaactctgcacaaagaaaaaaagggggtacacagttatcatcagccttgagaggggaggaggaagagagaatcaattctcagcctcgagaataaaagagaagatttgaagacaacggattaacacaaaagcatgaaatcatgtgaaagaaagttattagtatcttatctcagctcttaacctccatcacctctttctctttctcctttatttatttttggtttggcacccaatctttcaaccaacaagacaaccaccaccgtcctacgaccacgggcactctctcttcttttatatttaataaaagaaaacagctggtcctttttgcataaaatcaagaggtttatccaagctttcatctctattgcctttcctctctttctggtgaagaagagagtgaacaaaaatggagat

SEQ ID NO: 10053 - DNA, 607 bp, Gossypium hirsutum
  Clone ID: GOSHI-09MAY01-C14497_1
aagcagtatcgttgtatacactcgtctagttgtcaatgcacaaagggtcatctaagtgaagatgtgatcttcttagtgtttcaacaactcaactggaatccgaagttgattgcgactctttcatgcgtatgcaaatggtttgatgatcttgccaagagagtactatggaaagaattctgcataacaagggccccaaagatgatgcttgatctgcaatctagtggaagtcacagtgttgatgggaactggagagcccttggaaaactgcttatctattgttcaggttgtagcggtggtcgcttgttcaatagtgttcagatccctggtcattttgtttacaggaccaggttctctaggacctcagggaagagcttccttttaccacaatgccggactgatattttatatgtgtctgacccttgtgaacatctggaccaaggggacgagggtgatgtgggatttttccgaggagttttcaagtcattcttggtgtccaaggttcggaagatgttgattgacagggcagccaagcttcatccaacagcagtttgcccttattgtaaggcaaagttgtgggacatgctgcaagctaagatgataccgcaaa

SEQ ID NO: 10054 - DNA, 523 bp, Gossypium hirsutum
  Clone ID: GOSHI-09MAY01-C14487_1
gttttgaagcagagaagagcaaaaaaagctttttcaagctcttttccttttcccttctaaagggggagaaagttggaaacaaagagcctaagcttataatttgatggacaccggagggaattcattaccctcgggacccgacggcgtgaagaggaaagtgtcgtatttttacgatccggaggtcggcaattactattacggccaaggtcatcctatgaaacctcatagaatccgaatgacgcatgcccttttagcacactatggattgcttcaaaatatgcaagtttacaagccattacctgctcgagaaagagacctttgccgtttccatgccgatgattatgtgaattttcttcgcagtataacgccggaaacacagcaagatcagctccggcagcttaagcggtttaatgtcggtgaggattgtccggtttttgatggccttttctcgttttgtcaaacgtatgcaggtggatctgttggtggtgctgttaaattaaaccataatatttgtgatattgcg

SEQ ID NO: 10055 - DNA, 883 bp, Gossypium hirsutum
  Clone ID: GOSHI-09MAY01-C14477_2
gcgattgctacgtcagacgccccgaccaagccgagcgcgtaatcggcacgctcctcggctccgtccttcctgatggcaccgttgatatccgtaactcctatgccgttcctcacaccgaatccgccgaacaggttgctttggatattgaataccatcataatatggtagtctcccaccaaaaagtgaatccaaaggaagtaattgttggatggtattctactggccttggagtcacaggtggtagtgcattgatccatgatttttattctagggaagtcccgaaccctgttcatttgacagtggatacgggatttaggaatggagagggcacgataaaggcctacgtttctgtcaatttagctcttggagaccgacagcttgctgctcaattccaagaaattcctcttgatctacgtatggttgaagctgagcgacttgggtttgacatcctcaagacaacagcggtcgacaaactgccgaatgatttggaaggaatggaagtcacaatgcgaaggctgtcggctttgatagacgatgtctacaaatacgttgacgatgttgtggaaggccgtgttccagccgataacaacataggtagatttatagcagaaacagtagcttccttacctaaactatctcccccagctttcgataaactcatgaatgatagcctacaggatcaattgctgttactatacttatcgagcatcgctaggactcaactcgggttagccgaaaagttgaatacggcagctcagattctgtaaacttacttccaagtgattaatttttggatctggcattttcagttttttatttatttttaactaatagcctgtagtttgctaagagcttcttttcctttaacgaatagctttgtttc

SEQ ID NO: 10056 - DNA, 695 bp, Gossypium hirsutum
  Clone ID: GOSHI-09MAY01-C14477_1
cccacgcgtcctaaattctttgctcctctgcacttctttcactgaaaccgtaaggagaagatcggagagaaaatatggcggccggcgatcgcaccgttttgcagtttaactcaccgtcatcggcgatcctgtcagcgaaagttcaccctctcgtcatatttaacatctgcgattgctacgtcaggcgtcccgaccaagccgagcgcgtcatcggcacgctcctcggctccgtcctccctgatggcaccgttgatatccgtaactcctatgcagttcctcacacggagtccgctgaacaggttgctttggatattgaataccatcataatatgttagtctcccaccaaaaagtgaatcctaaagaagtgattgttggatggtattctaccgggctaggagtcacaggcggcagtgcattgatccaagatttttattctagggaagtacctaaccctattcatttgacggtggatacggggtttaggaatggggagggtaccgtaaaggcttttgtttctgtcaattactctggagacgacaactgcgctcatttcggaattctttgactatgatggtgaagctagcgagtggattgacatctcagaaacacagtcgcaaattccaatgatgagggatgaataccatgggaagtatcgcttgatacatgttccaatccttacatttggaaggcgtcc

SEQ ID NO: 10057 - DNA, 531 bp, Gossypium hirsutum
  Clone ID: GOSHI-09MAY01-C14467_1
ggtttttgaaaagaacgagaagcgagaagggatggccaagcgcgtgggtatgagtcgggataacggcagaggcaggaaagggtggacgctgaccgccgccgtcactaacatcttcgaatttgtcagattggccgagttcgagatcctctttatcctcttcctcatcatcgcttttatcatcttcaaagatctcacatcgcggcctgaatacaatcaattgctcgtgaaaaaacccggcggtgtagattggtggccgtactaagaatgggtagtggatgcgatgggaattatgtcctgcataattccattccttaggattattttgtttcttttcccttcctctttcacttccagatggttgcttttttgttgattgttgttgaggtctatattctatagaggaaccccctcctggctttcatgcttgtaacccaactagcttcttctttttcttttagttgtttactttgttgttaaggtgtaaggaaccccttctggtttgaaatcgaaacaatcactactttgttgggg

SEQ ID NO: 10058 - DNA, 373 bp, Gossypium hirsutum
  unsure (1)..(373): unsure at all n locations
  Clone ID: LIB3083-031-Q1-L1-E10
caaaggggtgattgcttcnatttcaaaccatttggttttccttacaccttaacaacaaagtcgccaggttaaacaaaaagaggggactagtttatttacaagcatgaagccagtagggggttcctctatagaatatagacctcaacaacaatcaacaaaaaagcaaccatctggaagtgaaagaggaagggaaaagaaacaaaataatcctaaggaatggaattatgcaggacataattcccatcgcatccacttcccattcttagtacggccaccaatctacaccgccgggttttttcacgagcaattgattgtattcaggccgcgatgtctgcaacccaattcaactcgagatctttgaagatgataaaag

SEQ ID NO: 10059 - DNA, 1028 bp, Gossypium hirsutum
  Clone ID: GOSHI-09MAY01-C14797_1
aaccctctcccagcttatcctctcgtacactctcgactcttatcaaattcaatctctctctcaccatggcacaaacccttacacgtgccgccacatccaccctcacgcgccaccttactctctcctttatcctcccaaagcgcctcctttcctccaaatccatcacccatcctcctcccatcccttccctccgcttctcccgccgccctcttacccctctttcccacgccgtccgatgtctccctctcgctcccacgcgcttcacttccatccgttgccgcgtcaaccgctccgggaactccgcctactctccgctcaactcggggtcgaacttcagcgaccggccgccgactgaaatggccccgctgtttccgggttgtgattatgagcattggcttatcgttatggataagcccggtggagaaggagctactaagcaggaaatgatcgattgctatatcaaaacccttgctaaagtcgtcggcagtgaggaagaagccaagaagaagatctacaacgtttcgtgtgagaggtactttggattcggatgcgagatcgacgaggagacctcaaataagctagaaggattgcctggtgttctctttgtgctcccagattcttatgtcgatcccgagtacaaggactatggtgctgaattgtttgttaatggggagattgttcaacgatcaccagaaagacaaaggagggtggaaccacaaccgcaaagggcccaagacagaccaaggtacaacgatcggactcgttatgttcgtcgcagagagaacatgaggtgaaaagtataattagaaagaaagaaaatgatttatagaactccttttaagtgtttcttgagatatgggagcattactattatgaagataagacatggaaaagaaaagcttatgttgatgttttttaatgtaggtctgaatctgaacttgaatgttttgtggtctgcttgagtttcagcgtaaaactgatgtaggattattatgatgttacctgtgtttattttccttctccttaga

SEQ ID NO: 10060 - DNA, 408 bp, Gossypium hirsutum
  Clone ID: GOSHI-09MAY01-C14767_2
tgtcaagtagtcaaaggaacttccatttatcgcgcacacctcatcaccgacaagttcaaccgcctcagcaaactccgagtgatcctccgcttgtgagctcgccggtgacctcccgttgtacctaatcggacgcagctttcgcggtggcagagtaggtcgatgatcactcatcatcaagtcctccgccggttccataatcgccgttaaatcaggaaatggcgccacgtgttgagggaaagcttcccggccgccggtgaaaagctccatttcactctttacacggtaaaaaacccaacagaaattactaccggtaaattataactactactgctaataattcgaataaattattactcccactagactttaaaaaaaaaaatcaaaaatggggcggcggtggcgtgaggg

SEQ ID NO: 10061 - DNA, 658 bp, Gossypium hirsutum
  Clone ID: GOSHI-09MAY01-C14767_1
aggctctcctctctgctccgagctaggcggtccttctactccgttgccgcctccgccgacagtagccgtcacgtcaccaacttcggctttaataggaggtgtcaagtagtcaaaggaacttccatttatcgcgcacacctcatcaccgacaagttcaaccgcctcagcaaactccgagtgatcctccgcttgtgagctcgccggtgacctcccgttgtacctaatcggacgcagctttcgcggtggcagagtaggtcgatgatcactcatcatcaagtcctccgccggttccataatcgccgttaaatcaggaaatggcgccacgtgttgagggaaagcttcccggccgccggtgaaaagctccatttcactctttacacgcgcccagcttatagcccgtaataattgaatcgaaaaacatgttgagaagacccgcagcattgctacgcttttcaatcacagccagtaatctgtgggctttgttgggatccgatttgccccaaatttggcctgttgtactgcacttcaactggtctgcatcttcaactgctggctatagaaccagaactagattcatggacatgtcgacattttggaattcaacgcctgtaattgataaagatgatacaggtatttgaagatttgaagttacttaatg

SEQ ID NO: 10062 - DNA, 655 bp, Gossypium hirsutum
  Clone ID: AI054572.1
gtcgtcccttgggttccttttaggtggtttttaattttaagtttataaacgatagctgcccacctcattgccggcgccatgtgtggcttagccatggccatttcacaaatcacccaatctgaaaccaaaataaaacgctattaaaataatatatttatttgattgttttatattactaaaatgccagcgcccagcttatagcccgtaataattgaatcaaaaaacatgttgagaagacccgcagcattgctaagcttttcaatcacagccagaaatctttggtctttattgggattccgatttgccccaaagttggcctcttgtacgacacttcaactgtcttcatcttcaactgctggctatagaaccagaaccagattcagggccatgtctacatcagtgaattcaacgcctgtaaatgaaaaagatgaacaagtatttcaagattttaaattacttaatgcagtcgatgatagtttggaagagtaatttttgaagtgagagaagctatggattctgccctcttggttcagtgcttagagctcaatactcagtgcgacacaatgttaaaggtgtgggatcaaattgctattagcatgcaatctgtgaactgttgcaggaaggattggttcacatctggccaatactgatcttt

SEQ ID NO: 10063 - DNA, 445 bp, Gossypium hirsutum
  Clone ID: LIB3189-045-P1-K1-A8
cggacgcgtgggttttaattttaagtttataaacgatagctgcccacctctatgccggcgccatgtgtggctttgccattggccacttcacaatcacccaatctgaaaccaaaataaaacgccattaaaataatatctttgttttatattactaaaatgccagcttataacccgtaataattgaatcgaaaaacatgttgagaagacccgcagcattgctatgcttttcaatcacagccagaaatctgtggtctttgttgggattccgatttgccccaaatttggcctcttgtactacacttcaactgtctgcatcttcaactgctggctatagaaccagaactagattcagggccatgtcaacatcagtgaattcaacgccttgtaatgaaaaagatgaacaagtatttcaagatttgaagtacttaatgcagtcaatgataga

SEQ ID NO: 10064 - DNA, 321 bp, Gossypium hirsutum
  Clone ID: LIB3189-045-P1-K1-A2
tcgcgcgacgcgtcggtcgtaattctagcgtattatacactctgttgccacgtttattatctttccatgtgtctcatgaccataggccagttcacaagcacccaatctgtaaccaaaataaaacgccattgaaacaatatctttgttttatattactaaaatgccagcttataacccgtaataattgaatcgaaaaacatgttgagaagacccgcaacattgctatgcttttcaatcacaaccagaaatctgtggtctttgttgggattccgatttgccccaaattttgccttttgtactacacttcaactgtcttcattt

SEQ ID NO: 10065 - DNA, 297 bp, Gossypium hirsutum
  unsure (1)..(297): unsure at all n locations
  Clone ID: LIB3189-045-P1-K1-A3
gaccggnnccggaaacccggggcgagccacgcgtccgaggacgcgtggggnnnaatagaaagctaatttgctatagctgcccacctctatgaccatcggcaggggtggcatatgccggggggcggaggggcacacaccaccgcaagcatgaaaccaaaagaaaacgccatgaaaagaataaacctgatttatatcactaaaaggccagcttataacccgtcgaaattgaatcgaaaaacatgctgagaagacccgcagcattgctatgctgttcaatcacagccagaaatctgaggg

SEQ ID NO: 10066 - DNA, 746 bp, Gossypium hirsutum
  Clone ID: GOSHI-09MAY01-C14707_1
ggccaatcaccacagctactcgtcataaagtaaagagaaaaatggtctccgaaagcaggggctgtacgagccttatattcacgtacggaaccttgaaacgagggttctccaatcacgtgcttcttcaagatctgacgcgaaccggagatgccgtgttcaaaggcagttaccaaacgggggagaaataccctctcgtttgcgggccttaccgcgtccctttcctcctcaacatgcctggttcaggacaccgagtcacgggcgagttgtacgccgtgtcgtcacgtggactcgcccgcgtcgatgagttggaaggcacgagtcgcggtcattacgagcggctgccgatcctgctgattcccgccggctacgggtacgaaagcgggaataacaaagaaaacgaggaagatcaggcggtgttaacccgagccgctgcggggggaataacgtgcgcggcggaggcgtattacgcgcacaagagtttcgagaaggagatgtggatgaagaacgggggggaagggtttgggatatattcacacaaagaagccaaagggtatgtgaaaaggaaagataggcctcaagatctcaggtttctggatcatgttaggatttttatttcatctccttccgattaattcaggaaaaggaaaactgggtgtttataaatttttgtattttgttatgaattttctttttgtttaatttggaatatcgaaaaaattcaaattgaaaaaaaaaaaaaaaaaaaa

SEQ ID NO: 10067 - DNA, 593 bp, Gossypium hirsutum
  Clone ID: GOSHI-09MAY01-C14697_2
gttttcttttgattactcctcttcccgatttcataaaattttaatattctcccactccgaatcgatctatgatttgggcaattcctctgtttttgctgtaaatattattcaaaatcaatttcatcaattatgtttttattgccttcttcgttgatgacttgcaacgtgatattccaaaacctgcgtgtgttcggtcctggcttgaatcctttttcccctttctgcgtcgctcatcattcctctgcttctcgctaatctgtttccctcttctccttgttttcatctctatcatgtaatcatttcttctcttcatcttaagctttcgaggggatcgtttgctttccaagaatacaaagaaacggatctaactctttgtgaaaatctcacgtttttacaaacatatcatgcgtttcttcgcctaatcaatcaaatcgtggcctggggttctctttactttttccgggttaaaggaaaacagtctatatatctgcaacgggattgggtggtttttgctatcgcttccgacgactatgacccaaggacagtctttgcggagtaattggtcatgtatgcgctcgtctacgtgtgggatc

SEQ ID NO: 10068 - DNA, 662 bp, Gossypium hirsutum
  Clone ID: GOSHI-09MAY01-C14697_1
ggcgtcataatatcctctttgtggtagctctctcctttcctctcatttctcttcatgttttcctctttatttagggttttcttttgattactcctcttcccgatttcataaaattttattattctcccactccgaatcgatctatgatttgggcaattcctctgttttcgctgtaaatattattcaaaatcaatttcatcaattatgtttttattgccttcttcgttgatgacttgcaacgtgatattccaaaacctgcgtgtgttcggtcctggcttgaatcctttttcccctttctgcgtcgctcatcattcctctgcttctcgctaatctgtttccctcttctccttgttttcatctctatcatgtaatcatttttctcttcatcttaagctttcgaggggattgtttgttttccaagaataaaaaatgaaagggatctaactctttgtgaaaatttcacgtttttacaaaaatatcatgcgtttctttgcctaatcaatcaaatcttggtctggtgttctctttacttcttccgagttaaaggaaaaaagtctatatatctgcaacggtattgcttggtttttgttattgcttcaagaatatgacccaaggacagtcttgcgagaatctgcagaagcctcgtaagtgggatgtagaaa

SEQ ID NO: 10069 - DNA, 429 bp, Gossypium hirsutum
  Clone ID: GOSHI-09MAY01-C14687_1
ctttccaccatgagatgctgaatattgcctatagcaggccttctcgagaaggattggattggtagtagcaaacctcctttcggaactcgtgagttgctgttgcagaaattgcatcttttcctagacttccaagcaagttaaactataaaaagaaagaatgtgaaaagaacaagtagaaaatggtttcagaagcttgactgctggtttttctccggtttcggtccatcatcgcagttcatgctgcttttgttgaagaaaatcagccgttgtggaaattaaccatttgtgaggactattataggttctttccatttctatttttctttgaaagaaaagacattttaagttttttcatcttggctatgatcaagtgtcacacatgatacgaactacttgtgatattctattacaaagttttgctgttgaaaa

SEQ ID NO: 10070 - DNA, 609 bp, Gossypium hirsutum
  Clone ID: GOSHI-09MAY01-C14677_1
cccacgcgtccgcccacgcgtccgaagaaagctttctttattatcatggaaaccaacttttgcgcttcttattttttaataggaacccttttttcggtctgcctttttgttgctttcaaaactggataaattctcgttgctaagcgtatctcgcttgatattttagagggcgaactggcgaaacataagtcttacgccgaatatctgcttcaacagctatttcgtgcgaagaatatacatttaagggagggggaaacttttaagggagtagtagaaaatcatttggtttttgaagagcccttaaaagagcaaattgatgggctctatcaaatctgttgtgatctcattctaaatggggccaacagtagctactttctaaaaattgtggaattttatggatccacgcttggtatgtagccaagcccaagaaaaaaggaacgaggggaagaatcgacaaggaatccataacaaaaaaaaaattgtgaatgaaaaaaaaagcgtgacgagaataattttctcaacccaagataaaaggaacgaggggaagaatcgacaaggaatccataacataaaataaaattgtgaatgaaaaaaaaaaaaaaagggcgg

SEQ ID NO: 10071 - DNA, 395 bp, Gossypium hirsutum
  Clone ID: uC-gsflnu33B112b05b1
cttacgcgtccgcccacgcgtccggtcgaatatctgcttgaacagctattttgtgcgaagaatatacatttaagggagggggaaacttttaagggagtagtagaaaatcatttggttattgaagagtccttacatgagcacattgatgggctctatcaaatctgtggagatctcactgtaaatggggccaacagtagctactttctaaaaattgtggaattgtatggatccacgcttgggatgtagccaagcacaagaaaaaaggaacgaggggaagaatcgactgggaatccatgacacatgaaagattgcttttgcggtagcagcacctctgctgaaaagggctgtcgattgcagagagcaagtttacgagcacgtgcatgcgacgtggtagc

SEQ ID NO: 10072 - DNA, 254 bp, Gossypium hirsutum
  Clone ID: LIB3189-043-P1-K1-F11
atcatttggtttttgaagagcccttaaaagagcttattgatgggctctatcaaatctgttgtgatctcattctaaatggggccaacagtagctactttctaaaaattgtggaattttatggatccacgcttggtatgtagccaagcccaagaaaaaaggaacgaggggaagaatcgacaaggaatccataacgaacaaacaacaaggaaaaacatgaaaaaagactttgaatgatctcaaaaaaaagggctgac

SEQ ID NO: 10073 - DNA, 598 bp, Gossypium hirsutum
  Clone ID: GOSHI-09MAY01-C14197_1
cacgcgtccgcgccataagttatccaaaagaaatcggttcgaatataatttgaaaattgaaaaactggtagccggagttgcagaaaagatgaagaataccggaaagagtagcaaaggtaccggaaaatcgtcggacgtgaggaaagataggagatctggtactggaatgattggatcgccaaagaaaggaggtcatggcgggaagttcacttgggccggagatggcttttcgccggctgagattggagttgagaaacaggtttttgatgttaaggatcctaactttgaagatcctgatgaaatcgtgaatgataattaattgtgttgtctatgatggtagtgtgagatcgttattattatcatcatcgatcgttgcctttggtttttttttctaatctagtttttatgatgagaccatgaaaagtgtttatgaataaattttgtagaaattgcggctttaattgttgatgtttgcttcttcttctttttttaatgatattatcttagctaaatcgcgaaagaaaatttttgtaagatgtttaaaattgatgtggttttgatttggatggtttctggaaatagtgtactgtctaaattt

SEQ ID NO: 10074 - DNA, 512 bp, Gossypium hirsutum
  Clone ID: GOSHI-09MAY01-C14187_1
atttaatttgttgtatagggtatagcaaaattcaagggagccctaaaacagggtgcttcaaagaaaaagaatccatatgtttggggctttggcgggcaattgtctccactctccactcttcactcttatccactccagtttccaggagaatcgatttcaatcggctttctggttaaattcatctttgaaggttcttgtatgcatatatcataataagagaaaaggaatggtgctatgaattaatggcgtgttttcattctatgaatcttcgcactccttgcttatggacgagtctaccttgcattcggagacacttctcaaggaatctgaaggatggaaataaattattgagttttaacagattatatgtgatccgcccttcaccatttcaaaccctgaactactgtagcttatctggcaacttaagttctacttgtaactggtgatcatgcaattccccatgggaatgcagtgatttcttcaaaaaaagaacacatatttcaccatgaggc

SEQ ID NO: 10075 - DNA, 628 bp, Gossypium hirsutum
  Clone ID: GOSHI-09MAY01-C14147_1
aacttgtgtactctatcaaagagtaagcccaacaatgccgcccaagtttgacccaacacaagttgtcgatgtgttcgtccgcgtcaccggcggcgaagtcggagctgctagttccctcgctccgaagatcggtccactcggtttatctcccaaaaagatcggtgaagatattgccaaggaaaccgcaaaggaatggaagggtctccgcgtgaccgtcaagctcactgtccagaaccgtcaggcgaaagtcatggttgtcccgtcggcggcggcgctggtgattaaggctttgaaggagcctgaaagggataggaagaagaccaaaaacatcaagcataatgggaacatcggccttgatgacgtcatcgagattgctaaagtaatgaggccaaggtcgatggcgaaggacttaagaggtacggtgaaggagattctgggcacctgcgtctccgtgggatgtaccgttgatggcaaagaccccaagggtttgcagcaggaaatcgacgatggcgatgtcgatgttcccctggagtgagaatgcttgtttctttttttcttttattatcaatattattctcccgttttactttcctttttttttaaattttgttagtttaatgtttggaca

SEQ ID NO: 10076 - DNA, 1485 bp, Gossypium hirsutum
  Clone ID: GOSHI-09MAY01-C14167_1
cctactaataaaatttccagattaatgagtactagtactttataacatgcataccaaacaccttcaaatggccaggccaatacatttaaccttcaggaaacaacagttagaaccaaaataatataactcatgaaacaagagagtgggaaacccgaaactgatacaagatgcatgctcctcatgaacgaaaatagcggctgctacaacagcaattaactactacatgtaaggcaaagcttctggcaagcattctcttcagactaaaacatgggaaacaagttagaaatttaaaaggcacctcggcatcccgtttgcgtatataatcaggttgctgttttttatttctgcccgggtgctgcaggggatctatcggaaagtgccctgtatatggctttgatagtatttggagtagttctacaacaacctcctacaagtgaagccccaatctcgcaccatttgtttacgtaagagacaaaatcttcatctgagactcctgtattttccacccattccttccgatcagcatcatacctctcaccactattgggatatataactatgggtttgggtagtgaccttcttaattgctaaaatcagatcatgaataaatctaggtggcgtgcagttgattccaacagcaacagcttgcttgcaagattcagcaattgatgcgcactgaagcaaagaatcgccgctaactacattcacgccatcttttgatgttgaaagttaaccatgcaggaatcttgatgtgttcttcctctaagagttcagcaaaagcctgagcttctatcttgttcggaactgtttcaaatgctattatgtcaggacctgcttcggccaggacctgaacccttctgcgatgaaattctttcaaagcattgactgtcattgcctcaccatagcacccactgtactcagaaccgtcagccacataagccccatagctgcctacagatgctgcaaccaagattggacgattttttagtatcctaccatctcctgttccaccactagaacttttactccatctttcataatacatacgccttgcctctagggcaatatccacactttttttaagcaagttttcactttgttctctagaaaagccttttgcttcaaacccctgaattgtggcctgataggatgctgtgataataatatctgcaccagcttcaaggtaatcaaggtgtacggagcgaataaggtgaggagaagtgaggaggcatttggcactccagaggggatcgtttaggtcagcaccgtggagttccagctcggtcgccagtccaccgtcgataacagcggtgcctcccatctggcggaggaactccttcatcaatgacggcgtcgccgggatgttgaaagtctccatttcttttctaaattagaaggggataagcgttaaatgcggtagccgcctcgccctctctcttttgctgtttgcttttggttggaacttaagaacacccccaggcgtcg

SEQ ID NO: 10077 - DNA, 398 bp, Gossypium hirsutum
  unsure (1)..(398): unsure at all n locations
  Clone ID: LIB3189-028-P1-K1-D6
cccacgcgnccggccttnnnccaaggaaaaaaaattagattttaattcagttctatgtgcagaacaggcgaaattcccaaaaagacctgcaccaaccactccttcactgctattccattattcctcttccttccatcagtaaaacttacttacattcacgtaaaattcagttcctaagttcctattacaaccactttggattatataggacgtaaataaaataaatcataaataaaataaatcaaggttcgaaaaaaaaggtaattttgaaagagggagaaaaacttacggagcgaataaggtgaggagaagtgaggaggcatttggcactccagaggggatcgtttaggtcagcaccgtggagttccagctcggtcggcagtccaccatcggtaaca

SEQ ID NO: 10078 - DNA, 302 bp, Gossypium hirsutum
  Clone ID: LIB3135-041-Q1-K1-D9
cgtcccacccgaaccaggtactgacataatagcatttgaaacagctccgatcaagatcaaagctcatgcttttggtgaactcttacatgaagaacacacaaagcttcctgcgtggttaactctgaacacaaaagatgtcgtcaatgtacttagccgcgattctttgcttttctgcgcatacaaagctaaatcttgcacacttagatgtgctgtatcaatgaactgcacgccacctaaatttattcatgatctgattttagcaattaaaaaggtcactaccaaacccatagttatatatccca

SEQ ID NO: 10079 - DNA, 545 bp, Gossypium hirsutum
  Clone ID: uC-gsronu33B167f12b1
tcacatagtgattttgaaaattcccattctcctccgtaatggctgaagaatccggaacggcgtcgtcatcatctagctcacaaccaagatcctctcctaacacttcaaaaatatcccaggttcctcctggatactctggcctcccaacttttcaaaatggcgattttcagatgtttccggttatgtatcctgcatttgttccaggtttaacttcgttacaaaatcaggaacagatgaaccgtggagcaggcatttatgctgttcctgttctaccatttatgggacatgtttctgggattccatctaacaatctcattcctctcacctataacatacctactcggtcggtgacagaggcaggggcagcagctgaggatcaagggcaaggagcacagcaacctcaacatcaacagcagcaggtaggacctcagagacaagttgtcgtaagaagattccaaattgcatttcagctggatttgttgcttatacttaagctagcagctgtaatatttttggtcaaccaagatggatcaagacagaggttg

SEQ ID NO: 10080 - DNA, 437 bp, Gossypium hirsutum
  Clone ID: LIB3189-030-P1-K1-G10
tacatatctcaagagagctgctggagcatcccatgccactaccaaatgactgattaattcggatcggcaacgatatcatctatctcacaaccaagatcctatcctaacactctaaaaatatcccaggttcctcctggatactctggtctcccaacttttcaaaatggcgattttcagatgtttccggttatgtatcctgcaattgttccaggtttaacttcgttacaaaatcaggaacagatgaatcgtggagcaggcatttatgctgttcctgttctaccatttatgggacatgtttctgggattccatctaacaatctcattcctcttacctataacatacctactcaatcagtgacagatgcaggggcagcagcttgaggatcaagggcaaggagcacagcatcctcaacatcaacagcagcaggtatgacctt

SEQ ID NO: 10081 - DNA, 299 bp, Gossypium hirsutum
  unsure (1)..(299): unsure at all n locations
  Clone ID: LIB3189-025-P1-K1-H10
aacaatcacaaagtgattttgaaaattcccattccccttcgtaatggctgaagaattcggaacggcgtcttcatcatctagctcacaaccaagatcctcttctaacactttaaaaatatcccaggtcccttctgtatactcttgtctcccaactttnnttaatggcgatttttagatttttccctgtttgtaatttttcaattttatttttttttaactttctttcttttttttttcatttcatttttctttccttttttattttattttctctttttttttattctctcttttatctt

SEQ ID NO: 10082 - DNA, 847 bp, Gossypium hirsutum
  Clone ID: GOSHI-09MAY01-C14107_1
cggcgcgtgggcggccgcgtgggcgggcgcgggcggtaaaattttcgatcatccatagctgcaaaaatggctctaaatcctcagcttttccctaatggcatgcccatccctttcactaacgagatgtttgttctcgtcagacatggcgtcgaattcgaagttgacaagattccgggggcgcgaggaggtcgtgttaaagcatggggcataatatatttgtcaaatatacggatggtctttgttgcaagtcgccctgttgggaatttctttgcttttgatatgcctctgctttatgtgcatgatgaaaagttcaaccaaccaatatttcattgcaataacatctctggtcaagtggagcctgtggtccctgaaaatgagcatagggctctctactccactcattcattcaagattttgttcaaagaaggtggatgcggaacctttgttccacttttcttgaacttgattgcttcagtgagacgatataatcaacaagtaaatcatgaaccacagcctcgtgtggatcctttacaagcagctcaaactccagtcgatgaaatgatgcgacatgcatatgttgatcctaatgatccaacaaaaaatcttcttacaagcagccaactacggagtctcaagttaaggcgacgtacgtaccaatcccaaccggttgaaggttcgatgtaaatttaaccttggcgttttataacatcatattgctaagaaacttaagtgatgtttattgcgttgtgtgattaaatgctgcatcatggcatggcataatgctacaatttcattttcctctcgtcctttatctttatgagtgaatagcactcgcttgtttatatat

SEQ ID NO: 10083 - DNA, 1220 bp, Gossypium hirsutum
  Clone ID: GOSHI-09MAY01-C14137_1
cccacgcgtccgaaacagcgaagtaaacgaccaagtcacctatcccttaaagaagatactcaaacccttaactaatcctcattttcactaaccagtaaccaacctttgtctctttctccgcttttctgtttagagcatgcagagacaatccttaggttcgccaagctccaaacttcgcatccatggcggagaagagagttccgtctccgaagatcagaaacgccaagtaatcatcgatgatgatgacagcaaagacatcaggcctcgtcgattgtccttctctccaacctcctcgttgacatcgcctcctaagcctgagaagttcattcacttaattcctcttctcactctcctttgcttcctcattctttatctaaattctcacagtccttcacaatctgatttggctgaatttaatggatttaagcatccctcaaagcattcagactcaactgcaatcggtcatgttgaccattttattgattctcggagaggcgatgttttggggattcgaagcctaaagaacttgcaagaacttgataaaaacgtctcaaaatctcgcccccacaggaaaatagccgatgtctaggcggtcgtctctcggtttatccttctgtctatctctcccccgtcgctcgttcatggccgccttgtcaagcagaccataagcccacacgtgtcggtcacacttgcacgtgcgagcattttgtgcacaaaaattgttttgtctatcgtgtagaattaaattgcatgttaaattcttaggttgtgaagcaactaccttagctggcgctgcgtggtggcccttgttcagttattttattatcattatttttttcttgaaataaattacatgacggttgcttggaaaaagtatttccagattaaagaaatcaaataagctaaagtgcgcgatggaaggcgtgagttagcgatagaggcggccggagtgagcggcaggagtttgggatccagctgggaataaggagcgtcatatgcatagcatattaattgctcaaacggtgatactgataatcttagtcttgatttggttgcatttcttttttctgttaccatactcaaagctacgtgtgtaattaaatgggtgtaagtgttataatttcggaattgcttgggttattgacgatatttaagttcctttgttttcttttcctaatatttcaatgtgtttataaacatttttgaaaaaaaaaaaaaac

SEQ ID NO: 10084 - DNA, 500 bp, Gossypium hirsutum
  Clone ID: GOSHI-09MAY01-C14127_3
ttttcacctaataatggaaggcggtggaccaccacaggcggcggacactgagatggcggagcaacccaacccacaaaaccaccagcaacagccgccacaaatggcaattgggttggagaatatcccggcaactcttagccatggcgggaggtttattcagtataatatattcggtaacatttttgaggtcactgctaaatataaacctcctattatgcccattggtaaaggagcctatggtatcgtatgctctgcgttgaattccgagacaaatgaacaagtggcgttgaagaagatagcgaatgcttttgataacaaaattgatgctaagagaactcttcgtgagatcaaattgcttcgtcacatggatcatgaaaacgtagttgcaatcagggatataatcctcgccaccaaagagagaatgcgttaatgatgtttatattgcatatgagctgatggatactgacttgcatcagataatccgttcaaatcaagcttta

SEQ ID NO: 10085 - DNA, 1234 bp, Gossypium hirsutum
  Clone ID: GOSHI-09MAY01-C14127_1
cggccgcgtcgacggcagcaccagtttcgtattgcagaaaaaaaattaaaatagagaaaacagcacagatctattaaccaataaaatcctacgcatccttccagtacacccactcaccctaatttctttttagattcttttttccaggaaataaggtaagaatggaaggcggaggaccaccacaggcggcggacaccgagggggcagaagcagcccagcaacagccacaacaccaccagcaacgtccgcctcaggtggccgctggcctggaaaatattccggccactctaagccacggcggtaggtttattcagtataacatctttggtaacattttcgaggtcactgctaaatataaaccacctattatgcctatcggtaaaggcgcttacggcatcgtttgttccgcattgaattccgagacaaatgaacacgttgcgttaaagaagatagcgaacgcatttgataacaagattgatgcgaagagaactcttcgtgagatcaagctgcttcgtcacatggatcatgaaaacgttgttgcaatcagggatataattccaccacctcaaagggaatgctttaatgatgtttatattgcgtacgagctgatggacactggcctgcatcagataatccgttctaatcaagctttatctgaagagcattgtcagtatttcctctatcagatcttacgtgggctgaagtatatacactctgcaaatgttctacacagggacttgaaacctacaaccttctcctgaatgctaattgtgacttgaaaatatgtgattttggactcgctcgtgtcacctctgaaagtgattttatgactgaatatgttgttacaagatggtaccgtccacctgaactgttgctaaactcttcagactatactgcagccattgatgtatggtcagtgggttgcatttttatggaattgatggatcgaaagccattatttcctggaagagatcatgtgcatcagcttcgattacttatggaactgattggcaccccatcaaaagctgagttggagtttttaaatgaaaatgctgagagatatattcgacaacttcctctttatcgtcgggaatctttcactgaaaagtttcccaatgtccaccctttactattgatcttgtggagaaaatttgacttttgattcccgaacaaggattactgttgatgacgcacttgctcatccctatctaacgtccctggctgacataagttt

SEQ ID NO: 10086 - DNA, 596 bp, Gossypium hirsutum
  Clone ID: AI054813.1
aaacagcacagatctattaaccaataaaatcctacgcatccttccagtacacccactcaccctaatttctttttagattcttttttccaggaaataaggtaagaatggaaggcggaggaccaccacaggcggcggacaccgagatggcagaagcagcccagcaacagccacaacaccaccagcaacgtccgcctcaggtggccgctggcctggaaaatattccggccactctaagccacggcggtaggtttattcagtataacatctttggtaacattttcgaggtcactgctaaatataaaccacctattatgcctatcggtaagggcgcttacggtatcatttgttccaatttgattcccgagacaattgaacactttggttgtaaaaatgatagtgatcggcattggatatcaagattggtgcgaagagaacttttcgtgagatcaatctgcttaattcaatgggatcatgtataacttgtgtgtaatcggggatatattgcctgacctttaagtgagaatgtccataatgtggtttaatatgtgatgcttgtggataactgcggttataaaatatattggtataaaatagag

SEQ ID NO: 10087 - DNA, 579 bp, Gossypium hirsutum
  Clone ID: GOSHI-09MAY01-C14047_1
cccacgcgtccgctcctcctcctcctccagtgcggcggtgcctcacccaagccctcttttgccttcagatttccggcggaccagtaatttaaataaagtggggaagaaatgagtgctttcaataagggcaaagcaagtgttcctgttgcgtggagcccgaacctctatataacccttgtgaggggaattcctggcacacgaaggcttcataggcgcaccttagaggcactaaggttacggaaatgtaaccgcactgtcatgcgttggaacactcccaccgtccggggaatgcttcagcaggtgaaaaggttggttggggttgagacagaagaaatgttcaaggcacgcaaagagaacgaagccaaacaccgagctctacgtccccctatcggcattaatcatctcctggcttctgcaaccgactccactaagtagccttataaagacgacaatagtaagtttttgaacctctattttagtagggattgttcgggttttttcgacataatttctctatgtttgaagaaaataatcggagtaaaaatggtgaactcgaaataacactgtattgaactctgc

SEQ ID NO: 10088 - DNA, 606 bp, Gossypium hirsutum
  Clone ID: GOSHI-09MAY01-C14017_1
ttcccctccgccacccttccttcttctcaagaccgtttcttctcacgaatcctccagacttaagacaatcttcctgagttattagaggtttatcctaacaaatctgtgaaggtttgagaaaaaataaacaactttttttaatggcatctagagtttcattaaagactaaaggcaaaggagggaaggggtctaagggctcggatgataaatcaactacgcagtgcttgaaagagtggagcacatgggctatgaagaaagccaaagtggtaacgcactatggcttcattcctctggtgatcattatcggcatgaactctgaacccaagccccaactttatcaattgctaagccctgtctgattcagttgcttatttcttaaccacccagatcttggtttaactatgtaatttgtttgttgcctatctgtcgaaactacatggtattatgttaggcatatgctttatatgatgttgactgttctattctatgtgcttgagaatacattttatgtaattcgaatcttatttgagtttctcaatattttcttttactcaaaaaaaaaatatctttaatttttctatttctcttttattatatatctaattt

SEQ ID NO: 10089 - DNA, 551 bp, Gossypium hirsutum
  Clone ID: GOSHI-09MAY01-C14007_1
taaaaattatttttccctttctctctcaaaatcactccatcacttgacttacatagagaaagttttgagaaacgcaaaagggaaagttcatttcttttttattttggtttttaaaacttgctaaaagaaaggggttaaaaaaaagaggaatttttggcttggtttttctctgttctttttctttgtatatatgtttttgttggctgccttttttgggcgtgcttttgaatggaggggagtgggatcaaagggaaggatttgattgaggagatttttgggcggtaatggtgggagttgagagctagggtttttggttttttggttttttgctgtattgttgtgctgttggggtttctggactgtgtggatcttaggatctttagattgtgagcttataaaaatctttattaaaaagttgcagcttttagtttcctttcttttgtcaaatggaaggaagcaaaaaggttaaatctttggttttggtttgtttgatcttggtgctactgaattcattctggcttatttctgctaatgttgaatggtgttcattg

SEQ ID NO: 10090 - DNA, 447 bp, Gossypium hirsutum
  Clone ID: GOSHI-09MAY01-C14027_2
aaaaaagataaagaaagagagaaagagagagagggggggggggcgacatggaaggaaagtgtgaggagcaaccatggttgaatggagagaaaaaagagccaaaatacagccatgggttttgttcagccgagatacagacgctggccagcgttgccgaagtgtttttcccttctttaccaccggattctggctttcaacgaaaggacacccagccaagcaaggctgttcaatccttcctaaaagcttctgcctctcaaccccctttccccgacgaggtagcagaattgctggggaaaagagcattcattggaagtgtgatagtggtgagaattgtattagtggtactggggacgagggtaggaagcttgttgctatgtggaaagcagtgtttggggaaggaatggccgtttataaatgactttggaagcatgggattggagaagagag

SEQ ID NO: 10091 - DNA, 941 bp, Gossypium hirsutum
  Clone ID: GOSHI-09MAY01-C14027_1
cccagcgtccgcggccgcgtgggcggtcgcgtgggggaaagtgtaaggagcagccatggttgaatggagagaaaaaagagccaaaatacagccatgggttttgttcagccgagatacagacgctggccagcgttgccgaagtgtttttcccttctttaccaccggattctggctttcagaggaaaggacacccagccaagcaaggctgttcaatccttcctaaaagcttctgcctctcaaccccctttccccgacgaggtggtcagcaaataagtagtgttggggagattctgcagttacatgtatcccaagttttaatttcagttttactagaaaaggacggtaacccagttgtgtcagatttggatgttttaacaaaagttttaaaagtagccctctttgtctagtttaaggttagacaatgtttgtatcaacgttacaggtagcacaattgctggggaaaagagcattcattgaaagtgtgatagtggtgagaattgtattaatgttactgtggaccagggtacgaagcttgttgctatgtggaaggcagtgtttggggaaggaatggccgattataaatgactttggaagcatgggattggagaagagagagaaagtaatgcaaaattggttaaagcacgggtttctatttactcccataagggctgctttcatctacttgaaagtcttctgccttttcgtttacttctctcgggtaatcattcaatgctacctcttccctttaatcttctttctactttcatcctttccctaaggattagggttactacataatatatttgtaccgataaaagtatgagacccctatattaaaaatttgattgtattttacttattctattcaaataatactaaattagttccttttttaaaaaaaaaaaaaacaaaaaaaaaaaaaaaaaaaaccctcgaggggg

SEQ ID NO: 10092 - DNA, 471 bp, Gossypium hirsutum
  Clone ID: GOSHI-09MAY01-C14317_1
caccactgagatttgttaggtccggcaatcagatttttgctgtacacgaacaatttccttaaatttctgtgttccagagctgagacttcttctagagatgagatcatttaaaaaattataattatgaattatccaccagagaaggttgtgaggttccaggactggaattcagagaaaacctgcgaagtacattatactaataataatgggataaattcagggaaatttacatttgcaataaattcattttcagaaaagtttcaaagaggggttgaatctggttctgagaggattaaagcgattagaaagtcatttaaatctagttcattcaaccatgttgttgctaaaggctttggttctagtaagaaagttctttgatccacaggggccattccttcaacgctggaacaagatatttgtattatcatgtataatagcagtctcaattgatccactgttcttttacgttct

SEQ ID NO: 10093 - DNA, 601 bp, Gossypium hirsutum
  Clone ID: GOSHI-09MAY01-C14247_1
ccccaccccaccagtgagtgagtgagagagagaggagtctgctatttgctaaggtgcagtttggagtggttttcataatggaaagaggtgcaaggatgctgttgatctcagtcatggtcctgctggtccttgcttcaaatgctgaagggagaagactcaaagaggaagcttaccaccctcagaacttcctcggagcctttggtactagtggtgggctagttccaacccctggtggaggtgttggccttaatttagggccgtcagtcttttgttcctatcctgggaccggatgtgttcgtgtccagcctactattcctggtagtactggtaccattggcgctggcacaccaccatgatagatgtcctgattcaggcttagagggtgttgaatgagcttcagttatggaggtctaagctgttgtctctttagtttggtgttttttagtgtgtgtttgataggaacaccttaatgttttgggagctgctaatgaccatcctttgtggttgattatttgccttatcaaaacattaaggttctaggttcaggcttcaaatctactaaactactactaatttgatctacaacatgatccatgtctct

SEQ ID NO: 10094 - DNA, 1095 bp, Gossypium hirsutum
  Clone ID: GOSHI-09MAY01-C15977_1
cccacgcgtccgcccccaccgcgtgcttccattcacgtcatcgattgcttcccttcacgctgctttcttcatcgtctccatcaattgcttgcttcacttttcacttagtggctcgctattttttttttcaaagcattgcaccatattcttaagttgcttcatccgcaacttaggttgtaaccgtgaagttctggtggttgcttgctttaccttaccttaaaaatgtcatcattaaagaatgctatcagcagacgtgctcacaaggaacgtgctcaaccttcatcgaggaaaaaatttgggcttcttgagaaacacaaggattatgtcgtccgtgctaaagcattccacaagaaagaagaaatgttacggaaactcaaggagaaagctgcattcagaaacccagatgaattttactttcagatgataaaaacgagaactgtggatggagttcataaacctgagagtcaggctaacaaatacactcaagaagaactcatgctaatgaagactcaagacataggatatatactacagaaattgcaaagtgaaaggaagaaaattgagaagctaactgcagtgttgcattctgttgataatcatccatctaacagacacatttactatgccgaggatagggaagaagctagagaattacagtcacaagcttcagaaagcagagttactcccccttctggtgatatccctgatcttattaaaaggaaggcaggtgcttcttacagggaattagaagccaggaagagtagagtgaatcagctggagaagctatatatggaaatgtcactgaagaaggaatttcagataaagggtcggaagcggaaactccgtgaagacgagttagtatgtcctacctcctagccagcgtatccatggagatcagaaagaaagtggtgacaaagatggttgtgttggtgaaggaggcaatttggctttagcagctttccccatgttttgagagagatctaagccataaatattgaaagttttgcattgttatgttttcaggggcatggggccaattatatatgatgtgagaattattattacttaaatgaagttatttatttattttgtctg

SEQ ID NO: 10095 - DNA, 442 bp, Gossypium hirsutum
  Clone ID: LIB3197-017-P1-M1-E10
taccaaaccctagctcttttccacccaaaatcccaaacccacccctcttcccactgggtgcttccattcatgtcgtcgattgcttcccttcacgctgctttcttcatcatctccatcaatagcttgcttcactttcacttagtggctagttattttctttttcaaagttaaagttttaaccgtaaagttctggtgattgtttgcttttccttaattgaacatgtcatcattaaggaatgctatcagcagacgtgctcacaaggaacgagctcaaccgtcatcgaggaaaaatattgggtttcttgagaaacaaggattatgtcgtccgtacgaaagcattccacaagaaggaagaaacgttacggacaagtttatttgtttagtgcattcaattcttgctggttatattaatatatgtgctcactaatttcttcctcttttt

SEQ ID NO: 10096 - DNA, 430 bp, Gossypium hirsutum
  Clone ID: LIB3197-016-P1-M1-A2
actaaagcaatatatgctcatttgtttgcagggagcggtttccaatcttgcttacgcatcttgagtgtgtttgcagattgtcaaactttcttagtgactatgcacattaatgttcacagcatttattagagtgtgagttcctcccatgcctttgcttttcttcttttaacctacttcataattgcaaattctctagttttgctccaatattgcactcatctaactgtatgtgtgtatatatatgcatgtagctatgtatttatgcttatgatatctgctaatatagctattaatgggatttttagaaaaaaatctattcttgaaagataatactatttacacatcatgttcaaattatggtaaaaaagtatggattagatattatataaatcttaaaatatatatttatatccaatactcctactcaaat

SEQ ID NO: 10097 - DNA, 293 bp, Gossypium hirsutum
  Clone ID: LIB3148-041-Q1-K1-H4
gctttctgttatactaataatcatatgcatctatcgggagagggggggagggaatcatgtctttcgatctcatatgctgaagccatcctgcagctgcttcggatccttccaagatctgtacggctgaggaccaaaagaagaaagatgatgaggatctggtgtttgagatgtctgcaacagctctctcttgaatactccctactgaagaacaagcttcaaatcttattccagattgtcaaactttcttagtgactatgcacattaatgttcacagcatttattagagtgttgag

SEQ ID NO: 10098 - DNA, 541 bp, Gossypium hirsutum
  Clone ID: GOSHI-09MAY01-C15857_1
ctcatgcgtccggagaaaatagaaatactaattgcgggggaaatttataaacttcttcgctctctccttccgcctttctctccatgcgaatctctacctagggggagaaaaatatcaagaaagagccaatctcgaaatttctgcgaaaatatgggcgatacctgaaattctccgcttcaagcgacgccctgcaagcgactggtttcacttcgacgatgtctctttctggtgtctttgcaattgtcctatgatttgggactttgcaggaaccaggtatacaagacaaaatttaagattgtacttggaagggggaagttgggtttgagtgagctctgacctctcatctcgggcttcgttcctgcaacagcatgaacaggatgtttggagaagttcactctccaacaaattgtacaggccaatgcattttgttccatacagaaacaatgcctttaggtgtcatgcttttggagtacctgcccaaaattagaactgcccggtgtaaaagctgcatctatttcattaacaaggtcttacaatacct

SEQ ID NO: 10099 - DNA, 709 bp, Gossypium hirsutum
  Clone ID: GOSHI-09MAY01-C15807_1
ttcttagagtcctaataaccgaccaagaccgagctctgaaatctgtggtggcggaaatctttccaaatccacttcattgcttcttcctgtggcacgtattaggaaaggtttctgagaaccttggtcatgtaatcaaacagcatggaaacttgcgcgtccggtttgagaaatgcatctacaggtcttggacagatgaagagttcggcaaaaggtggtggaaaattcttgatagatttgaactcaaggatgatgaatggattgaagtcgttgtatgaagaccgcaaaaagtgggtgccaacctatataatgaatgttctgttggctgggatgtctacggttcagagagccgagagtgtgaactcattctttgacaagtacgtacataagaagaccacagtgcaagattttttgaaacattatgaagcaattttacaagataggtatgaagaggaagcgaaagcaaattctgattcatggagcaaagtgccagcattaaaatctccatcaccttttgagaagagtgttgtgggggtatacacacacacattattcaagaagtttcaaatcgaggttgtgggtgcaattgcttgtcatccaaagccggaaaatcatgattcaacatgcagcatttttagagttcaagatcttgaacagactcaggattctattgtactttgaatgagatgaaaggagaagtttcttgtatatg

SEQ ID NO: 10100 - DNA, 616 bp, Gossypium hirsutum
  Clone ID: GOSHI-09MAY01-C15507_4
atctaggtctctctctctgtctcgaccgtctcccgccaccagggaagggctgacgctagagggagtgacaatggttgagaaagcatgaggcacaacggaagaggcggtgaccagagagtacaccattaaccttcacaagcgccttcatggctgcacattcaagaagaaagctcccaaggctatcaaggagatcaggaagtttgcagaaaaagccatggggacaaaggatgtgagagttgatgtcaagctgaacaagcacatctggagcagagggatccgaagtgtcccgagaaggattagggttcgcatcgctcgcaagagaaatgatgatgaagacgccaaggaggagctttactctctagtaacggttgctgaaatcccagctgaaggattgaagggtttaggcaccaaggtcattgatgacgatgaggaataatttttatctgtctcttgtttacttgcattttgttctcctacaagtttcatcagagttttgactagttttacaattgtgacattaaaaatatttggtttgtgttatttagattcttaagcttgtcgctttagtttagagctttataaatagattcaaatgatgagtgtttggatttatgtt

SEQ ID NO: 10101 - DNA, 737 bp, Gossypium hirsutum
  Clone ID: GOSHI-09MAY01-C15507_3
gcggggaagtcattatggtttccttcaaaacaccatcataggggggtttacccccggaaggatttcaaaatggttgagaaaacaaggggaagaaaggaagaggtggtgaccagagaatacaccatcaaccttcacaagagactccatggctgcacattcaagaagaaggctcccaaggctataaaggagatcaggaaatttgccgaaaaagccatggggacaaaggatgtacgagtcgacgtgaagctgaacaagcacatatggagccgagggatccgaagtgtcccaagaaggattagggttcgtattgctcggaggagaaacgatgacgaagatgcaaaggaagagctctactctttggtaactgttgctgaaatcccagctgaaggactgaaaggcttgggcaccaaagtcattgacgatgatgatgagtaatttattggttttcttttagtttatgaaaacttttaaaattttgtttgagaccgacaactttatcattagaattttttgggttaagttttgtagtaatttcttgtgagacattaaagttttcctcgtatatttgggttcattgttgttagtcttttaagctttaattgtagtggaaattacatatacaaatagtgatgggccgggcgggacgaccggttttttgtctgccccaattccgacccgatataccccaatataattcaacttcaacacgatccgaaattaaatattgatttattttc

SEQ ID NO: 10102 - DNA, 700 bp, Gossypium hirsutum
  Clone ID: GOSHI-09MAY01-C15507_2
ctttggtgttgtagctttctgctttgctcttttttggggggtttcaaaaatggttgagggggcatggggaagaaaggaagaggttgtttccagagaatacaccatcaaccttcacaagcgtctccatggctgcacattcaagaagaaagctcccaaggcattaaaagagatcaggagatttgcagaaaaagccatgggaaccaaggatgtgagagttgatgttaaactgaacaagcacatatggagccgagggatccgaagtgtccccagacggattagggttcgcattgctcggaagagaaacgatgatgaagatgcaaaggaggagctttactctctggtatcggttgccgaaatcccagccgaaggactcaaaggtttgggcactaaggtcatcgatgatgatgatgagtaatctccgatctctagtttaagaaaagcattgcattttgtttactgaaaagtttaaacccaggttttggctagtttaacgattttgttcatcaactgtttttcctttgatactcggtttatcgttgtttagacttttaagcttggtgcaatatatgtttcaatggcggaatcaggttctttttgcggcggcgtttcccatacattatgaagcattactttattatattcatgtcatgaataagccgattatgcacgaacttgctgagttttatcaatgacttggaca

SEQ ID NO: 10103 - DNA, 678 bp, Gossypium hirsutum
  Clone ID: GOSHI-09MAY01-C15507_1
cccagcgtccgcccacgcgtccgcccacgcgtccccgccctccggctttccttcaatccaatccaaacgcctccaggtaagggctaaggcaagagggagtgaaaatggttgagaaaacaagaggaagaaaggaagaggtggtgaccagggagtacaccatcaaccttcacaagcgcctccatggctgcacattcaagaagaaggctcccaaggctataaaggagatcaggaagtttgcagaaaaagcaatggggacaaaggatgtgagagttgatgtcaagctgaacaaacacatctggagccgagggatccgaagtgttcctagaaggattagggtccgcattgctcgcaagagaaatgatgatgaagatgcaaaggaagagctctactctctagtaactgttgctgaaatcccagctgaaggattgaagggtttgggcactaaggtcattgacgatgatgatgagtaatttattgatgtttagttctatgaaaaacttgcatttattcaccaagaaatttacccagagttttggctagtgttatatttgtgacctgtgagacatcattctactaatattttggttaattgttgtcaagactatttaagcttgttccttgtgcaattgaaatttccagcagattttagagttttatttttattatttatattatttt

SEQ ID NO: 10104 - DNA, 407 bp, Gossypium hirsutum
  unsure (1)..(407): unsure at all n locations
  Clone ID: LIB3149-017-Q1-K1-D5
ctccgatctctagtttaagaaaagcattgctttttttttactgaaaagtttaaatccaggttttggctagttttacgattttgttcatcaactgtttttcctttggtattcggtttatcgttgtttagacttttaagctcggtgcaatttatgtttcaatggcggaatcaggttctttttgcaaaaaaaaaaaaaaaaaaaaaaaaaaaaaaaaaaaaaaaaaaaaaaaaaaaaaaaaaaaataaaaaaaaaaaaaaaaacaaacaaaccccnccaaanaaaaaaataaaaaaaaaccaaaacccaaactaaaanaccacaaccnnaacaataaaaaaaaggggggctgttttaaagggtcccaatcttaaacccggtggggtggaaacaaattttttttttttggg

SEQ ID NO: 10105 - DNA, 339 bp, Gossypium hirsutum
  Clone ID: LIB3149-037-Q1-K1-H9
gaccacgcgtccgctttacttcaatccaatccatgtaaaggctttttcaagttggagtgaaaatggctgagaaagcaagtggaagaaaggaagaggtggcgaccagggattacaccatcaaccttcacaagcgcctccatggctgcacattcaagaagaaggctcccaatgctattaatgagatcaggaagtttgcagaaaaagcaatggggacaaaggatgtgagaagcgatgtcaaacttgaccaacacattttggacccgaggaatccaaaaaggttctaaaaagattaaggtccccattggtcccctgaaaaattattatgaaaaagccaaagaa

SEQ ID NO: 10106 - DNA, 1425 bp, Gossypium hirsutum
  Clone ID: GOSHI-09MAY01-C15527_1
cacctttttctttccttttcctctctaaaaccctaatttgatctccaaataccttcgagatctccaagcttcgtcaccccaaaatggccacgacacgcagatcccttcctcttctgagaaccctcatagccggaaaaacccaaacccgaaacgtgacgtacatgccccgaccaggagatggagccccaagacccgtaacgttaatccccggagacgggatcggacctttggtgacgaacgcggtggaacaagtgatggaagtgatgcacgcaccggtttacttcgagaagtacgacgttcacggcgacatgaaacgggtaccacaagaagtgttggattcgataaagaagaacaaggtttgtttgaaaggagggttaagaacacccatgggaggtggagtcagttcattgaatatgcaattgaggaaagaactggatctatacgcttcattggtcaactgttgtaacttacccggattgccgacccgccatgaaaacgtggatatcgtcgtaattagagagaacactgaaggggaatactcgggtcttgaacatgaggtggtgcctggtgttgttgaaagccttaaggttataacgaagttttgttccgagcggattgcgaaatatgctttcgagtatgcttatttgaacaatcgaaagaaggttactgctgttcataaggccaacattatgaaacttgctgatggattgttcttagagtcttgccgtgaagttgcaactaagtatccaagtatcaagtataatgaaatcattgtggacaattgttgtatgcaactcgtttcgaagcccgagcaattcgatgtcatggttacccctaatctttatggaaatctggttgcaaatacagcggccggtattgctggaggcaccggtgtcatgcctggaggcaatgtgggagctgaatatgccgtgttcgagcaaggtgcttcagcgggaaatgttggaaaagaaaagatagtagagcaaaagacggcaaatcccgtggcattgcttctctcctctgccatgatgttgagacatctccagtttccttcatttgccgatcgactcgaaagtgcagtgaaacgtgtaatctcagagggccagtatcgaactaaagatctcggtgggcaaagcagtacacaggaagttgttgatgccgttattgctaaactagattgattactcgtcttcttcttcactatgggttttccacagtaagattttcttaagttggtatatctcattcttacattttcagaataatatttttttttcgaaatactcgaaaatcaaacttataacaaacaacaaacaactgttgagttgtgaaccattttacattttttgtttttgttatgattttgaggtgaatataatattgttacctgcccctgaacttttttcttcaaatatcactaccaat

SEQ ID NO: 10107 - DNA, 469 bp, Gossypium hirsutum
  Clone ID: GOSHI-09MAY01-C15777_1
atggctgaacaactcaaccttctctgcacagtgggtccagcatcctttgaagcatgagttcttaccaggagaagcagacctttaccccaccacctcagcttcaacagcagcaggtgaaacaacccagccagcctccacctcaggaaccatttgttcccataaccaaggagccatgccacccaaaggttccacaacctggaaacacaaagattccagagccagattgcaccaaggtccctaagccaggctacaccaaggaccctgagccaggcagcaccaaggtccctgacaaaggctgcaccaaggtccctgagccaggcagcaccaaggtccctgacaaaggctgcaccaaggtccctgagccaggcagcaccaaggtccctgagccaggcagcaccaacgtccctgacccaggcgccatcaaaatccttgagcgaggctacaccaaagttcctgagccaggctacac

SEQ ID NO: 10108 - DNA, 617 bp, Gossypium hirsutum
  Clone ID: GOSHI-09MAY01-C15767_1
gctcaaccaataacaatattaaaggccattccgtatttcgcaccataataattccaaaacaaacaaaaaagacacccaaaaattctacttttgcgagagagaaatagcgacgctctggattccacctcctcccgtccttggcgacggtgtttatgccgcttctttttcagcttgtacctgacttggatttagagggatttagtttccttttcaagacatggaacaagtgtgcttctggtcaaattgctaccttttccgagtgtttttcttccaagaagtactcgattggcggttccttgcccgtggagattttcttttggtttcctttgtcaattgcacttagttctcagtctccttttaacactcaacacaggagctggaatgctagttttttctgagataggtgttggatttttagcacatttccgcaatgaattgatgacaaaacatccagatgaggattttgggaaaatgcttttcaggtctgactctatcgataggcagtttaaagttgcatgctaagcctgtacagttgtagtcctatgttagttttctgttatgctcctgatgggcactgatcagtgatgagatgttggtgttttgagctttctgcaacc

SEQ ID NO: 10109 - DNA, 591 bp, Gossypium hirsutum
  Clone ID: LIB3825-027-Q6-K6-H2
caaaatacaaaaaatgtgctaatttttgcttcttaggagacggagaatagcgaaactctggattccacctcttcccgtcctcggcgacggtgcttatgccacttggttttaagattgcaccgggcttggatttaaaaggatttagtttccttttcaagacatggaacaagtgtgcttctggtcaaattgctaccttttccggatgttttcattccaagaagtacttgactggcggtttatcatccatggagattttctcttggtttcatttgtcaattgcacttagtgcccagtctctttttaatacccaaagcaggaagcgtaatgcaagttttttcagggatacgtgttagatcgcacttctgcaagtaaggtattttgtctttctccatttgactgaaaatagatagtaaggttctaaaacaattttcttggcagtgctttgctgatacaacatttggtcaaagattttgcgaaaacaccttccaggtatacacaatatatgcttacatgattatctttccccatatctattaagtattaacttttgtccattttgtgacctttactttatttttctattttcttgtc

SEQ ID NO: 10110 - DNA, 541 bp, Gossypium hirsutum
  Clone ID: GOSHI-09MAY01-C15647_1
acaattttaatggcggggagatgggccacggcggctttccggtgggtattttcagacttaatatcagttcggcggtggccgatgcgatggggtcacgtggagtggcctcaacttagtggtttcagcttttcgatcgtggacgacgtcgtttggagtctgatcacggcgtttgagtctgtcgctttggtttctatgctctgcttcttttttctggtttgcggctgtactttctgagaaggagaaaaaagaaaatactaggattgtggattgccggaatgtttgtcggaatttgacgtcagctgtgaggttcttatgtcggattccatcagtggcggaggtctcgaggttcgttcgttataaacaaccacgtgaccttatcgagtgaggtgcacgtggtaaatgttgcaattttgtcttttattattattttcttttcttttttaaatttttaaattttatgtattattttgttttgaaccaaaaaaaacaaaaacaaaacatgtagtaatttctttacgattatctttttatgcaatatgtg

SEQ ID NO: 10111 - DNA, 638 bp, Gossypium hirsutum
  Clone ID: GOSHI-09MAY01-C15667_1
cttattccacaaccaaataaatacaactcttgtgttctgtttcacctaaagcacaagaagctttgctttttcctttcttctttcctcaagagtttttaatttttttttgccctactttgtggggtttcagtattctttcttctcaacaggttctgatgcattcaagctttcaaggactatacttggtctgcgtttttctagcgttttctattgttgggttttgcgttttggggttaaaggcttttgagaaacgtttttttctttcaagttcaaccatgcctgctcttgttaattacagtggtgatgatgatttctataatggagggtccttttatacaaattctactgacttgggtagattgtgttcaatcagttcccaagttgatgtgtactgcccgcctcgtaaaagaacgcgtattagtgccccatttcacttcggagaagctgaggttgagcagaataagcaaccatcgatcgatgtcctccctgatgaatgccttgttgagatctttaaacgcatttctgggggtaaagaaaggagctcctgtgcttgtgtctctaagcactggcttatgcttctgaccagcattcgcaagggtgaatatgagtcatcaaaggtggtcaaggagaactttggt

SEQ ID NO: 10112 - DNA, 348 bp, Gossypium hirsutum
  Clone ID: GOSHI-09MAY01-C15117_1
gacagaactaaatgatggaaaaccaaggaagattaagaatgcaaagccatattcttttactcttgaggaggataccacccagttcggtacgtataggaaaggtggtattggtacacgagtgaaacagcccaaggtattaaatttcaaaccactaagagatgctatcaaagaccctggtgattttctgctgagtgatttttcaaaatttgatcgtccacctctgttacacttagcattccaagcattggataagtttgtctccgatttgggacgctttcctgttgctggttcagaaggggatgctaataagcttatttctattgctgggaacatgaatgagagcttggg

SEQ ID NO: 10113 - DNA, 646 bp, Gossypium hirsutum
  Clone ID: GOSHI-09MAY01-C15097_1
tccaaatatactcactggtgaggcgagaggtgggaactttgcaagagataaaaaaaaattgagaatggtccaaaaatgaataaaggttcatcatcaatggcgaaagatcagtcaatctcagtttcagaagcagtacacaagattcaactccatctccttgacggaatccgagacgacaaacaactaatctcctctggttccttaatttctcgaagcgactatgaggatgtcataaccgagaggtcgatttccaacacttgcggttaccctctctgccgaaaccctttaccttccgaaccccgtcgaagaggccgttatcgaatctctttgaaagagcaccgagtttacgatttacaagaaaccagccgcttttgctccgccgattgcctgattaatagccgagctttcgctgggagtttacaagaagagaggtgttccgttttgaatcatgcgaaacttaatgcgattttgagtttatttgatgacgtggatttgaacgataaggatttggggaagaatggggatttagggttttcgaatttgaagattaagaaaatgaggaaataaaagctggggaagtttcttcggtgggtccttccaatgctattgaaggctatgttccacaaagagaattggtttctaagca

SEQ ID NO: 10114 - DNA, 617 bp, Gossypium hirsutum
  Clone ID: GOSHI-09MAY01-C15047_1
atcatcgtcatcgagtgccgtattgttttcatggatctagagcaaaatctgggaatcacgtctcacgtccaaaaccagcggagaaacactaagtggaaagttgcggagattgaaggtttcttcgaatgtgttcttcgtttaccatgaccaagatgggttcggaaacgccatcgcccgagctctcagtcctactccccatccttgtagtaaagccttcgagttagtcgacctggaattaggggatgcaaaactgaatgcctctattactcaatttatggatggagaaaatctaaaggcaacaatggtaatgttggatcatttggagccgccactactgtcacaggctataaattcagttctgactaaaatagcagatgcagagcacataccatctaccgtacccactatcatagccccttttcttgtaccggcatcaaagctgaagttggaaggtaggttgtttacaacaaatagcggcaagcttcctctctatagtatccaagtaggccccgagactgatgtaagtcgagccattgctgccaaaacccagaagccaccttcatctttgcaaattcattacgagcctttagcctgctttcttcacctggtccgtgctg

SEQ ID NO: 10115 - DNA, 674 bp, Gossypium hirsutum
  Clone ID: GOSHI-09MAY01-C15307_1
gtattgtcaggcatttttcttagttaagttgcagcaaatattttctgctattgggatgtgatttagaatggaaatttctttttagaattttatttggctattacgcttgttttgctgtctaacgagaaggaagagagtattttagaaaacattgaaaagaatttaatctcccctattcttattgaaaatgaccttgatattctgtgaatctgttaatagcatagctagcctaaaagtttaagttattatattagtgcctttattttgttgtttttggttctaatgtccacttcttgcccttagctgtctttatagttttatgatctattagttcctctattttttatatgataagagttgccacgtgatttgctatcttgcttctatgggatttcaagaaaaatatgttgttgaatgtacttgctcttttaggttcgtactttattattatggttatgctttttattccgacactttatgatttaagtaccagtgtccggaacccatggatgtgggagaacttggaaaaaaaattgaacatactcatctcagacatgccttcatacccatatctgacatgtctttatactgacacctaacactcatacctaagtccgggtaacatgggttttttctttttcaagttctaaattgtttacaatagtttttttgtt

SEQ ID NO: 10116 - DNA, 430 bp, Gossypium hirsutum
  unsure (1)..(430): unsure at all n locations
  Clone ID: LIB3146-016-Q1-K1-D10
aagannatcattgaacctaaaagtttaaggttatttatattagtgcnnctttattttggttttttgtgggttcttaatggtcccaacttttgcnnctttagcnntgtctttnnatagttttaatgatcccctattagtnntcctcttatntnnttttatatgaaataagaaagttgtnncacatgnnatttgcnntatcttgctnnntctatgggaaatttcaagaaaaaaatatgttggttgaatgtacccttgctcttttagggttcgtacttttattattatgggnntatgctntttattccgactctttatgatttaagtaccagtgtccganacccatgggatgtgggaaacttgaaaaaaattgacatactcattagcatgcttataccatattgcatgtttatctgcactacactatactggt

SEQ ID NO: 10117 - DNA, 826 bp, Gossypium hirsutum
  Clone ID: GOSHI-09MAY01-C15337_1
ccagcgtctattgaggcttcactcctttttaaagggacaaatattcagtgtacccaaactgagctttatctcttttgaaggacgaattagcattccaaatccaattcaggctccaactagcttgtggtgtaataacagagattgttgaaggcgaaactttggttgataaggtagttcgattcctctcatctcatctgcctgcgctttaaatcattaaaaaatggcttcatattccaaatttccaatatgtttccatttatcaaagcccttcctttccccttctaagccctctaagttttcattctttcacaacacatccatctctttccaaaatatccctactaaatccccacctccacttcaatcatcttcctcgagttccacccagctccagcccatagaagaactccctccaaagctccaagaaataatcaagcttttccaatctgttgaagaacccaaagccaagtacgagcagctgatgttttatggaaaaaacttgaatccacttgatacacagttcaaaactaaggagaacaaagttgagggctgtgtttctcaggtttgggtcagggcttatctcgataaaaataaaaatgttgtttaccaagctgattctgattctgttttaactaaagggcttgctgctttgcttgttaatggattgtccggaaggcctgtccaaaaagttttgagggttttctcctgattttgcagtgctccttgggctgcaacagagcttgacaccttcaaagaataatgggttcttgaacatgttgaagttgatgcaaaggaaagcacttgaactgcttattgaagctgaaaa

SEQ ID NO: 10118 - DNA, 671 bp, Gossypium hirsutum
  Clone ID: GOSHI-09MAY01-C15267_1
ataactagctttctactagttgtatattagcaaatcagtcgatgtggagatccttcaagtgatggcattgtagatacatggagaaaaatacattggaggaaacagttgaagcttgcttggagagagaatttgtgtaggacttgattgttagttttataggatatatatatatagttttcatgtggatgggggagggaagattttctttgatgtagtgttttcccactattgatatatgcctagtcttgtgctatattgcttttctacgtttctcatttttaggaaggcacctgaacgcccatcctcgacctgagaggttgctgctgtctttctttttgtacacagctcgtgtaatttcagcacatatgaagattttggacctgatatatatcgggtatagttggttgcacatatgagttaaccttttcttcctttgcactccctttgccggccaacgaccagctgccggtggttggctgtacctctccttgtcctatattctcttttccatgctcccttcctctttgaataataatccccactatgatttgtggtttcggcggttcttttggatagattcaatgctaatagcatcggaactaacgatttggaacgttttgggctattctctcttctgagctgggttttgctgagggctgggtgtggtgctt

SEQ ID NO: 10119 - DNA, 767 bp, Gossypium hirsutum
  Clone ID: GOSHI-09MAY01-C15207_1
tctttcggcttcccagtttctcgataggggggggggcgataaaacagtagttttttttttctttactttgcttgctgtacatatacatatagtattaagtattgaaccctgagggaaagcgttgtcggcgcagggtcactttctgtcggcattgtctgtatccaacgaggggtattcgtttctaagttattcattcaatttttaaattcagaactgaatttgcattccaaagctgtctctgtgttgtgttttttttttctttctcatttggtttcgatgatttggaccttccatctcgtttattaaagaaaaaaaaccaactacaaccattccaccaacttcatcaactattgctcacctcgattcctcatcactgctgtctctttttgtctgccctcaccatcccttctttttttttcaccttgatttcacccattcgcactttatcttattctggatatctctcggtttcttcccccaaatcgagtttcttgtttctcgcttctttcgatgtgggaatgcgggtgattctgctcctaaagagatcaatttgatttctcattgccaaatgaatgggaatacaggttaaatgtgtaataatttcaatcatagctgaagtagttcccataccagatgtcaacgaatcttgcaccaatattaggaggtgctgcagacccctggcattggtggggatagttggctcgcttatatggttctgcctatttcacaaacggggtgtgtcaagaacatccgagaacggatcttct

SEQ ID NO: 10120 - DNA, 663 bp, Gossypium hirsutum
  Clone ID: GOSHI-09MAY01-C15237_1
gaagcataaggtatcgatctgagtgtgccaaagagggaaaagtatgggactgctttctaacagaatcgataagaagagcctgaatccaggggatcacgtttattcatggaggactgcttatatttatgcccatcacggcatctatgttggaaacaataccgtcatccattttacaagacgtggccaacaagttggtacaggaactgtgcttgatctcatcctggtaagctctggaccagctcaatctcaactgcattgccctacctgcactccacctgaagaagggaatggtgttgcttcctcgtgcttggactgcttccttgctggtggaatattgtatcgtttcgagtatgcagtcacccctgctctctttattgcaaaagcaagaggtggaacctgcactcttgcagtctccgattcggatgatttagtggttcatcgagcaaaatacttgctcgaaaatggatttggttgctataatgtattcaagaacaactgtgaggattttgcgatctattgcaaaactgggctgcttgttctggatcattcagttggacgtagtggtcaagcaatatctattgtaggaggccctctcgcagctgtgttgtcaactccgttacgccttgttactacaaacatttatggcatggcagctacagcagt

SEQ ID NO: 10121 - DNA, 584 bp, Gossypium hirsutum
  Clone ID: GOSHI-09MAY01-C15227_2
ggcccgtgggcaagttggaagtagaagttgaaatggataaattaaattgtaaagggcgtcggagcaacagcaagagctcagtcccagccccagccccagcggtttgagtggcttgttttttgcttttaaccatttgcggttcaattcctttgttcgattgttcctcttgcagcttggccatcagcagcagggtggatgtgagatttgttacagtgaaacaacaaaaatggatatgtatcatccaagttcaaggctctcatcacaagaagaaatgcttaataatctcaatcgcaaaggtataggagagccttacctcgtcttgacttccgatcctaagcctcgtctccgttggactgctgacctccatgaccgattcgtcgacgccgtcactcaacttggtggccctaacaaagctacaccaaaggctatcatgcggacaatgaatgtgaaaggcttgactctttttcacttaaagagtcacctgcaggtttcttcattcttttcaatttttacctagtcaatttttttttacaaactcatagtttttgttagaaatgattctcttctggacatatttttactgt

SEQ ID NO: 10122 - DNA, 1351 bp, Gossypium hirsutum
  Clone ID: GOSHI-09MAY01-C15227_1
acggaacaagtatggaagtagaaggttgaaaatggataaattaaattgtaaagggcgtgggggctccagcaagagaccagtcccagccccagcggtttgagtgcttgttttttgctttaaccatttgcggttcaattcctttgttcgattgttcctcttgcagcttggccatcagcagcagggtggatgtgggattttttacagtgaaacaacaaaaatggatatgtatcatccaagttcaaggctctcatcacaagaagaaatgcttaataatctcaatcgcaaaggtataggagagccttacctcgtcttgacttccgatcctaagcctcgtctccgttggactgctgacctccatgaccgattcgtcgacgccgtcacacaacttggtggccctaacaaagctacaccaaaggctatcatgcggacaatgaatgtgaaaggattgactctttttcacttaaagagtcacctgcagaaatacaggttaggtaagcagtcagggaaggatatgggtgagggaccaaacgatgggatatcagcttcatatcttttagaaggccctggaaccaataattctaccattaacttgtcaactgccgacgtgaatgagggttatgaggtaagggaggcattaagggcacagatggaagtacagagtaaattacatttgcaacttgaggctgaaaagcacttgcagattcgccaggatgcagaacgaaaatatatggccatgcttgagagagcttgtaagatgcttgccgatcattttatcggaagtggtgcagttaccgaaacagataacctggaatttggttgtaagatgctgagaaattattctgttgatccactgggattttactcctcccaatccgctgaggtggagaatgcatgcgaccaggaagaagaaatgccatccggtctgcattcacagaggggcgatggttctactgaaagctgcctaacttcacaggagagtccaggaggattaacaatggagggatcacctgttgaagggaagaaaaagatggtcaacatggaggcaacaacaggatctgtgatatggggtgataccagggttaatccccaagggctaactggatatggaatgtagagatggaaaatgagtgctactcttttatgtttgctcaagttattattatagtatcaagtgaaaaaagatggtgatatatctattggttattagtgagagtttgtctcaaaattgtaaatccaaagttgcttatgcagtgctctaaaatagcaaaaacatgtcagtctcttagaatatattgacgtatgctgattttattggaaatttatggaatctctgaattccaaactaggaatg

SEQ ID NO: 10123 - DNA, 627 bp, Gossypium hirsutum
  Clone ID: GOSHI-09MAY01-C16967_3
gtacccttcttcaacaccaatctcctctctctctctctctctctctattttgtttgatagaatacccagaaaaccccttcagtcttctagctctcaatttctttttattttttaccttcttatttcatagatccagggtgctcttcttcttagttcacattggcatagataaaggaccgtacggtcagatctaagccgtattctagcgatgtcgtttaccggtactcagcagaaatgcaaggcttgtcagaagaccgtttatcctgtcgaacttttgtcggctgatgggatcccttaccataagtcttgcttcaaatgcagtcattgcaaagggacactaaaattgggtaattactcctcgatggaaggtgtcgtttattgcaagcctcatttcagcaactattcaagagtcgggggaattcaacagatttcagtcactgccaagtcagctgagagttaactccgagctgcaagatcacctacaagctgcagcatgttttcgggacacaagaaatgcgctactgtgaaaactgttatcactcagaggtacgtggaggcgtcgacacagtatgttcaatgcttatgtgctgccatactcataattgcgactgaagcatgatgaactcc

SEQ ID NO: 10124 - DNA, 881 bp, Gossypium hirsutum
  Clone ID: GOSHI-09MAY01-C16967_2
gttccatccatcaaaccatataatataatattccttatatggatatatatatattattctcttgtttctttgaattatttcccaatattttctcattatctatttcttctctaattccttagaacacccttttgactcttttacagcttttgaactttctctttaatttgatttcatttttttgttcatcttatttcatagatccaatacttccttctttcaacgtattaaacaacaaaatattgaattgaagctctagatctaaagcatatattggagccatgtcttttattggtacccaacaaaaatgcaaggcttgcgaaaagactgtttacccagtggaacttgtatcagtagatggggttcctttccataaatcttgcttcaaatgcagccattgcaaagggacattaaagtggggtaattattcatcaatggaaggtgttctttattgcaagcctcatttcgagcagctattcaaggaggcgggtaactacaacaagaattttcagtcacctgccaagtcagccgagaagttaactcaactgacaagatcgcctagcaaagcggctggcatgttttccgggacacaagacaaatgtgctacctgtgggaaaactgcttatccactcgagaaggtaacagtggaaggtcaatcttaccacaaatcatgtttcaagtgctctcatggtggctgccctttgagcccttcaaattatgcagcacttgaaggcattttgtactgcaaacatcacttttcccagctcttcaaggagaaaggaagctacaatcatcttatcaaatccgcatcaatcaagcgtgccgctgcatccgttcctgaagcttgaatacctatttcatgttcttcgtctattcccatg

SEQ ID NO: 10125 - DNA, 971 bp, Gossypium hirsutum
  Clone ID: GOSHI-09MAY01-C16967_1
ctctcttcctcctccaccatcatcatatgatacacgtctaaagcatctgggcgctgcaaaaagtacacaatctcccacttcctcttttacactcccttcatttttggtctttgaaaccccataagcccttttcactcctttttatactctcattttacgtttatttcttctttctttcatagatccaggccttcttcttcttcttcttcttcttcttctatcaaagttaatataggcaaatataagagaagaaatcgaattaaagtttatctgtggaactagataaagaacagtacgatttgttttgatccaaagcacattcgagccatgtcgtttattggtacccaacagaaatgcaaggcttgtgagaagactgtttatccagttgaacttttgtctgcagatggagttccttaccataaatcttgcttcaagtgcagtcattgcaaagggacactaaagttggctaattactcctcaatggaaggtgtcctttattgcaagcctcatttcgagcaactgttcaaggagtcggggaatttcaacaagaatttccagtcacctgcaaggtcagctgagaagttaactcccgagctgacaagatcacctagcaaagccgccagcatgttttccgggacacaagaaaaatgtgctacttgtggcaaaactgcttatccactcgagaaggtaacagtggaaggacagtcgtaccacaagtcatgtttcaaatgctctcatggtggctgccctataactccatcaaattatgcagcacttgaaggcattttgtattgtaaacatcacttctcccaactttttaaggagaaaggaagctacaaccaccttatcaagtctgcatcgattaagcgcgcagctgcctccgttccagaagcttaaatccgtgtgttaatatccatatcatttcgattttttccttctttcctcgtgattgccggtgtgtttgatttatg

SEQ ID NO: 10126 - DNA, 517 bp, Gossypium hirsutum
  Clone ID: LIB3584-047-P1-K2-G8
cccacgcgtccgcccacgcgtccgctccctagcaaacaccggatgtgtttgatgtttcgattaattgggaaaaattcgttatagtgtgtcataatgtttttgctaactcctaatagctcgtgttaatttcagacaagatcacctagcaaagctgccagcatgttttccgggacacaagaaaaatgcgctacttgtggaaaaactgcttatccactcgagaaggtagcttttgagatccattaaatcattagatgagaaatctgtcttttctgcaattgccggactccaattttctggttatctatatgccctcttctaaacccaactcttactcctgattggtccgtgtggcctgccacatccatccgaacctttacgatctttacttcttggtttgctctttctttttgatagaataaggtgtagtgtaaatcctataatagttcaaagatgcaagactggctcggctcagttttccttctaccgtatgctttatctcattgctgctaggtttagg

SEQ ID NO: 10127 - DNA, 562 bp, Gossypium hirsutum
  Clone ID: AI731610.1
attttttaccttcttatttcatagatccagggtgctcttcttcttagttcacattggcatagataaaggaccgtacggtcagatctaagccgtattctagcgatgtcgtttaccggtactcagcagaaatgcaaggcttgtcagaagaccgtttatcctgtcgaacttttgtcggctgatgggatcccttaccataagtcttgcttcaaatgcagtcattgcaaagggacactaaagttgggtaattactcctcgatggaaggtgtcgtttattgcaagcctcatttcgagcaactattcaaggagtcggggaatttcaacaagaatttccagtcacctgcaaagtcagctgagaagttaactcccgagctgacaagatcacctagcaaagctgccagcatgttttccgggacacaagaaaaatgcgctacttgtggaaaaactgcttatccactcgagaaggtaacggtggaaggacagtcgtaccacaagtcatgtttcaaatgctctcatggtggctgccctataactccatcaaattatgcagcacttgaaggcattc

SEQ ID NO: 10128 - DNA, 453 bp, Gossypium hirsutum
  Clone ID: LIB3585-010-P1-K1-B2
cccacgcgtccgaaataatcaaagccaccatagttgagtttggttgaaaccaatgacttgttccatccatcaaaccatataatataatattccttatatgtatatatatatattattctcttgtttctttgaattatttcccaatattttctcattatctatttcttctctaattccttagaacacccttttgactcttttacagcttttgaactttctctttaatttgatttcattttttgttcatcttatttcatagatccaatacttacttctttcaacggtacatttttctttttaatccctttatttttttaaagtttcaatctttgatccagttattgtttactattgggtttaagctctcaaattagatcatctaaggaatcttgatgtcatttatgactccttatgaaaatcccagattttaaggattagagtccatgtttttgt

SEQ ID NO: 10129 - DNA, 468 bp, Gossypium hirsutum
  Clone ID: GOSHI-09MAY01-C16907_1
ggaagaggaggatcttgtaaatgctcatagaaaacaggtggagactatgaacattgtcaaagaggaggtgaacctgctggttgaagcagaccgacctgggaagcagcaggacggttatatatctagactgaatgctattttttcgcagaaggctgacgacgtcgtgcagttacaaacacaatttgctcatttcgagaagctttacaggagcagaacattttagtgtcttgttctggctattggtgttcagggatgaagagtagtaagccagagtggtgcaaccatgggtttgcttgatgattcactgattgccattcaacacccttcccttctttcttttaaattatatatacagccttcaagcaataggcaaaggaagtgatggatttacatgcccttgtgcaggccagcagcattgtgattggatgcattatttgaatatgtcacaccatctttattttatgtaaa

SEQ ID NO: 10130 - DNA, 539 bp, Gossypium hirsutum
  Clone ID: GOSHI-09MAY01-C16937_1
caaaaagggggaaaaaatcactgaacccaacagaaagctaaaacttattactaataatttcaaagaaaaaggagcgtcatcatcgaagcggaagcgggattcgcggtggtaactatactgcgatgccttgttcttcgatcgagactagcaataatttttgtggtggcggtgacggaggtgatgtgaatgggcgtattcacaatttcaagctgaacgagcacactttcttagcttctctgatgccgaagaaggagattggcgccgatcgcttcattgaagctcatcctcattacgacggtcgcggcgccgtcatcgcaatctttgattctggtgttgaccctgctgcttctggcttgcaactgacatcagatgggaagccaaagatcttagatgttattgactgtacccggagtggagatgttgatacctcaaaagtggtgaaggctgataaagatggtcgaattcaaggagcttcagggcttcattggttgtcaattcttcttggaaaaaccttctggtgagtgcatgtgggctataaa

SEQ ID NO: 10131 - DNA, 1134 bp, Gossypium hirsutum
  Clone ID: GOSHI-09MAY01-C16847_1
cccacgcgtccgctcgcgttgccgtcgcatatccgccgccggagttgataggatgtcgagtcggcctgaattgcaagccccgccggagattttctacgacgacgtagaagctcgaaaatacacttcctcatctcgtattgctgaaatacagacaaagctctctgagagagcactggaacttctggctttgcccgatgatggagtcccaaggttgctccttgatatcggttgtggatcagggcttagtggggagacaataactgagaatagtcaccaatggattggtttcgatatttctgaatcaatgcttaatgttgctttgcaaaatgaggttgaaggagatttgttacttggtgatatgggtcagggcttaggacttcgacctggagttatcgatggagctattagtatctctgctgttcagtggttatgcaatgctgacaagtcctctcacgagccaagattgagattaaaggcttttttcggatcattatatagatgcttagcaaggggagctagagcagtgctccaagtatatcctgaaaatctagcccaacatgagctaattttgagttatgcaatgcgctctggatttgctggtggcgtggttgtcgattacccgcacagtaccaagaagagaaaagaataccttgtcctcacttgtggcccgccgtccctcagctctgtcgttcccagtggaaaaggtgaagacggagagagttgttctgatgatgagagcagtggagatgaagaaaatcagacggtttgcatttcggacaggcatagacctcagaaaaagcagaaagtaaacaagaaagggaagggcagagaatgggtgttgaggaagaaggaccagatgagaaggaaagggaatgtcgtcccccctgacacgaagtacactgctcgaaaaccgaaagctcgtttctaaccagctacgatattatagatctgaaagttttgggatgaactagttttacatatttcatggtttattatccctttgaaagtcatagttaacgagtctaatggttgatttaaggttttggttcttgtatcgatacatacatatctctgtgttttggttttaagaaaatattgatatatataatatatatggatgtgttttggttttgg

SEQ ID NO: 10132 - DNA, 512 bp, Gossypium hirsutum
  unsure (1)..(512): unsure at all n locations
  Clone ID: LIB3828-024-Q6-K6-F5
caaacaccatcgcgttgccgtcgcatttccgccgccggggggggggggatgtcnagtcggcctgaattgcaagccccgccggtgattttctacgacgacgttttttttttttatccacttcctcatctcgtgtggggggggggcggacaaagctctctgagagagcactggaacttctggctgtgcccgatgatggagtcccaaggttgctccttgatatcggttgtggctcagggcttagtggggagacattaactgggaatagtcaccaatggattggtttcgctctttctgaatcaatgcttaatgttgctttgcctaatgaggttgcaggagatttgttacttggtgatctgggtcagggcttacgacttcgacctggagttatcgatggagctattagtttctctgctgttcagtggttttgcaatgctgacttgtcctctcacgagccaacattgagattaaaggcttttttccggtcattgttttcatgctttgcaaggggagct

SEQ ID NO: 10133 - DNA, 608 bp, Gossypium hirsutum
  Clone ID: GOSHI-09MAY01-C16817_1
tctttttatttcatgacaagtctcttgcaaatgaagatacttatgaacctttcctaagattgctctggaaaggtaactggttcatacaagaaaagagctgtaagatacttgccttgatagtaagtgccaggccaaaaacccagaatggtgttgttgcaaatggagaagcctcaaactcgaagacaaagctcactaccattgatgctgtactaagaggattggttgaatggctttgcacacagctgaagaagccttaccatcctagtcgtggtattccaactgctattaactgtcttgcagcattgctgaaggaacctgttgtcagatcctcctttgttcaagcagatggagtgaagatgttgattcctttaatttgtccagcatccacacagcaatctatccagcttctttacgaaacatgtctctgtgtgtggctttgatcttactatgaaccggtaatcgaggacttggcaacatctagggctctaccccgactggttgatgttgttaggagttccacgaaggagaaggtacatgtggtgctcagatggttgaccttggattgccacaaattattcagagtttgaaagcacaagcatggagtgatg

SEQ ID NO: 10134 - DNA, 673 bp, Gossypium hirsutum
  Clone ID: GOSHI-09MAY01-C16837_1
gtgtttttgaaaagaaatctcgagaacctctcttcattctctatttcctccgtgaaagctgctgttgtgctgatccaagtgataaaccagtgtaaagatgagcgttgttgggtttgattttggcaatgagagctgcattgttgctgttgcaaggcagagagggattgatgtagtgcttaatgatgaatcaaagcgtgaaactccggctattgtgtgctttggggagaagcagagatttattggtactgcaggggcggcgtcttcaatgatgaaccctaaaaattcaatttctcagattaaacggttgattggccgtcaattctcagatcctgagttgcaaagggatatcaagtcgttacccttcaatgtcactgagggccctgatggataccctctgattcatgctcgttatttaggtgaaatgagaacgtttactccaactcaagtcttgggaatggttttttcgaatttgaaaagcatagctgagcagaatctgaaagcagccgtggttgattgttgcattggtattccagtatatttcactgagcttcaaagaagggcagttttagatgcagccacaattgcaagcttgcatcctcttcgcttgatccatgaaactacagcaactgcattggcttatggcatctataagactgacttacctgaaaatgac

SEQ ID NO: 10135 - DNA, 1099 bp, Gossypium hirsutum
  Clone ID: GOSHI-09MAY01-C16507_1
gtcaatggagaagatttggcaagtggggacaggctaatgttccttccatgtggtctaaaagcaggttcttcaattacagtcgttggcactcctcgatatgctcatcaggagtacgtaccccagcttgcaaaaacgaggggtggtaatggcctagtgatggtttcacagtttatggttgagttgcaaggattgcagcccggcgtccgggaagctccaccaaagattttacatttgaatcctcgattgaaaggagattggagccgcaagccagtcattgagcataatacatgttatagaatgcattggggtacggctcaaagatgtgatggtttgccatccaaggacgatgaagacatgctcgttgatggatatcgaagatgtgaaaaatggatccggaatgatgttgtagactcgaaagagtccaagacaacttcttggtttggacggttcattggaagggcacagaaaccagaagttacctggccatttccttttgcagagggcaggctttttatcctgactctgcgtgctggtgttgatggataccatatcattgttgggggtcgacatgtgaccccacttcctccgcgtacgggtttttcacttgaagatgcgacagggctggccataaaaggagatgtggacattcattctgtttatgcaacctctcttcccacctctcatccaagtttttccccccaaagagtactggaaatgtcaccaaaatggaaagcttctcccttgcctaagagatctattcgactttttattgggattctctctgctactaatcactttgcagaacgcatggcagttagacaaacttggatgcaatcttcagccatcaagtctttagatgtagcggtccgtttctttgttgcactgaatcctaagaaggaggtgaatggagtgctgaagaaggaggcagcttattttggcgatattgtaattctgccatttatggaccgctatgagcttgtggctcttaaaactattgcaatttgtgaatttggggtgcagaatgtgactgctgcttacatcatgaaatgtgatgatgacacatttgttagagctgacagggtcttgaaacaaattgatc

SEQ ID NO: 10136 - DNA, 459 bp, Gossypium hirsutum
  Clone ID: GOSHI-09MAY01-C16527_1
gaaagtctcagtgtttttcaagggttttgagagttctcaaatcatacatttacatcctcctccactccctcgatatgatcctctaaaagaaaaaaacaaaatccaaacctaacccagaacttgcagcaaatcaattatggcgaccatgcccgcatccgcatcagatctgttgaagtccttcaaacttcaaaaccaagcaacaagaactcttgatccgagtctccatcctctgtctcgtctacatcttggcattcatcactcgtctcttctctgtcctccgttatgaatccatgatccatgaatttgacccctacttcaattatcgcaccactctgtacctcacggagaacggcttctacgatttctggaattggtctgactatgaaagctggtaccctttaggcccgatcgtcggcggcaccctttaccccggtctcatggtgaccgccgttctcattt

SEQ ID NO: 10137 - DNA, 915 bp, Gossypium hirsutum
  Clone ID: GOSHI-09MAY01-C16497_1
ccccgcgtccgcccagcgtccgccctgcgtccgaagcagacacattaattgagcagatgactcgggatcaagatcctattatccgttatggtggtatgtatgcattagcattggcctataggggaactgcaaacaataaggctattcgtcagctgctgcactttgctgtatcagatgtgagtgatgatgttaggagaactgctgttttagcgctggggtttgtcctttactcagagccagagcagactcctcgaattgtctccttactgtctgagtcttacaaccctcatgttcgatatggtgcggcacttgcagtgggtatttcatgtgctggcactggattgagtgaggccatatcattgttagaacccttgacatcagatgttgttgattttgttcgccaaggtgctcttattgcgatggctatggtcatgattcagatcaatgaagcaagtgattctcgtgtcgggacattcaggcgtcaacttgaaaaaattatactggataagcatgaagacacaatgagcaagatgggagcaatcttggcctctgggatccttgatgctggtgggaggaatgtaaccataagattgctttccaagacaaagcatgacaaagtcaccgcagttgttggtcttgcagtttttagccaattttggtattggtatcctctcatttattttgtaagcttgtcattttcacctaccgcttttattggactgaactacgacctgaaagttccaaaatttgagttcttatcacatgcaaaaccttcgctttttgagtatccaaaacctactactgtgcccaccaccacatctgctgtcaaacttccaactgctgtcctgtcaacatcagcaaaggctaaagctagggctaagaaagaggcggaacaaaaggcaaatgctgagaaat

SEQ ID NO: 10138 - DNA, 656 bp, Gossypium hirsutum
  Clone ID: GOSHI-09MAY01-C16797_1
cccacgcgtccggttaaagctctcttctcgttttccttcttgttcagagaggatcaaggatataatactccagaataaacgaagctttgtgcttgagttgcaacagagatctattgaatttaattgtattcttcagaagcatcagaacattagatctgcactggttgaaaggatgccagttttggatgaggcaactttcagtggaaggagagctggctcgttgccgacatctgtttcaacttccactgggacagcacgtaatcttccaaatggaattgctaaaccagctgcagctcctgttgcagacttacttgacctaagttcagatgatgcccctgcacctaactcttctggtggtgattttcttcaagatcttcttggtgttgatttatcccctgcttctgcaccaccaggcacaagtcagcctccaaaagctggtacggatgttctgctggatcttttgtcaattggaacatctcctcctgcacaaagcagctcatctgcatctaacatattgtcctccattcaagacgacaaaacatcacttgtcaatttaaatggccttgcatcacttacgtcactttctccaaatgccacttctgcaagtcctgctccaatgatggatttattggacgggtttggccccactcctcaaa

SEQ ID NO: 10139 - DNA, 585 bp, Gossypium hirsutum
  Clone ID: GOSHI-09MAY01-C16747_1
gcgaaaaaaaataagaaagagaatgaaatcaaatctttagatttattcatttaattttctctcttttgctctcatttcctgcaactccgatctataaaattccatcgtttgttggaaagagcaagagaggaaaattaaatcaaagataaaacgattattagcaataaaggacgacaatgaagaactgtgaaagactcgctaatttagctttagcagggttgacgttggcaccacttgttgtgaaggtggaccctaacttgaatgttattttgactgcatgcctcgcagtatatgtgggctgctatcgttctgtcaagccaactccaccattggagacaatgtctaaagagcatgctatgcgttttccgttcattgggagtgcgatgctgttatcacttttcttactgttcaagttcttatcaaaagacttggttaatgcagtattgacatgctatttctttgtgctaggaacctgttgccctttccgcaacaatattgcctgccatgaaacgcttcttgccaaagcattggaatgaggaccttatcatttggcgttttccatacttcgatctttggagatcgagt

SEQ ID NO: 10140 - DNA, 465 bp, Gossypium hirsutum
  Clone ID: LIB3582-020-P1-K1-E10
atcctctataagaattcaatatttacgaaaatatatattttgctctcattatactacaacgggggtggtataaaaatccataaggttggtggaaaaaagcaagaaaagaaaaattaaattaaagctgcctacgattattagcacttaaggacgacactgaacaactgttaaagactcgctaatttacctttagcagggttgacattcgcaccccttcgttgtgaagaaggaccctacctcagaatcttgtttttactgcatgccgttgagtatatgtgggctgctatggttctgtcaacccaactccaccattgtagacaatgtctaaagagcatgctatgcgttttcctttcattgggagtgcgatgctgctatcactcttcttactggacaagttcttatcaaacgactcggccaatgcagtattgacatgctctttctttgtactaagaactgttgcccttt

SEQ ID NO: 10141 - DNA, 747 bp, Gossypium hirsutum
  Clone ID: GOSHI-09MAY01-C16707_1
tgcctttggaatgatggctgcagttttagtctcattgattgagtcaaccggagcttacaaggccgcctcacgtctagcaagtgcgacaccccctccagctcatgttcttagtcgtggtattggttggcagggcattgggatccttttgaatgggctatttggaacactgagtgggtcaacagtctctgtagaaaacgtggggctccttggaagcactcgtgttggaagccggagggtcattcaaatctcagctggctttatgatatttttttcaatattaggaaaattcggagctctgtttgcatcaataccttttaccatatttgctgctgtgtattgtgttttgtttggtcttgttgcatctgtagggctgtcgttcttgcaatttacgaacatgaactccatgaggaatctctttatagtgggcgttgccttgttcttaggtttatctgttcctgagtacttcagagaatacactgccaaggctcttcatggtcctgctcatacgagaggcggctggttcaatgatttccttaataccatattcttttcatctccaactgtcgcattacttgttgctgtgttcctaaaccacacactagactaccaagaccgtgccagagatagaggaatgccatggtgggttaaattccggacatttaaaggagatagccggaatgaagagttttacactctccctttcaacctcaaccgtttcttcccaccatcataaactattcgtcctct

SEQ ID NO: 10142 - DNA, 444 bp, Gossypium hirsutum
  Clone ID: GOSHI-09MAY01-C16657_1
ccctgcactgctacaattcgacacgaggcttcaatctatgtgccacaaaaccctagcgtacatactccacagacattgtcgtttactctcggcatccatggatattgaggctgagatccgtgcactgcagcttgactctgctgaagataataatgccacgctcattcctgaagatgcaaaaccagaagaagttgaaatgacagataaggtggaggaggaaggtatgacggatgaggttgatactaaatctcagccagtccaggctgagccaaaagtgaaagacaaggaagtagctgatatggattgtgcagaagtaccagatgaaatggaatcacaaaagaagcgccacttgaatgtggtctttattggtcatgttgatgctggcaagtcaacaactggaggccagatactcttcctcagtggtcaggttgatgaccgtacgat

SEQ ID NO: 10143 - DNA, 419 bp, Gossypium hirsutum
  unsure (1)..(419): unsure at all n locations
  Clone ID: LIB3197-028-Q1-M1-F9
attctctctttgtcgtttgccgcgaaaccctggtgtctttacacattgtccccttctctcggcacccatggatattgaggccgagatccgtgcattgcagcttgactctgcagaagataataatgatgtgggcaatcctgaagatgcaaaactggaaaaagttgaaaaggaagatgangtggaggtggaggttgaggtggaaggcatgaaggatgaggttcatggaagatctcagccaggacaggcagagccaaaagtgaaaaacaaggaagtagttgctttggaggatgctgaagcacaggaagagatggaaacaaataagaagcgccacttgaatgtggggtttattggtcatggtgatgactggaaagctacaactggaggccagatactcttcctcagtgggcangtcgatgacc

SEQ ID NO: 10144 - DNA, 367 bp, Gossypium hirsutum
  Clone ID: LIB3083-109-Q1-L1-A1
gaaagaacagctcccgagcaaccagcgccgccctatttgccacaaaaccctagcgtacatactccacagacattgtcgtttactctcggcatccatggatatcgaggctgagatccgtgcactgcagcttgactctgctgaagataataatgccacgctcattcctgaagatgcaaaaccagaagaagttgaaatgacagataaggtggaggaaggtatgacagatgaggttgatactaaatctcagccagtcgaggctgagccaaaagtgaaagacaaggaagtagctgatatggattgtgcagaagtaccagatgaaatggaatcacaaaagaagcgccacttgaatgtggtctttattggtcat

SEQ ID NO: 10145 - DNA, 469 bp, Gossypium hirsutum
  Clone ID: GOSHI-09MAY01-C16607_3
ggttaactttccttcctagtcttccacttcaacaatgggtgagaaatgaataatcccactaccgacactgtctttcgtgtaaagcttcagacataccattaaagggtacagagattgagggaaaactacttgtgggacttcaaccccccctccccccccccaaaaaaaaacctgttttttctctttctgtctctgcaataaactggaaggagcagacacagagacagggagagacagagagagagagagaggtgtaggggagacagtatggctaagttaatctaaggataagatttgatccatctctcttatggtttcctttttctttggatgaagttcagaagaagcagattcaaggatattgagaagaagtttctaaagattttttcaagctagctatgggaactcttgcaatcgataccgagtgtgtggattctgacatataccgtgctttgggattcaaagaatt

SEQ ID NO: 10146 - DNA, 628 bp, Gossypium hirsutum
  Clone ID: GOSHI-09MAY01-C16607_2
ggaagaagtttctaaagattttgtaagtcctttttttttttgtcttcacttgttttctttacctaattttgggtgtgtgttttgatcagatttggtttgatgggttttgcttaagttctcataattctttttgagctcttgtatgtgagcaaggaaacttggaatttttttaggttaagctagctatgggaactcttgcaatcgatacggagtgtgtggattctgatatataccgtgctttgggattcaaagaattgggtaaaggagttgttggaactccacggattttatcacttctttcttcgcttcttgaggaatccgtccaaagaaacgagatggagtccgagacggtgaacttcaaagataatgttgccatgtttcatgggttaagagctcccaccataagcattcagcattatatcgatcgcatcttcaagtatgctggctgcagtccgtcgtgctttctcgttgcatacatttatgtcgatagatttgttcaacaaacggatgtgcatttgacttcccttaatgttcaccgactcctcataaccagtgtattggtagccgcaaagtttattgatgatgcgtctttcaacaatgcatattatgcgcgagtggcaggggtaac

SEQ ID NO: 10147 - DNA, 912 bp, Gossypium hirsutum
  Clone ID: GOSHI-09MAY01-C16607_1
ccccgcgtccggtgagaaatgaataatccactaccgacactgtctttcgtgtaaagcttcagacataccattaaagggtacagagattgagagaaaactacttgtgggacttcacccccccccaaaaaaaactgttttttctctgtctctgcaataaactggaaggagcagacacagagacagggagagagagagagagagagagagagagagagagagagagagagaggtgtgggggagacagtatggctaagttaatcaaaggataagatttgatccatctctcttatgttttcctttttctttgtataaagtccagaagaagcagattcaaggatattgagaagaagtttctaaagattttgttaagctagctatgggaactcttgcaatcgatacggagtgtgtggattctgatatataccgtgctttgggattcaaagaattgggtaaaggagttgttggaactccacggattttatcacttctttcttcgcttcttgaggaatccgtccaaagaaacgagatggagtccgagacggtgaacttcaaagataatgttgccatgtttcatgggttaagagctcccaccataagcattcagcattatattgatcgcatcttcaagtatgctggctgcagtccgttgtgctttctcgttgcatacatttatgtggatagatttgttcaacaaacggatgtgcatttgacttcccttaatgttcaccgactcctcataaccagtgtattggtagccgcaaagtttattgatgatgcgtttttcaacaatgcatattatgcgcgagtgggaggggtaagcacggcggaactcaacaggttggagatgagcttcctgtttggtctggatttcaaacttcaagtaactgtgaatacattccaaagatactgtta

SEQ ID NO: 10148 - DNA, 791 bp, Gossypium hirsutum
  Clone ID: GOSHI-09MAY01-C16637_2
ccctggaacagttactttttcgacccgtccatctttttctcttcttcccagcagaaataataatagcaataatcatggagtccaaacatgggagttggagactctcattaatgttgcttctggttatgcttgggttggcaaaagctgatatcaatcaagacaaaacagaatgtagtaatgagctagtagggctggctccatgtctcccctacgttggtggagacgcaaaaacccccaccatagattgttgcagtgggctgaaacaggtgctggataagagccggaaatgcctgtgtgtattgcttaaagatagagatgaccccagccttggcctcaacatcaacgctactctcgcggcaacacttcctatcacttgtcgtgcccctgtcaacatgaccgactgcatctctcttctgcacttaactcccgattcccaggaagctaagttatttcaaggatatcagaagctgacacacactggcaactccaactccactaccactgctgctgctgctgcagacaagagtgatggaggaaaggcaaagaagtgggtgggagtagagatagcgttcggagtttcactatggattttcaccataaaccggaaccttggtgtgtgattgatttcttctataaacggtggatccagtttttatgtgtcgtacattctctttcattcacttgtcttgctttgcccaacaattcctggctagatgtagatcacatgtggactaaagctttttatttcttacctcccatcatcaaaacaaaacaacatattgcttgccttc

SEQ ID NO: 10149 - DNA, 537 bp, Gossypium hirsutum
  Clone ID: LIB3829-024-Q6-N6-E7
aaaaaaaataatatatactttagcctttaaacttgacaacttatacttaacttgtgcctgaacttttttcagatctaactagtacatgaacttggaaactattaaccaagtcgggtttttttaagtacttggtcgacgccattaaattttatgctaacagctgatagttcttgaaaagttatcgtttataaacagcataaactgcctaatataattgattctcgtaatatctaacacactgttgagcagaaaaagacacgaaagaattagaaatgcatttatacgtattatgtctatttaccggccactcctttcttctttggcttcgagagcgtctacttcctcattagataaaaggtcaagaacgggtttataataatcccactcctttcttttccggacaacacttgacctgaaactgaataacttcatcaagtccagtgcagcaccactagctttactgggagtgaaatgttcagcagcccgacgaccctttttgcttattctgttctcccttgctgaagttacattttgaat

SEQ ID NO: 10150 - DNA, 369 bp, Gossypium hirsutum
  Clone ID: LIB3083-094-Q1-L1-F1
gtaacttcagcaagggagaacagaataagcaaaaagggtggtcgggctgctgaacatttcactcccagtaaagctagtggtgctgcactggacttgatgaagttattcagtttcaggtcaagtgttgtccggaaaagaaaggagtgggattattataaacccgttcttgaccttttatctaatgaggaagtagacgctctcgaagccaaagaagaaaggagtggccgaaataataatagcactaatcatggagtccaaacatgggagttggagactctcattaatgttgcttctggttatgcttgggttggcaaaagctgatatcaatcaagacaaaacagaatgtagtaatgagctagtagggctggc

SEQ ID NO: 10151 - DNA, 442 bp, Gossypium hirsutum
  Clone ID: uC-gsronu33B104a08b1
cccacgcgtccgggttaccataatctcactggcttcccttggtggataactattgtaacttccaccatggctatgagatttgcattgtttcccgtagtagttattcatcttcaaaagctgaaaaagattggagagttagctcctaaatgtatgtttcttttatcattatttaaagtcataacatcgcttgcttggagtatgaattagtcaagaactcaagatagtagggttcggctttatgtatgccgatcttgcattgctcgagtaattaatctagccgaggtctggtttttttgtattggacctagtggcttgtgttgtgagttagatatggtttatacttttccttcaacatcttctaatattatacacatacttagtaaaatataaaaattgttttcataattatacactttatttgatttgagtttaaatttattat

SEQ ID NO: 10152 - DNA, 395 bp, Gossypium hirsutum
  unsure (1)..(395): unsure at all n locations
  Clone ID: LIB3197-021-Q1-M1-G11
cctaatcttccggcgcgcgtctccccaatcccctaccccgccactcggtcctttttcacttcgtccaacaatgttgaagaatctatccttccggttcgtgcaatcgtatcattgcttgatggttaccataatctcactggcttcccttggtggataactattgtaacttccaccatggctatgagatttgcattgtttcccgtagtagttattcatcttcaaaagctgaaaaagattggagagttagctcctaaattgccttctccattgccaccacctatgtcaggaagaagttataaagaccattttatacattttgagaaggaaagaaaggcaaatggatgcccctcatatttttgggtctttagcttcttcttactcangtcccatgcctt

SEQ ID NO: 10153 - DNA, 405 bp, Gossypium hirsutum
  Clone ID: GOSHI-09MAY01-C16147_1
cggacgcgtgggctgtgaacaccaaggcagctctcaaacaagaaaactagtttttatttcaatccaagtttatgagtataggttttgcatggggttctattaaaaacctaaacaaatttcattcaatagctatttgatctcatcataaggaattcagcaagcaatgttatgatggagatagaatccaataaaccagcagggaatgggatggtgatcggtggtttaagtcctttaagtgaaaccttatggagagagaagactaacaccgagtttgtaggagatgtatcagcccgactcactttggaaagaatctcaccgtaatggtaactctcaacaatggtgaaactcaaaaagtacttgaaggactcactggttatgctgaaccaggtactttaacagctctaa

SEQ ID NO: 10154 - DNA, 511 bp, Gossypium hirsutum
  Clone ID: GOSHI-09MAY01-C16167_1
attatctttcagcgtcccagaccctaccttcgaatcgtggctccgagactccggctacctagacgtcatcgacaaccaacagaccgccgctgctgccgctcccaccaccggtacttccacgattagcgacccaacaataaccatcccaatcagcagcttccttttccgatatttggtctcttttttctctcatttatggacgctactctctctactcacgttcaacccattcgccaagctcaccaccaacgatttctccggtgaaactccgtcgtggactaaagggttcttcgcggatttcttgtcctattcgtttccagcttcggcttctcaagcgaggcttcagggttcaagagaatgttaagcgttatgctcggaattaatgcttcactttttatcctcttcttcgcttgggtctctggatcagctgccacttgcacttgttgggttgatatcaagtttggcactttgggattcattcaggttcttcagtgataaatgggtttgaatc

SEQ ID NO: 10155 - DNA, 424 bp, Gossypium hirsutum
  Clone ID: GOSHI-09MAY01-C16117_1
gttcagttttggaactgaagtgttcagaggggtttcttactctattgtggaaaaaaaagaggattttggaggttataattagacaagaagatgaattctggttctaaacaaggtttgttttgtctaaaatggccttgggatgttaacaaacagtctaaaagttccaatctttgtacctttgaaggtccttggttattcaaatctatgcaaaatcttggttcctttgttctaaattcattcaattcagtttcgggtttaaggtttagtaatttaaaccctacccaaatagcttttggggttagtcaaaatgagaacttgaagtttaaaaggaaaccattgagtcctgatgaacaaggggaagctgaacagagggcttttgcatcggcattggctagtgggaaatctgctacgtgatcgagtttac

SEQ ID NO: 10156 - DNA, 594 bp, Gossypium hirsutum
  Clone ID: GOSHI-09MAY01-C16107_1
gattaaaagaatatataagaaagaaaagatttccaatctgtaatcagtgctagggtcctttggattgatgataatgatggggcgttttgcgcttcttgtcttcttagcgttcgcgtcgatgcagcttctctgcattgccgctgatcatgatgctgcgattttttatgattcatttgaagagccattcaatgggcgatggatcgtctctgataaagatgattataaaggtatatgggagcattcaaagagtgaagggcacgatgactttgggcttctagtgaccgagaaggcacggaagtacgcaatagtgaaagagctggaggagcctgtgaatctcagggatggaaccactgtgcttcagtacgaggctcgcttccagaatggacttgaatgtggtggtgcattacctgaaataccttagacctcaggaaagctgggtggaagcctaaggaatttgacaatggatccccttactctatcatgtttggacctgacatatgtggattaacaaacaaggtgcactttatcctgaagcagaagaatcctaaatctggggaatatgttgaacatcatcttattgacccacccgcgcgt

SEQ ID NO: 10157 - DNA, 455 bp, Gossypium hirsutum
  Clone ID: GOSHI-09MAY01-C16127_1
gagagggggagaggacaggaagaaaagaatatggtgggggcttcgtctttgcatccaagactcctctcttcttttgttggtgatcgtttagctcaatcgagacaaccacttgctcagctatttcattacaacccaggtcgtaagcatatatcaatgcaattatccagaacgttttctggcttaaccaatattttatttaatagaaggaacaatttggacgaagttccagatggcaagcgcaaacgtctgagacctgggaagttatctcctcgtcgacctgttccaaatcatataaaaaggccaccttatgtcaaaactcgtatggcacctggaattgctagtggcccggaagtgcatgatctaaagggcatagaacacatgagagcttctggaaggctcgcagctcaggttctcaattatgctgggaccttagtgaagccaggcataacaactga

SEQ ID NO: 10158 - DNA, 673 bp, Gossypium hirsutum
  Clone ID: GOSHI-09MAY01-C16057_1
ccaaaactgaaaacaagcgttcagaacacaggcattatcaatagcttacatcatcattctcttccatttcaattcagtttctcacaaaaccctaaaccctgcctttcccttcctcaatcatccaatgacggagctgaaactctccgagagccgagacctgacccgaatcgaacgcattggggctcattcccacatacggggcctaggcctcgactcctctctggagccccgtgacgtctcggaaggaatggtgggccaagcacaagctcgtaaagccgccggtgtcatcctccaaatgatcaaagacggtaaaattgctggccgtgctatcttattagcgggacaacctggaactggcaaaactgccattgccatgggcatggcgaaatctcttggccttgaaacccctttctcgatgctctctggcagcgaaatcttctcccttgagatgtcgaaaaccgaagctttaatgcaagcgtttcgaaagtccatcggagtaagaatcaaggaagaaactgaaataatcgaaggcgaagtcgttgaaatccaaattgaccggccggcagtttctggggcggcttcaaaaactgggaaattaacgcttaaaacgacggatatggagaccgtttacgatttgcgggcgaaaatgatcgatgcattacggaaagatacc

SEQ ID NO: 10159 - DNA, 604 bp, Gossypium hirsutum
  Clone ID: GOSHI-09MAY01-C16067_1
cccacgctttcgcccacgcgtccgcccacgcgtccgcccacggggaaggagacagagagcggcactgcaaaaaaaaaatgtctgcaacgggaaacgtcggcggcggaggaccagaggaggataagaagccggccgatcaagctaatcacattaatctcaaagtcaagggccaggatggaaacgaagtgtttttcaggattaagagaagcactcaaatgaggaaactgatgaacgcatattgcgataggcaatcggtggatctgaactccattgctttcttgtttgacgggcggaggctccgtggagagcagactcccgatgagctggagatggaggatggagatgaaatcgatgcgatgttgcaccagaccggaggagcggaataaagcagtaggtattatatatatgatattgtttcttctatatatgtaaatgaaagatttagagaacattcggaacagtgggtttctttgatttatagctacagtagtggtgaatttccttgctattaagcatggataatttaatgagctgtccttttgttttttcttaactattcaatgaaaatgattgtatccaaaaaaaaaaaaaaaaaaaaaaaaaa

SEQ ID NO: 10160 - DNA, 433 bp, Gossypium hirsutum
  Clone ID: LIB3197-019-Q1-M1-G5
gagaaaccgaaggggaaggagacagagagcggcactgcaaaaaaaaaatgtctgcaacgggaaacgtcggcggcggaggaccagaggaggataagaagccggccgatcaagctaatcacattaatctcaaagtcaagggccaggtttttactttttacgtcatttagatcatctctgttgtttttcttttcgattttttttcttcttttcatttatttgttttttgatctcgtttttgtaggatggaaacgaagtgtttttcaggattaagagaagcactcaaatgaggaaactgatgaacgcatattgcgataggcaatcggtggatctgaactccattgctttcttgtttgacgggcggaggctccgtggagagcagactcccgatgaggtaaatttccttacgtgttctcgatgttccgaaatgatatac

SEQ ID NO: 10161 - DNA, 722 bp, Gossypium hirsutum
  Clone ID: GOSHI-09MAY01-C16007_1
gcaactggaataaaaattcttataaatagatatccaatcaaaatttacatggtatactcaaatacttatgtagatacaacataactttttctcttgcacccaagtagccttttttacaaaaatattattacagaaaacatgcaagaattgttatatgatcagatacatggacttgagtctgcatctggttgaacattccattagcaggtggtcatgcctgaatcagtgttaaacttgagaggatttcatccatttgtccttaagaagactgatcttatatcatacagttctggagaaaagactgaatcagcctcgaactagagtatcatcatggtcaatgaagaagcgatgagaagataaactgcagcatattcattgtaaagtctgctttgagcatttgttgccgcaggtagtgcagggattcttacagttttattgcatgatgaagctggtagaagtgatggattgggccatggagctggaatattatcatttagatcgccaatgaaactgattccagaaaacttattgaatgtcgcatcagagggcaagcttggcaggagacatccagatacctgactttcgacttgaagagagagatccttgaggtgtatatggcataggctattagcatttttggtgataatatatgtatgtcgcttcaaccccagtgcggtagcacaatccaaagcttgttagttggtaatgaacgtacgcgtggg

SEQ ID NO: 10162 - DNA, 421 bp, Gossypium hirsutum
  Clone ID: LIB3197-019-Q1-M1-C8
aagagggggaatgcatattacggaagctttgcgcatgcagatggaagtacagaaacaattgcatgaacagctggagctacaaaggtcgcttcagttacgcatagaagaacatgcaagatatttgcagaagatgttggaggaacagcagaaagctggcaatgccttagttccgaacccaaactccgaactgccatcaaggattgcatcagaaaccgagccttgtgagtccaaaaccgagtcaccaacatctctaccatcaaagtataaagctcccaatgtggaggattgtaaactgaaatcaagtccgaaaaggcttcgtatggacgaagccgaggccgaggtagaaaatcctgagcagtaacaagtgggaattttgatttggttttgtagatccatccacagtagaaaggtagtgattgaa

SEQ ID NO: 10163 - DNA, 348 bp, Gossypium hirsutum
  Clone ID: LIB3135-038-Q1-K1-D2
cccacgcgtccggcttatgaatgttgaaggtttgactatctaccatgtgaaaagccacttacagaaatatcgacttgccaaatatatgccagagaaaaaagaagagaggaagacttcttctagctctgaagaaaagaaaccagcttcaagcagcaatgaaagcgatggaaagaaaagagggggaatgcatattacggaagctttgcgcatgcagatggaagtacagaaacaattgcatgaacagctggagctacaaaggtcgcttcagttacgcatagaagaacatgcaagatatttgctgcatctggttttcaaataataaataaaaaaaagatgattttcactttc

SEQ ID NO: 10164 - DNA, 1121 bp, Gossypium hirsutum
  Clone ID: GOSHI-09MAY01-C16297_1
caaaaacctgggttcagaccaatacaagttcttgcttcggacaatggttaatgctggcatcggtgaagaaacttacggcccaagaaacgtcattgatggcactgaagaaaccccgaatcttcctggttcgctttcggaggtcgacgatatcgtcttcggaaccctcgataaactctttgataacaacggagtttccccttcggaaatcgatatcctcgtgatcactatctcgatgattacttcggttccgtcgttgccggctcgggttattaaccgatacaagatgagggatgatgttaaagtgtttaatctctcgggaatggggtgcagtgctagtgttattgcggtcgacctcgtacatcatttgttcaaaacgtatacgaactcatttgcagtgattggtagctcggaatctttgattccgaattggtatcgcggcaacgaaagatcgatgatgcttcccaatattttgttcagattgggagggtgttcgttgttgttgacgaataaaagctcgatgaaacataaatctttgatgaaattaaagctttctgttcgtttccatggtggagcaagcgacgaagcttatcaaagttgcaccagggtcgaagattcccaaggctactgcggtttttcactttcgaaaagcctgccacaagccgctgcgaaagccgtaacaatgaatttccgagtcttactcccgaagacgctaccgttacgcgaacttgttcggtacgcgacggtttcgttcttacactcgaaaacgaataacaacaagggcttaactccaagcttgaatatgaaatctgggtttcaacatttctgtattcatcctggtggaagggcagtgattgatgcaatgggacgaagtctagggctaaacgaatacgacctcgaaccgactcggatggcacttcatcggttcgggaacacgtccgcggccggaatatggtatgttttaagttacatggaagctaagaagaggcttaagaaaggtgataggatattgatgatcagtcttggagcaggttttaaatgtaataattgtgtatgggaagtcatgaaggacgccacggatgacgttaacgtgtggaaagattgtatcggtcgatatcctgtga

SEQ ID NO: 10165 - DNA, 649 bp, Gossypium hirsutum
  Clone ID: GOSHI-09MAY01-C16207_1
gctactcttgcttctagacccttctctcccatcactttatgggtttcttttttccctcttttaaaagccacccctgaaacccacccagtgtcttttgtcaccccacaaatagctttgctgtcaacattttactcaagattttcctctttttctttcctcccaaactaactatgtatcgttttgcttcaagccttgcttctaaagctagggctgctaggaacactacatatcagattggtagtaggctgagttggaataggaactatgctgcaaaagatattaaatttggggtggaagctcgagcattgatgcttaaaggtgttgaagagctcgctgatgctgttagagtaaccatgggtcctaaggggcggaatgtggttattgaacaaagctacggtgctccaaaagtgactaaagatggtgtcactgttgcaaagagtattgaattcaaagacaaagtgaagaacgttggtgcgagtcttgtgaaacaagttgcaaatgccaccaatgatgtagctggtgatggaactacctgtgcaacggtgcttacacgagcaatttttaccgaaggatgcaagtctgttgctgcaggaatgaatgcaatggacctaaggcgtggcataacaatggcagttgatgccattgtaac

SEQ ID NO: 10166 - DNA, 438 bp, Gossypium hirsutum
  Clone ID: GOSHI-09MAY01-C16237_4
tttcccacgcgtccgccaagattataaattggggatcgatttgagtatttgaatagtttagattacaaggtagtgcggggaacaagttcagaatgtcgctgggtttaccggtggcggctacggtgaactgcgcggacaacactggggccaagaacctctacatcatctctgtcaaaggaatcaaagggcgtctcaacaggctcccatcggcttgtgtcggtgacatggtcatggccaccgtaaaaaaaggaaagcccgatttgaggaagaaggtgttgcccgccgtcatcggccgacaacgcaaaccttggcgtagaaaggacggcgtctacatgtacttcgaagataatgctggtgtcatttgtcaatccctagggagaaatgaaaggatctgctatcactgggcccattggaaaggagtgtgctgacctgtggcct

SEQ ID NO: 10167 - DNA, 918 bp, Gossypium hirsutum
  Clone ID: GOSHI-09MAY01-C16237_2
cccattcgtccccccaaaatccaaaagaaacccaagattataaatttagtatcgatttgagtatttgaatagtttagattacaagaatggcaggggaattagtattgttggatttctggccaagtccatttgggatgagatccaggattgctttggctgagaaagggataccatacgagtacagagaagaagatttgaggaacaagagtgatttgttgctgcagatgaaccctgttcacaagaaaatccctgttcttatccataatggtaaacccgtttgtgagtctgtcattcaggttcagtatattgatgaggtctggcatgataaagctcctttgatcccttctgatccttatcaaagagctgttgccagattctgggttgatttcgttgacaagaagatatatgacctggggagcaaaatatggaagacaaagggagaagaacaagcaaatgcaaagaaagaatttattgagtgcctgaagctgttggaaggagagcttggagacaagacttactttggaggagaaagtcttggatatgtggatgttgcattagttccattttatacctggttttatgcttatgagaagtgtggggacttcagcattgaagcagagtgtcccaagatgattgcttgggttaaaaggtgcatgcaaaaggagagtgtagccaagagtcttcctgaccaagaaaaagtctatgaatttattctgcagttgaagaaagtctttggaattgagtaattcaattcttgggagttgggatccaagcttcaggcatgtactaccattatatctggttttaaataaaagggcatttagctgttgcctgcctggttgggattgtcatttgaaatttctgagttttcaatttctaagtacttttagttcctatgaaagttattaatcggcggct

SEQ ID NO: 10168 - DNA, 617 bp, Gossypium hirsutum
  Clone ID: GOSHI-09MAY01-C16237_1
ccccccgggtcggccgcagagtagggccgatccaaaatgtcgaagcgaggaaggggaggtagtgcggggaacaagttcagaatgtcgctgggtttaccggtggcggctacggtgaactgcgcggacaacactggggccaagaacctttacatcatttctgtcaaaggaatcaaagggcgtctcaacaggctcccatcggcttgcgtcggtgacatggtcatggccaccgtaaaaaaaggaaagcccgatttgaggaagaaggtgttgcccgccgtcatcgtccgacaacgcaaaccttggcgtagaaaggacggcgtctacatgtacttcgaagataatgctggtgtcattgtcaatcccaagggagaaatgaaaggatctgctatcactggtcccattggaaaagagtgtgctgacctgtggcctagaattgcaagtgctgccaatgctattgtttgaaaggtttccatggttttgtttgctactgtctttgatgttatctttcaattacttacaacatattttgagagattttgatcagacaatgttacatctagttgtctaaaacttatttctggtttctttttatggaattacaacagttttagcatgcttcc

SEQ ID NO: 10169 - DNA, 592 bp, Gossypium hirsutum
  Clone ID: LIB3828-009-Q1-K6-D9
cccagcgtccggcggagcggatcagagccgttcaagatgtcgaagcgaggaaggggaggtagtgcggggaacaagttcaggatgtcactgggtttgccggtggcagcgacggtgaactgcgcagacaacacgggagcgaagaacctctacatcatttcagtgaaaggaatcaaaggtcgtctcaacaggcttccatcggcttgtgtcggcgacatggtcatggctaccgtcaagaaaggaaagccagatttgaggaagaaggtgttgccagctgtcatcgtccgacagcggaagccttggcgtagaaaggatggcgtctacatgtacttcgaagataatgctggtgtcattgtcaaccccaaagggaaatgaaaggatctgctatcactggccccattggaaaggaatgtgccgatctgtggcctagaattgcaagtgctgccaatgctattgtttgaaagatttttcacggtttttgtttgacattgtagttttaatgttatttttctgttacttataacatgtttctgagaggttttggcgaaacggtagtgaacctgtaaacttattttcttatatctagttgtctaaa

SEQ ID NO: 10170 - DNA, 748 bp, Gossypium hirsutum
  unsure (1)..(748): unsure at all n locations
  Clone ID: AI055055.1
gaaacccaagattataaatttagtatcgatttgagtatttgaatagtttagattacaagaatggcaggggaactagtattgttggatttctggccaagtccatttgggatgagatccaggattgctttggctgagaaagggataccatacgagtacagagaagaagatttgaggaacaagagtgatttgctgctgcagatgaaccctgttcacaagaaaatccctgttcttatccataatggtaaaccggtttgtgagtcggtcattcaggttcagtatattgatgaggtctggcatgataaagctcctttgatcccttctgatccttatcaaagagctgttgccagattctgggttgatttcattgacaagaagatatatgagctggggagcaaaatatggaagacaaagggagaagaacaagcanatgcanagaaagaattattgagtgcctgaagctgttggaaggagagctttgagacangacttacttnggagganaaagttctggatatgtgaatgttgcattagttccatttatagctggttttaggcttagaaaaaggtggggacttagctttaaaaaaaattgccgataagagggttgaataagaggccgcaaattgcgtcaacacaaatttttttcttaatgaatatattggtgaaatattgatttgtggggctggtggccctctttgttataaaatttttatccggtgttggggcgtgtttatataaaaaatataaa

SEQ ID NO: 10171 - DNA, 400 bp, Gossypium hirsutum
  Clone ID: uC-gsronu33B087b11b1
atttgaatagtttagattacaagaatggcaggggaattagtattgttggatttctggccaagtccatttgggatgagatccaggattgctttggctgagaaagggataccatacgagtacagagaagaagatttgaggaacaagagtgatttgttgctgcagatgaaccctgttcacaagaaaatccctgttcttatccataatggtaaacccgtttgtgagtctgtcattcaggttcagtatattgatgaggtctggcatgattaagctcctttgatcccttctgatccttattaaagagctgttgccagattctgggttgatttcgttgacaggaagatttatgacctggggagcaatatggcagcgtactacgtcaggtatagaagccctgtgggca

SEQ ID NO: 10172 - DNA, 726 bp, Gossypium hirsutum
  Clone ID: GOSHI-09MAY01-C16227_1
gcacgttatggtcaaatcacgtgttaccttgtagaccttcaggaatcacattagatatcaagaaatcatctcataagaagttatcaaagtggctgcgagccttgtcatcgtctggactgataacagtaaaagaagacaagtacaagaaagaagctatgttgatttctgttaatcgaggtcacccagaatacttgcaatttaagccagaaaagcgaccggtagagaaagttgttcaggctggtgattctgctgctagtgaaagccgttcacagaaggcgcttgaagtggtagaggtctataagtcaagtgtgcatgttaatcccatttttgcttctgttggagctgacactgggaaactgtactcagcttctgaagctactgatattgtcttcaagtacattgagaaagaaaatctggtgaagcaaacaaacaaagccactgtggtattagatgcaactttgtgtgatgcgttatttaagggagccatcaagaaaggatcaacatatccaactgagatccacaagaaagatttaggagcaacatttataaaccgtatgcaggcccaccacatggtgactagaggaggtgaatctgttgttcggaaaggtgttttgaaaacagttcacataatgactgaacggaaggcaaggcaccatgagggtgacaaaagtttcaggtttggaaactttcctcattgatccagaagcattggcatcagagttgcag

SEQ ID NO: 10173 - DNA, 337 bp, Gossypium hirsutum
  Clone ID: GOSHI-09MAY01-C17957_1
taaaccttttttcttcattcctgttaccattttcaagagtcttcttctttcaaaaatttccttcaatcttggatttcttggccattcttcgtaccgtcactccttcgtggtggaacaacctcatctcttaccagtctccccttattgtggctgatcggagacccagtgaaattcccaatttgactgcctgtggacaagctaaagcctctgtccggggaagggagatgacactttggaatgaaggcactgctctaaaactttcatctctcccctactattacgtgcaatgacccctgacgccgatctggatctatttgcctcgaaagctggatcaaaa

SEQ ID NO: 10174 - DNA, 697 bp, Gossypium hirsutum
  Clone ID: GOSHI-09MAY01-C17547_1
cggacgcgtgggcggacgcgtgggataggagtagccgatggtgtaggtggctgggctgaagtcggtattgatgctggtggatttgctcgtggacttatgtctaattcggtgaaagcaattcgagatgaacccaaaggttcagtcgacccggccagagtattagagaaggcccattcaagcacaaaatcacaaggatcctcaactgcgtgcgtcattgcccttcacaaggagggactacatgcaataaatttgggggacagcggtttcatagttgttagagatggttcaactgttttccattccccagtgcagcaacacgggttcaattttacttatcagttggagagcggtaataatggtgatctaccgagctctggtcaggttttccgaattcccattctgccaggtgatgtcattgtcgccggaactgacgggctgtttgataatctatacaataacgaggttgctgctgttgttgtccacgctttaagagctggcttcagtcctgaatcgactgctaaagagatagtagctttggctcgtgaacgagcagtggataagaacaagcagacaccctttgccaaagccgctcaagatgccgggtatcgctataatggcggcaagcttgatgacatcaccgtggtcgtttccttcattactatctctgctgacatgtgagttttctttgagttggtga

SEQ ID NO: 10175 - DNA, 593 bp, Gossypium hirsutum
  Clone ID: GOSHI-09MAY01-C17487_2
aaaatttggggctctttacttaccttgttcttgcttcttgatcggaatgttagatttggtacgggtcgtgcgtgtacactgatgccattttcacactatttagacctaaagccagtaattcggatcaccggcggccaagccttgattcttcgagacggagtatagatgtcggggccactcgatcgattcgctcggccttgctttgaggggttttatggtagtgatgagaggagagagaggaaatctgatttcgagaactcagaggatgaaaggcgcacaagaattggatccttgaaaaagaaagcaataagtgcatctgctagatttaagcattctcttaaaaagaagagtaatagaaggaaaagtgatggccgtgtcagctctgtatccattgaggatgttcgcaatgctgaagagctacgggctgttgatcaatttcgacaagcattaatcatggaagaactgcttccagaaaaacacgacgactatcacatgatgttgaggtttttggaagcaagaaagtttgatatcgataaagctaagcacatgtgggcagatatgctccaatggaggaatgagtttggtgctgacac

SEQ ID NO: 10176 - DNA, 645 bp, Gossypium hirsutum
  Clone ID: GOSHI-09MAY01-C17487_1
acaaattgagctacaaagtaaaagaaaaaacaaaattcaaagctcctcatatttggactcttctccgtagaactttttattcttgtttttgtttattgtaatgctggcttttttgataaggcgcgcgagactaaattgatccgattataacaaatctgtgattaccggtggcggctgcgccgtcttgattctttcgtccaagggagcgtagatgtcggggccactagatcgatttgctaggccttgctttgaggggatttcaggcagtgatgaaaagagagagaggaagtctgattttgagaactctgaagatgaaaggcgcacgaaaatgggatctctaaaaaagaaagctttaaatgcatctactagatttaaacattctctcaagaagaagagtagtaaaaggaaaagtgatggccgtgtcagctctgtatccattgaggatattcgcgatgtcgaggagctgcaggctgttgatcaatttcggcaagcattaattatggaagaattgcttccggaaaaacatgatgactatcacatgatgttgaggtttttgaaagcaaggaagtttgatatcgataaagctaaacacatgtgggcagatatgctccaatggaggaaggagtttggttctgaccaccatta

SEQ ID NO: 10177 - DNA, 658 bp, Gossypium hirsutum
  Clone ID: GOSHI-09MAY01-C17447_2
cggccgcgtgggcggccgcgtgggtttttattttctcttttggagataatctatctctggttttcctttttttttgattcctttggctcttgcgcagctagcaaaacaagatggcagatggcgaggatattcaaccactcgtatgcgataatggaactggaatggttaaggctggatttgccggtgatgatgctccaagagctgtgttccctagcattgtaggtcgtccgcgtcatacaggtgtgatggttggcatgggtcaaaaagatgcatatgttggggatgaagctcagtccaagcgtggtattctgactctaaaatatcctattgaacacggtattgtcaacaattgggatgatatggaaaagatctggcatcataccttttacaatgaacttcgtgtggctccagaagaacacccggttcttctcactgaggcaccactgaacccgaaagccaatcgtgagaaaatgacccaaatcatgttcgagaccttcaatgctcctgccatgtatgttgctatccaggctgttctctccctctatgctagtggccgtacaactggtattgttctggactctggagatggtgtgagtcatactgtccccatttatgaaggatatgccctcccacatgccatcctccgtctcgaccttgc

SEQ ID NO: 10178 - DNA, 688 bp, Gossypium hirsutum
  Clone ID: LIB3582-055-P1-K1-E9
cggccgcgtgggcggccgcgtgggcggacgcgtgggtttttgaaggcgggcagctttcatatccatctttctctcattttccttttgcttttgcgctgctggtgatacaagatggctgacggtgaggatattcaaccacttgtatgcgataatggaactggaatggttaaggctggatttgctggtgatgatgctccaagggctgtgttccctagtattgtgggtcgtccacgtcacactggtgtgatggtcggcatgggtcagaaagatgcatatgttggggatgaggctcagtccaagcgtggtattctcactctcaagtatccaattgaacatggtattgttaacaactgggatgatatggaaaagatttggcatcacaccttttacaatgaacttcgtgtggctcctgaagaacacccggttcttctcactgaagcacctctcaacccgaaagccaatcgtgagaaaatgacccaaattatgtttgaaaccttcaatactcctgccatgtatgttgctattcaggctgttctctccctctatgcaagtggtcgaacaactggtattgttctggactctggagatggtgtgagtcatactgtccccatttatgaaggatatgcgctcccacacgccattctccgacttgacctggctggccgtgaccttactgatgccctaatga

SEQ ID NO: 10179 - DNA, 633 bp, Gossypium hirsutum
  Clone ID: LIB3828-015-Q1-K6-C11
cgcaactcaaatcctcttctctgcttttccacttttcctttctttcttcagttgtgatgttattttagctggtgatacaagatggcagatggtgaggatattcaaccacttgtctgcgataatggaactggaatggtcaaggctgggtttgctggcgatgatgctccaaggccgtcttccctagcattgtgggtcggccacgtcacactggtgtgatggttggcatgggacagaaagatgcatatgttggggatgaggctcagtccaagcgtggtattctgactcttaaataccctattgaacatggtattgttaacaactgggacgatatggaaaagatttggcatcataccttctacaatgaactccgtgtggctcctgaagaacacccaattcttctcaccgaggcgcctctcaacccgaaagccaatcgcgagaaaatgacccaaatcatgtttgagaccttcaatgctccagcaatgtatgttgctatccaggctgttctatccctctatgctagtggtcgtacaactggtattgttctggactctggagatggtgtgagccatactgtccctatttatgaaagatatgccctttcacatgccatccttcgtctagacctcgcaggtc

SEQ ID NO: 10180 - DNA, 565 bp, Gossypium hirsutum
  Clone ID: LIB3828-024-Q6-K6-A11
cgggcagctttcacatccgtggggggggtcgttgggcttaagctttggcgctgctggtggcacaagatggctgacggtgaggatattcaaccacttgtatgcgataatggaactggaatggttaaggctggatttgctggtgttgtatgctccaagggctgtgttccctaggggggggggtcgtccacgtcacactggtgtgatggtcggcatgggtcagaaagatgcatatgttggggatgaggctcagtccaagcgtggtattcttactctcaagtatccaattgaacatggtattgttaacaactgggatgatatggaaaagatttggcatcacaccttttacaatgaacttcgtgtggctcctgaagaacacccggttcttctcactgaagcacctctcaacccaaaagccaatcgtgagaaaatgacccaaataatgttttgaaaccttcaatactcccgccatgtattttttcattcaggctgttctctccctctatgcaagtggttcgaacaactggtattgtttctggactctggagatggtgtgagtcatactgtc

SEQ ID NO: 10181 - DNA, 459 bp, Gossypium hirsutum
  Clone ID: GOSHI-09MAY01-C17427_1
cacacacacacacacaacaattactcctttcctttgatatccgcatttctttctttttctcttttcttgttcttgttcttgttccccccttgttgatattctctatttactttgagggattaatataagaaggcaatgtgggatggtggggttttaggcttgatttggcgtttgaagcctgcctcactccctttgttggttttcaggtgctttcgggactaattggttgcctgcttttgacgatgatggagaagcttaattttgtaaagaacggtgtgcttagattgcctcctgggttccgcttccatcctactgatgaagagttagtggttcagcacttgagaagaaaggtgctttcttggcccttacctgcctctatcatacccgaagttgatgtttgcacagctgatccttgggacttgccatgtgacttggaacaagagaggtacttctttagca

SEQ ID NO: 10182 - DNA, 1043 bp, Gossypium hirsutum
  Clone ID: GOSHI-09MAY01-C17767_1
tcgtgatggccttaaaatgtcgtggtgagcatgtattaggaggtcttcatacaggaatcaatacccgacacattgtaatggcaagcaaaatggtagaagaatacacagggttacatgttcagccgcattcgcccacgcgtccgcccacgcctcccgctcacgaaagtggtattcaccaggatggaatgctaaagcacaaaggtacatatgaaattatatcccctgaagatattggacttgagcggtccaatgaagctggcattgtccttggaaaactcagtggacgtcatgctttgagcgaccggttgaaagagcttggttacgagcttgacgatgttcagcttgggaacatattctggcgcttcaaagaagtagctgaacaaaagaagagagtcactgatgctgatctagtagcattggtttcagatgaagtttttcaaccagacgtggtttggaagcttctcgatctacaggttacttgcggaactcttggtctttctactgcaacagttaaactcatcgatgctgatgggagaaagcatgttgcctgctcagttggaactggacctgtagattcagcttataaagctgttgatctcattatcaaggaatcggtttcacttcttgagtactcaatgaatgccgttacggaaggaattgttgcgatagccactacccgcgttcttaattcgtgtagagaaaagtcacttatctactcatgcgttgactggtgaactcggtcatcgtacatttagtggaactggggcaggaatggatatcgttgtttccagtgtcaaagcttatgtcagtgcattaaataagatgttgggattcaaagaacaatatccagcaaaggcttcatccatagaaaggactccagcttcttcttaagctacttactcggtttcatgtacgtgtattgaatatgattatgtatccaacaagggtatgttcatttctgtttagatttttccacgtctatactcatgtctggatttgcgtcggacacactactttagagagaagaaaagagaacagttgga

SEQ ID NO: 10183 - DNA, 902 bp, Gossypium hirsutum
  Clone ID: GOSHI-09MAY01-C17617_1
cccacgcgtccgattgaaaggctccctttcagacaatctaaactgtgggagaaaccttgagttcgttgatatatcaaacaataggttaatgggaagccggccgcctggtttaaactctgaaacaagagataacagagttattaagttcagtggcaattgtgttgtccattgccggacatcatcagcatccagaatcatattgcagagaatttaaagttcatgtttataagagcagtaatggtggcaagggcataggagtattggttggtctcattgttggaattgcagttctcattgttcttgtggctattggctttctcattgtgtgtcgaagatactgccctcgagtgagatcggagcaacatttactgcagaaatcagtaccagagaactcaacagcagggttatcatctgagattttaaccaatccaagacatgtttttgaatcttcaaagtcggaggtacaaattcttccaaggtgtcgatcattcagtctggaagagttaaaggaagctacaaacaatttcgatagctcggcttttctcggtgaaggttcatacggaaagattttcaaagggttattaaagaatggaacccaagttgctataagatgcctgcccacatccaagaaatactcgatccgtaacctgaaactcaggttggatatgctggcgaaaattcgacacccacatttggtttgcattttggggcactgcattgaagttgaacaagatgataattgcagcataaacagagtcttcttcgtgcttgaatatattcctaatgggaattttcgttcccatctctctgataattctccaggagaagttctcattggcctgaacgattagcagttctgatatgcgtttgcaaggcatgcatttcttgcatactggagttat

SEQ ID NO: 10184 - DNA, 431 bp, Gossypium hirsutum
  unsure (1)..(431): unsure at all n locations
  Clone ID: LIB3197-045-Q1-M1-G9
ctgagaactggtataatcttttgttacagtatagccactattctcttattttttaatgaagttgtaataaaagtttaaggttgttgaaaatcatttgacatatgaaaatcattatcttagagtaccgtactggtttgaagcatgaaagttttggtcaattcttttgatggaacttcaatttccattttattatctttctcttgaaagttgtgtgtctgagcaaaaaattctttgggccgttgagaaggtttggctttattggttctcacttttctcatggattgagctgtctttgacttactaatctgttcttgttggatcacaagctttatggaaaatagcacaaatatgttattntctgggcaagaaatagcgcaaatgatacttgcctgatgtctggtgacttttttgttagctggttgctcgaaaca

SEQ ID NO: 10185 - DNA, 245 bp, Gossypium hirsutum
  Clone ID: LIB3148-012-Q1-K1-D8
atcaattgattgtctattcttagttggttgatcagtaatgtattcttctgagaactggtagaatcttttgttacagtataggcactattctcttattttttaatgaagttgtaataaaagtttaaggttgttgaaaatcatttgacatatgaaatcattatctgagtactgtactggtttgatacaaaaaacattataaaacaagaaagctataaagctgacttacacattcattctgtatgaaa

SEQ ID NO: 10186 - DNA, 764 bp, Gossypium hirsutum
  Clone ID: GOSHI-09MAY01-C17637_2
gtcgcactgtaaccgggaaaaaggaaacgaatttttactttacgaaaagaaatctgggttttgagtatttacatccattatatccaaaacaaagggaagaagccgcaaaaaaaaaaaagaattgaagaaattatggcagagaaaccacaaccagtgaaagttttatattgtcccatatgttctcttccagcggagtactgtgaattcggccctgatttcgaaaagtgtaaaccttggttgatcagcaacgcccctgacctttacccacatctcctcaaagaggctaatgaaaaggagggtgagaaggtttctgaacagctgcaatcagttggtatttcctctgctgctgaaggggcagcatcttcagctccaccagggagcacagtgtcatctaaacaagaagatgtaaaacgtcttcctgggggaaaattaaggaggaaagagaaacaagaagttgtcattgaaaaggttgtacgtaataggcgcaaatgtatcaccattgtgaaaggattggatctatttggaattaagcttagtgatgcttcgaaaaagcttgggaagaaatttgccaccggtgcatcagttgttaagggaccaactgacaaggagcaaattgatgttcaaggagacatatcgtatgatattgtggaatatattacagagacctggcctgctgtacctgaaactgccattttcttcatcgaggatgggaaaaagttcccgctgcttgatgctagaacttggtgccagagcagggactggga

SEQ ID NO: 10187 - DNA, 678 bp, Gossypium hirsutum
  unsure (1)..(678): unsure at all n locations
  Clone ID: AW187271.1
aagggaccaactgacaaggagcaaattgatgttcaaggagacatatcgtatgatattgtggaatatattacagagacctggcctgctgtaatgttttcaatanttcactttacattttattcaatatgaaaatgcttcatatgagaaatatggaacaatgtttgtttattttctttgcctttaccattagaaaagacattactctggtcttacacatggaaatacatttcaacatgaaactctccaattctgagttatgtttctttattaccttgaaagtgaggttttattgttcattgttaatgctaaaacttgatgaaatttgattatatttgtttggttgtatgtttcatatttgactattcgtacaccctgataaatttaatgcatgcctccttgctggaaaagatggcattaccaccctttggagtcttcttatgatgcgtgactatattaaaatcatgttcagaaaaggcagcattaacattctttgttgtttcctttcaagtaactgaaaatggcaattttcttcatcaaggaatggaaaaagggttccccctgcctggaagccaaaaacttggtgccaaaacaaggggactggggtgggaattttaaanccacattcaatgaacccaatttccccctttaaattgggaactaagcatcttattccatcca

SEQ ID NO: 10188 - DNA, 759 bp, Gossypium hirsutum
  Clone ID: GOSHI-09MAY01-C17197_1
cttcccattgctcctttcaattctcttcatcatctcccctgttttctgtgacaatgatgaggaagatgatcttcttaaaggcatcaacagttaccgagcttcgttaaacttgacaagcctaacaacaaatgagaacgccgagtgccttgctgatgaactagccgaagaattcaagaaccaaccttgcacaaactccacaggcgccaacacagtcccaggcaccgaaccacagtttgccaactatccaaacattttagccaaatgccatttgaatgtttctgtcacaagggacggagcagtaatgcctgcttgtgttccgaacctggctcctagtcttgtgctcactaattttacgcagtctcaatactctgaaaacctcaatgaaaccaagtatacaggaatcgggatcggttctgaaggagactggattgttgttgtcctaacaaccagtacaactgaaggaaactacgctacggctactactgctgctactactagtgcggccaattcagtttccgagataaccataattcatcaccttctattgctcctcatggctgctttctacatgttatgagcagctaaccctttaaagactacacaaaaatcatatgttttcatgtactaataagcttggattatttttttccctttttgggaaaattttcatatgattccgggttagataggtaatttcttattgttctcggtgtgggttttgtccggataacaataatgtgatattttagaccttggatt

SEQ ID NO: 10189 - DNA, 372 bp, Gossypium hirsutum
  Clone ID: LIB3829-029-Q6-N6-G1
cccaaaagggaaaaaaaaatccaagcttattagtacatgaaaacatatgatttttgtgtagtctttaagggattagctgctcataacttgtagaaagcagccttgaggagcaatagagggggataaattatgattatctcggaaactgaattggccgccctagtagtagcggtagtagtagccgtagcgtagtttccttcagctgtattggttgttgggacaacagctatccggtctccttcggaaccggtcccgtttcctgtttgcttggtttcattggggttttgggtgttttgtgactgggtggagttagtggggccggattgggagccgggtgcgggacgcgtggcgggcgtttctgctccgtccttt

SEQ ID NO: 10190 - DNA, 434 bp, Gossypium hirsutum
  Clone ID: LIB3197-039-Q1-M1-B11
agggaacaaaaaagaaaaaaaagtagaaaggatccattggagttgctgtcaatggcgcagattgaggttcagcgtcaaccggcgatttccgtaccaaacgccgtcgctccgcaaaccggaggggtgcagttcataccgacgtcactatatgttggggatcttgatgttaccgttacggatgagcaactgtttcaattgtttggacaagttgctcgggttgcttccgtaaggatttgccgcgacttggctacgggccgttcactcggatacggttacgtcaactatagcaatcctcgtgatgcggctagggctttggatctacttaatttcactccactgaataataagcctattcgtatcatgtattctcaaagggaccctagtcttcgtaagagtggtactgcaaacatatttatcaagaatctggacaagtc

SEQ ID NO: 10191 - DNA, 387 bp, Gossypium hirsutum
  Clone ID: LIB3083-103-Q1-L1-G12
cgcatattcatgttcagcatcaggcgccggtttccggtccaaatggcgtggctccgggagcttccggaggagcgcaattcatgcttacgtctctctatgtcggggatcttgatgttaccgttaccgatgagcagctataccaactgtttagccaggtggctccggtcgcatcagttagggtttgccgggacttggcgagcggccgctctcttggctatggctatgtcaattataacaaccttcgcgatgcggctagggcaatggatctactgaatttcacaccactgaataataagcctatccgaatcatgtattctcagcgtgatcctagtcttcgtaagactggtaccgcaaacatatttatcaagaatctggacaagtctattg

SEQ ID NO: 10192 - DNA, 688 bp, Gossypium hirsutum
  Clone ID: GOSHI-09MAY01-C17127_1
cccacgcgtccgggatcttctcagtcaggatatgcaccaccaggtcctcaatctgcgtatgcccctcagcagcagtatggcaagccatattcatatgtgcagtcacaaggaccccaaacatatggtcctccagccaatcaacctggagaagttccatatcaagggcccgctggccaatcttacagtccacatgtgcctcctcagcagcaatacgcatatgcaagtggccccttgcaacaaagctatcctccatatggctctgcaccacccggtgatgggtataatcagcctccaccagtgactggcccggcgtattcccaacaaggtggacagtctgttcctggttacagtcaaccttctgctcagcaagctactccttatgcacaagcgaatactgctgctgggtatggtcaatatccaccctcacagcagggttattccgatcaggcagcttcaaataatgcggcttatggttatcaagggacacaagattctggctatggcagtggccctgtgacaacatacggtgcatcaccacctaatgggcaagttacttatgctcaaccgacagcaactcaggcaacctatgatcagtctgagggatatgcagcagcaccaggtactgcacctgtagcatatggaaaaacagtatccccgcaacttggataccgtcagtatgattcaaccc

SEQ ID NO: 10193 - DNA, 750 bp, Gossypium hirsutum
  Clone ID: GOSHI-09MAY01-C17267_1
cccacgcgtccgaccgactcgaaaacgaaataggcccaaagcaaaacaaaagcttggaaaaacaggcctaaatttatctgggtctaattactatttaagaaaagattgtatcttcaatccataaagattgaatataacttttccaaagtacgatatttttaaaaaaaatgaaataaaattcaaaccatttttaaaataaataataaaaactctttcttccttcatctctctcattctccctttcttctctcccccttttcccctttcttctactacttttctttttctctcttcctcctttattgtcctttctaacaaaccgctgccgctgcttccacacactttccagcgtcttacctccgatcaggccagcttccttcccatcattcgaaacttaaatcctcaaatatatctatccaatccattgtttctcatttcttcggcgattctctctcaccctaggtctcttttcaacgttttcctgtcattctattttagccttgggtatccacaggccaaaaaaacacacgctatagtaggaagagagttttcgtgagagagaaaccctatgttttctctggcgtttctggtttttgtgatttttgaaattcgctgcttaaacggagactcatttcaggtgccaaggtcgtgtggcttcccagctttcgtggtctctgtttcgtttcgtctgtcagatctatagatgtcggtcttgctcttcattattggttgtttatcgaatactatatg

SEQ ID NO: 10194 - DNA, 1567 bp, Gossypium hirsutum
  Clone ID: GOSHI-09MAY01-C17217_1
ctcaacccctccattttactacgctctctgaaatcttagttacatccatggcagcaacatctctaaatgcccctaacgctcctctccttcaaaagacccatcaaactcatgtctttctcaaacccatctccaccattccttgtcaaacctctgccaagcgcttctccatctcttgttccgcaactacccaagatcgcctctccgtccaatcccaatctcaagatcgggtctttaacttcgccgccggtcccgccaccttacccgagaacgtcctcctcaaagcccaatccgagctttacaactggcacggatctggcatgagcgttatggaaatgagccaccgtggtaaggatttccgttctattatcgaaaaagccgaggccgatctccgttcccttctcaacatccctgaaaactacgccgttttgttcctccaaggtggagccaccacccagttcgctgctgtccctttgaatctctgtgccccaggtgactccgttgattatcttgttactggatcttggggagacaaggctttcatagaagctaagaaatactgcaaccccaaagtcatttggagtgggaaatcggagaactacgtcagggttccctcgttcgatggtttagaactgaacccgaatgccaagtatttgcatatatgcgccaatgagaccatttacggggttgagttcaaggactacccagttccccgcaatccaaatggggttcttgttgctgatatgtcttccaatttttgttccaaacctgttgatgtaaccaagtttgggttgatttatgctggtgcgcaaaaaaatgtggggccatccggggtttgcatcgtgatcgtgaggaaggatcttctaggaaatgcacaagagagtacccctgtgatgcttgattacaagatccacgccgacaacaactctttgtacaacacacctccatgttatgggatttatatgtgcgggctggtgtttgaagaccttttgaagcagggaggactggaagaggttgagaagaagaaccacaagaaagctggtatattgtacaatgccatcgatgaaagcaaaggattctacaggtgccctgttgagaaatctgtaaggtcaatgatgaatgttccattcacattggagaagtcagagttggaggctgagtttttaaaggaagccgagaaggagaagatggtgcagctcaagggacataggtcggtgggaggcatgcgagcttccatttataatgctatgcctttggctggagttgagaagttggttgctttcatgaaggatttccaggcaaagcatgcttgattcacgtctcttcctatataaagtgcggttgttctcttctgtttgtgttcactcttttatgtttttgctacggttttatgtcgggtaggttttaggtactattggtgataaattgcatgctatctgaaagttccaaacaggggaagttaagcaagatttttgtattagacatgatttgctagtttcatttcctgttctgattcttaagtgcacaatattaattaattctaataaaggtcgcttgaattttggtgttt

SEQ ID NO: 10195 - DNA, 1058 bp, Gossypium hirsutum
  Clone ID: GOSHI-09MAY01-C17227_1
cggacgcgtgggctgcaggatttccagcaacctcctttgagtaggtgtgggatacagttgtagctcctcatcttcacaagttccatggaatattaaatggaattgacttagatatttgggatccgtacaatgataagttcattcctgtaccttacacttcagaaaatgttgttgaaggcaaacgagctgccaaggaagccttgcagcaaaggcttggtttgaagaaatctgatcatcctttggttggaatcattactcgcttaactcaccagaaaggaatccatcttatcaagcatgcaatttggaacaccttaaaacgcaatggccagggtgtattgcttggctcagctcctgatcctcgcatccaaaatgattttgtgaatttggccaatcagctgcattcatctcattcggaccaggctcgcctttgtttgacctatgatgaacctctttctcacttgatatatgctggtgccgatttcattctagttccatcaatttttgagccttgtggactgacgcaactgacagcaatgagatatggctccatacctgttgttcgtaaaacaggaggactttatgatactgtattcgatgttgacgatgataaagctagagctgaagcacaaggtcttgaacccaacggatttaacttcgatggagctgatggtgctggagtagattatgccctcaatagggctatctctgcttggtatgatgggcgtgactggtttaactcattgtgcaagagggtgatggagcaagactggtcttggaatcggcctgcgcttgattatatggagttgtaccatgcggcaaagaaatactaaaagccgattaagcaaagctgcaaatcgttaccatctcccatagcttgtacattgtttacttataccttttactgccatagttttagcacttaaaatcgttcctccatttttgtgtatcataaagcaataggctctcctcaaaataaggaaaaaaaaaagagagaaccaaatgtgtatcattcttgagagctacaaattctttttgactgctggtacttcttctctatg

SEQ ID NO: 10196 - DNA, 1067 bp, Gossypium hirsutum
  Clone ID: GOSHI-09MAY01-C10987_1
gttttggctcaaaatttcatcctcctaatctttattctgaatcaaacccagaaaaactatgccaattgctaccttatctctccattctttaggctattgctgccaaaagtctcctcctttctccctcaaatcttcttttctctcaaaacccacaaaaacccagttttcttttgccttcaaaactaccgagaagaggcctttttcgcatatagtctcaatgagcatggaagcaggcattggagtaatgggcacaaagcttggaatgatgagtttctttgaaactgatggcacagttgttccagtgactgtagttggttttagagaaggaaatatagtgacccaagttaagacatcggctactgatggctatgatgctgttcaagttgggtatcggagagttagggataagaagttgacaaagcctgagttgggtcatttggggaaagctgctgttattcctatgaggcatttgcaagaatttaggttgcaaagtgtgggggagtttgagactggtcagaaattggctgttgaagagatttttaaggaaggtgatcttgttgatgtctctgggactaccatagggaaaggatttcaaggtggaataaagcgccataattttaaaagaggtcaaatgagccatggttccaagagtcatagagcattggggtctattggtgctggaacaacacctgggcgtgtgtacaagggaaagaaaatgcctggcaggatgggaggaagcaaaagaaagatccgaaagctcaagattgtgaaaatcgacaatgagcttcgagttgtgatgatcaaaggtgctctccctggtaagcccggaaatctgctacgtataacccccgctaagattgttggaaagaacataccaaagagctagtttcatgtattggactcatttcattttagctagtatttcagttgtgggaacttttgatatattcattggtgtatgagtttaagtcgaaatttaccttttcttttattgagttgattcctgaatttggaaatggcttctcaatttgtgaactacttaaattgatcagtcaattctacttgtc

SEQ ID NO: 10197 - DNA, 376 bp, Gossypium hirsutum
  Clone ID: LIB3120-020-Q1-K1-C10
gggaaagtctggtgcttctttcaaggactcatctctctttggagtgtcactttctgatcacatcaaagctgacttcacctcttctgctttaagatgcaaggttgggattctgtgttctttaaattggacaactatggtgtttatgctgtttttgtgcctttaattgagcctttttcctttgtagagggaattcaaccatagaactggggctgttagagcccaaacaacagccactgcaacaccagcaatcaccagatctacagtggatggaaagaaaacactaagaaagggtagtgtgatcatcactggtgcctcctctggattgagtttagccactgcaaaggccttggctgaaactgggaaatggcatgttata

SEQ ID NO: 10198 - DNA, 328 bp, Gossypium hirsutum
  Clone ID: LIB3166-033-P1-K1-B11
cccacgcgtccgagctcacccttcactttggtccactacacagccatttcaaagtggtacatacatggctctacaagctgctgctttggttccagctactttctctgtaccaaaagagggaaagtctggtgcttctttcaaggactcatctctctttggagtgtcactttctgatcacatcaaagctgacttcacctcttctgctttaagatgcaagagggaattcaaccatagaactggggctgttagagcccaaacaacagctacttgctacaccagctatcaccagatcttcattgtgatggtaagaaatcacttataaagggtt

SEQ ID NO: 10199 - DNA, 826 bp, Gossypium hirsutum
  Clone ID: GOSHI-09MAY01-C10817_1
gaaaaagactacattaagaatgttcttggtgagcaagggcagcatatggctgtcaactattacccgccatgtcccgaaccagagctgacttatggattgcctggacatacagaccccaatgctcttacaattttgcttcaggacttacaagttgcgggactccaagtactcaaacacggcaaatggctcgccgttaatcctcaaccggatgcttttgttattaacatcggtgatcaattacaggcgttgagtaatgggaggtacaagagcgtgtggcatcgagcggtcgtgaatgccaataaggaaaggatgtcagttgcttctttcctctgcccgtttgaccgtgccttgatcagccccgcaaagcctctcaccgaggacggatgtgaagctgtatacagggattttacttatgaagagtactacagtaaattttggagcaggaacttggaccaagaacattgtttggaacttttcaaaaactaatatcggctttcgtccccgcccgcttcagatgcttgacttctattgtttccatagacttgtcggttttacctgaatgcctgtatgcctgtatattattgcagaatcactagacggcccctattattattattgttgttattattattattcattgcagtacgccatttttaatgcagcataactatattgctggccatcattgcagccattttagcaagcctactctgtaacttatgatccatatgtagcatgggattgttttgtactgatattgcacttatctttattattgtattctagcatacagcacaacattatctgtaataaaatgattttatgc

SEQ ID NO: 10200 - DNA, 943 bp, Gossypium hirsutum
  Clone ID: GOSHI-09MAY01-C10597_2
gttaaagaatctgttatgggttctgtttcgttcatggattagtattttattttcaattttttccttggtgtttgtgctccagtgtgtgtgtgttttcattttagtcaagcttctgctgctctaatgttattttttttcgtggttagccttagagaatagcatgatccacataacactatatgggaaatgcatgtgatataatgataatgaaacgttattgtgctatctcatgtatgcatttagaacgaaataggctgcagggggaaaaaagcattgcaacttgcaagagttaataaaggaacaatttggtacaccgagtttaaagataatgtataaaaacagtaaagatattctgtatgatagctggtccccggctatgactgtcagttccatttgtatcagcatcctctccatgttatcaagcgcaactgtgaagcaacggccaactgataatgatcgatacgttaagaactgtcggaatgggagatctcccaaggagacgagatggtggttccatgatgataaagtgtaatattttagaactgttatctatctcttataactgcgagggtttcatcaggagagatgggaaaaggatggccctccctaaatgcggtggtaaccttctaaatttgcctttgttgctgtgtatgaaattgtgaatcaaacatagatttaatttgaatgtggctgcctccttcaagcagcggagtaggaaatccaatataaccctgtttcctaatcatgttaggacacccatttgtcaaatcatggtagggtgcatgggaggaccgtcaacgtaataacgtcattgcatgttgatgatgaagtaattgaatgtacggctaactcatgctgttgataatatctatggagagttaaagcctgcagcataactgcatgaaactcgattttgtgttaaatctatatgtctgtctctact

SEQ ID NO: 10201 - DNA, 875 bp, Gossypium hirsutum
  Clone ID: GOSHI-09MAY01-C10597_1
cgaccgatttacgactcattttgtgacatttttctggctcgttcgatttactgacatttttctccaaaattctcgagcaatagtaattgacatttacagcctagtctataaattacagcagatggcaccatcctttttcatttttccccacgcgtccgcggacgcgtgggcgctcgctcgcgctgaagccatgactagctcctcggctcgttcacgcaaggctttaagcaagatcccatgtaatagactccagaaagagttagtggagtggcaagttaatccacccgccggattcaagcacaaagtcactgataatctccaaagatggataatcgaagtcaacggagcccctggaacgctttatgctaacgaaacttatcagcttcaggttgattttcctgagcattatcctatggaggcaccccaggtgattttcattcctcctgcgccattacatcctcacatttatagcaatggacatatttgtttagatattctgtatgatagctggtccccagccatgactgtaagttctatctgcatcagcattctctccatgttatcaagctcaactgccaagcaaaggccagctgataacgatcgatatgttaagaactgtcgcaatggcaggtctcccaaggagacgagatggtggttccatgacgataaagtataataatatgaacttattatctataatctgtgtataaaaactgaggctacagggataggtaatcgtttacatttgtcatgctgtgtatgaaattatgaattaaacgtagatttattttgaatattgttacctaatgcatgaagcagactgaacaatataaacctttcttttcttctaatccagttatgcacacactttgttg

SEQ ID NO: 10202 - DNA, 374 bp, Gossypium hirsutum
  Clone ID: LIB3145-032-Q1-K1-E10
acgcgtaccgatcattgaactcgagtctccaattatcttatgctttaaagaatcgtttacaacggtatggaaacgcgacaggtttgttttagcacaatgcccaactcaaatattatgctttttgttgttacagcataagacttatataatcgatagtataatttcagttattcgactattgcttttaaatttgactaagcaagccaatgcttgctcaaattcactttctttcaaggcaatggtgaagcaacggccaactgataatgatcgatacgttaagaactgtcggaatgggagatctctcaaggagacgagatggtggtttcatgatgataaagtgtaatattttagaactggtatttatctcttataac

SEQ ID NO: 10203 - DNA, 336 bp, Gossypium hirsutum
  Clone ID: LIB3166-027-P1-K1-H7
cccacgcgtccgctcagaagccatttctagctcctccgctcattcacgcagtgctttaagcaagatcgcatgtaatagactccataaagaattagtggaatggcaagttaatccacccactggattcaagcataaagtcactgataatctccaaagatggataatcgaagtcaacggagcccctggaacgctttatgctaatgaaacttatcagcttcaagttgattttcctgagcattatcctatggaggcaccccagatattctgtatgatagctggtccccagccatgactgttagttccatctgcatcagcattctcttcatgttatcaagc

SEQ ID NO: 10204 - DNA, 289 bp, Gossypium hirsutum
  Clone ID: LIB3189-036-P1-K1-H8
ctcctctacatcctcacatttatagcaatggacatatttgtttagatattctgtatgatagctggtccccggctatgactgtcagttccatttgtatcagcatcctctccatgttatcaagctcaactgtgaagcaacggccaactgataatgatcgatacgattagaactgtcggaatgggagatcttccaaggagacgagatggtggttccatgatgataaagagtaatattttaagaactgttatttatctcttattactgctagggtttcatcacgagagatggg

SEQ ID NO: 10205 - DNA, 899 bp, Gossypium hirsutum
  Clone ID: GOSHI-09MAY01-C10587_1
ccccgcgtccggccggtcaggtcttttccttgttatttcgcacgctaagctgaagcaactcccaactccaacaacagcaatgatcttcgttttctttctcttcttccttaactagccgcccttatctgtcacttttcaggtttggtctttcctgtctacttctttctttttcgattcctgcgtcgcttctcttcttttctttggttatggttttctggggttttcaatttctctcctagtacttttcaactttgattctttttttcttttgttctttttcatatatatatatgtacttcgtcaactggaagtgacttcgaatttgatcacgaagtttgaagctttgattgaattttgcagggtttgctattatgttggagttaactgtttaaaacacttttgggaggctttacatgaaagggtcagctttgatatcttatcagggtttcagggatcattgttgattcagtcaactcaaccgtgaagacttaggtcaaaatttgcagtggccttttaagaaagagaattgaacgattagaaaaatctcttgaagtcgtctcctttgttaatttggagatgaaaagtgaatttcttacccagtttgagtttttttcttttttgtgattgttgatattagattttgtttattggggttttaccttggttactgtgcatcattaatacgctgtattgagtatgggcaacattgaatgaagtaattaaggttccaggagttgattttgctatgtttctctcctttgatattacttggatgcaactagcagaataagtgatgcttcatttgtagcttagatttttatggtgtttgagagctaactcattgagaatggctgcctctattgttggtctactcttgtttatgcaattatcaacattct

SEQ ID NO: 10206 - DNA, 1578 bp, Gossypium hirsutum
  Clone ID: GOSHI-09MAY01-C10547_1
gggggggccgcccgcccacggtcaatcatctccctctacaaaagacaaaagctattttctgaaatcttccatcttttgatcaaagcaaaaacaaccagaattcaatggggaagaaagctgtgttgattggaatcaactatccaggcacaaaggctgaactgaaaggctgcataaacgatgtgaagagaatgtacaaatgccttacagaacgctatggattctctgaagaagacatcacggtattgatagacaccgataattcttatgatcaacccacagggaagaacatcagaagggctttgaatgatcttgtgagatcggctgagcctggggattttctgtttgtgcactacagtggccatgggactaggcttcctgctgagactggggacgatgatgatactggctacgatgagtgcattgtcccctgcgatatgaatctcatcactgatgatgatttcagagagttggtggataaagtcccaaaaggtagccgcatttcaatcgtatcagattcatgccacagtgggggattgattgatgaggccaaagagcaaataggtgatagctctaagccccaagattcagaatcagaatcaggttcaggtgggtttaggagcttcttgcaccacactgtacaagatgcatttgaatctcgtggaattcatgttccttctagattacgccaccgcgaccaccaccatgataaggaagaggtggatgacaggggagtgaatgaagactatgatgacagtggctacgtcaaaagcagatctctgcccctctcaactctaattgaaatgctcaagcagaaaactggcaaagatgatattgatgttgggaagctaaggccaaccctttttgatatgtttggcgaagatgcaagccccaaagtgaagaagtttatgaacatcattatgaccaaactgcaggggagtggcgatgacggtgaagggggtggtttcatggggaaggttgggaatctggcactacagtttcttaaacaaaagctggatgatgacgaaggatacggtaaaccggcacttgagactgaagtgagtagcaagcaagaggcttatgcaggagctggtaagcactctcttcctgacagtggaattcttatcagcggctgccagaccgaccaaacttcagcggatgccagcccatcagggaatgcaagcaaagcttatggagcacttagcaatgctattcaaaccataattgccgactcagatggctcaattactaataaagagcttgttctgaaggccaggcagatgctcaaaaaacagggcttcactcagcaacccggcctttattgctgcgaccatcatgtcagagctccatttgtctgcgaatactaatcttttatctgcaagcttcagaaacaaataaagtctatgatttggtcagagaattgttgttgatgagattgtactgcttgtctcactttcgatttatccatatatttacagtttgtgtgcttctggacattgaatggattttaaacaaaaaatgatttatctattgcagctataacttgaacaaaaaaaaaaaaaaaaaaagtcgacgcggccg

SEQ ID NO: 10207 - DNA, 428 bp, Gossypium hirsutum
  Clone ID: uC-gsronu33B107e09b1
tggtgtcaggccctgaggtctgcaaggaccagcaactgtgtgaaaccatgatcagtgatgagagtcatatcgtatgggacaaggcactactactatcccgacacatggtggtgtcatattgctgccacagtgggggattgattgatgaggccaaagagcaaattggtgatagctctaagccccaaggttcagagccagaatcagaatcaggttcaagtgggttcaggagcttcttgcaccacactgtactagatgcatttgaatctcgaggaattcatgttccttctagattacgccaccgcgaccaccaccatgataaggaagaggtggatgacaggggagtgaatgcagactatgatgacagtggctacgtcaaaagcacatctctggccctctcaactctaattggaatgctcaaagcagaaact

SEQ ID NO: 10208 - DNA, 434 bp, Gossypium hirsutum
  Clone ID: GOSHI-09MAY01-C10497_2
ggagcagtgcctaggatcaaagagtctaagctctctctcctcacatacggcaaacttaacaatgtgcctgaagctgtttgcatgcaacatttgatggggattgatggagtgatagttgattttgtccaagagatctcgcatgcagtggatgacatgattgtcaggccgttaaatgagggattaagagaaggggaccacgagactgggaccaagtcaaagctgcagttctcacagcaggagctctcttttctcttaaagctaattccagagttgatacaccactaacttgtccctaccactacagtttttttgtttttttaccaactttacctctctttttcttttttttttaaatattttggggctgccttgctggattccttcgaagaagtcaaggtgacatttttatgtataaagtacataattaatccatt

SEQ ID NO: 10209 - DNA, 969 bp, Gossypium hirsutum
  Clone ID: GOSHI-09MAY01-C10497_1
cccacgcgtccggggtactgtcttcgaaaaaagagtcacagtgttatctctggaggaatttctatgcgttggaccccagagagaagcagggaaacaagggaagagtttgttgagaaaaaccaaagatggcaaaattctcaactggaatgttgaaactgatgattcattttgtacattggctgaaaccttccagaaagttgatccttctttaggtttcaatattgaattgaaatttgatgaccatattgtttaccaacaagaccatctcatccatgtcctccaagtcatcttgcacgtggtatctgagtatgctaaagataggcccataatcttctctagctttcaccctgatgctgctcaactggttaggaaattgcagaacacttaccctgttttcttcttaacgaacggcgggactcaagtttactatgatgtaagaagaaactccctggaggaggccataaaggtgtgcatggaaggaggtttacaagggattgtttctgaggtcaaaggagtgttcggaaatccaggagcagtgcctaggatcaaagagtctaagctctctctcctcacatacggcaaacttaacaatgtgcctgaagctgtttgcatgcaacatttgatggggattgatggagtgatagttgattttgttcaagagatctcgcatgcagtggatgacatgattatcaagcctttaaatgagggattaagagaaggggacgaggagactgggaccaagtcaaagctgcagttctcacagcaggagctctcttttctcttaaagctaattccagagttgatacagcactaacttgtccctaccactacagtttttttgtttttttaccaactttacctcttttttaatatttggggctgtcttgctggataccttcgaagaagtcaaggtgacatttttatgtataaaatacataattaatccattaattttaatgcctttacatt

SEQ ID NO: 10210 - DNA, 661 bp, Gossypium hirsutum
  unsure (1)..(661): unsure at all n locations
  Clone ID: AI054457.1
tcactgccaaaaaatctgtcaagatacagacactttcgaagataatgattttgcacctgatgcgttttagctatggtagccaggggagtaccaagctgcataagcctgtacacttccctcttgagctggtattgggtcgggaactacttgtttcctcatccaccgagggccgaaaatatgaacttgctgctacaataacacatcatggaagagagccctccaaggggcattatacggctgatgctcgataccccaacggccaatggctgcgttttgatgatgcctctgtcacagccattgggacaagcaaggtgttacatgaccaagcatatgttcttttctacgaacaaacgtagaagtcgtcgctattttactccttgttcgcatgatattcacccgagtactatggcgcctgtttgctaatatcatcattacagaattggctccttgatttttccttcccttgtaacagttagtcacgctttaccttcaatggatnagttaactgcagcccatatatatacatatatataggtttatgtattgataatcaaactgtgagaaagtacttanaatnttctaatgttcttgaactactagtggggtatatntttggtntagtttattaaaaaaaaaaaanaaaaaaaactcgaggggggcn

SEQ ID NO: 10211 - DNA, 341 bp, Gossypium hirsutum
  Clone ID: LIB3166-030-P1-K1-D8
atcattacagaattggctccttgatttttccttcccttgtaacagttagggacgctttaccttcaaatggataagttaactgcagcccatatatatacatatatataggtttatgtattgataatcaaactgtgagaaagtacttaaaatttttctaatgttcttgaactactagtggttattattttttgttttagttttattattactgttgttattactatcattataagacaactgcccttttaggtatatagaataaatatgcatgtatacaataaataggacatacactattatattcttatgtatacatgtatataacaaggccctctaattgt

SEQ ID NO: 10212 - DNA, 490 bp, Gossypium hirsutum
  Clone ID: GOSHI-09MAY01-C10737_1
cctctgtcttttttccccctctatttctctttcaatctttgttacacaaattatctccaaagcttgaaaatgaagaaagtggtgctgaaattggattttcacgacaacaaatgcagacagaaagccatgaaaacagcctctggtctttcaggggttgaatcagttgccctggacaaggaccaaaaactcacactcacgggagacgttgatccagtcgtggcagtaaggaaactaaggaaggtatgttacactgaaatagtctcggtcggaccggcgaaagagccggagaagaagaaagatgagcccaagaaagacgaaccgaataaaccggcggatacgagcaaagatccgcccaaaggcgcggtggtacagtacttttatcacccctcaatgccccagtactacccgccggtacccgattattacagttaccgttaaagtgcggatgaagattcctttggttttcctttttgctaatttttttttcttt

SEQ ID NO: 10213 - DNA, 741 bp, Gossypium hirsutum
  Clone ID: GOSHI-09MAY01-C10627_2
cccacgcgtccggaggaaaaaggacatttggctgctactgtaaagcactaaaagaggggaatacaaaaaacccaagcatttcttccgccgcgcctccctcagtcaagcccttccaacactcttcagcttgaactctccgcaacaatgtttcgatcagtagctcgatcggccgccggaaagcacctcctccgccgaggatatgccactgaatctgttcccgaccggaaggtcgcggttttgggcgctgccggagggattggccagcccttggctctcctcatgaagcttaaccctcttgtttctcggctggctctctatgatatcgctaacactcccggcgttgcagctgatgtcagccatgtcaacaccagatctgaggttgctggatatgttggtgaagatcaattgaagcaagctttggagggatgtgatgttgtcatcattcctgctggggtgccaagaaagcctggtatgactcgcgacgatcttttcaacatcaatgctggaatcgtcaagggtctatgtgctgctattgccaagtattgccctaatgcacttgttaatatgatcagcaaccctgtcaattcaactgttccaattgctgctgaggttttcaagaaggcacggacatatgatgagaaaaagttgtttgggtgtaactacccttgatgcggttagggctaaaactttctacctgggaaagcaaaattgaatgttgcaaatgtcaatgttccattgtcc

SEQ ID NO: 10214 - DNA, 1376 bp, Gossypium hirsutum
  Clone ID: GOSHI-09MAY01-C10627_1
cccacgcgtccgcccacgcgtccccagactcccccaaaaccctcaccacaaaagaaatctcttctatttttccccactctactgcaaaaatgtttcgatccgttgctagatcggccgccggtaagaacctcctccgacgaggatatgcaaccgccgtacctgaacggaaagtcgctgtcttgggcgcagctggagggatcggccaacccttggctctcctcatgaagcttaaccctcttgtttctcaactggctctctatgatatcgctaacactcccggtgttgccgctgatgtcagccacatcaactctagatctgaggttgccggatatgttggtgaagagcaattggggaaagctttggagggatgtgatgttgtcatcattccagctggggtgcctagaaagcccggtatgactcgtgatgatcttttcaacattaatgccggaatcgtcaagggtctatgttctgcaattgctaagtattgccccaatgcacttgtcaatatgatcagcaaccctgtcaattcaactgttcctatcgcagctgaggttttcaagaaggcagggacatatgatgaaagaaagttgtttggtgtaaccacccttgatgtggttcgggctaagactttctatgctgggaaggctaaagtaaatgttgcagatgttaatgtccctgttgttggtggtcatgctggaattaccattctcccactattttctcaagccacaccaaaagccaatttacctgaagaggatatcaaggctctcacaaagaggacacaagatggaggcactgaagttgtggaagccaaggctggaaagggttcagcaacattatcaatggcctatgctggagccattttcgctgatgcttgccttaagggactgaatggcgttcctgacgtagtggagtgctcatttgtgcagtcaactgtcactgaactccctttctttgcttccaaggtgaggcttggaaagaatggtgtggaggaagttttggggttaggccctctctctgagtacgagaaagaagggttggagagcctcaaaccagaacttaaatcatctattgagaaggggatcaagttcgccaaccagaattaaacctgaactacttatgatttcttccattagcccaatccgaaattcttaaaaagttttttttttgtgttactgttgtatttcatgctgcaagcagcatcggctttactgaataggataggccctacataccatcaagttttcaagtaataattcccagtgacctgttacaaaggagggtttggttttaaaaaaaaaatctatttttccagtttaggtggggtgttccattcatttaactatataaattgtgaaatcacgtttgctctgggg

SEQ ID NO: 10215 - DNA, 514 bp, Gossypium hirsutum
  Clone ID: uC-gsflmaxxa058f09b1
tcgcttacgcgtgggtggctatcggcggtctgatttccaaccggagtttcggttcttttatcggttcaggtaaagtatgtcaaggggaacaagccattttgcttcacaagggagagagatcaggcattgctgttctgcatggtaacatgttttaccgaaagctttggagggatgtgatgttgtcatcattccagctggggtgcctagaaagcccggtatgactcgtgatgatcttttcaacattaatgccggaatcgtcaagggtctatgttctgcaattgctaagtattgccccaatgcacttgtcaatatgatcagcaaccctgtcaattcaactgttcctatcgcagctgaggtttttaagaaggcaaggacatatgatgagagaaagttgtttggcgtaaccacccttgatgtgggtcgggctaagactttctatgctgggaaggctaaagtaaatgttgcagatgtttatgtccctgttgtcggtggtcatgcttgaattaccattctt

SEQ ID NO: 10216 - DNA, 416 bp, Gossypium hirsutum
  unsure (1)..(416): unsure at all n locations
  Clone ID: LIB3135-004-Q1-K1-H4
gcgacacgcgtacaaccactcgtacagaagacacataagttattgttcaccactctactgcaagcccggtggacaacgctgacatgctggacttcgataatatcctattcaaactcaaagatgcatatcacgggcatactctcaagcttcctatttctttcgctagacgtgcaaacgatacaaccgatgctataaccatgatacttgacatgctccaagctgaactggctctatataactgatcacactcttcaaagggagccacgtggatatcacgcaacaacttcttataatcacgttcacaatatatgaccagcaaagatctttcgtgntaatgctttggaaggatgtgatgttgtcatcattccaaccggggtgcctagaaagcccggatgactcgtgatgatcttttaaca

SEQ ID NO: 10217 - DNA, 418 bp, Gossypium hirsutum
  Clone ID: LIB3197-027-Q1-M1-B8
ggaagttatggggttgggtcctctctctgactatgagcaggcaggtttggagagccttaaaccagaacttaaagcatctatagagaagggaatcaagtttgccaaccagaattaaatttatattatttgagatattcttccattagaacaatgaaaattttgcagttacttcggctgctattggtgttttttttcttgcagcaagcagcatcggctttgctgttgttaataggatagccataccataagtttccactaataattcccagtggtatgttgcaggaagtgtgtgattaaaaacccgtttttgtttaggtgggggatgtttaattacaaaccattttaaaattgtgatattacatttaatcttccacgattattccgtctttggtggtgacgaaagcttactttttatcct

SEQ ID NO: 10218 - DNA, 353 bp, Gossypium hirsutum
  Clone ID: LIB3083-091-Q1-L1-E6
cccataaccttcaccacaaaagaaatctcttctagggagggcactctactgcggaaggtgggccatccgatgctagatcggccgtcgataagagcctcctccgactaggatatgcaaccgccgtacctgaacggaaagtcgctgtcttgggcgcagctggagggatcggccaacccttgactcttctcatgaagctcaaccctctcgtttctcaactggctctctatgatatcgctaacactccccgtgttgccgctgatgtcagccacatcaactctagatccgtggtctgccgtatatgtacgtgaatagcccattgggaaagcttttgaggatgagatgttcatatcatt

SEQ ID NO: 10219 - DNA, 349 bp, Gossypium hirsutum
  Clone ID: uC-gsflmaxxa070b09b1
cggactcgtgggtaaagcatctatagagaagggaatcaggttctggtttaaggctctccaaacctgcctgctcatagtcagagagaggacccaaccccataacttaaagcatctatagagaagggaatcaagtttgccaaccagaattaaatttatattatttgagatattcttccattagaacaatgaaaattttgcagttacttcggctgctattggtgttttttttcttgcagcaagcagcatcggctttgctgctggtaataggatagccataccataagtttccactaataattcccagtggtatgttgcaagaagtgtgtgattaaaaacccgtttttgttta

SEQ ID NO: 10220 - DNA, 293 bp, Gossypium hirsutum
  unsure (1)..(293): unsure at all n locations
  Clone ID: LIB3493-033-P1-M1-H9
aaaggctggaaagggatcagcaacagtatcaagtgcctatgctggtgcaatttttgctgatgcttgccttaagggactgaatggtgttcctgatgtcgtggaatgttcatttgtacagtcaactgtcactgaacttnccttctttgcttctaaggtaaggcttggaaagaatggtgtggaggaaggtacngnatacttcttctgaacattttttgtgctatattataggtcacaagaatcttttaggggattttttctttatcctttttatttgggggggggggggggggggt

SEQ ID NO: 10221 - DNA, 1322 bp, Gossypium hirsutum
  Clone ID: GOSHI-09MAY01-C10197_1
ataagaaaatattttctttaaaaaaaactaaaaaaaaaaaacatattataagaaaacacacacaaaaagaaaccaaacaaaaaggttgtcccctttgttagccgttttctctatcgatttgcggagtctctctctttttcttttttttcctttttctttcttgtatttctcagtgtatgaagtgacgatctttaaggttttcttttggattttacatcaatggaagccatttagataaggcgggaaaatctgaaccagaccgttctttcataaaaggggaattttttttcccattcgatcatggcggttgctgagaatgacgggtcgaaaatcgggtcatcgggtcaaaatttggtgccggttgacaccgatacggtcagcgattccggtaaaccgaaaaccaactccgattccatgactgttactaagactaccgaggaaccacgagcagcagcaggagaagccatcaacggcgatgggttcaacgaaaacaaccaccaccaccagcagatggctacaatgaccgataagcttaatgggtttaccagtgttcaaaatgggggtaataatggtgaaattctcaagaaaaacatcactgatttggttgaaactttgtctaagcttaaccccatggctgaagaatttatacccccttccctaatcaatcatcatcagcaacaacaccctccgtccgcggccccgtggcgggaaaatgggtttggatttagggctgaaaatactaatagaaggaaaaggacttactttagccaagggaagagaaggttgaataatcgaaccagcattgcgcaacgagaggatgcgattcgaaaaactgtatacgtatccgatatcgatctgcaggttactgaggagcttcttgctggtctttttctaagttgcggaccggttgttgattgtcgtatatgcggtgatcctaattctgttctccgctttgcgtttgtcgagttctataaagaagaggatgcaaaggctgctttgaatttgtccggcaccatccttggttattaccctctaaaagtgatgccttccaagactgccattgcgcctgttaacccaacttttttacctaggtctgaggacgagcgggaaatgtgcacgaggaccatttactgtacaaacatcgacaagaagattactcaagctgatgtcaagctcttcttcgaatcagtttgcgggaggttcaacgattgaggctattgggagactatcatcattcaactcgaattgcttttgttgagttcacattggctgatagtgcgatcgcagccctcaactgcagtggtgcagttttgggatcactg

SEQ ID NO: 10222 - DNA, 573 bp, Gossypium hirsutum
  Clone ID: GOSHI-09MAY01-C10157_1
gcgcccacgcgtccgcgaacgcaagcaaaaaatttaaagttcgataatactttattttgataaaaataaaatgccgatttctcgaatcgcagtcgggtctccggccgaagccggccaagctgatgcactcaaggctgctttagccgagttcatttcagtgcttatttttgttttcgccggtgaaggctcgggcatggctttcaacaagttgaccgacgatggctcctcgacaccggcgggtttagtagctgcggcattggctcacgccttggcgttgtttgtggcggtttcgatcggggctaacatttccggcggacacgtaaaccccgccgtcacgttcggtgctttcgtgggtggccacattacattggtgaggagtattttgtattggatagctcagttgcttggatctgtcgttgcttgcttgcttctcaagttctcaaccggtggaatgacaacatcggcattttccttatcatccggggtaggagcatggaacgcactcgttttcgagatcgtgatgaccttccgcctggtttaccccgtttacgccacagcggtcgacccgaaaaa

SEQ ID NO: 10223 - DNA, 569 bp, Gossypium hirsutum
  Clone ID: GOSHI-09MAY01-C10147_1
atggcattttcccaacttatcgtgatagtccattgccagcagcatttaatcgtgttttacagtttggtgatgctagtggcatacaatcacctgtctcttttggtggtttcgggagcttgactaggcacctcggaagattatcaaatgggatttacgaagcaattgatggggattttctcgattcatacagtttgtccctgctgaatccttacatgcctaacttgagtgcttcatggttgtttcaaagagcaatgtctgcaaagaaacagtctaatgttccaccggattttattaacgagcttcttgacataaacttcaagagtatggagaggcttggagaccctgtgctaagaccgtttcttcaggatgtcatacagtttggacctcttgccaagacattaagcctcgtgatgctaactaagcctcaaattcttccatcgatattcaagcaagttgacatccctgttctcatcgattggtctcgacattttttcatgctcggatattatacgtttctctcgacctacatggatcctgttataaggtcatggttaaatggtttgccatcg

SEQ ID NO: 10224 - DNA, 640 bp, Gossypium hirsutum
  Clone ID: GOSHI-09MAY01-C10137_1
cccacgcgtccgtccaaacacctttccatttccccccatcttttttttcggtaggttccttttatcttttccatctttctatgcaaattcgaatatcatccatggcagttcccagctgtaccataaaatccagaccctattcaacaaaacaacacctttattccttcttcttcataatcatattttccttcctctttttaccctcttctttttcatcctcttctccttcaatccacgatcttctcgtttccagagggttaccggcaggtttgctcccaaaagaagtgaaatcttataccctttcagacaatggaaccctggaagtgttgttggacgaaccctgcttgacaaagtacgagaatagggtgttcttcgacagtgtagtgagggctaaccttagctatggaagcttgatcggggttgtcgggttaagccaagaagaactgttcctctggttgcctgttaaagacatcatcgttaatgacccgacatctggtctcatcttgtttgacataggacttgctcacaaacagctttcgttgtctcttttcgaagacccttctctgtgtcaacctcaaggaatatcgaagataatgtgaggaagagaatagatttgagggttttagataggaaaaggaga

SEQ ID NO: 10225 - DNA, 817 bp, Gossypium hirsutum
  Clone ID: GOSHI-09MAY01-C10097_1
attctccaagccgacgctcactctccactctcatactgtcgctactctgctctactccacaaccctgtctcgccttaccggccccgcagctccacacgctctatgcttacactgcgcccctgcgtctaccctattattagagttcgcgccatcatttttgctgctgctctcattttacaggattgcgttagaggatgagttcaagaaaagggaatgggaatccttttgtttatggtggtattaacaacccatcgtccaaggggaaagacatatctggatcctctagctccaaggttgagcagctaagccagggtgtagcggacatgaacctgggtttgcctcaagacgatggtgagtgggaggttattcaaaggaagcctaagaatagaactggaagcagtgctgcaagaccttggggtcctcaaaattccaatagtaaaccgcggggagcgatgcggactaatgctgtatcaggaagagcctctggcaatgattgggatactcataatactgattccaggatggcaactggcagaggaaatgcaagaccccaaacattcaacaagactattgagaacaacaatgtgccaccacatcctgtcattcgcccaccccttcagtatggatggaattggcaatctagaactggttccaatccatccggggggttacaagatgatcatggaaaaaacaatgtcagcactgagggtgaagaggtcaatgatattgatgatgttgaggatgactcagatgataacgctattgatgattctgatgatgaacttctaaccgatgacttgattcagattcaagtcaa

SEQ ID NO: 10226 - DNA, 385 bp, Gossypium hirsutum
  Clone ID: LIB3166-022-P1-K1-A4
cggacgcgtgggctactctgctctactccacaaccctatctcgccttaccggccccggacctccacacgctctatgcttacactgcgccccctgcgtctaccctattattagaggattgtgttagaggatgagttcaagaaaagggaatgggaatccttttgtttctggtggtattaacaacccatcgtccaaggggaaagacatatctggatcctctagctccaaggttgagcagctaagccagggtgtagcggacatgaacctgggtttgcctctagacgatggtgagtgggaggttattcaaaggaagcctaagaatagaactggaagcagtgctgcaagaccttggggtcctcaaaattccaatggtaaaccgcggggagc

SEQ ID NO: 10227 - DNA, 459 bp, Gossypium hirsutum
  Clone ID: GOSHI-09MAY01-C10017_1
ccttcgcgttcgcttcatttccctatcttctctgcaaatggtctatcctttccttttcttttctttttttccttcttctttgtgtagacagatacaatgatgtcaattaacaaagggaaagaaatagctgaaggttcttcaggaccggctgctgttgctgttggtgctgctgttggtggtgttggtgggggtgatcagcggaatccaccgccgttgagcaggtacgagtcgcagaagagacgggattggaacacgtttggtcagtacttaaggaaccaaaggccaccggttgcactttctcagtgtaacgctaatcatgtccttgaattccttcgttatctcgatcagttcggtaagactaacgtgcacttacaaggttgcgtgttcttcgggcaaccggagccgcacgggaccatgtacgtgtccctcttagacaagcttggggtagtctcgacgctc

SEQ ID NO: 10228 - DNA, 792 bp, Gossypium hirsutum
  Clone ID: GOSHI-09MAY01-C10007_1
gcttcagcagcaaagaaaagactctccaaggtttatctcaagaaactaagaaatctaagcatgcctggaagtagaattccagattggtttacacaagatatggttaccttttcaagccacaaaacccgtgatctcactggggtgataatcgcagttgttgtttccattaaccatcatataccagatgaactgagataccaactgcctgccgtgccggacattcaagcacagatcttcaatggcgagcaggcaataatgaccactgcattgaacttaattggggtacctagaaccaaccaagacaatgttcacttgtgtcgatatcccgcatatcgtcccttggtttccatattgaaggacggttttaagattaaagtgaccaggcgaaacccgccctacgtacagggcgtagagctgaagaaagctgggatttttctagtttatgaaaacgatgatgattatggtggcgatgaagattcactggatgagaaccagcagtctgtatcagaaaaattagccaagtttttcagctctcttgaataaaatgatggaattgatcaccaatccaactgcagccgtgaaataaaagaagagcttcaactccaaagtaagaaacaaaaacgtcgcccaatcaaatcgtgctgcagttggtgcgggaggttaagcgtaaaataatgagagatttcaaggcgtgtatgcctatttctgttatttcacttcactcaagttgaacgcagtatacattcttaggatccattgggatgtataatgaaatagattttagtgagtcag

SEQ ID NO: 10229 - DNA, 1437 bp, Gossypium hirsutum
  Clone ID: GOSHI-09MAY01-C10357_1
cggccgcgtgggcggccgcgtgggcgggcgcgtgggcggacgcgtgggtccaactgctgtcatggttgctacaggggttggagcaagtaatggtgtgttgataaaaaggaggagatgcactggaaagagctcagaaggtccagtatgttatttttgacaaaactggaactttaactcagggcaaagctaaggtcacaactgtaaaagttttctcagagatggaccgtggagaattccttacactggtggcttctgcagaggctagcagtgaacacccattggccaacccgtttcgccccgcggctccccccttccatttctttgatgagaattcgttaactgaagatgcccaatacagcagcaaaggatctccaatttctgcctggcttcttgatgttgcagagttctctgctgtgccaggaagaggaattcagtgttttattgacggaaagcaagtgctggttggtaacaggaaactgcttacggaagggggagttagcatttctgcccatgtagaacaattcgtggttgatttggaagaagggcgaggacaggcatacttgcagcctatgatggtaacgtgattggagttttgggagtagcagatccatttgaagagagaagctgctgtggttgtagaaggcccacgcgtccgccctcgcggccccccccgcgtccccggggataattggaggacagctcaagctgttgctagggaggtgggtttccgagatgttagggcggaggtaatgccggctggaaaagctgaagttgtccgatcattccagaaggatggaagcatagttgctatggtgggtgatgggattaatgattctcctgcactagcagctgcagatgttggtatggcaattggggcagggacagatattgccatagaagctgcagactatgttttaatgagaaataacttggaagatgtgatcacagccatcgatctgtccaggaaaacatttagccggatacggtggaactatgtttttgcgatggcgtacaatgtggtggcaataccaattgctgctggggttttgtatccatcattagggataaagttgccaccatgggcagctggtgcctgtatggccctttcctctgtaagcgtggtgtgctcttctttacttcttcggagatataaaaagcccagacttaccactatacttgaaataactgtagagtagaaacaaaatttgaacaactatttttctctccatcaccttcctttaggtttgtgtttttataagaaggaaattgagggggtgcgagtgaatcataaatttcccaattttgtgaacttccttttggtcctctcctttgtagtcatagggaatagagggtggaagttaaaacaccccattaaaatgtaaatggactttgttgtatactatatggtcaatgatgcgtctttttgttttttctttc

SEQ ID NO: 10230 - DNA, 311 bp, Gossypium hirsutum
  unsure (1)..(311): unsure at all n locations
  Clone ID: LIB3166-025-P1-K1-A5
tgttgataaaaggaggagatgcactggaaagagctcaaaaggtccagtatgttgtttgtgacaaaactggaactttaactcacggcaaagctaaggtcacaactgtaaaagttttctcagagatggaccgtggagaattccttacactggtggcttctgcagaggctagcagtgaacacccattggccaaagcaatagttgaatatgcacgccacttccatttcttttatgagaattcgttaactgaagatgcccaatacangcagcaaggatctncaatttctgcctggcttcttgatgttgcagagttc

SEQ ID NO: 10231 - DNA, 703 bp, Gossypium hirsutum
  Clone ID: GOSHI-09MAY01-C10327_1
gtgagcactcattttttatcctgttcattgtcctccctctctggcgctgttttccttccaaaaaacagagggtctagttggaataagaaaattatatgctatgtacatttctgcaaattagtgtgggtttttgaaccacttaagctctgctttcattgcttctggttcaagcaaaaaaccaacatagattccatctctttttccaatggatgtactttaaatctaaacagatctagtgggttgttttcaaaatctgtttttgttggttgttctttgttctttccttctttttcctgtttttgtttcttttacaatttagtcctcccctgttttttttttcccaaaatggatcggcttccttcaacaactatcttccccgacacaaccgatgatttgtcgatgcaaatggcagtgatttggggccaaatcaaagcaccattgatcgtgccattgttgaaactcgccgtcgtggtttgtttgataatgtctgtaatactttttattgaaagagtttatatggggatagtcattgctttggtcaaactgtttggtcggaaaccagacaaaaggtttaaatgggaagccattaaagatgatgtcaagttggggaactcagcttatcctatggttctggttcaaatcccaatgtataatgaaaaaaaggtttatcaactgtccattggaactgcatgtggcctctcat

SEQ ID NO: 10232 - DNA, 1072 bp, Gossypium hirsutum
  Clone ID: GOSHI-09MAY01-C10267_1
tccgggaccggggcggacgcgtggggaacactggtgggcgccgcgcgcggccagctagctaagcggaaaacttcgttctcctaaagaacgttaaaagtgaaagcaagcgagatagagagggcaaagcaaagatgcagagagtgaaggctgtattaaaagctaggcattcatttcaaagacttgggatcctctctcatcaaagatgtctctctgctcagcccaactatgctctatatgatgatttcgaggaccaggttttagtggaaggaagagctaaatcaagagcagcaattctcaacagaccttctgctctcaatgcacttaccgcctcgatggcagctcggctgaagagattgtatgaatcatgggaagaaaaccctgatattggttttgtcttaatgaagggcaatggcagggctttctgttctggggttgatactgttgctctccatcgcttacttaatgaagggaaagtttatgaatgtaaaaggttttttgagacgctatataagtttgtatacctacaaggaacatatttgaagccgcatgtggcaatcttggatggtataacaatggggtgtggaggtggaatttctttgccagggatgtttagattagtgactgataaaactgttttttctcatccagagactcaactggggttccatcctgatgcaggggcttcattttatctttctcgcctacctggttacttaggggaatacttagctctaacaggagacaagcttaatggtgttgaaatgattgcctgtggccttgctacccactattgcttaaatgctaggcttgcttggattgaagaacgtctcggcaacttgatgaatgatgatccagctgccatagattcttctcttgcacaatatggtgaccttgtttatcccgataggagcagcattcttcgcaggattgacacagttgataaatgtttcagccatgacactgttgaggaaattattgattctctggaaaatgaagcagctggagcttatgatgattggtgcaagacagtgctgggaaaaatgaaagaagcctcaccgttgagcttgaaagt

SEQ ID NO: 10233 - DNA, 575 bp, Gossypium hirsutum
  unsure (1)..(575): unsure at all n locations
  Clone ID: LIB3582-050-P1-K1-F12
ccgggtcgacttcgcgtccggtgggatgcgaggcgaggcgaggccagctagcgggggcgaaaaagcttcnttctcctaaagaggcgtcaaaagtgaaagcaagcgagatagagagggcaaagcaaagatgcagagagtgaaggctgtattaaaagctaggcattcatttcaaagacttgggatcctctanatcaaagtgtttctctgctcancccaactatgctctatatggtgatttcgaggagcaggttttagtggaaggaagagctaaatcaagagcagccattctcaacagaccttctgctctcaatgcacttaccgcctcgatggcagctcggctgaagagattgtatgaatcatgggaagaaaaccctgatattggttttgtcttaatgaagggcaatggcagggctttctgttctggggttgatactggtgctccccatcgcttacttaatgaagggaaagtttatgaatgtaaaaggttttttgagacgctatataagtttggatatctacaaggaacatatttgaagccccattgggcaatcttggatggaataacaatggggtgt

SEQ ID NO: 10234 - DNA, 387 bp, Gossypium hirsutum
  Clone ID: LIB3146-030-Q1-K1-B8
aactggggttccatcctgatgcaggggcttcattttatctttctcgcctacctggttacttaggggaatacttagctctaacaggagacaagcttaatggtgttgaaatgattgcctgtggccttgctacccactattgcttaaatgctgtttgttttttcttctgcttcttattgtgcttttcctcctttcctcttttctcaacttatttgaacaaactgccctatagagacttgcttggattgaagaacgtctcggcaacttgatgaatgatgatccagctgccatagattcttctcttgcacaatatggtgaccttgtttatcccgataggagcagcattcttcgcaggattgacacaattgataaatgtttcagccatgacac

SEQ ID NO: 10235 - DNA, 482 bp, Gossypium hirsutum
  Clone ID: GOSHI-09MAY01-C10217_1
cttaaaacgttaaacgcggctttctctctatttcttttctgcagcgagttactgagtcaacaccacgatggccgaacgaatccaccccggcgactcaccaccgtcttccggcgaacactcgaatcccaagccagctcctccttcttcagataaacctattccacaacccggaacttacgtcgtccagatcccgaaggaccaagtctaccgcgttcctccgccggagaacgcccgccgctacgctcatctgtcgaaacgtaagtcgagtcgcagcacctgttgccgctgctgctgctgctttttaacaactatcctctctctcctccttgccgccgccattgccgccgctgtgatctacttcgttctcaagcccgaagctccaaactactccgtcgggagcgttgcgatcaagggattcaacctcacgtcaccttctccgctatcgccagaattcgacgtcaccgtccgggctgacaacggca

SEQ ID NO: 10236 - DNA, 771 bp, Gossypium hirsutum
  Clone ID: GOSHI-09MAY01-C10237_1
cccacgtgtcgggcccaccgaactgaacctcctctccagaggctttctctaccttttccacaccccccccccccaatatggcgatttcggcgctccaaaaactcacctcccaaatccaccgtctcccatatctctcctcccaaatcctcacccgatcctccgccaccttaacctcctccccctcctcttccaaaaaagttgctgatcggctcgtcaagctcttcgccatcgaccctgaaggccagaagcgtgaggttgtcggcctcgctggccagaccttacttcgtgccttgactaacagcggcctgatcgaccccgactctcaccgcctcgaggagatcgacgcttgctccgccgaatgcgaggtcaacattgcccaggagtggctcgagaagcttccgccgcgtacctatgatgaggagtatgtgttggtgaggaattcgaggggtcgcatcttgaacaagcattccaggcttggatgtcaggtcgtgcttacgcctcatctccaaggtatggtcgtcgccgtccccgaggctaagccgtgggatattccataaatatttgtaggggaaaaagagatgaatgtgggaacatttagtgcatttctgttgttttcctggaagtaataataattttgttactttgaatgaaacggattttatttatgatttttatgcattgctgccccatgtgatttgggtgcttggaaaaaaaaaaaaaaaataccaaaaaaaaaaaaaaaaaggaaggactaaaaatacgaaaatacat

SEQ ID NO: 10237 - DNA, 608 bp, Gossypium hirsutum
  unsure (1)..(608): unsure at all n locations
  Clone ID: LIB3828-033-Q6-K6-F11
cccggtcgacccagcgttcgcgnattcgacgctccaaaaactgggggggggagacgaccgggtcccatatctctcctcccaaatcctcacccgatcctccgccaccttaacctcctccccctcctcttccaaaaagttgctgatcggctcgtcaagctcttcgccatcgaccctgaaggccagaagcgtgaggggggggggggagctggccagaccttacttcgtgccttgactaacagcggcctgatcgaccccgactctcaccgcctcgaggagatcgacgcttgctccgccgaatgcgaggtcaacattgcacaggagtggctcgagaagcttccgccacgtacctatgatgaggagtatgtgttggtgaggaattcgaggggtcgcatcttgaacaagcattccaggcttggatgtcaggtcgtgcttacgcctcatctccaaggtatggtcgtcgccgtccccgaggctaagccgtgggatattccataaatatttgtaggggaaaaagagatgaatgtgggaacatttagtgcatttctgttgttttcctggaagtaataataattttgttactttgaatgaaaaaaaaaaaaaagggcggc

SEQ ID NO: 10238 - DNA, 473 bp, Gossypium hirsutum
  unsure (1)..(473): unsure at all n locations
  Clone ID: uC-gsflnu33B085f02b1
tcactatagggagaggtggcgcgcgccggtgcacctccgcagttcttgggtcgacgccacacgcgcgcctttactcgtctacctttttcagacctcccggatccattctgtggaatgttagcgctccaaaatactaagctcgccaaattccaccgtcaacccatattgtgtactaccaagtcctcacccgatcctacacaccttaacctgctgcccctcctcttccaaaaaagttgctgatcggctcgtcaagctcttcgccatcgaccctgaaggccagaagcgtgaggttgtcggcctcgctggccagaccttacttcgtgccttgactaacagcggcccgatcgaccccgactctcaccgtctngaggagatcgacgcttgctccgccgaatgcgaggtcaacactgaccaagagtggctcgagaagcttccgccgcgtacctatgatgaggagtatgtgctggcgagga

SEQ ID NO: 10239 - DNA, 1023 bp, Gossypium hirsutum
  Clone ID: GOSHI-09MAY01-C11937_2
cggacgcgtgggctgaaaggaaacttgttttagctccaaaatcaattttcaaaacctgtgttagtgccaaaaactaaatcttttgctgagtttcaagttaaaagttgatatctttcaactttgtctgttttgggttcttttttattgttaaaaattagccttgtttttagctggttgagcttaaaatccaaatgcgtttttgataaaatctcagaaagtttttagttttaactatggagtcaagagaagctgttactaatactaatattagtactaatactatcaccaccaccaccaccactactactactaccactgctggcgtaacggggggggggggccgatgctccatcggactaccacatagctccaagggtctgaaaactcgacccaaaatcctaacccggctcctggatccgctccgccgcagattcctcaacaaccggcggctcaacaagtccctcagcctgttgtggtgccgggggggcccttgaagaagaagaggggaagacctaggaagtatggaccggatggttcagtcactatggcgctctctccaaagcccccacccgcccctgccccacctccggttatcgacttctcagccgcgaaaagaggaaaagtgaagtctccgacgccggtttcaaaagctaagttcgaggtggaaaatataggggaatgggttgcatgctctgttggggctaattttacgccgcatatcatcacggttaatgccggtgaggatgtcacgatgaagattatttcgttttctcaacaagggcctcgagctatatgcattctttctgcaaacggggtgatctcgagtgtcactcttcgtcaacctgattcttccgggggtacattgacatatgagggtcgtttcgagatactgtccttatccggttctttcatgccaaatgacactggtggaacaagaaagccgatccgttggggtccctaaacagatcaaaatcgtggatgctaagtcttcggtgaccgtaaaatccgacgtgtatgccggat

SEQ ID NO: 10240 - DNA, 1269 bp, Gossypium hirsutum
  Clone ID: GOSHI-09MAY01-C11937_1
cccacgcgtccgcccacgcgccctcagcagagcagaaaaatagaaataaaaataataaaaggaagggattttttaaaaatttttaaattaagaaaaatttctagaaaaaaaaaatccttccttttttcctttgatttccccttatgagatcgtaaaatattcgagaatccctttttttttcctgtaaaatttatatatctaattatcgctttgtctttgattttatttggggttgtttttgggttaattaatatggggactgaagttttacgacctcaggattgtttgatcgaacggattcggttacctccgacggcgtgtcctcgccggagatacggaaacggtagctttaatcctagttattatcataactacaacaataacaatggaaatggtagatctaacaggaaacccgttcagaggaagcggatcggatcggagcaggggatttcgaagaaatacagctccgccgatgacttgaagacggtgaggaacaatgttatggtggagaaggttacgattatgagacgaggtgagtcgttggattcgaagatcaagatcgacaacggcggtggtggaagggaagggggtttggttgttatgggtacggatcgtttgggtccggatccggaaatggttcctaaacagatcaaaatcgtggatgctaagtcttcggtgaccgtaaaatccgacgtgtatgccggatcggctttctccgtttctccggcaccgagctcacttcctttacccactttctcgaagaagaaacaggttccggtcgatgattcagctacaagggatctcaggcgtttgctacggcttgatctctgatacccgaatatttagatttggatccaaataagcctgcgtctctttttatctccatctctctcttgatacgtttcgtctctatttagatatctccggaattttcaagatccgatgccctccgtgatattttttgaagacggtggacggatttgaaaatctggaaaattttaggggcgattagataatattccctgcttatcagtttatgcgttaaacaagtggggtttctttaaggaaaaaagaaaaatcaagggggttgatatgtaatattaggggaatagtgggcgagggttgagttttaaaatgttgagatgggaaaaatgcttttctgctccgttgtgaaaaaagtttgtaagagatttgcaatttagtcccttcgatgtaaagtaaagataaaattagggagaaatttgagcagatttctattattattactag

SEQ ID NO: 10241 - DNA, 266 bp, Gossypium hirsutum
  Clone ID: LIB3583-012-P1-K1-E5
gcgtaccagctttcactataataaatagacatttgcttttaattgtgctgataaacatattttatgactgtaactaaacagtcatttaaatactacactgctaatagactttactataaaaattttaaattataatcgacggcgtgtcctcgtcggagatacggaaacggtagctttaatcctagttattatcataactacaacaataacaatggaaatggtagatctaacaagaaacccgttcataggaagcggatcggattgga

SEQ ID NO: 10242 - DNA, 629 bp, Gossypium hirsutum
  Clone ID: GOSHI-09MAY01-C11927_1
cccacgcgtccgtttctatccaacatccattctttggtcgcaaaatgattaaaatatatatttttttttcaatctaatgttcttcattgatattagtatgttccactttttctttctttcattgttgcagaccatttttctatggcaccacaaaaatcagtggaaactattgggaaaaacttgagagatcaatatgagaagtggcagcccaagtaaggtcaaagttgatcctacagtggatgaagtgaagaaactttgtaatacatgttgcagatatgccaagttagagagttttatttcattacaatggacatggtgtgccaatgccaactgcaaatggtgaaatctggctgtttaataagatgttcacttgtttaactgttaggaatcaattcttgttgcttttcttttgctctatttgccaatttttctccttgataagcctgaacatttcctgtgcagagttatacacagtatattcccttgcctatcagcaatcttgattcttggctaaaaacaccttctatatatgtttttgattgctctgctgcaagaatggttgtttgttttccttccctagccttatctgttgcaggaatggttggtaatgcctttattgagctttttga

SEQ ID NO: 10243 - DNA, 860 bp, Gossypium hirsutum
  Clone ID: GOSHI-09MAY01-C11827_1
atggtttccaccatctcaaagatccccactcactccgtcttcatactcctcgttttgtcctcacccaaaccacccgtttcctgcttcatttccaccgccaccgccaccgccaccgtcaccgacaccgctgagaaccggactcagaaactcgaacgcatcgtcgacgagcttttagatcttacaaggctcgaacgctacgactattccatcctcttccgtcttaaactcggcctcaactgctacggacctgccgtatccggcgtatcctccgccgccgcttcgggtccgggaaccggatccagcgcagccgaaacgaaaacggcggaaaagacggcgtttgatataaagctggagaaattcgatgcggcggccaagataaagataataaaagaagtgaggacgttcacggaattgggtttgaaagaagcgaaggatatggtggagaaagttccggttgtggttaaaaagggagtaacacaagaggaagctgaggccattattaagaagctccaagaattgggtgctactgtggtacttgaatgattttatttatttgactaaaggtgtagaataattgttgttttgatgaaatgggaacaaaagtgtttgaggatattgttgttattggtattaccaatagaatttgaaagtgagaaactttgctgaagtcaatttgatccattgattgggtttgttttggaatagtttagtttagggtgtattgaaatgaatggattaggatggattaatggtagtacctgcagttcaccttctatttgagaatggtggtgaccggtgccaatgccccttggcgttgggtccctttaaaattcaagttgactcgtgattatgcttcattg

SEQ ID NO: 10244 - DNA, 387 bp, Gossypium hirsutum
  Clone ID: LIB3166-044-P1-K1-E11
ccgatagcgaacaagtaccgcgaggaaaagacggcgtttgatataaagctggagaaattcgatgcggcggccaagataaagataataaaagaagtgaggacgtttacggaattgggtttgaaagaagctaaggatatggtggagaaagttccggttgtggttaaaaagggagtaacaaaagaggaagctgaggccattattaagaagctccaagaattgggtgctactgtggtacttgaatgattttatatatttgactaaaggtgtagaataattgttgttttgatgaaatgggaactaaagtttttgagggaaaaaaaaaaaaaaaaaaataaaaaataaaaaaaaataaaaaaaaaaaataaaaaaaaaaaattatattatttt

SEQ ID NO: 10245 - DNA, 938 bp, Gossypium hirsutum
  Clone ID: GOSHI-09MAY01-C11597_1
cccacgcgtccgagcagctgcaacagcagcactagctgcggagaagaaagaaaaggagaaagcaaaggagataaaacttgcttcgaaaagcagtatcctggctaataagaagaaaatgaataatgtgttgacaatgtggaaacagaggagtcatgaagggcaggccacacgtttaactcttgatgaaaatcacttgtctacttcatctgaggatagacctctgcaatctggacaacatgcaaagaccaaagttaaatttgatgtgacgggcctgaaggagagtagtatatcaagttctggagtcaatacaactgcccaagctgcattgactgggggtttggagtctccagtcaaggcaaggcctgtaagcaacagctcaggggggactttaatgggagtaataagaggctcggcaagaggcgtggtaaagtctgatactccatactccggagcatctgctggaatttccacttcagctgtcggaggtgctgaagtttcttcaaccaattcagatatgcccacagttatgactccctttaggactgatgcttctgcattgggttcttatacaccttcaactgtctctgcaagtggtaagagaagagtttctgaaacaccagtgacttctactaccagcaaggagcaatctcaaactgcttacagagaccgtgcggccgagaggaggaacttgtatggttcatcatcttccacaggagatgatctgcctgaccctgagctcaggaattcgaatcgagatatggcattcaaaaaattctcctcagatccaatgcctttcccacctggtgttggtggtggacggggggttgtgtcagatgatgttcaaagctttgaggtgatcacagcagagaaagcatttgatgagaaatatgagggcatccaaatgctccgcaatatgggttggcatgaaggattgggat

SEQ ID NO: 10246 - DNA, 1176 bp, Gossypium hirsutum
  Clone ID: GOSHI-09MAY01-C11537_1
cccacgcgtccgcggacgcgtgggttctgcacctgttttatcacaacatttacttgatctttgtaaggaggatgtagaaagtttatgtatgacccttggctttgagcagcttagaagtttatgtgataagatggataacaaagaagcattagagcgggctaaactaatccaagatgcccggggatacaatagcaaccgcgtacagaaaaaaatagatgatacgaacggctcacatctgaatggttctgtggactcaaatggaagtatcctctcgagcagcagctctgagaagaaggagaaaccttggaccaaggaagagattgagcttttgagaaaaggaacccagaaatatccaaaagggacatctcgtaggtgggaggttatttcagagtacattggtacgggtcggtctgtggaagagattctgaaagctaccaaaacagtacttctccagaagcctgatgctaccaaagcatttgactcttttctcgagaagaggaaaccagcggctactattgcatctccactttccactagggaggaagtagaaggggtttctatgccttcaaggactgaaaacacaactgtgaagacaagcagccctgaagactctggtaaagctgcaagtaatcctgtcgatgtggtttctggcaatggtgtttcatcgagttcagaacaagatgtatggtctgctgtacaagaaagagcactgattcaggctctgaagacattcccaaaggaaaccagtcagcgttgggaacgagtagccactgctgttcccgggaagactgtaaaccaatgcaagaaaaaatttgcattactgaaggaaaactttagaagcaagaaaagcacagcttagtcacttgattaaataccaagggggccgagaagtgatatatcttaaagagggagttgtcttaacacatcttggaacctgcctgagctacaacatatgtgtaacgaaaccaacctctcttcttagttcctacattctgacttctgctatgccatagaagtttccataacaaatgttttctacagcaattagctttatatattgatataaaatatactatttctcattggttttgtatggagctgtatttgcttaggtaccaataacaatggctatttttgttttatttaatgctatatggtttcaatcattgttttgat

SEQ ID NO: 10247 - DNA, 357 bp, Gossypium hirsutum
  Clone ID: LIB3166-038-P1-K1-E8
gttgaaatcccttactaactaccattgttattttcttaagattcagcgatgtggggtgttttaactcgaaattaaagtttgatagaaaatctcaaaagctgggaaaagtaaagaaatattcttaagattcagcgattttgggtagttctattgacaagcttttctgattttcagctttgatttttctttcttttttgtctctgggatttgagagttgtgaaggttaaggtcttgagtgatggcattacaagagaagttagatagatttaaacagcagcaggagaagtgttagtcgatgctctccaacatttcagcaaaatcagcatcttctaggtccactccaaaacctgcacttgc

SEQ ID NO: 10248 - DNA, 230 bp, Gossypium hirsutum
  unsure (1)..(230): unsure at all n locations
  Clone ID: LIB3828-005-Q1-N6-C10
aggtacaggttttgngatggacctagaagagctgattttgctgcaatgttggagagcatcgactgacacttctcctgctgctgtttaaatctatctaacttctcttgtaatgccatcactcaagaccttcttaaccttcacaactctcaaatcccagagacaaaaagaaagaaaaatcaaagcttggtagctggtaagggctttcaacgagctttcggcttcaatttccg

SEQ ID NO: 10249 - DNA, 593 bp, Gossypium hirsutum
  Clone ID: GOSHI-09MAY01-C11777_1
gaaaaaatgatgcccatatggccattatagattgccataatgctcgaagaatagacagttcttcctttagagctcattattgtatggcggaggctttacaacagttgggaaaacataaagaagcattagactttgctgttgcagcacaatgtttatctccatatgatactatggccgttgagaaagtggagaacattaaaaaacatcttgctgctgctgaggctgaaaaaagtaacaaggcaagtgatggatcacataagggtgaacctccaactggaagggtattgtcgttgagtgacatactatatcgctcacaagctaacagtgatgctttacaagatggtccaagatctgaaagagaagactctgatttttgatgaggagctggaattacattttgaaacttcaatatcaggcgatgaagggcctgttgtgggatccaacatatttcatggaagtttaaatcttagaatttatcgaagaggtgattcaactagagaaactggtgcatgtggaatctccttccttttcattacaaaatgggagtggcttatcaagttcacatccttatctttggtaatgggattgcaaat

SEQ ID NO: 10250 - DNA, 381 bp, Gossypium hirsutum
  Clone ID: LIB3166-043-P1-K1-H3
atggaagtttaaatcttagaattcatcgatgaggtgattcaactagagaaactggtgcatgtggatctccttcctcgtcatcacaaaatggagtggcttatcagcccgaggcggtaattgatatgaagcggagatatgctgggcactgcaatgttggaactgacatcaagcaggcgagtttccttggtcagagaggtgaatttgttgctagcggcagtgatgatggaaggtggtttatttgggagaagcagactggtaaattgataaaaatgcttcttggagatggcgttgttgtaaactgtgttcagagccatccatttgattgctttgtggcaactagtggtattgacaacacaataaagttatggactccaagtgctg

SEQ ID NO: 10251 - DNA, 818 bp, Gossypium hirsutum
  Clone ID: GOSHI-09MAY01-C11717_1
gcccttcattcttcatcaacggacagttctcggggtcagcattcggaactaggaaagaccgaggattcacatttacggggccggtgaacctacatgctggagcaaatcatatcgcacttgtcagcgtagctgttggattaccgaatgttggactgcatttcgagacatggaaaacgggaatcgtaggtgtttactcgaatggccttgacaaaggaaagaaagatttgtcgtcacataaatggtcgtaccaggttggtttaaaaggagaagcaatgtatttggcctcaccagaaggagtctcatccgttgaatggatccaaggttcactggccacacagagtcgccagtcaatgacctggtacaaggcatatttcgatgcaccaacaggtaacgaaccgttggctttggatatgcggagtatgggaaaaggccaagtatggatcaacgggcaaagcgtaggaagatattggatggcgtacgggaatggtgagtgcggtaagtgtagttactcggggacgtaccggcctacaaagtgccagagtgggtgcgggcatccaacacaaagatggtaccatgttccgagatcgtgtctaaaaccgaaacagaatttgttggtggtgtttgaagaactcggcggagatgcatcgaagatttcgcttgtgaggagatcggttttaaatagacaccatcataataagtgataaaaaggtatgaaagtagaaaatgttgcagtttcattgtctaaatgcgccatttgtttttagaagagatgtttttagagtgcatgttttgaagaaatgaatcattcttgctttatc

SEQ ID NO: 10252 - DNA, 398 bp, Gossypium hirsutum
  Clone ID: LIB3145-008-Q1-K1-F7
gaataaccgggccgaccgacgcgtccgcccacgcgtccgatttggcctcacctgaatgtttctcatccgttgaatggatccagggttcgctggccacacagagtcgccagtcaatgacctggtacaaggcatattttgatgcaccaacaggtaacgaaccattggctttggatatgcggagtatgggaaaaggtcaagtatggatcaacgggcaaagtgtaggaagatattggatggcgtacgggaatggtgagtgcagtaagtgtagttactcggggacgtaccgacctacaaagtgccagagtggttgcggccatccaacacaaagatggtaccatgttccgagaacgtggctaaaaccgaaacagaatttgttggtagtgtttgaagaactcggc

SEQ ID NO: 10253 - DNA, 615 bp, Gossypium hirsutum
  Clone ID: GOSHI-09MAY01-C11697_1
cttccgccacacccttccgcccacgcgtccgttcttgctcggtttttttatccttggtggagaaagaaggatccttgctttgctttgattatttttcaatgatgatggagctttttgtattggggtgtacgggagttgtggtgttcctccacggggccaatttcttcttccatgttctttctcaacatctcgctgttcgatctctcagtttcttgggatttgttggatggtaataccaaaaagggaagaaaacagagatgattaatatatctttttgcaaattgagatgtggatcatgatgcttttgtaaatatttgattacaacttagattttgggcaaatataaaatataatatgataattatgtattggtagagcaaaaatggaaaggctgtttgccctcaatatagagcaatatcatctttctatactgtattctatccatttatgtaccccatatttgattaaatcttagattttgagggtatcaaatataatgaaatttatgtacccttaaaaccaaaagggaaaagctttgatcccccaaaaaaaaaaaaaaaaaaaaaaaaaaaaaaaaaaaaaaaaaaaaaaaaaaaaaaaaaaaaaaaaaaaaaa

SEQ ID NO: 10254 - DNA, 397 bp, Gossypium hirsutum
  Clone ID: LIB3149-039-Q1-K1-A8
ctttctcaacatctcgctgttcgatctcttagtttcttgggatttgttgggtggtgataccaaaaaggggagaaaacggagatgattcatttatctttttgcaaattgagatgtggatcatgatgcttttgtaaatatttgattacaacttagattctgggcaaatatcaaatgtaatatgataattatgtattgttagagcaaaaatggaaaggctgtttgccctcagtatagagcaatatcatctttgtatactgtattttatccatttatgtaccccatctttgattaaatcttagattttgagggtatcaaatataatgaaatttatgtatccttaaaactaaaaggaaaaaaaaaaaattaagctctgtggtcacaaactatgattacttgc

SEQ ID NO: 10255 - DNA, 352 bp, Gossypium hirsutum
  Clone ID: LIB3148-019-Q1-K1-D8
atcaaatgtaatatgatatttatgtattgttagagcaaaaatggaaaggctgtttggcctgagtatatagcaatgtcatctttgtatactgtattttatccatttatgtaccccatctttgattaaatcttagattttgagggtatcaaatataattaaatttattttttcttaaaactttaaaaatataataattttatttattataaatattatttttttttttatatttaatttttatttggtctgcctctttatattttctaagtttatcattttctttcttttcttactttttatctttttttttttggtctacccttattttcattttttttcttcctttactttt

SEQ ID NO: 10256 - DNA, 304 bp, Gossypium hirsutum
  Clone ID: GOSHI-09MAY01-C11687_1
ttgctagaaaggctactaatgtatatactgggattgcctacggaaataggtgactgttgcacaaagcataaacaccattttggatttgggcaatttcagacagtatacatgtctaacaccatatagagtatcatcccaggatatgcaagtgcatttgagaagtcccaaacaggtctaacatgggtataaaacgtacattgaagcggacagttttggaatggcattcttgtcattctttgtctcctaactttttttttccttacattcaagaaatccattcataagaaaattctatctgaattca

SEQ ID NO: 10257 - DNA, 581 bp, Gossypium hirsutum
  Clone ID: GOSHI-09MAY01-C11657_1
caaatattacactgactacaagttttagcctgtacgcacattagcgctttcgggctctacaggacatgggactaacattattgctggagtcagcttgggcctggaatcgacagcacttcctgttcttgttataagtgtatctattatttctgctttttggctgggtcacacctcagggcttgtggacgaaacaggaagtccaactggtgggctgtttggcacagcagtagctacaatgggaatgctcagcactgctgcttatattctaaccatggatatgtttggtccgatagctgataatgctggtggaattgtagagatgagtcagcagccagacagtgtgcgagagattactgatgttcttgatgctgtcgggaacaccacaaaagctaccaccaagggttttgccattggatctgcagcacttgcttcttttcttctgtttagtgcatatatggatgaggtttcatcttttgcacgtgaaccttttaaacaggttgatattgccattcctgaggtttttattggtgggttgttgggttccatgcttatattcctatttagggcatgggccctgcgct

SEQ ID NO: 10258 - DNA, 854 bp, Gossypium hirsutum
  Clone ID: GOSHI-09MAY01-C11677_1
ttttaattatccatctttaagaacaccctactggaaagcaaaggtggttattgtggggaagattgatggagagtctgttaaaattagacagtctagggatgatggatatgctgatgtaaatacctattcaaagagagatgttagcagttggcagttgaatcatcggaaacgcccatacttggatcttacagaagcagttccagaaatgtctaccgagtcaagtcaaagaatgccatggagtgaagtgaggagagtttccacagatagaggaagtgatgacaaaaagctgaagacgggtttcactggaatataccaatataacggtgctagagatgaaggcacatttagtgataatactgcattagatagacatggtctgggttctggctcttgtgttaaagagagatgtaacattgcttgcgaagaaaaaggtgtccccaaggacatgggaagtggcgaaaggttctttcccataggttcagatcgtgcccgggatattcggatggactggagggaagagcttctggtaaaagatgaggacagagctggggatgcctctccaaatcttgagcttgctttgggggctgagatgagaccaccaaataaggggatcctgcctttctttgttggaacagcagacaaaagtgagaacctggataaggtaacaggaaaggaagaggcggatgatgtgtctgcctcgctttccctttccctgtcgttcccattcccagagacagaagggaatgtgaagtctgtatctaaaactgagcagctcttgccggaaagccatggtgtgaatacttccctactactgtttgggggattccctaacaaatagtatgatggtgatccta

SEQ ID NO: 10259 - DNA, 549 bp, Gossypium hirsutum
  Clone ID: GOSHI-09MAY01-C11667_1
ccagttctgggtttgccttaaaccacaataaaaatggcttcttgactctcttttccatgccccaatatcttttttttttgaaacaaaccagcaaacccaaactcacaagggtttttttgtctcttcctccaacttcaaatttcaactccaaatattgcaggcgtttgaagagttatcgcagtgtggtaccaaggatgaagggcttccgttggatgaattctgtgatgcttgttctttggtttctggtctttttaaactccctcggtctcgccttcaaattcccggagatggagtacgtcgccaagctgtggatttcttcaatcaggtgaatctgctctatggtaccctcactaagttttgtactcctgagaattgccctacaatgactgcaggacttaagtaagagatataaactagattccttttgcccttttcaataaatcgaaactccctcaacttgaatttaggctctttatctcttcgagctagatgatactgtattaatttatttttgttaaagttatatatatttgccttattttttttttg

SEQ ID NO: 10260 - DNA, 726 bp, Gossypium hirsutum
  Clone ID: GOSHI-09MAY01-C11627_1
gggaaaccttgaattcaccaaggatcttcattgggaatctcccagcttccgaaatggaactctcagaagattacacctgtgtcatatctcatggaagtaatccaagaaccacccatatctttgatgattgcattgttgaaagctgttgtggggttgttggtttctcctctccgaagagaaacgggtcaagttaccaatcagaaaatttccttacctactgttatgcttgtaaaaagaatctttctccaggaaaagacatttacatgtacagaagtgagaaagcattttgcagcaaagaatgtaggtaccaagagatgatgctagaagaaagcaccaacaaactagaatctgatgacatctttgggacttattcctaacatttgtttcaagttctcatcatcagtcttgcataaaagccagtcaaggatcaagtagaaccagcacaaataacttctgcttgtcaatcatcgtgagagtttttaattgcttttagctgtttaaaagatgaaactttgggtttactcttttgtatcttcttcaacaggctctatggtatttgtagaattgatctttctttctttctttgcaagtgatcttttgtgtttttcttttgccataatagtctttggtgggggtggtaatttgtaaatgccaatgatcatcattctgatttgtgactctaaaaaaaagcatataatattatactatatttgctttattttatgt

SEQ ID NO: 10261 - DNA, 580 bp, Gossypium hirsutum
  Clone ID: GOSHI-09MAY01-C11147_1
cccacgcgtccgcccacgcgtccgagagttttggagccatgttcgtcgcatagggcgttaccgaacctagaattgtcgtgcaaacaacaagcgaagttgatctattggatgatggctataggtggcgcaagtatggacagaaagttgtcaaaggcattccttatccaagtagctactacaaatgtacaaccccgggatgcaatgtccgtaaacacgtcgagagggcttcgactgatcccaaggctgttataacgacatacgagggaaaacataatcatgatgtaccggctgccagaactagcagccacaacaccgccagtagtaacgcaacacaaggtagaacacagaatatagtaaccgttaccaaccacggtgtaaataacagtgtcgattctacgaacgataggcaacgaccggtagcacggttacggttaatagaagacaggatacgtaatgtctctgaattgcagcatggaaaatctgtcatatttcaagcaatgtaaagcttaaaaaagtgtacgtaaagtagtttagtgcgtgcgtgtatatatagagtaatttgattctcttattccatgca

SEQ ID NO: 10262 - DNA, 747 bp, Gossypium hirsutum
  Clone ID: GOSHI-09MAY01-C11107_2
cgcctccaggacgcctccgcccaccgtcaattaacctccatcctttctcctttccactccaaaaccctccatcaagaaaacctcttcttcgacaccccagccaataccctttcctctcaactttccgttcttcgcctccgcttcctcaacaaggacgcccgctgcatcgtttccctcaaatccaaacctactctggtagatggtgtcagccgcgtggcggaagatgaggaggaactagatccgtgttctgcacgcgcttgcgtggaggacccggcgaggttggggaagatcgagtcgaggattttgaagagggttaaagaggaatttggggttggggaagaagtgggatttgtttgtttaggtgggtttgagaataaacgagaggtttttaattggaaaaatctgaagctggtaggggatgagactaagtttggttttgggatatgtcatgagctggaatgtgaaaatgacgatcctgatggcgtccacaaattgcttgaagagttcttgaaggatatgggattggttattcctactctaacatgacaaatttgctgttttaggtctgggaattgcctaaccaataatttgaagattcctgcggtatataacccatggttcctacattcaaccatgggttaagaaccaaggttatcacctccccccaaaattattttgtattttcccccacccattcccaatattttgttctttggcaaaaatactgaaaaattttggctatttata

SEQ ID NO: 10263 - DNA, 1031 bp, Gossypium hirsutum
  Clone ID: GOSHI-09MAY01-C11107_1
gaagtacaaggccctcccgtccgggggaccttccaaaatcgaagtcgggctcgaggacaagcaagaactcgaagactcccgcaaaccctctcctcctcctccctcaaccgccaacgccacctcttcttcctcccttcttcacctcctcgatcgctcccaccctaacccctcttccaaacttcaacgcatcggcctttccccctaatggaaggcgaaatcaaactccgcctccaggacgcctccgcccaccgtcaattaacctccatcctttctcctttccactccaaaaccctccatcaagaaaacctcttcttcgacaccccagccaataccctttcctctcaactttccgttcttcggctccgcttcctcaacaaggacgcccgctgcatcgtttccctcaaatccaaacctactctggtagatggtgtcagccgcgtggcggaagatgaggaggaactagatccgtgttctgcacgcgcttgcgtggaggacccggccaggtgggggaagatcgagtcgaggatggtgaagtggggtaaagtgggagtagaggagaggattggggagaatgtgaaatgggtatgtgtaggtgggtgtgaaagtgagagagaggtgtggaggaggagaagtcgggtaagaagaagtgagaggaggaagggtgtgggtgaggggagtgagatgggggagctggaaggtgagagtgaagatcaagatgaggtggatgagggagagtggacgagttccttgggggaggatgggagttgaggatgcaagggactagaagttgaagaggagaggcgagtgggaggggtctaggaagatgaggctggagggagctgagtagtgaggtgatggaacagcgtaaggagaggaatgatgcatggacaaggagaaaatatgtgaaaataagagggtggggatagagcgtcgcgagagttgatagttgcaggaatagaggaaaagaaacgccgcctgtatacgggacgataaggcgcaggcgagtattggttggttacacgcaaacgtta

SEQ ID NO: 10264 - DNA, 427 bp, Gossypium hirsutum
  Clone ID: LIB3148-049-Q1-K1-A7
ggattttgaagagggttaaagaggaatttggggttggggaagaagtgggatttgtttgtttaggtgggtttgagaataaacgagaggtttttaattggaaaaatctgaagctggaagtggatgagactaagtatggttttgggatatgttatgagctggaatgtgaaagtgaggatcctgatggcgttaagaaattgcttgaggagttcttgaaggaaaatgggattggttattcctactctaagatgacaaagtttgctgtttttaggtctgggaaattgccttagcgaagtgagtttgaggatgtcctgcggtatgattatcccattgttccttacatacaagcaatggtagagaagcaaggtttatcatcttcctcgcaaaaataaatgtttactttcacgcaacgcaattccgagatcttgca

SEQ ID NO: 10265 - DNA, 294 bp, Gossypium hirsutum
  unsure (1)..(294): unsure at all n locations
  Clone ID: LIB3147-011-Q1-K1-A2
cccacgcgtccgcaaaancgaagacaagctcgaggacaagcattaactcgaagattcccgcaaaccgggtcgtgcttctccctcaaccgccaacgccacctcttcttcctcccttcttcacctactagatcgctcccaccctaacccctcttccaaacttcaacgcatcggcctttccccctaatggaagtcgaaatcaaactccgccttcaggacgcctccgaccaccgtcaattaacctcttattcgacaccccagccaataccctttcctctcaactttccgttcttagcc

SEQ ID NO: 10266 - DNA, 1458 bp, Gossypium hirsutum
  Clone ID: GOSHI-09MAY01-C11007_1
acccccggggtgccggggcggaattttcgggcggccgcgtggattcgtgagtattgaggggaagggtaccctttcacccccgagaggatccaagaatgaaaagatttagaagaaagaggccaagaaggagcagtccatcaaaacaatcttggtttcccgatctcgtgactttgtagttacttctgatggaagtaaggtgccggtgtccgaacttgaggggaagactgtaggtatatatttctcagcgtcttcattcaagccatctgctgattttactcaaaaacttgctgaagtttatagtaagttgaaagaaaatggggagaaattcgaggttgttatgatatcgcttgatgatgatgaggaatccttcaagcaaagctttggggcaccatggttggcattgccttcgaaagacaagagctgtgagaaattggctaggtacttcgagctctcgacccttcccactgttgtcattatcgggccagatggaaaaactctccaccctaatgctgctgatgcgattgatgaacatgggattgtggcctaccccttcagccccgaaaaatttgcggagcttaaagaaatagagaaagcaagtgaggcaacacaaactctggaatcagttctggtttcagggggtttggattttgtcctagggaaggatggggctaaggtcaaggtggccgacttggtggggaagaccattctcttgtacttctcagcccattggtgcccaccatgccgtgctttcacaccgagccttgttgaagtatataagaagatcaaagaaaaggatgatgcatttgaagtgatttttatttcgagcgacagggaccaatcctcctttgatgactattattcaggaatgccttggttggctcttccattcaatgatgctcggaaatcatcattgagtcgcaaattcaaggtccaaggcatccctatgcttatagcactcggaccaactggaaaaactattacaaaagaggcaaggagtctggtcatggctcatggggcggatgcttatcctttcactgaggagaggttgaaggagattgaggcacagattgaggagatggcaaaagggtggccggagaaactgaaagatgaacggcatgaggagcatgagctggtgctcactcgtcgcagtaattatgtctgtaatgtatgcgacgaaatgggacaagtctggtcattctactgtgaggaatgtgactttgatctacatcccaaatgtgccctggagaaagaaaccaaagctgatgcaaaagaaggttgggtctgtgatggggaggtctgcactagagcttcatgaattatgtccatgtatacaccaacacactagttggctgtcctgttgatgcagcttggatcatgtgtgtgctatgtaataaaatcttgagatgcagtgttgaaagactttgttttctatattggcccaatcctgtttcctggttt

SEQ ID NO: 10267 - DNA, 886 bp, Gossypium hirsutum
  Clone ID: GOSHI-09MAY01-C11027_1
caaaaaacggagtagatctagttctcggcggacgcctgggttttttttctgcgatcaacggtgaaaagttccttttttttcatggcgatgatgacctgccgttccttgttgcttttacttttgatctcactttttgtttcttttggtttcgccgagatccgtttcacggagatccgatccgatgtccgacccataatacctttcgatgagttcgggttcactcacaacggccgccttgaactcaacctctctcagatcgatctctccgacaagaacaagaacctcgacttgaacaaaatcggattcttcctctgcacgcgcgacacgtggttccacgtgcttgaacaactcaacgaccaccatgtcacgtgtgctctcgattccgaactcgtcaaggtcgtcttcaggttcaaatctctcgacgggaaaacgagcatcaaccccgttttccctgtaaacaacgctgaccagtacgccctactcttcgctaattgtttgactcaagtcaaagtatccatgaccgtccgatcggcgatgtacaatattgaagggaagcaaagccgtgattatctctccgccggcaaaacaattctccctagggtttacttccttttatcccttgtttatttcagtctcgcacggatttgggtttactttctttacaaaaaacgactcaccgtgttccgaatccatttctttatgctagcagtcattgttttaaaagccttcaatctcgtgtttgaagcccaggataaatcttatatccaacgaaccggaagtgctcatggttgggatgttttgttttacatattcagtttcttgaaaggatcatgcttttcaccctcatccttttgatcggcacgggtggtcgtttttgaaacttatt

SEQ ID NO: 10268 - DNA, 583 bp, Gossypium hirsutum
  unsure (1)..(583): unsure at all n locations
  Clone ID: LIB3829-015-Q1-K6-B5
cggngaaccgatccgatgtccgacccataatacctttcgatgagttcgggttcactcacaacggccgccttgaactcaacctctctcagatcgatctctccgacaagaacaacctctcgattccgaactcgtcaaggtcgtcttcaggttcaaatctcntcgacgggaaaacgagcatcaaccccgttttccctgtaaacaacgctgaccagtacgccctactcttcgctaattgtttgactcaagtcaaagtatcgatgaccgtccgatcggcgatgtacaatattgaagggaagcaaagccgtgattatctctccgccggcaaaacaattctccctagggtttacttccttttatcccttgtttatttcagtctcgcagggatttgggtttactttctttacaaaaaacgactcaccgtgttccgaatccatttctttatgctagcagtcattgttttaaaagccttcaatctcgtgtttgaagccgaggataaatcttatatcaaacgaaccggaagtgctcatggttggggatggttttgttttacatattcagtttcttgaaagggatcatgcttttc

SEQ ID NO: 10269 - DNA, 416 bp, Gossypium hirsutum
  Clone ID: GOSHI-09MAY01-C11317_1
ctaggttctcttattattggtctctttgaggctgctcttctgctctcttccttcccaacacaacataagttattctggtttttggtggaggcggcggcggcggcggcggcgctgtctgaaattcaacaagtctcgtaatccgacatggcgaccaaagggttcgttttgtatctgctgtccggtttttcgatagcagttctctctgttttgttcatccaaaaaagcaacaacgacaacatgaaccaaagctcaaatctcttagagtccccatataatttatccaccactgaaaaagtttggcctgcattggagttgaactggaggcttgtaatggcgacggtgatagggtttctaggatcaacatgtgggacggtggggcggcgttggcggcggcggcatttttgttccaatgctta

SEQ ID NO: 10270 - DNA, 414 bp, Gossypium hirsutum
  Clone ID: GOSHI-09MAY01-C11307_1
attcctttataaatccttcatcattgccctttcttctccccacacattcaaatgcctctcgttcacctttttatcagagacatgggtttacagcgatcagctatggcgatgctcttgctgatgatgttcactttatcatcagctctcgacatgtcgatcatatcctacgatgaaggccatcccgacaagtccaagtccagttggagaacagacgacgaggttatggtcatgtacgaggagtggcttgtgaagcatggaaaagcgtacaacggcttgggcgagaaagagaggaggttcaagatttttaaggacaatcttaggttcatcgatgaacataacgccgatgagagccacagttttaaagttgggttgaaccggttcgctgatctgaccatcgatgagtaccgagccatg

SEQ ID NO: 10271 - DNA, 642 bp, Gossypium hirsutum
  Clone ID: GOSHI-09MAY01-C11287_1
tcaagccacgagccgccgacagtcgtcaagtgttcaccgttggatctcaatctcggacacggtgcggtctccgggtacggatctcctgccgtcaggctgcctttccctcaaatttcgccggtcgccggttttttcgccaacggcgtcccggcagttgcagccccccaagttttttacttcgacgcgttggtccgacccggtgttatgaaaggacagcagtatcaacaacggttgagattcgatcaccgtgattatcacgaaactttcaacgctggtgtacaaagcgactcagattcgtcctccgtcgttgatttaaaccaccacgagatcaaacggcgaccgcttctcaatatcgatctcaaccaacccaaaaaaaaaattacgcgagagcggcgtaaattgtgaatacgtagatgaaaaacctcccttttttgcagcagagaaacgttagtttgtagtctgttgtttcatattaatttctgtaattcttttttattttcaatgaattaattagtaattacgaagagcaattttcttaattaacctttgttaattatttaaaaaatggataatactaaatactaattaccagttatatacacgagatagaccaacatttacagcgatgataaaaaattaaat

SEQ ID NO: 10272 - DNA, 421 bp, Gossypium hirsutum
  Clone ID: LIB3147-023-Q1-K1-C4
aaaggacagcagtatcaacaacggttgagattcgatcaccgtgattatcacgaaacttttggcgctggtgtacaaagcgactcagattcatcctccgtcgttgatttaaaccaccacgagatcaaacggcgaccgcttctcaatatcgatctcaaccaacctgctccggaagtcgcctgattatgattttttaaaatcgccgatatcaagaaccggaaaagaaaaacccacaaattttcaattttatctctttaaaatcgttaatcttctttttagtcccaattttgaaaattagacgagaaaattatacccaaaaagaaattacgcgagagcggcgtaaattgtgaatacgtagatgaaaaatctcctctttttcgcaacaaaagtaccgtaggttggtggctgtggttcatattaaatt

SEQ ID NO: 10273 - DNA, 842 bp, Gossypium hirsutum
  Clone ID: GOSHI-09MAY01-C11247_3
ctgttctactggtttctggactgtctgattaatctttcgattaaattctccatttcttttttgaaattcatcaccgatggcgaccgccatggtcgaagattcgagcttcgaagaggaccagttggcttcgatgaccaccgaggacatcgtccgagcttctcgtcttctagataacgagattcgaattctcaaggaggagatgcaaaggacaaatctcgagttagattcgacaaagagaaggttaaagagaatcaagaaaagatcaagcttaacaagcaattgccttacttggttggcaacatcgtcgagatattagagatgaatcccgaagacgaggcagaggaagatggtgccaacattgatcttgattcacagtcgcgcggtcgccctcgcgtccgaaaaacctcaactcgtcagaccatctttctacctgtggtcggacttgttgaccctgataagttgaagcctggagatttggttggcgtcaataaagacagctacttgatattggatactctgccatctgagtacgactcccgagtaaaggctatggaggttgacgagaagccaaccgaggactacaatgacattggtggcttggagaagcagatccaagaactagttgaggccattgtgttgcccatgactcataaagaacggtttcaaaagctaggcgttcgtccacccaagggggtgctcttatacggacctcctggcactggaaaaaccctgatggcccgtgcttgtgcggcacaaacaaatgccacgtttctgaagctagcaggcccgcagctggttcagatgttcattggagatggagcaaaacttgtccgtgatgcttt

SEQ ID NO: 10274 - DNA, 787 bp, Gossypium hirsutum
  Clone ID: GOSHI-09MAY01-C11247_2
gttcgtgatgcctttcagcttgcaaaagaaaaatctccatgcatcatttttattgatgaaatcgatgcaatcggtacgaagcgtttcgatagtgaagtgagtggggatagggaggttcaacgaacaatgttggaactgctcaaccagcttgatggctttagcagtgacgaacgtattaaggtaatagcagcaactaaccgagctgatatccttgaccctgctctcatgcgttctggtcgattggatcgtaaaattgaattcccgcatcccactgaagaagcaagagcccgaatccttcagatccactcaaggaagatgaacgttcatccggatgtcaatttcgaagaacttgctcgttcgaccgatgattttaatggagcacagctgaaagctgtttgcgtagaggcaggcatgctagcacttcgccgagatgcaactgaggtgaaccatgaggatttcaatgaaggtataattcaggttcaagctaagaagaaggcaagcttaaattactacgcatgatctggagagcatttcgccattagagaaggcatgacaaagacgataggggtagcaaaatgacatttttcgaatagattgattgaattcggtttcttcggtttcggttttaatgtgtttcttcggttaatttgtggttttcttatttttatttttgaacccaattgataaaaaaaaaatctacacttaaaaaagtgtgagggaaaaaaaatctcaagactatagagtgagaaatcaaaatgattgattaaaatgaaaattaatttcggtt

SEQ ID NO: 10275 - DNA, 1791 bp, Gossypium hirsutum
  Clone ID: GOSHI-09MAY01-C11247_1
gtttggtaatataaagatcttcatctgttcttcctttttctctattctctccgtcttgtattcttttccttcattttccgactcatctttcgcttgaaatcatcgttgtattttttttaaaaccctcaccgatggcgaccgctatggtagaagattctagctttgaagaagaccagctggcttccatgactaccgaggatatcgtccgagcttcccgtcttcttgataacgagattcgtattctcaaggaggagatgcaaaggacaaatctcgagttggattcatacaaggaaaagattaaggagaatcaagagaaaattaagcttaacaagcagttgccttacttagtcggcaacattgttgagatattggagatgaaccctgaagatgaggcagaggaggatggtgccaacatagatctagactcacaaaggaagggtaaatgtgttgtgctgaaaacctctactcgtcagaccatctttctacctgtggttggacttgtagaccctgataaattgaaacctggtgatttggttggtgtcaacaaagacagctacttgatattggatactttgccatctgagtacgactccagagtaaaggctatggaggttgatgagaagccaactgaggactacaatgatattggtggcttggagaagcagatccaagaactagttgaggccattgtgttgcccatgactcataaagaaaggtttcaaaagttaggcattcgtccacctaagggggtgcccctcgcggccccccccgcctccgcggacgcctgggtggcccgtgcttgtgcggcacaaacaaatgccacgtttctgaagctagcaggcccacagctggttcagatgtttattggagatggagcaaaacttgtccgtgatgcttttcagcttgcaaaagaaaagtctccatgcatcatttttatagatgaaattgatgcaattggcacaaagcgttttgatagtgaggtgagtggggatagggaggttcaacgaacaatgttggaactgcttaaccagcttgatggctttagcagtgatgaacgtattaaggtcatagcagcaactaaccgagctgatatccttgaccctgctctcatgcgttctggtcgattggatcggaaaattgagttcccacatcccactgaagaagcaagagcccgaatccttcagatccactcaaggaagatgaacgttcatccagatgtcaattttgaagaacttgctcgatctacagatgatttcaatggagcacagctgaaagctgtttgtgtggaggcaggcatgctagctcttcgccgcgatgcaactgaggtgaaccatgaagattttaatgaaggcatcattcaggtgcaagctaagaagaaggcaagcctaaattactatgcataatgggagagcatttcagtgtaagaatgtgaaggtgggttgtgttgagaataggttgatatacatattttactctctgcccaattatattgtgttaggttttcctggtttgcacgtaattttatataaaaaaaaccatttacaaatggattgttctgtttaaaagactcccatctttttatttgaatcagctagttcagcaacagattaagattgtgaggggaaaaagagtttaatctgaaaattttgtatttgaataggaaatgaaaaagaaagaattaggtgaactagtttttctttatataaaatggtctgtttaatggaaagatgataatgagataactttataataacaagtttagttgtaaatgtttatacgtttacacaatgc

SEQ ID NO: 10276 - DNA, 472 bp, Gossypium hirsutum
  unsure (1)..(472): unsure at all n locations
  Clone ID: LIB3145-038-Q1-K1-E5
gaattncccgggtgcgagcgccagcgccgtccgnatcctctactcgtcagaaccatttctttctatccttgtgagttggacccttgtagaccccctgatggaatgggaatacctggtggattgtggggtgggtgtcaacaaagtnacagctacttgatatntggatacctttgccatcntgagtaccgactccagagtaaagggctatggaggattgattgagaagccaatctgaggactacaatgatattggtggcttggagaagcagatccaagaactagttgaggccattgtgttgcccatgactcataaagaaaggtttcaaaagttaggcattcgtccacctaagggggtgctcttatatggacctcctggcactggaaaaaccttgatggcccgtgcttgtgcagcacaaacaaatgccacgtttctgaagctagcaggcccacagctggttcagatgtttattgg

SEQ ID NO: 10277 - DNA, 442 bp, Gossypium hirsutum
  Clone ID: LIB3493-051-P1-M1-A1
gatcttcatctgttcttccttttggtctagtctctccgtcttgtattcttttccttcattttccgactcatcgttgtatttttttttaaaaccctcaccgatggcgaccgctatggtagaagattctagctttgaagaagaccagttggcttccatgactaccgaggatatcgtccgagcttcccgtcttcttgataacgagattcgtattctcaaggaggagatgcaaaggacaaatctcgagttggattcatacaaggaaaagattaaggagaatcaagagaaaattaagcttaacaagcagttgccttacttagtcggcaacattgttgagatattggagatgaaccctgaagatgaggcaaaggaggatggtgccaacatagatctagactcacaaaggaagggtaaatgtgttgtgctgaaaacctctactcgtcag

SEQ ID NO: 10278 - DNA, 429 bp, Gossypium hirsutum
  unsure (1)..(429): unsure at all n locations
  Clone ID: uC-gsronu33B132h05b1
attgtgggttgtgttgagaataggttgatatacatattttactctctgcccaattatattgtgttaggttttcctggtttgcacgtaattttatataaaaaaaaccatttacaaatggattgttctgtttaaaagactgccatctttttatttgaataagctagttcagcaacagattaagattgagagggaaaaaaagtttaatctgaaaattttgtatttgaataggaaaagaaaaagaaagaaatcctcttaaactgttaaaacttaggtgatagttttttctttatataaaatggtctgtttaatggaaagatgataatgagatagctttataataacaagtttagttgtaaatgtttatacattgtgtttagncgatgtttatttacacaatgcatatttagaagttatagcaatttttttttt

SEQ ID NO: 10279 - DNA, 665 bp, Gossypium hirsutum
  Clone ID: GOSHI-09MAY01-C11237_4
tctttgacgcgtgggcggacgcgtgggattgggggaaacagcgttccccgatctcctgcttagagttagtttctcatatttatggggctacttgaccagttgtgggacgacaccgttgcgggtcctcgacccgataatggtctcggcaagctccgaaagcactccactttcactttccgctctaactcctccaaggaaaccgatggcgggagtgtgagatcgtacaatgatgagacgccggaggaaacaacgaaagtgacacgtacgattatgatcgtaaaatcgccgcgttaccagagcggatcgcctccggtttcgccggccgaatcgactcctccggtatctcctttttctggaggaagcagagagtcgtatcggtttcggagaaggtcaacatcagatgcatacgagaaggggaaggagggtggaggtaggagccttgctcctccttacgacgtgtgagatgtgaacctctcctctcctctctgctgatcccccaattcgccgacaagtcaatattaatttgcatagtttctacgtttatacagctgaactttataatgttaattagagtttgcccactttgttttttttgcatgcatgtatgtatgtatttatgtgtacttgttttggcaatgtaactacttttatcatcatggtatatt

SEQ ID NO: 10280 - DNA, 722 bp, Gossypium hirsutum
  Clone ID: GOSHI-09MAY01-C11237_3
cccacgcgtccggttatttttttaaacaaagatccccgatctcctgcttagagttagtttctcgtatttatggggctacttgaccagttgtgggacgacaccgttgcgggtcctcgacccgataatggtctcggcaagctccgaaagcactccactttcactttccgctctaactcctccaaggaatccgatggcgggagtgtgagatcgtacaatgatgagacgccggaggaaacaacgaaagtgacacgtacgattatgatcgtaaaatcgccgcgttaccagagcggatcgcctccggtttcgccggccgaatcgactcctccggaggaagcagagagtcgtatcggtttcggagaaggtcaacatcagatgcatacgagaaggggaaggagggtggaggtaggagccttgctcctccttacgacgtgtgagatgtgaacctctcctctcctctctgctgatccccctattcgccgacaaatcaattttaatttgcatagtttcgacgtttatacagctgaactttataatgttgttaattagagtttgcccactttgtctttttgcatgcatgtatgtctgtatgtgtacttgttttggcaatgtaactacttctatcatcatgggatattattatatataatgtgcagccggcgttgaaaagctgcaacccatatatgtagagagggtataactataatgtcctaacatggtttgct

SEQ ID NO: 10281 - DNA, 1043 bp, Gossypium hirsutum
  Clone ID: GOSHI-09MAY01-C11237_2
gcgcccacgcgtccgcccacgcgtccgcttttttaaacaaatatccccgatctcctgcttagagttagtgggtcgtatttatggggctacttgaccagttgtgggacgacaccgttgcgggtcctcgacccgataatggtctcggcaagctccgaaagcactccactttcactttccgctctaactcctccaagggtacgacgctagaccacttctcttccttctccggcgacacactttactactttatccgtgcataaagaaaccgataatatctcagtaaaaacaacgaaaattgtcaccaaaagtaaattgaactggcgagcagctaccaatgcggtccggtaagcgttatggaattgaactttattgtcttcctcaacacgtttgctgttttattgtttaacttgtcttctttttttttttccctaatctggttcgacgatgcaatgatcagaatctgatggcgggagtgtgagatcgtacaatgatgagacgccggaggaaacaacgaaagtgacacgtacgattatgatcgtaaaatcgccgcgttaccagagcggatcgcctccggtttcgccggccgaatcgactcctccggtatctcctttttctggtaatatatacacaaataatttcctcactgattgtcgaatttgtccctggtttagttcttgaaccccaaaactatcctccccggaaaggttggagtggggttgtgtaaggtaactagaggtgggactattgaaggtttgaagggtagatcggtcaatgtaattcgtgctatatgataagcggactttacgagggtaattatgtcatttgatagctttgtatgtttcttaaatggataaagataaatgaaatattaggtggatggcaagcgtgtattttgtccgagtgttgggaaatgacaaaaaggtcctcgttgacgtgcaataatgcatgaatatgatataaacttggagagaaatacatctgcctagtttggtccatttagtatgctataaatttatttatttatttttgtggggtataatgtc

SEQ ID NO: 10282 - DNA, 983 bp, Gossypium hirsutum
  Clone ID: GOSHI-09MAY01-C11237_1
ttcacgcgtccggccacgcctccccccccgcgtcctatcgagttctttgttaacgaataaggatcttttaagatacgccggatccgctaaaatacgccgatccccgttcgtcttccgatcatatggggctgcttgaccagttgtgggatgataccgttgcgggtccccgacccgataatggtctcggcaagctccgaaagcactccactttcactttccggcctaactctgccaaggaatcggatggcgggagtgtaagatcgtacggtgatgaagcgccggaggaagcgacgagagtgacacgtagtattatgatcgtaaaaccgcctggttaccagagcggatcgcctccggtttcgccggccggatcgacccctccggtatctcctttttccggaggcagagaatcatatcggtttcggagaaggtccacatcggatgcatacgagaaggctaacgaggttggaccaaggagcccttgtcctcctccttacgacgtgtgagatatgagtcctctcccatatttggcgacaaatcaaatgggttttggtactgtttgcatgcttaggtctttcaaatgtgtaacttaatagtgtagtatggggtgatgtatgcaagaatgtagtctggtacttgtgtatatagagcttgtaatagtacggttcggccgttgtttgtcggaataagatttcggtgttggtttctcttttgcttatatggatcttaaaactgtaattttatgttttggtgggtgtgtggagccagggttataatagtggatgatgaatgtgacggtgtttgctaaaggtagaacagataagagcggtggtggtggatgcaatgggggttatggacaaatggtgggggcttatcgatgattaatgtcgtggaatttggtattgtcaaaatctgtctttgtgggatcaatttggttgtatgattgggatatgaaaatggaaatgtccgttactgcttattttcgt

SEQ ID NO: 10283 - DNA, 399 bp, Gossypium hirsutum
  Clone ID: uC-gsflnu33B109d10b1
ttttccacgcgtccgatcggttttggagaagggccacattggatgcatacgagaaggctaacgaggacggaccaaggagcccttgtccttctccttacgacgtgtgagatatgagttctgtcccatatttggcgacaaacaaaattgaatatgactcgtggcttacgaggaaggtaattaaaatggagaagttatacgaatttggctgaacgccttaactaggctaatgataagtgttataaggtgaaagactactagggaatcattggtgccactaaaacaagcataaaggcgaagcatttggttgcccagctaattcctcgctttttcaagttctttcttaacctatccagccgtgcttttaatgctcattttgatttgattgaagaataacatttg

SEQ ID NO: 10284 - DNA, 394 bp, Gossypium hirsutum
  Clone ID: uC-gsflnu33B050d12b1
cttctatggcacgcgggattgaaagaaaagaacatcgaagatatcaataacatgatcactttctggttgggacaggagattcttcataccagtggtgacagatgatatataggggaatgaaacagcataagtgactggttggcgttgactcacattcgaggaaacatgaaaaacaataagctatggaaaggatacaactttaagctttccagactgaatttgcctgatactaagatcgcccaatcctaagatcggacggcgatgaagcgccggaggaagcgactagagtgacacgtagtattatgatcgtaaaaccggctggctaccagagcggggcgcctaaggtttcggcgggcggatcgacccttccggtatctcctttttccgagaatat

SEQ ID NO: 10285 - DNA, 411 bp, Gossypium hirsutum
  Clone ID: LIB3146-044-Q1-K1-C2
cggacgcgtgggtggctatcgagttctttgtttaagaataaggatcttttaagatacgccggatccgctaaaatacgccgatccccgtccgtcttccgatcatatggggctgcttgaccagttgtgggatgataccgttgctggtccccgacccgataatggccttggcaagctccgaaagcactccactttcactttccggcctaactctgccaaggaatctgatggcgggagtgtaagatcgtacggtgatgaagcgccggaggaagcgacgagagtgacacgtagtattatgatcgtaaagccgcctggttaccagagcggatcgcctccggtttcgccggccggatcgacccctccggaggcagagaatcatatcggtttcggaagaggtccacatcggatgcatac

SEQ ID NO: 10286 - DNA, 401 bp, Gossypium hirsutum
  unsure (1)..(401): unsure at all n locations
  Clone ID: LIB3493-055-P1-M1-E2
ttttaaacaaagatccccgatggcctggttagagttagtttctcgtatttatngggctacttgaccagttgtgggacgacaccgttgcgggtcctcgacccgataatggtctcggcaagctccgaaagcactccactttcactttccgctctaactcctccaaggaatctgatggcgggagtgtgagatcgtacaatgatgagacgcctgaggaaacaacgaaagtgacacgtacgattatgatcgtaaaatcgccgggttaccagagcggatcgcctccggttttcccggccgaatcgactcctccgggatcttctttttctggtgatatatacacaaataatttcctcactgattggcgaatttgtccctgggttagttcttgaaccccaaaactattc

SEQ ID NO: 10287 - DNA, 312 bp, Gossypium hirsutum
  unsure (1)..(312): unsure at all n locations
  Clone ID: LIB3146-041-Q1-K1-A7
gaaaatcctttgcatagaagagaagagaagaggtggagaaagatggtgatggtgatggtgatggcacctttttctaattattttctagctttcctttcttgttacggttttgtaaagatgagttaagatgtaatatataagtgctggtgagcaggtgaaacctcatccagtcaatgttgtatttgaacttatttggttctttcaatgaagaaaatcgtgctatatgccatgttttttttgncnggntaccagagcggatcgcctccggtttcgccggccggatcgacccctccggtatctcctttttccgga

SEQ ID NO: 10288 - DNA, 431 bp, Gossypium hirsutum
  Clone ID: GOSHI-09MAY01-C11227_1
aggcgaacggttaggtaagggaattaacaatttccccgatgaattgctatatttccttgggactgtagtagagcgtgtttatcacatgaatctcataaccccactctatgccttttctactatactttgggttttgcaggcggagtcgaagagcggctcaaatgaatcggctttaaaggttgctttacatcatggaaaggcctcaggtgttataaagccacatgaccgtgtggtggtttgccagatgctgggtgatgcatcagtggtaaagatccttgaacttgaagattacaagcttatatgtggatgagaagttttgcataacctaaaaccctaagcatagcatggatgaaataaaccgtatctgtacacgtattcttaaactatccatgctatttttgtgtaaacggattttgcgtcttgtaagaaaa

SEQ ID NO: 10289 - DNA, 343 bp, Gossypium hirsutum
  Clone ID: LIB3166-036-P1-K1-D12
ctggactttctctggtgcttttgaggcaaggcaatccctcatcgtcagaggccgtttccccatgctggctgatcctcgacatccggcggagtcgaagagtggctcaaatgaatcggttttaaaggttgctttagatcatggaaaggcctcaggggttataaagccacatgaccgcgtggtggtttgccagaagctgggtgatgcatcagtggtaaagatccttgaacttgaagattagaagctaatatgtggatgagaagttttgcttaacctaaaaccctaagcatggcatggattaaacaaaccgtatctatacatgtattctcaaactatccaggatatt

SEQ ID NO: 10290 - DNA, 372 bp, Gossypium hirsutum
  Clone ID: GOSHI-09MAY01-C12997_1
ccagcatccttgtactccccttgtttcaattcccagaatccagcctccagcgccatgtggagtgagatagagagtgtttgggtgtttccccttgcatccaaatggcgaaccttttctcaagaaagctttgcatggtcgattttcatcattcttcttgcctggctaatcatgacccttgtctactgggcttaccccggtggcccagcctggggcaaatacaggttcgtgaaccgttcctctcttactgctgctaacaagaggagaattccagggcctagaggtttgcctctaataggcagcatgaagctgatggccaactccttggctcaccaccggattgcggccgcagcagaagcatgcaaagccaagagg

SEQ ID NO: 10291 - DNA, 990 bp, Gossypium hirsutum
  Clone ID: GOSHI-09MAY01-C12987_1
aaaaaagaaaaaaaaaagacagaaattaaaataaaaagtgaaagagcgaaatagagtaaagctcaaagaaacagatttgacacagttgaaaatcttttgagtttccgtgcttaaaaaattcaactagttttaaaagaggggaaaatcatttgattttcctttttttttaatttgaatttcgcagcaataactgagaatcaatcactttcagtgttttttttgggagaaaattctatgtcgagcgagagagttcccgttgagttatccaagggcgttaacggccttgaaaaaatcatcctccgcgagactcgaggcagctctgccgaggtgtatttgtatggaggacacgtgacatcttggaagaatgagcatggagaggagttgcttttcgtcagtagtaaggcattgttcaagcctccaaaagcaattcgtggaggaattcctatatgttttccccaattttcaaatcatggtcctcttgagccgcatgggtttgccagaaatagactttggagcattgacactgaccctcctgcttttccgacaaactcatccaacaaagcttacattgatttgatccttaagccttctgaagaagatatgaagatttggcctcacagttatgagttccgcctgagggtagctttgggacctggaggggatctaatgttaacatctcgcatcaggaatacaaatactgatggaaagccgtttacattcacattcgcatatcacacatatttttccgtgtccgatatcagtgaagttcgtgttgaaggattagagacacttgattatctggataatttactgaacaagcagcggtttactgaacagggagatgcaataacatttgaagctgaagtggacaagatatacctcagtactccgactaaaattgcaattctggatcatgaaaagaagagaactcttgtattacgcaaagattggctccctgatgctgtggtgtggaatccctgggataaaaag

SEQ ID NO: 10292 - DNA, 2144 bp, Gossypium hirsutum
  Clone ID: GOSHI-09MAY01-C12947_1
gagcttggagacaatgatgatgatgaggatgatttggctgccttggaaagaaagatgcagagtgcggggatgccttcaaatatctggaagcatgcacagagggagttgaggaggcttaagaaaatgccaccgcaacaacctggatacaatagttcacgtgtctacttggagcttcttgctgatctgccttggcaaaaggccagtgaggaacaggaattggacctgaaggctgcgaaagaccgtctggactgtgaccattatggtttatccaaggtcaagcaacggataatcgaatatctggctgttcggaagcttaagcctgatgcaaggggtccagtgctgtgctttgttggcccaccaggtgtggggaaaacatcattagcgtcatcgatcgccgctgctttgggtagaaaatttgtgcgcatatccctcggtggtgtcaaggatgaggctgatatccgagggcataggagaacatacattggaagtatcccacgcgccgcttattgatgggttaaagagagtagctgtttgcaacccagtcatgctattggacgagattgacaagacaggttctgatgtgcgtggtgatccagcttcagctctactggaggttcttgatccggagcagaataattctttcaacgaccactatttgaatgtgccatatgacctttcaaaggtgatttttgtggctactgcaaatagggtgcagcctattcctcctccactcttggacaggatggaagtcattgagctgcctggatataccgctgaagaaaagctaagaatagccatgcaacatttgattccacgagttttggatcagcatggattgaattctgagtaccttcaaattccggaggccatggttaaacttgttattcagaggtacaccagggaagctggtgttcggaatctcgagaggaacttggctgctttggctcgcgctgctgctgtaagagttgctgagcaagaccaggctgtctcagttagcaaagatgttcataagctagcttctcctctgctggataacaggcttgctgagggagctgagatggaaatggaagtccttccaatgggtgtgaataataatgagatatcaactgcgttcgtaattgcctcacctttggttgttgatgaggctatgctggaaaaaatattggggcctcctaggtttgatgatcgagaagctgcagatcgtgttgccactcctggagtatctgttgggcttgtttggacagcttttggaggagaggttcagtttgtggaggctacatcagtggttggaaatggtgaattgcatcttacaggacaacttggtgatgttattaaagaatcagcacaaatagcactgacatgggtaagagccagggtggcggatcttaagttagcagctgctgaggaaactgatctgctgcagggcaaagatattcatatacattttcctgctggggctgtacccaaagatggaccttcagctggtgtgacccttgtgacagcattggtttcactgtttagtcagaaaaatgtaagagcagatacagcaatgactggagaaatgacactgaggggtctcgtgttacctgttggtggtgtcaaggataaggtactagcagcacactgttacggtatcaagagggttattttgccagagagaaatctgaaggatttagttgatgtacctgcagctgtgctttccagtctagagattctggtggcaaagcgaatggaagacgtgttggagcatgcatttgatgggggatgtccctggagacaacaccaacactcaaaattatgacatagctctcgaactcaaaggcatcgatctatctaacatgtctcccgcgacaggtgactctaatctaacatgtcgcctttgggaacatgtaaatgaggttagctgttctggtccagcacagagaatttaacccttttgcaaatggggccttcttatatacgtgtgtgtttacaagtttcccaggagcggaaaatcactgattgccatatgcatttacttccgaagcaaggtatcctattccttctaattcttcttcttcttttgtgttttctttctaaaatatgtataatttgtagccacgcaagtatatttaactctcaattaagaattcaattacgaaatt

SEQ ID NO: 10293 - DNA, 309 bp, Gossypium hirsutum
  Clone ID: LIB3148-058-Q1-K1-E1
aggtttgatgaccgagaagctgcagatcgtgttgccactcccggagtatctgttgggcttgtttggaccaatttcggaggagaggttcagtttgtggaagctacagcaatgattggaaatggtgaattacatcttactggccaactgggtgatgttattaaagaatctgctaaaataccattaacatgggtgaaagccaggccaccaaattttaagtggccccttgcaaagaaaaaaatggtcctgcaggttaaaaatatcctattcctttttcaacttgggcctgaccaaaagaatggcccttaagcc

SEQ ID NO: 10294 - DNA, 466 bp, Gossypium hirsutum
  Clone ID: GOSHI-09MAY01-C12967_1
aaacacgtttcccgttctgggttttcaatcaaattttgctttgtttcctgttgcggaagatgcagcaactcttcagtatgttgcaaggatctctcatggcgctcctttgggatccactgaccttgtggttgatcttggcggttcgtttctttggatggattgcaattccggacacgtgtcttcatcatacaggttggtctcaagctgctcggtcaactgctctagagcaaagttccatgatcttggaagcacgagttgtctattaaacaccaactgttatgtgtccccttacaatggcgtaacaggatcgacttcaatgggggaactagtggaggatgtcatagccgttgattctgttgacccttcagatgtaggccaaagcacaacagtggatcactttctgtttgcttgtgcatcgacgtttcatttacaaggcttatcaagtggggccaagggaatgatgggt

SEQ ID NO: 10295 - DNA, 646 bp, Gossypium hirsutum
  Clone ID: GOSHI-09MAY01-C12907_2
cccccgcgcccgcccacccgtccgcccacgcgtccgcaaaactaaaagtccagaattagggtttcgataaccctaaccccagcatatcccctacaactccgacatcatttgggtccctttgtccttcaattagatcacagcttttcgttcaaaaatatattctcttgttattgttcttaatttcaagcaacaatggcggagcacttggcctcaatctttggtacggagaaggaccgcgtgaattgccccttctatttcaagattggagcatgccggcacggggacaggtgttcacggctccacaaccggccgacgatctctccgactctcctcctttccaacatgtaccagcgcccggacatgatcactcccggagtggatgcccagggccagcccatcgatccccgcaagatccaggagcacttcgaggacttctacgaggacatcttcgaggagctgagcaagtttggtgagatcgagagcctcaacgtttgcgacaacctcgccgaccacatgattggatacgtgtatgttcagttcagggaggaagaccaggccgcagccgccctacaggctcttcaggaaggctctactctggtcgtcctatcattgcggatttttcccggtcaccgatttccgcgaagca

SEQ ID NO: 10296 - DNA, 929 bp, Gossypium hirsutum
  Clone ID: GOSHI-09MAY01-C12907_1
cccggaacgaccgacgcgacccacgcatgcggtcctagagcgctagcgacggctgtagagatcgaaagcctcaacgtctgtgacaacctggccgagcacatgattggaaacgtgtatgttcagttcagggaggaagaccaggccgcagctgccctccaggctcttcaaggaaggttctactctggtcgtcctatcattgcggatttttccccggtcaccgatttccgcgaagcaacttgtcggcaatacgaggagaatagctgtaaccgtgggggatactgtaactttatgcatgtcaaggtaattggaagggagctgagaaggaagctgtttgggaggcaccgcaggtatagagggagtcggagcaggagtaggagcgccagtcctcgccaccggcgtgagagggaatatagggaaaagtctcgagatcgagaccgagatgatcatcgtgatagaaatgggcgaagaccggatagggatagggataggtatgaccgtgaaagcgggagtaggagaaagcatgggagtcctaggcgaagcagaagccctccacctgctagggaaggaagtgaggagcggagagccaggattgaacaatggaaccgtgagagggaagagaaggtgtaagaaaagattgttgggtatcatgtgtttacttttgggtaatcatttctaattatcatgtttttgttatgtttctgcaatttggattgaacttaaatcttcctttagcatgagcggaaccggccgcgcgggtacaaatggtctttttttttctttttagtgtcagcttttaatgcagcgcttgtatctctgttgaatagttctcttttgttttagtccatggttagagtttcaagccactttcttctcaaaaaaaaaaaaaaaaaaaaaaaaaaaaaaaaaaaaaaaaaatgtcgacgcggccg

SEQ ID NO: 10297 - DNA, 720 bp, Gossypium hirsutum
  Clone ID: GOSHI-09MAY01-C12927_1
caactttattggcattagctggacttagacgcttgagcatgactgaaaatgttacttctgttcttccaattgatgaaatgcttccagctgttgcgcagggggctattggaattgcatgtcgaagcaatgatgaaaaaagggctaattacctagcttcattaaatcacgaggaaacacgattggcagttacatgtgagagggcctttctagagacattggacggatcttgccgtactccaatcgctggctatgcttcaaaagacgaggatggtaattgcatatttaaaggattggtagcttctcctgatggaacacgtgtgcttgaaacatctagaaaaggtccatatgcttttgaagacatggttatgatggggaaggatgctggcaaaaaactcctttctcgggcaggtccaggcttctttgatttttgagtaatttaacaataatgagggctaaaagttgaaagcccaaggcttctggtttaacttttagggtttgtgtccatcaatcttcattcattctcttgagcctttgattgttgtaattccgggttagctattgtatgattaattctcaactagatcattttttttgatgagttgtgatagaaggttagaattttttttttaactctattgtaattgtattatcctttttttttaagtgaatgatttaaccctttattataagtattaataatctctgcggtatatcattttc

SEQ ID NO: 10298 - DNA, 491 bp, Gossypium hirsutum
  Clone ID: GOSHI-09MAY01-C12897_3
cttgggaacatttctggtgtttaggccttcgcgtccgggagagatgggaggaggccatggagggagtacaacttacaaaggtctaactttgcatcatccaaagcgatggcatgttgtcaccggcaaaggcttgtgtgccgttatgtggttttgggtcttgtacagggctaagcaagatggtcctgttgtattgggttggcgacacccttgggagggccatgatggtcattctcacggtcatggagataagcattagtgactcccggattgtgtttaggcgcaggaagattatctgattacaggcttgctgttgcagatgttgttccacaaatgtcttttgttaatttcttcggtttcaataaagtgattgtgaagggaagattgtaagcataatggggtgaaatatgaaactccatttcaacattatgaaactccatttcaacatgattgtttttgctgtttttaagcatggatttttctgaatgaatgcg

SEQ ID NO: 10299 - DNA, 652 bp, Gossypium hirsutum
  Clone ID: GOSHI-09MAY01-C12897_2
cttcagttggtcaaattcgcatccaactgttcaggatcggtttaaatctaagcgaccggcaagtgattaatccaccttcgaacacttgggaacatttctggtgtttagggtttggttacagggagagatgggaggaggccatggagggagtacaacttacaaaggtctaactttgcatcatccaaagcgatggcatgttgtcaccggcaaaggcttgtgtgccgttatgtggttttgggtcttgtacagggctaagcaagatggtcccggtgtattgggttggcgacacccttgggagggccatgatgatcattctcacggtcatggagataagcattaggcacaggaagattatctgattacagcctcgcggccgcccacgcggtcccaaatgtcttttgttaatttcttcggtttcaataaagtgattgtgaaggaagattgtaagcataatggggtgaaatatgaaactccatttcaacattatgaaacttcatttcaacatgaatggttttgctggttttaagcatggatttttctgaatgaatgtgttgtttgtgcacaaaaaactacatacaaaattgcatgttcatatgatgtgaaaccaagaccagaaacctcaaaaatggaaggataattgcgcacagaactc

SEQ ID NO: 10300 - DNA, 679 bp, Gossypium hirsutum
  Clone ID: GOSHI-09MAY01-C12897_1
tgttcgttcaaatcgaagctactggcaatctagtgatcaactccaccgaggcgagtcgcgagccccattcctgcttcgaacatttgagaccatttctggtgttttagggtttgatcacagtgagaaagaccgatgggaggtggccatggagggagcacaacttacaaaggtgtaaatttgcaccacccaaagagatggcacgtcgccaccggcaagggcttgtgcgctgtcatgtggttttgggtcctgtacagggctaagcaggatggtcccgtagtgttgggttggcgacacccttgggagggccatgatgaccattctcatggccatggagacaagcattagcctgaagaagcttatctgcttatgggtgcgtggcacagatgctgttctggaatgtcttctgtttattttcttcggtgtcaataaagtgatggtgaaatgggattgtaagcataatgaaatgaaaactgaaacttcatttatgcattatggttttcctgttaaagtgtggatttttatggccgaatgcatttggtttattgggcacctctggtttggctgaacgtagattttggccgaattgaagttttcttgatatttgatccccagaataatagaaattcgcctgtttgattaaaaagaaaaaaaaaaaaaaaaaaacacccccccccccagc

SEQ ID NO: 10301 - DNA, 378 bp, Gossypium hirsutum
  Clone ID: LIB3149-053-Q1-K1-G11
ggaacatttctggtgtttagggcttggtcgtttggatagatgggaggaggccatggacagagtgcagcttacaaaggactaactttgcatcatccaaagcgatggcatgttgccaccggcaaaggctcgagtgccgttatgtggttgtgggtcttgtacagggctaagcaagatggtactgttgtattgggttggctacaccctctggtgggccatgatgatcattctcacagtcatggagataagcattatgatgttgttccaaatgtcttttgtcaatttcttccgttgcaataaagagattgtgactgcagattcgaagcataatgtgatgaaatctgaaactacatttgaacattttgaaacttcaataaacat

SEQ ID NO: 10302 - DNA, 246 bp, Gossypium hirsutum
  Clone ID: LIB3146-027-Q1-K1-D9
cttatctgcttatgggtgcgtggcacagatgctgatctggaatgtcttctgtttattttcttcggtgtcaataaagtgatggtgaaatgggattgtaagcataatgagatgaaaactgaaacttcatttatgcattacagttgaaatgggatgatgaccgaatattaataatggaatcaacctcattgcttataaaaaaaaggaaaaaacaattacataaaaaagaaaacttaatactttagtaca

SEQ ID NO: 10303 - DNA, 514 bp, Gossypium hirsutum
  Clone ID: LIB3582-021-P1-K1-B3
cctgaaacaaaactagaagctaaaatggttgaagctatgcagcacagggcttctaaaggaactacaatcaagtctttcaacagcatcatcttaaaattccctaaaattgatcacaccttaaggaagtgcaaagctatttttgagcagtttggttagtaagcaactagtatttgttgaactgattgtttatttatgccatatacacccttttttcctttttgttcatcatcatatataaataaaactttgagaaagaacatgttttgtagatgaggactcaaatggtgccattgatcatgaagagttgaaaaaatgtttgcacaagcttcaagtttgtttcacagaggaggagatagaggatttgtttaaggcatgtgatatgaatgaggatatgggaatcaaattcaatgagttcatagtccttctttgccttgtctatcttctcaaggacaatgctactgaattcgaagccgtatcctttttaacatttttgagattttctctttcatttctt

SEQ ID NO: 10304 - DNA, 358 bp, Gossypium hirsutum
  Clone ID: LIB3166-058-P1-K1-A2
cttccccccaattaattcaattcaccctttctttgctcttgtgttttaagaggcgaggagaatggtaggtgtagtgggaaagtctgaatcacctgaaacaaaactagaagctaaaatggttgaagctatgcagcaaagggcttctaaaggaactactatcaagtccttcaacagcatcatcttaaaattccctaaaattgatcacaccttaaggaagtgcaaagctatttttgagcagtttgatgaggactcaaatggtgccattgatcatgaagagttgaaaaagtgtttgcacaagcttcaagtttgtttcacagaggaggagatagaggatttgtttaaggcatgtgatatgaat

SEQ ID NO: 10305 - DNA, 585 bp, Gossypium hirsutum
  Clone ID: GOSHI-09MAY01-C12877_2
ctacgcgtccgtttttgtattggaggatggcaagtggggatctagagcgaggaggaaggaatgggaagaacagagcaaatagctatcaccaatcatcatctcctttctatgtagaaaacactgataagcaatggacttcatggcttgttccaatgttcgtggtggctaatgttgctgttttttttgtggtgatgtatatcaatgattgccctaacaacaatctgggatttgaaggcagctgcgtggctaagttccttggcaagctttcttttcagcctttgaaagaaaatcctctctttggtccttcttctcatacattggacaaattgggagcactaaattggagcaaggtagcgcatggcaagcaaggatggaggctcatcacttgcatctggctacatgctggcgttattcatcttcttgctaacatgttgagcttgggcttcattggaattcgccttgaacagcaatttggattcctgcgtattgggcttatctatctattggccggctttggggggggtactctctcctctctcttcctgcgggatatttcttctgttggtgcatctggtgctttattcc

SEQ ID NO: 10306 - DNA, 1187 bp, Gossypium hirsutum
  Clone ID: GOSHI-09MAY01-C12877_1
gggccggccgacccttccgcgaacccctcgcgacaacccaaatctctctccatttttactaatcgaaatagatataaatttgagtttgatcccagtttcctttgaaaaagaaaaccccacagaagaaaaaaaggtacaaattttattcattaaacttgaaaaagaaccaagtttttgtattggaggatggcaagtggggatctagagcgaggaggaaggaatgggaagaacagagcaaatagctatcaccaatcatcatctcctttctatgtagaaaacactgataagcaatggacttcatggcttgttccaatgttcgtggtggctaatgttgctgttttttttgtggtgatgtatatcaatgattgccctaacaacaatctgggatttgaaggcagctgcgtggctaagttccctggcaagcctttcttttcagcccttggaagaaaatcctctcttgggtcctcctcctcatacttgggacaaatggggaccactaatttggaccaaggtagcgcatggcaagcaaggatggaggctcatcacttgcatctggctacatgctggcgttattcatcttcttgctaacatgttgagcttggtcttcattggaattcgccttgaacagcaatctggattcctgcggctcgcgcctttccttcgtgtttgattaatgatcatttgattcattacttgctgaatgaagaatttgatcatcttgctgttaaagcttttatatgtgtttttcccctaacagtgcgtattgggcttatctatctattgtccggctttggagggagtatactatcatctcttttcattcaagaataatatttttgttgtgccctttgtgctttatataaacctctgagagccatgtgataccgagcttttgagttaacgggctctatatacacataaagggctggtgctaaacccacattgggggccttaatgccttaacttaaatagtgggtattcttcctccggcaaaactttgcccatatgggggctttttaccggttttcccctggtttggtaaactgttcgtccaaatccggggggtccaatgcacattgtcctgtggggccctgtaaatttacccagggattccgtattttttgggattccgggtttggcaaattggatcacaggaatgggacctcttaagaaaaaggaatcccttg

SEQ ID NO: 10307 - DNA, 547 bp, Gossypium hirsutum
  Clone ID: GOSHI-09MAY01-C12837_1
catctctcgctccaagagtaataaacttcaagttgatggaataaaattagagattgcaccagcagctttgttccaacgaaacctccatcattctccagaaatttttagattttgatttttgtctccaacccagaggcgacagcttcacctgccggtccgtcttcaattgcatgatcgttggctcaatccctgtctttttctagcatcaaacaacttaccccaaatcttactctggtttcatccaccgtgacttagtcaaaaacggtacctcctccattaaaaccgttcttcaaagttactgcaaacaagaaataaaccaaatgagggagaaagtgattcaatacattcccaaattagtttatgcaaaacccgtaaaggggtttaaccatacaaaggatgcctttcgattttccattgattgagttttgttgtgtatttaaattacatagtcccttcctgttttaaattgggaatgttttttaacataccttccgctgattctttctttttcatttttatttttttaagaacagagcaggggaagaca

SEQ ID NO: 10308 - DNA, 412 bp, Gossypium hirsutum
  unsure (1)..(412): unsure at all n locations
  Clone ID: LIB3166-057-P1-K1-H6
cttcaatacccaatgtgtttcttactccaatgacccccgaaatcatacgtgctgtgtttcatctctactcgctgacttnnagtcaaaaaccggtnnacctctctccattataaaccccgttcttcaaaggttaccagcnnaaacaagaannataaaccaaatganngggagaaaggtnngattcaatacannttcccaaatnntagtttatgnncaaaacccgaaaaggggtttaaaacaatacaaagggatgcanttcgatatcgcncattgatggagtntttgaagagggaattaaagaaccaggagcanngcctggattcaaatggaaatgattataaacatacgtacgtagattctttctttttcatttttatttttttaagaacagagcaggggaagacatgattgt

SEQ ID NO: 10309 - DNA, 624 bp, Gossypium hirsutum
  Clone ID: GOSHI-09MAY01-C12587_1
cccagcgtccgcggatggttaagagcatgaatccaaaacttgttactgtcgtcgagcaagatgtaaacacaaacacatcaccattcttcccaaggtttatcgaagcctatagttactactctgctgtttttgactccctggacgccacccttcctagggagagccaggatcggatgaacgtcgaaagacagtgcctggcacgggacatagttaacatcattgcatgtgaaggagaggaaaggatagaacgatacgaagtcgcagggaagtggagggcaaggatgataatggctggcttcaagtcatgtccaatgagttcaaatgtaattgatacaatccagaagcttatcaaggaatactgtgacaggtacaagctgaaggaggatgtgggtgcacttcattttggttgggaagacaaaagcttgattgttgcttcagcatggagttaggaagttcagctctgaatgttcattgtaaactatagagttgttccagaaaaatgactttaatcctttgtgcttatgtaaaattccagagaagagtaggtattgctaattatctaacatttttcttgaataagatacgtttttcgcacaaaaaaaaaggtaatgaaaaaaaactcga

SEQ ID NO: 10310 - DNA, 591 bp, Gossypium hirsutum
  Clone ID: GOSHI-09MAY01-C12547_1
tgaaaagtctctctttgcttgctctccctccctccctcgagtatcttctcttcgcaggcaaacaaacagagctcaatttcttttcttattccgagtcttggttatcagattgcatgttgcactggagtgattgacatagcaaaagtttgttaggaagaatcaatgaaaccttggttagcatgtctggattaattgaaggtcttcccgatgctgttgcccttaggtgcctagcacgggttcccttctacctacatcctaagttggagattgtttctcattcctggagagctgccattcgtagccccgagctgtttagagctcgacaggaacttggctcaacagaggaacttctatgcgtgtgcgcctttgatccggagaatttatggcagatgtatgatcctttacgtgatctttggattactcttgctgtccttccctcgcaggtcaggcaccttgctcacttaggtgtggtctctactggtgggaagccggatgtgcttggtggtgtaagtgaggatagttaccctttgactagttgaccaggaggggagattggcaactaatgaagtctgggcatatgaccctggattg

SEQ ID NO: 10311 - DNA, 465 bp, Gossypium hirsutum
  Clone ID: GOSHI-09MAY01-C12457_4
ggtcagcggagatgctcttggagaggaattcaagggctatgttttcaaaatcaagggaggatgtgataagcagggattcccaatgaaacagggagtgttaattcctggttgtatctgtctcttgctccacagaggttacttgtgttgaagaagaagctgtgctgtccctggatgcctacattttgctctatgctaaacaaggtataccttggttttcaactgcaatagaagtgcaaaagccttgtgcagaccctggaatttctgattcttcaccaaagtctgttctagatgacatagactttgcctccaatcttgaggtggaaaagagtgccaattgcagcgccaatgaaactaaagatgttgctgatagagcttcaactcaattctcttgtgatgtgttcaactagtcagtctgtttctcatatgtattatttattttagttttgattctaaatctttattttc

SEQ ID NO: 10312 - DNA, 668 bp, Gossypium hirsutum
  Clone ID: GOSHI-09MAY01-C12457_3
cccacgcgtccgcccacgcgtccgcccacgcgtccgcccacgcgtccgctttcatcttcttaattaattgttaatcttcccaatggccgcctaccaaagaaaacgacgttttgccaatcaaactaggaggaactgaggtatcaactatttgcagttgtaaaacattccggattcagacctactgctggacactatgtttgctacattcgatcctctcctaatatatggcataagatgaatgattcaagggttacttgtgttgaagatgaagctgtgctgtctctggaagcctacattgggctctatgctaaacagggtataccttgcttttcaactgtaatagaagtgcaaaagccttgtgcagaccctggaatttctgattcttcaccaaagtcctagatgacatagactttgcctccaatcttgaggtggaaaagagtgccaattgcagcgccaatgaaactaaagatgttgctgatagagcttcagctcaattctcttgcgatgggcatagtcataggcaggctcaactagtcagtcctgtatctcatatgtattatttactttacttttgattctaaattgttatggttactttactttttacgacgacttgagttctaacttttggattcttcttgcttctgacttctatttttattatcttt

SEQ ID NO: 10313 - DNA, 468 bp, Gossypium hirsutum
  Clone ID: GOSHI-09MAY01-C12457_1
gaggaattcaagggctatgttttcaaaatcaagggaggatgtgacaagcagggattcccaatgaaacagggagtgttaactcctggtcgtgtccgtctcttgctccacagagggaccccttgcttccaaggatatggtaggcgcaacggagagaggaggaggaagtctgttcgaggatgcattgtgagtcaagatctctctgttctcaacttggtaattgtgaaaaagggtgaaaatgatcttcctgggctcactgatactgagaaaccaagaatgaggggtcccaagagggcatcaaagattcgtaaactcttcaatctctcaaaggaggatgatgtccggaagtacgtcaacacttaccgtcgatctttcacgacaaaatcaggaaagaaagccagtaaagctcccaagatccagagattggtcactccattaactttgcagaggaagagagcaagaatagccgag

SEQ ID NO: 10314 - DNA, 455 bp, Gossypium hirsutum
  unsure (1)..(455): unsure at all n locations
  Clone ID: LIB3828-024-Q6-K6-B11
cttcggggaaccagggctagnngggggggaggggggagngacaagcaggttcccatgaaacaggagtgttactcctggtcggtccgtctcttgctccacagaggaccccttgcttccaggattggtaggcgcacggttagggaggaggaagtctgttcgaggggggggggagtcaagatctttgttctcaacttggtaattgtgaaaagggtgaaaatgatcttcctgggctcactgatactgagaaaccaagaatgaggggtcccaagagggcatcaaagattcgtaaactcttcaatctctcaaaggaggatgatgtccggaagtacgtcaacacttaccgtcgatctttcacgacaaaatcaggaaagaaagccagtaaagctcccaagatccagagattggtcactccattaactttgcngaggangagagcaagaatagccgatattttt

SEQ ID NO: 10315 - DNA, 682 bp, Gossypium hirsutum
  Clone ID: GOSHI-09MAY01-C12767_1
tcgaaattataatcttcaaagtctctctggtctttagaatcctaactcgcaagttactaagaagaaatggcaactgaacaaccaaagcctcaaaatgaagacataaatatggatttgtttgaagatgacgatgaatttgaagaatttgaaatcgatggagagtgggatgacaaggaagaaggaaaggaagaaggaaaggaagtaacacagcagtgggaagatgaatgggatgacgatgatgtcagtgacgacttctcactgcaactgaggaaggaactcgagaataacaccaagaactgaaccagagttgtgcttctctattgtcttgcttcctcgtttgaatttattttggtttcttgcaaaactgatgtttgagctttaactctttatgattgggatgttttatagaaacagtgtgcagaagctggtctttatggttatctgaaatatagattgtgtgggtgtttgccttgtttaaactgggcccatgttttgctttttttttttttaaaaaaaaaaaaaaaaaaaaaaaaaaaaaaaaaaaaaaaaaaaaaaaaaaaaaaaaaaaaaaaaaaaaaaaaaataaaaaaaaaaaaaaaaaaaaataaaataaaaaaaaggggggggccgttttaaaggatcaaattttatgtcccggggtttgcaacggtatatttttttt

SEQ ID NO: 10316 - DNA, 416 bp, Gossypium hirsutum
  unsure (1)..(416): unsure at all n locations
  Clone ID: LIB3189-052-P1-K1-H6
gtgggatgacaaggaaaaaggaaaggaaaaaggaaaggaagtaacacagcagtgggaagatgaatggnaggacnattatgtcagtgagcgacgtctcactncaactnangaaagaactcnagaataacaccaaaaacttaaccagaattgtgcttctttattgtcttgcttccttcgttgaatttaattttgggttcttgcaaaactgatgtttgagctttaactctttatgaatgggatgttttatagaaacaagtgtcaaaaacttgtctttattgttatcttaaatataaattttttgcttgtttctcttttaatactaattattatttttttttttacttttttttctttttttatttatttctaatatattattttctatctttattattttatatatatttatttttttt

SEQ ID NO: 10317 - DNA, 578 bp, Gossypium hirsutum
  Clone ID: GOSHI-09MAY01-C12737_3
cccacgccccccgccaacgctgtgttagtggaaagtgtgaataaagagagtgaaagaccctcacactcccagtctccgaccttgcgagagccgagcgacccctcccagaatgctgcgtcgagcattggggctcttgccccgacccatagcagctgcaagggctcgatccttttccaccgatctgcccgccgctcacactgccgatgccaccttcatggaggcctggaacaaagtcatgcccaacacggatcctcctaagacccctctatctttcatgcaccctcgcccgcctaccccttcctccattcctcccaaactcactgtcaatttcgttcttccttatgcttctgagttgtccaccaaggaggttgacatggttatagtaccagccacaaccgggcagatgggtgttcttccaggacatgtagcaacaattgcacaattgaagcctggtgtgctgtcagtgcatgaatgaagtgaaacttcaaagtattttgtcagcagcggctgtgtttttatccatgccaactcatttgcagatataattgctgtcgaggcagtgccactcgatcagatcg

SEQ ID NO: 10318 - DNA, 804 bp, Gossypium hirsutum
  Clone ID: GOSHI-09MAY01-C12737_1
aaacagaaaaagagttaagccagagactgaacggcccctcttctcacaccctgtctccgaccttgcgatagccgagcgatcaccaccaacccccctcccagaatgttgcgtcgagcatcgatgctattggcctgtcgatccattttggcagcaagggctcgacccttctccactgatctgccagcggcaccctctgcggatgccacattcacggaggcgtggactaaagtgatccccaacatggaccctcctaaaactcctctctctttcatgcaacctcgtcctcccactccttcctccattccttccaagcttactgtcaatttcgtccttccttatgcttctgagttggccaccaaagaggttgacatggttatagtaccagccacaactgggcagatgggtgttcttccaggacatgtagcaacaattgcagaactgaaacctggagtgttatcagtgcacgaaggaagtgaaatgacaaagtatttcgtcagtagcggctttgtttttatccatgccaactcttttgcagatataatagctgttgaggctgtgccacttgatcgacttgatgttaaccttgttcagaaagggcttgcagagttcacctcgaagctgagctctgccacaaccgacttggagaaagctgaagcccaaattggaattgatgtgcacagcgcactcaactccgccctcacgggctagcgttgtttgccattcatccgatttttttttccttaaacctgccctaccgatccttaagatttatatgatggatgcagatatagttctgaatatgtt

SEQ ID NO: 10319 - DNA, 604 bp, Gossypium hirsutum
  Clone ID: LIB3825-018-Q1-K6-G11
aaatccctttacccgctcgttactccctcttcctcttatctccgtcgtgcgccctaaatcccccaataactctcaaaatttgcccccaaaattcccatttccagcaacaccaagtcaatacatctattgtatttgttcggctgagaaaaaaagggaaagaaggaggtcgggaaccggcgaagttcgtcggatttcacccattcgtcatcggagcttccaaaaaaaactctttatctgagttttgatcgcggatatagaaaagaatcagcaaaatcaagggatctggacctcttgttacgaccatgctcgttgcatctacggtggtctcacttcgtcttcatccgccgaagtccaacatgtttctttttctccaacctcctccaaccaggttgacatggttatagtaccagccacaactggacagatgggtgttcttccaggacatgtagcaacaattgcagaattgaagcgtggtgtgctgtcagtgcatgaaggaagtgaaactacaaagtactttgtcagcagcagttttgtttttatccatgccaactcatttgcagatataattgctattgaggcagtgccactcgatcggatcgacgta

SEQ ID NO: 10320 - DNA, 567 bp, Gossypium hirsutum
  Clone ID: GOSHI-09MAY01-C12667_1
cggacgcgtggggaaccagattttctcagaaaccacaacagaaaaatcgccgccatgcatcggttccttgagcaaagacctagggcattgttgaaaaatgtggcagctattctcttcttcacgatcgcatctgggacattgagtattcaccacgacccgttttattttgaggttgataaaggatggaataaaattccatgaaatcctccatattgtcattttgatctttgacaggatctgcaatttccatagtttgctgtagaaatctttagtttcgatatgtaaaattaaattgttaggatccaaggtagactcatgtaatagtttataggcgctcctaaaggaaaaatcccctgtcagctcccctctccaaacttgaaaatctttatgttccgtctccgccagtgggattttcaatattttctttgctacatccggttggaagatcatcacgaatggaaattttatcacctctccccaccctccagcagagtcctttttcaagcagtcctttcgcagtccatacgctattctaggatttcttcatcatcatcatcaagggataga

SEQ ID NO: 10321 - DNA, 889 bp, Gossypium hirsutum
  Clone ID: GOSHI-09MAY01-C12627_1
gtggtatgtccgtgtcaatgttattgaggctcaagaccttgttccagctgacaagagcaggtttcctgatgcatatgttaaggttcagattggtaaccagatcttaaagacaaaaccagtccaaactcgaaatatgaatccaatctggaacgaagagtttatgtttgttgctgccgaacccttcgaagatcatctgacttttacagttgaagatcatgcaggtcctaataaggatgagaccattggaaggactgtcatagcattgaactccattgataggcgtgctgatgatcgctttgtccgtacccggtggtacaacctggagaaatctttatccgatgccatggacagtgatcgtgcaaagaaggataaatttcatagtaggctccatgtttgtgtttgtcttgatggaggataccatgttcttgatgaatcaactcagtatagcagtgatctccggccaacagcaaagcagctctggaaatcgtcaattggtgttttagaactcggaattttgaatgccgacgggctccagccaatgaaaactagggacggaaaaggtgcatctgatacatattgtgttgctaagtatggccataaatgggttcgaactcgaaccatagtaaatagcttgaatccgaaatataatgagcagtacacctgggaagtttatgatacagccacggttctcactgtgggtgtctttgataactctcagattggaggttccgataataccagagataacaaaatcggaaaggtacggattcgcatatctacactggaaactggtcgtgtttacacacactgttacccgctgctggttcttcacccttctggtgtcaagaaattgggtgaactccatttagcaatacgattttcgtcaaca

SEQ ID NO: 10322 - DNA, 1093 bp, Gossypium hirsutum
  Clone ID: GOSHI-09MAY01-C12107_1
cccacgcgtccgctcattttttccatctgcaaccaaaggcaatggctgtggctcaccttttccctatatatgtaaccgtatggcatcataacccataccagacactcgttgcctcgtcttccacttcactctgggtcacttagtttctttgttttttgctcttggagtgaggaaatccataggaaacaagtacgtttcgtctctttttaattttcataatggctgggactggagtgttttcagacatattggatggagatgtttacaagtactatgctgatggtgaatggaagaagtcttcttctggaaaaactgttgcaattatcaaccccaccaccagaaaaactcagtataaggttcaagcttgtacacaagaagaggtgaacaaggttatggaatcagcaaaaactgcacaaaaatcatgggctaagactccactttggaagagagctgagctccttcataaagctgctgctatcctaaaggagcataaagcaccaattgctgaatgcctggttaaagaaattgcaaaaccagccaaagatgccattaccgaggttgtgaggtccggggatcttatttcttacactgctgaagaaggggtaaggattcttggtgaagggaaattcttggtatctgatagttttcctggaaatcagagaaccaaatattgcctcacgtccaagattccgcttggagtgattctggccattccaccattcaattatccagttaacctggctgtttcaaaaatcgcaccggctttaattgctggaaactcccttgtactcaagccaccgacacagggtgctgtttctgctcttcatatggtacactgctttcatttggctggttttcccaaagggctcattagctgtgtgacggggaaaggctccgagatcggggactttctcaccatgcatcctggagttaactgtataagcttcactggtggagacacccgcattgcgatctcaaagaaggcaggaatgatccctctgcatatggaatttggaggaaaagatgcatgtattgaactcgaggatgcctactaggatttagttgctgcaaacattattaaaggagggttttt

SEQ ID NO: 10323 - DNA, 575 bp, Gossypium hirsutum
  Clone ID: GOSHI-09MAY01-C12087_1
agggggtgccccagtgtatagataaacttgcacaagctggtctgaagatctgggttttgacgggggacaagatggaaactgctataaatataggatttgcttgcagtctgctaagacaaggcatgaagcagatatgcattacaacaattagttcagataccaaaactctaatcaaggaaaacatattgatgcaaattaccaatgcttcacaaatgatcaaactagaaaaagatccacatgctgcatttgcattgatcattgatggaaagactcttgcctatgccttggaggatgatatgaaacagcaattcttaggcttagcagttttatgtgcatctgttatttgctgtcgtgtatctcccaagcagaaggcgctagtgacaagattagtaaaagaagggaccgggaaaaccaccttagcaattggtgatggtgcaaacgatgtcggaatgattcaagaagctgacattggagttggcatcagtggtgtggaaggcatgcaggctgtaatggccagtgacttctctgttgcccaattttgtttcttggaaaggcttctcgttgtccatggacac

SEQ ID NO: 10324 - DNA, 638 bp, Gossypium hirsutum
  Clone ID: GOSHI-09MAY01-C12007_1
cccacgcgtccgcccacctcagcttaacaacaacaacaaaaaaatggcttcttttatcactccagctatcttaaaaatattcctcatcatctctttgtttcaaatctgtttgggtgtacgaaagctgagtgaagtggttgaggagcagcctcagctcttgaaataccacaacggtcctctcctttcaggcccaatcaccgtcaatctcatttggtacggcaagttcaggccttccgagagggctattatctctgattttgtcacctccctctcttctaacccttcttcaccctccctaaaaacccaacccacggtggctcagtggtggcggaccaccgagaaatactaccatctcgcctctaagaaatcgtctctttccttgtctttggggaagcagatccttgatgaacactattcgcttggcaagtctctcaagaagaaacaaattgttgagttggcctcaaagggtgaccaaaagtatgctattaatgttgttttaacagcatctgatgttgctcgtgaactggttttgcactgaccctatgtgggactcatgggtctgccttgagctccaccatgggtatatggtctgccaaacttgcttacatttgggttgggaatgctcacactcattgccc

SEQ ID NO: 10325 - DNA, 851 bp, Gossypium hirsutum
  Clone ID: GOSHI-09MAY01-C12367_1
tccacgcgtgcgcccacgcgtccgcccacgcgtccgctatccccaaaatcttttaactttcattttgctatctactttcattactcatctgcacattgctccttcattctggttctttaagccaagtttctgccgaggcgaaggcgtgaccttccagatcttctcccatcagctttcaggcacgcataagcctctgctgcaaaaggtgaggggacatctctgtggataaccgtctgtaacaccattaaggttcccctcaaatcccaccctaccaaacctgtcgctgaactgaaagttctactgtcgaacgctgcattaaaatagattctcggactcggtatggccttcttgtgttttataacttctggttatactttcgctctttgtcaagttttttaaacctccaaattcttgccagatgtctttgaatattatgtgctaaatctctacctggtgtatttcttctctcgtgtactaattgaggtctggagtaccataacatccatagagcgtagcagaaaagtagacattgactcgttgtcgcttctcttgaagacccagagggcattcgcgataaacatggacactttcttcaaccgtcgaatagcatcgaggacatctatcattgacagtaaccctcctgtatctaagattagcaaaattaagaataaaatcccatgaaatgcgccagattgtaaatgtaatttttgagggcaactgtaagctccaaagtttcttggaaaattcttttaattcggtctgcaataaataatcattggggacccgattatcaatagtttacagcaaaaacagaaactaataaaagcaacaaaaatcaacaaacaaaacca

SEQ ID NO: 10326 - DNA, 357 bp, Gossypium hirsutum
  Clone ID: LIB3166-051-P1-K1-F5
cccacgcgtccgcccacgcgtccgcccacgcgtccgttcttctctggtgtactagttgatttctggagtaccataacatccatagagcatggcagaaaagtagacactgaccgttgtcgcttcccttgaagacccagagggcattcgcgaaaaacatggacactttcttcaaccgccgaacaacatcgaggacatctatcattgacagtaaccctcctgtatctaagattagcaaaattaggaataaaatcccatgaaattcgccagattgtaaatgtaatttttgagggcaactgtaagctccaaagtttcttgtaaaattcttttaattcggtctgtaataaataatcattgggg

SEQ ID NO: 10327 - DNA, 326 bp, Gossypium hirsutum
  Clone ID: LIB3493-022-P1-M1-A4
gtcgaacgctgcattaaaatagattctcgtactcgtaccataacatccatagagcgtagcagaaaagtagacattgaccgttgtcgcttctcttgaagacccagagggcattcgcgaaaaacatggacactttcttcaaccgccgaatagcatcgaggacatctatcattgacagtaaccctcctgtatctaagattagcaaaattaagaataaaatcccatgaaattcgccagattgtaaatgtaatttttgagggcaactgtaagctccaaagtttcttgtaaaattcttttaattcggtctgtaataaataatcattagggac

SEQ ID NO: 10328 - DNA, 744 bp, Gossypium hirsutum
  Clone ID: GOSHI-09MAY01-C12247_1
ctgccttaatcattgcacagctggttgctactgtgattgctgtatatgctaactggggatttgcaaggattcaaggaataggatggggatgggccggtgtcatatggctttacagtgttgttttctacatcccacttgatctaatgaagttcgccattcgttacatcttaagtggaaaagcttggctcaacttgctagaaaacaagactgcattcaccaccaagaaagactacggaaaagaagagagggaagctcaatgggcacttgctcagaggacattacatggacttcaaccaccagaagcttctaacctcttcaatgacaagagtagctacagagagttgtctgagattgccgagcaggccaagaggcgagctgaggtggcaaggcttcgagagcttcacactctgaaagggcatgtggagtcagtggtgaagctgaagggactggacattgatacaatccaacaacattatacagtctagaaagttgctgctgaatgagaaatgcaggtccaagctagagcaagaagaagtaatgttcaagtttgaaaattttctacattagtcacaacatgtgtgctataattttcctgcccttcccatttagttttttactttgcctgtcttatgtaattcaaggccgaaaaaggtgttttagtctcttcttgctccttttaggggtctgggccctgtaattccttccacttctttcttttttctttgctgctttttctttcttgcg

SEQ ID NO: 10329 - DNA, 205 bp, Gossypium hirsutum
  Clone ID: LIB3148-002-P1-K1-D2
cccacgcgtccggttttttactttgcctgtcttatgtaattcaaggccgaaaaaggtgtgttagtcacgtcttgctccaataaggagttaggccatgtaatcttccacttcaatctttattcttagctgcaaatctactttttttcctatgctttcttgaaggtatattatgagaaatagctgcctgccattcagccactatgtc

SEQ ID NO: 10330 - DNA, 696 bp, Gossypium hirsutum
  Clone ID: GOSHI-09MAY01-C12227_1
cttttaatttattttatatattatctttttttctcttatatatatgtgtgcgtgttttcatgctgatctattttcgttgttctctccttgttgaaatccaaaggctctctttatcgttccttcaatggcagttgaagctcggcatctgaatattttctcttctcagttcatcaccaatagtcacagcagggtttttattaaatcaaatcaagggattggggatatatacaatacccagatggattcttgtgttcctttaattgattcaaattcaatgcatgaaggttcacaacttttaccattatatcaacccctcctctgtcatccaaatatttcagccaacaaagctgatagcggtcttacaacttacaacatgagtatcccagtttcagctccaagaaaaaggtctagagattcattcaccaatggctttgattcgtattcgctccctcaaaacatcaacctttctggtgcttcctcagacgttgatgatgatgtcttctcccagatccaacaacaacatgatattggaccggttatattctgatcatccagaaaaattgaggttggaagttgaagagagacgaaagaggcagtcaagaatgtttattacagcgatccaagaaagggtgatgaagaaactcaaggaaaaagatgaagaaatccaagagatagggaaactcaactgggttcttc

SEQ ID NO: 10331 - DNA, 391 bp, Gossypium hirsutum
  Clone ID: LIB3166-049-P1-K1-H5
ggaatcgccccacgcgtccgctctctcttaatctatttgatatattatcttttatatacatatatatatgtgtgtgtgttgtcatgctgatctattttcgttgctctctccttgttgaaatccaaaggctctctttatcgttccttcaatggcagttgaagctcggcatctgaatattatctcttctcagttcatcaccaatagtcacagggtttttattaaatcaaatcaagggattggggaaatatacaatacccagatgtgattcttgtgttcctttaattgattcaaattcaatgcatgaagtttcagctccaagataaaggtctagagattcattcaccaatggctttgattcgtattcgctccctcaaaacaacaatctttttgg

SEQ ID NO: 10332 - DNA, 464 bp, Gossypium hirsutum
  unsure (1)..(464): unsure at all n locations
  Clone ID: LIB3147-035-Q1-K1-B12
cgggcgnccacgcgtgcgntggaaaacaaacacattgtcttgtttcatgatccatctacagttgagcgaantgaaggatcctaagattatgctttgccccatacctacaatacatgttttttcaagatatagttttatagtagtatatatggactgtaaatatgcatgttgggtttatgtgactttactagataacaacgtttagtagagcagcgtgaaaataaacatttgataagccatgttgattacaatatattgaaaatggagatagcccggtttacctatttgtttttttttttaaataaaactatattttttacttttttttttttaattttttacctacatattttattaatctattattaattatattttttatctatcttattattacttatttttttaataatttaattattttggggggggccccctctttttagggaataaatttttttttt

SEQ ID NO: 10333 - DNA, 322 bp, Gossypium hirsutum
  Clone ID: LIB3189-023-P1-K1-C8
gcggccgctcgcgatctagaactagtctcctaagattatgctttgccccatacctacaatacatgttttttcaagatatagttttatagtagtatatatggactgtaaatatgcatgttgggtttatgtgactttactagataacaacgttaagtagagcagcatgaaaataaacatttgataagccatgttgattacaatatatggaaatggaagatggcgggttagcctattgtttttattaaaaaaaaaaaaataaaaaaaaaaaatataaaaaaaaataataaaaaaaaaaaaaaaaaaaaaaataaataaaaataat

SEQ ID NO: 10334 - DNA, 725 bp, Gossypium hirsutum
  Clone ID: GOSHI-09MAY01-C13967_2
cggccgcgtgggaatataaatttaaaggaaaatagatgccatttattatcattattattttcttcgagttttgccttcagattcttcctctttgtaagttcaaatctaaaaagccatggcaaatgctgcttctggaatggccgtgcatgatgactgcaagctgaagtttctagagctaaaggctaaaaggacataccgcttcatagtattcaagatcgaggagaaacaaaagcaggttgtcgtggaaaagcttggtgagccaagtcaaagctatgacgatttcactgctagcctccctgccgatgagtgtcgatatgctgtatacgatttcgactttgtgactgctgagaattgccagaaaagcaggattttcttcattgcatggtctccggacacatcaagggtgagaagcaagatgatttacgcgagctcaaaggacaggttcaagagagagttagacggtattcaagtagagctgcaggcaaccgatcccaccgagatgggactcgatgtcataagaagccgtgccaactaaatcggagtctccgagaggcatgggtatttgaattcttttctgcttttgcttttagtgaaatgttattacggttgcgggaggcggtaatatcgacctgactgaactttgatattggtttgttgggtaagttttttttatataaaattcttcagtctcgaacaaattatatgggtttgttatgcgcaaaggt

SEQ ID NO: 10335 - DNA, 865 bp, Gossypium hirsutum
  Clone ID: GOSHI-09MAY01-C13967_1
aaaaaagaaaggaaaaaaaattcaaaaaagaactagaaatttattatcgctcacagtctctttgagaaagcccaataattccctctctcatttttaattttggatatttttgttgccctagattttctctctgtaagctctacctagagaagaagccatggctaatgcagcgtctggaatggctgtgcatgatgactgcaaactgaagttccttgagttaaaggccaaaagaacataccgctacatagtattcaagattgaggagaaacagaagcaggttgttgtggaaaagcttggtgagccaagtcaaagctatgatgatttcacttcaagcctccctgctgacgaatgtcggtatgctgtctatgattttgactttgtgactgctgagaattgccaaaaaagcaggattttcttcattgcatggtctcctgacacctcaagggtgagaagcaagatgatttatgcaagctcaaaggacaggttcaagagagagttggacggtattcaaatagagctgcaggcaactgacccgactgagatgggacttgatgttattcgaagccgtgccaactaaattggcatctccaaatggcaggaataatggagatggtaaaatgctttctgcttttgtttcaagtgaaatgttaatagtttggcggggtggtatgattttggtttgttgttcagatgttatatccaagtctttgtctagaacaagtttagcaatttccatttgaatcttatgattctgttatgcatgtctcaaagttatcggacggagtgtcttacagctgagtcgataaacaaaagtctcatcttcttgaagagtatatgaagcactcttttttgaggggtttcttcc

SEQ ID NO: 10336 - DNA, 606 bp, Gossypium hirsutum
  Clone ID: GOSHI-09MAY01-C13807_12
agttgaatatcattgctggaggggtctcagaaaaaagaatgtgttgagggtgcaattgcggatctagctgcaactacgccaccaggtgaccatgcgatctgcgccatgacatacggtccatggcgaagacaaccagcactcagaccatgatgaaggagaggcgcccgcgaagatgaccttcgagggaccagagatgagcactactgcatcaggacatggatgcaagtgtggatcaaactgctcttgcgatccatgcaactgttgaaaagcttcctgctcgcccgagatgatgaaaaaaagaaagcagcggggataacaggcctctgtaatgatttattggcaaggatggatgcctgcaaggtctatgactatatatgtctctgactgtgtcttgtgtaatagaagctttgtttgtggtgaaaataatgtataagccatttggttgggagcaaattgttcttttctccaaaggatttttgctgctcattcatggagacttggattatggatttatctgttgttgctaaaatcttataaaaatatatatctgttgctgctaaaaacgactctgtaggaaggcacattaccttgaaaccaagaattaag

SEQ ID NO: 10337 - DNA, 582 bp, Gossypium hirsutum
  Clone ID: GOSHI-09MAY01-C13807_11
ctcatgcgtacggtgtttgtctattgaattctggggggtgtttttttaaagattttggggggtccccacgttgcaattgcggatctagctgcagctgcggcgacagctgctcatgcagcaggaaccttaaccttggatactcggagaagacaaccagcactcagaccatcatctccggagttgcgccagtgaagatgaccttcgagggaccagagatgagcactactgaatcaggacatggatgcaagtgtggatcaaactgctcttgtgatccatgcaactgttgaaaagcttgattaaagccctagattttgaataaagaaagcagccaaataacaggcctctgtgatgatttattttcaaggatggatgcttgcaaggtctataattatgtctctgtctgtcttgtgtaatagaagctttgtttgtggtaaaaataatgtataagccatttggttgggagcaaattttccttttgtccaaaggatttttgctgctcattcatggtgacttggtttatggttttaaaaaaaaaaaaataaatatatctaataataattattttatttaataaaaatttag

SEQ ID NO: 10338 - DNA, 393 bp, Gossypium hirsutum
  Clone ID: GOSHI-09MAY01-C13807_8
cccattctttcgcccacgcgtccgcccacgcgtccgcccacgcgttttgcttcccgcgtgcccgagattatgaaaaaaagaaagcagcaaaaataacaggcctctgtaatgatatattgtcaaggatggatgcctgcaaggtctataattatgtctctgtctgtgtcttgtgtaatagaagctctgtttgtggtgaaaataatgtataagccatttggttgggagcaaattgtccttttctccaaaggatttttgctgctcattcatggtgacttggtttatggttttatctgttggtgttaaaatcttataaaaatatatatcggttgctgctcttggtttgtatcaaatcattggctgccaatatatggcatcatttcttaaaaaaacaaa

SEQ ID NO: 10339 - DNA, 608 bp, Gossypium hirsutum
  Clone ID: GOSHI-09MAY01-C13807_6
ccttcgcgtccgcccacgcgtccgcccacgcgtggggcggtgacaactgctcatgcggcagaaccttaaccttggatattcggagaagacaaccagcactcagaccatcatcttcggagttgcgccagtgaagatgacctttgagggaccagagatgagcactactgaatcaggacatggatgcaagtgtggatcaaactgctcttgtgatccatgcaactgttgatctgcttgatgaaagccctagattatgaaaaaaagaaagcagcaaaaataacaggcctctgtaatgatttattgtcaaggatggatgcctgcaaggtctatgactataattatgtctctgtctgtgtcttgtgtaatagaagctttgtttgtggtgaaaataatgtataagccagttgtttgggagcaaattttccttttgtccaaaggattttttgctgctcattcatggagacttggtttatggttttatctgttgttaaaatcttataaaaatatatatcgattgctgctcttggtttgttaactaaaaaaacatagaaaacaaataccaattgaataaacaatttgcaaggaaatattaaggtttaaaaaagggcggc

SEQ ID NO: 10340 - DNA, 567 bp, Gossypium hirsutum
  Clone ID: GOSHI-09MAY01-C13807_4
ctttcgtgtttgtctattgaattctttccctcacttgggcgagaaattaaaatgtcttcaaggttgcaattgcggatctagctgcacctgcggcgacagctgctcatgcagcacgaaccttaaccttggactcctaccgagaagacaaccagctctcagaccatcatctccggagtcgcgccagtgaagatgacctttgaggcaccacagatgagcactactgaatcacgacatgcatgcaagtgtggatcaaactgctcttgtgatccatgcaactgttgacaagctcgatgaacgccctagaattatctataaatgaaagcagccaaaataacaggcctctgcaatgatttattgtcacggatggctgcctgcaaggtctatgtccataattatggctctgcctgtgtacttgtggaatagaagctttgcttgtggtgaaaataatgtatgaagcccgtcggttgggagcaaattgatccttttctgcccaaaggattttttgctgctcattcatggtgacttgtttatgggtttatctgctgtaaatcttataaaatatatatc

SEQ ID NO: 10341 - DNA, 632 bp, Gossypium hirsutum
  Clone ID: GOSHI-09MAY01-C13807_3
ccgccgcccctttttgagctttcgtgtttgtctattgaattctttccttcactttctcgagaaaaaaaaaatgtcttcaggttgcaattgcggatctagctgcagctgcggatctggctgcaattgcggtgagaactgctcaatgaaccttaaccttggatactcggagaagacaaccagcactcagaccatcatctccggagttgcgccagtgaagatgacctttgagggaccagagatgggcactactgaatcaggacatggatgcagctgtggatcaagctgcaaatgtaatccatgcacctgttgaaaagcttgatgaaagccatagattatgaaaaaagaaagcagcaaaataacaggcctctgtaatgatttattttcaaggatggatgcctgcaaggtctataattatgtctctctctgtcttgtgtaatagaagctttgtttgtggtgaaaataatgtataagccatttggttgggagcaaattttccttttgtccaaaggatttttgctgctcattcatggtgactgggtttatggctttatctggtgtggtaaaatcttataaaaatatatatcgattgctgcttataaataaaaaatttgaaagccactctttacttatat

SEQ ID NO: 10342 - DNA, 737 bp, Gossypium hirsutum
  Clone ID: GOSHI-09MAY01-C13807_2
ctgtacttgtgggcggacgcgtgggcggacgcgtgggcggactctccgcctcacgcgtccgcccacgcgttctgagctttcgtgtttgtctattgaattctttccctcactttctcgaaaaaaaaaatgtcttcaggttgcaattgcggatctaactgcagctgcggtgacaactgctcatgcagcaggaaccttaaccttggatattcggagaagacaaccagcactcagaccatcatctccggagttgcgccagtgaagatgacctttgagggaccagagatgagcactactgaatcaggacatggatgcaagtgtggatcaaactgctcttgtgatccatgcaactgttgaaaagcttgatgaaagccatagattatgaaaaaaagaaagcagcaaaaataacaggcctctgtaatgatatattgtcaaggatggatgcctgcaaggtctataattatgtctctgtctgtgtcttgtgtaatagaagctttgtttgtggtgaaaataatgtataagccatttggttgggagcaaattgtccttttctccaaaggatttttgctgctcattcatggtgacttggtttatggttttatctgttgttgttaaaatcttataaaaatatatatcggttgctgctcttggtttgtatcaaatcattgtctgaaaatatatggcatcttttattccttttaaaaaaaaaaaatttcttcccgtacccctctatggaggtt

SEQ ID NO: 10343 - DNA, 958 bp, Gossypium hirsutum
  unsure (1)..(958): unsure at all n locations
  Clone ID: uC-gsronu33B028b06b1
cattcttctcatgcattggccaacagacatagtattagtaggaccagctaaagaaccagagaagaaagagggaccaaagaaagaaggtgatgccaataaagaagatgaacaaatgaaagaaggtgaacccaagaaggaagatgaacaaacgaaagatgaatcaggacatggatgcaagtgtggatcaaactgctcttgtgatccatgcaactgttgaaaagcttgatgaaagccctagattatgaaaaaagaaagcagcataataacaggcctctgtaatgatttattttcaaggatgaatgcctgcaaggtctatgactataattatgtctctgtttgtgtcttgtgttattgaagttacgcttgtttgttattttttgttttattatattatttgatatttttttttatttattttcttatctttttttttttcatttattttttattttttttgttttcattttttttttttttttatttctttttttatttttttcttttttatttttttttttttttattttattttttatgtttaaatttttttatttattttttaattctctatttctctttttattttatatttttttattctttttacttttttacattttcctttttttttaatttttttattgtcttttttttattatattatttattttatctaaaatttttaatctactttattttttctattttcttttattatctctaatgtgtctgtcctttttctattttatttttttctttgcttattgttttctatttattaacttatttctttatatcttttatttctactctttttttattcttttgttttttttattttttattattattctatttattattttcttttttattcttttattcttttntgtttttttttttttattttaattttatttccttatttaattttatattatatattcttttattattt

SEQ ID NO: 10344 - DNA, 498 bp, Gossypium hirsutum
  Clone ID: uC-gsflnu33B055c07b1
tttcctacgcgtccgtgaattctttccctcactttctcgaaaaataaaaatgtcttcaggttgcaattgcggatctaactgcagctgcggtgacatctgctcatgcagcaggaaccttaaccttggatattcggagaagacaaccagcactcagaccatcatctacggagttgcgccagtgtggatgatcttggagtgaccaggtatgaacgctactgaatcatgtctggaatgcaagatgggaacaaatcttctaatgtcttccattccactgttttatagcacttcctctgcattttattactttctttaatttttttttgtttcttcattttttgagttttgaaagtgatatttggaaactttaccgcattttcttactcattgtgttgaatttgtatttagagctatttttaatccctctttcattggatcttttgagatttgctttttggtttttagttccagattcttggtctcaatctttagttaaaaatt

SEQ ID NO: 10345 - DNA, 472 bp, Gossypium hirsutum
  Clone ID: uC-gsflnu33B050e01b1
agggaaggctggcgcgtgtgcgggccccggcgcggaattcggggcgagacacacgcgcgtttttactcgtagacagtatgagcaaggatgagctcggggggaccagagatgagcactactgaatcaagacatgcttgcgggtgtggatcaaactgcaaatgtaatccatgcaactgctgaaaagcttgatgaaggccataaattatgaaaaaagaaagcagtaaaataacaggcctctgtaatgatttattttcaaggatggatgcatgcaaggtctataattatgtatctgactggcttgcgtaatagaagctttggttgaggtaacaataatgtataaggcatttggctgagagcaaattttcatgatgactaggagaatttgaggctcattcatggtgacttggcttatggttttatttgttggagataaactcttataaaaagatatatcggttgctgttttaggttt

SEQ ID NO: 10346 - DNA, 342 bp, Gossypium hirsutum
  Clone ID: uC-gsronu33B005e01b1
ggtctgtctattgaattctttccttcactttctggagaatttaaaaatgtcttcaggttgcaattgcggatctagctgcagctgcggatctggctgcaattgcggtgagaactgctcaatgatccttaaccttggatccttgctgtagtccaccagttctttatccctcttctcttttctttcatcttatttaatgaccttttcgagtttttctttattcctcacttttttaatcctttttttattttctcctctttttctcttttttttctctatcttcctttctttttggctttcttttcttcttttttctctccccacttttttttttctctctttttc

SEQ ID NO: 10347 - DNA, 357 bp, Gossypium hirsutum
  Clone ID: uC-gsflnu33B073c08b1
tcttttctattgaattctttccctcactttctcgaaaaaaaaaatgtctccaggttgcactagcggatctaactgcagctgcggtgacaactgctcatgcaatatgaaccttaaccttggatattctgagaagacaaccagcacttagaccattatcttctgagctgcgccagtgaagatgacctatgagggacctgatatgagcactactgaatcaggacatggatgcaagtgtggattaaacagattttgtgatccactgcaactgttgaaaagctagattgaaagccatatattttgaaaaaaatgtaagttcttttaattaacatgccaaattctatgatttaatgtcaaggt

SEQ ID NO: 10348 - DNA, 306 bp, Gossypium hirsutum
  Clone ID: uC-gsronu33B164a11b2
ttaaatagaaagcagcaaaataacaggcctctggaaggatttattatcaaggatgggtgcgcgcaaggcccataattatgtctctgtctgtcttgtgtaatagaagctttgtttgtggtaaaaataatgtataagccatttggttgggagcaaattttccttttgtccaaaggatttttgctgctcattcatggtgactcggtttatggtcttatctgctgttgttaaaatcttataaaaatatatatcggatgctgcttttggtttgtctcacaccccaatcaataggattttattctttttctt

SEQ ID NO: 10349 - DNA, 309 bp, Gossypium hirsutum
  Clone ID: uC-gsronu33B168a02b1
cccattcttccgaattatgtctctgtctgtgtcttgtgtaatataagctttgtttgtggtgaaaataatgtataagccatttggttgggagcaaattgtccttttctccaaaggatttttgctgctcattcatggtgacttggtttatggttttatctgttgttgttaaaatcttataaaaatatatatcggttgctgctcttggtttgtatcaaaaaaaaaaaaaaaaaaaaaaaaaaaaaaaaaattaaaaaaaataattttattattataaaaaatttattattatattattttattaaacattat

SEQ ID NO: 10350 - DNA, 289 bp, Gossypium hirsutum
  Clone ID: uC-gsronu33B147g07b1
ccctcgcgtccgagatcgagagcacacaacctgggggtggtttttataaaataaagtctccgggacagcaccgcggaagcaactggagctgtgatgccaactgctcatgcaccaagaacccttaacctttgtgacgtcgaagaaaccaccaacactcagacgatcatctccggagtctgcgccagtgaagatgacctttgaggaaccagagatgagcactactgaatcacgacacggatgcaaagcgtggatcaaaccgctattgcgatccatgcaactgttgaaaagc

SEQ ID NO: 10351 - DNA, 255 bp, Gossypium hirsutum
  Clone ID: uC-gsronu33B086d12b1
tccctcgcgtccgcccacgcgtccgcccacgcgttcgtgcagctgcggcgacagctgctcatgcagcaggaaccttaaccttggatactcggagaagacaaccagcactcagaccatcatctccggagttgcgccagtgaagatgacctttgagggaccagagatgagcactactgaatcaggacatggatgcaagtgcggatcaaactgttcttgtgatccatgcaactgttgaaaagcttgatgaaagcccta

SEQ ID NO: 10352 - DNA, 240 bp, Gossypium hirsutum
  Clone ID: uC-gsronu33B029b08b1
ttcggtttgtctattgaattctttccctcactttctcgaaaaaaaaaatgtcttcaggttgcaattgcggatctaactgcagctgcggtgacaactgctcatgcagcaggaaccttaaccttggatattcggagaagacaaccagtactcagaccatcattttctgtgttgttccagtgtagattaacttttaggaaccatagacaagttttatattatttacttaaagtatctctttct

SEQ ID NO: 10353 - DNA, 1164 bp, Gossypium hirsutum
  Clone ID: GOSHI-09MAY01-C13577_1
aaaaaaaatgaaggcaatagttataactacaggaggaggcccagaggtgttgcaattgcaacaagtagaagacccagaactcaaagatgatgaggttctcatcaaggtagaagctaccgctctaaaccgggctgatactctacagagaaaaggttcctaccctcctccaaagggtgcttgcccttaccctggtcttgaatgttctggtactatccaagcccctggcaagaatgttctgggctggagagttggtgatcaggtgtgtgctcttcttatggaggtggatatgctgagaaagtggcagtcccagctggtcaagttcttccaatcccacttggggtttccctcaaagaagctgctggtttacctgaagttgcttgtactgtttggtccactgtttttatgatgagtcgattatctgctagggagacattcttggtccatggtggttcaacgggcgcgggcgcttttgcaattcagatagctaagagcaaaggagcaacagggtttgctacggcagggaatgaagaaaagttagctttctgcaagagtcttggagctgatctgtgcatcaattataagacagaggattgtgttgcgtgcattaaggaagaaactggagggaagggtgtcgatgtgattctggattgcatcggggcagcgtacctacagcgaaacctggacagtttaaattttgatggaaggctttgtatcattggcttgcaaggtggagctgtgaccgaaattaaacttaataccccacgcccccggcgcctcacagtgcatggggctgcgttgcgacctagaaatccagaaaacaaagcaatggttgttaatgaagtggagaagaatgtttggccagaaatcgtggcgggcaaggtgaagcctatcatctacaaatcatttcccttatctgaggctggggaggctcataagctaatggaaagtaatgagcatattgggaagatactgcttgttccatgatgctgctaatggttttatcttatattgtgacaatggtgtgtcttttgataatacaatggagccacttgttactgtgtagtgtgtaccaatttgaaatcatgcagaactgatgtgaaagatttctaatacttgccaatggcattgtctgataaatataataagaacaagttaatttccccc

SEQ ID NO: 10354 - DNA, 323 bp, Gossypium hirsutum
  Clone ID: LIB3146-022-Q1-K1-C5
aaacccgggtgcgacccacgccgtccgcgagacgccgtgggcctggtacttatccataacctttggcaagaacatgttctgggcatggcgcgtggttgtgatctaagtgtgctgcttctctagtggaggtaggatattgctgagaaagatggcatgtcccagcatggtcaacgttcttccaatcaccacattggggtttcctctcaaagaagcttgctggtttacactgaagttgcttgaactgtttggtccactgattttatgatgagtcgattatctgctagggagacattctaggtccatagtggttcaagtgtgatttg

SEQ ID NO: 10355 - DNA, 555 bp, Gossypium hirsutum
  Clone ID: GOSHI-09MAY01-C13537_2
tcagacgcgtgggtggaacttgacttccccccagttaagcatcctcaccttctcacctccttcccatcctattttcctaatcccccagttttctttcttatttttcttaatttatcatgaaactaatcaataggcttagtcccaaacatctctttcgatctaataaaaagggtccatccactgtctccaagttcgatccttcgtcgtatactacttccggttctgcttcatcgtcttcgtcagaatccgtttcctcagttcacaaaggaaatcagtaccctttagcgccaacagttggaaccggaacacccaccagtgttttgcccgaaacatcggttgactggttagatttttctgctaatttttatgtagaactttgccaagcttttaaaacgatggataaagataacgatggggttattaccagaagcgaggtcgaggctttgcttagcaagttcgccaggcagccgccgagccaagaagagatttcgtccatgcttggcgaggtggatggagacggcgatgggtgcatcagcctggaaacgttgatgaacc

SEQ ID NO: 10356 - DNA, 657 bp, Gossypium hirsutum
  unsure (1)..(657): unsure at all n locations
  Clone ID: AI730684.1
atttgacttccccccatttaagcatcctcaccttctcacctccttcccatcctattttcctaatcccccagttttctttcttatgtggctgaatttatcatgaaactaatcaataggcttagtcccaaacatctctttcgatctaataaaaagggtccatccactgtctccaagttcgatccttcgtcgtatactacttccggttctgcttcatcgtcttcgtcagaatccgtttcctcagttcacaaaggaaatcagtaccctttagcgccaacagttggaaccggaacacccaccagtgttttgcccgaaacatcggttgactgaagcgaggtcgaggctttgcttancaagttcgccaggcagccgccgagccaagaagagatttcgtccatgcttggcgaagtggatggagacggcgatgggtgcatcagcctggaaacgttgatgaaccangtggctggaccggcttgcgaaccggagctgagagagacgtctgatatatttgatacggatcatgacgggaagatcaccgcggaggagttgatggcgtcttataacgagaaattangggacgagaagtgcacgttaaaagattgccggctcatgatanctagtgttgataaaaatggagatgggtttgtgtgcttcgatgat

SEQ ID NO: 10357 - DNA, 1278 bp, Gossypium hirsutum
  Clone ID: GOSHI-09MAY01-C13477_1
ccccccccaaaaaaaaaacccgttttacagagcctaatcttatatgctcacacaccagcacaaaatccttcctttctcttttttcttgtttcatgttctgtctaccctaaatcttaacgtctttggaattagcgagttttaagatctctttcaatttcttcaatcagctccattcttcagatcacagtccattgatcaattaaagaatctctggttggttgctgtttgcttactctctttttttgagagagaatcacatgaatataaagctttggtgtttgtactaaataaaggaagctctctgtggcgaccaggcagcatgggtggtgatatgcagatgttgccagggtctagccaccgccctgctttgaagaggcccgtatggattattttcttggtttcgttagtctgcctttttctagcttgttcttatatctatccaccacatggcgatgctgcttgctacgtattttcttctaaaggttgctggcccgtgcccgatcggcccctgccttcccccgctttgtgttactttctgaaagttgtattcccttgcatagttttgactatgtctatgactatctgatgcatgctaatatgagtttcgttgactgctttttcgatcctggaccacatggacatggtaggtactcaaagcacatgttacctgtagtagaaaagagtggctcccgatcgggcggcagcatgctctggtagttatggctgacagtctttactactcaaggttccgcgattactgcaagcgtggttttgatggcaaaaattgcattgctgatgaacattacttgccaacttttttccatattatagatcctggtggtattgccaactggtcagtaacacatgttgactggtctgagagaaagtggcaccctaaatcctatagggctcgggatgttacatacgagctactgaagaatattacgtcaattgagttgagtgtgcatgtaacaagtgatgaaaagagagaagagcaggtacaggcctgcctatggaacggtgtccgacgaccatgctacctatttgctaggaaattctatccagaaaccctacataaactgatgaagcttcacaatttttgaatataaattttttggttggatgtgacaataacaacttgctgggtttacgtcaattgcatgtagatttttttccgatttagagagaattgttggggatgtaataattttgaagttcaaaaacaaagctactgcttgcaccctttttctaataattattgtaacattgtattttctt

SEQ ID NO: 10358 - DNA, 537 bp, Gossypium hirsutum
  Clone ID: LIB3584-042-P1-K1-E7
taaatgtcaaggcattatctaatataaataagtcataggtatttcattgtagtgaaaagaatttcctttgttgattgtggatgttaatatgatttaatgcgtgtggtgaaggttttagtgatatcaatctggcatattatgattggatagaaatgctaaggtggaaacagaaaaaggcaggtttgctgtttagggcagcttatatttgtggttttgagttacttttttaagttgttatttccgttgtatctttatcaatagttcgcttgttttttcctggcagggacatgaggggaagttttctgtttatgttcacgcatcaaaagaacaaccagttcatgtgagccgttactttcttaaccaagaaattcacagtgataaggttgggtgggggaaaatttctatggttgatgcagagagaaggttattggcacatgctctaaaagatccagataaccaacagtttgtgttactttctgaaagttgcattcccttgcatagttttgactatgtctatgactatctgatgcatgctaa

SEQ ID NO: 10359 - DNA, 874 bp, Gossypium hirsutum
  Clone ID: GOSHI-09MAY01-C13467_1
cccacgcgtccggagagctatgcaagatgctttgggtagagaagctagagaaaagcacgagagattggagcgtgagaagcaacaaagggaaagggaggaggaagagagacagcaacggagatatgaattggagagggaaagggaggagaaagagagagaacaaagaaggcttgagaaagagagggaacaggaaagggccagacaagctgttcaaagggctactagagaagctcgtgaaagagcagcagctgaagctcgtgtgagagctgaaagggctgcagttgaaaaggcagctgctgaagctcgagaacgtgccgaaagggctgcagtgcagagagcacaagctgaagcccgtcaaagagcagcagctgaggcaagagaaagagctgaaagagctgctgcggaagcgagagaaagggaagcaaaagagaaggaagctcaagagaaggctgaaagagctgaagcaaagcttagagctgaaagagctgctgcagagaaggctgctgctgaggctcgagaaagagcagctgcttctgcaagggcaagccagcaaaataatgacaatgatcttgaatccttctttagtatgggttctcgaccaagcagtgctccaagaccaagaactaactcttctgatcccctgtttgatggacaaaataagggagggcctgaagtagctaggggaacatctgccggatcctcatctagcatgaggaaagcttcttcaagtgcaaatattggtgatgatctcagctctatttttggagctgctgcatcctcatttggggagttccaagaggttgatggggaaactgaagaaagcgaagagccaggttggacgccagcaaagactcggagcgcgcggcaaagcact

SEQ ID NO: 10360 - DNA, 788 bp, Gossypium hirsutum
  Clone ID: GOSHI-09MAY01-C13797_1
cggacgcgtggggttggctctttcttttttgtttctgtttcctctctttttattgaaaaattagggtttccgtcagcggtattgagaatcaatggcgtcgacttcgaggaagataatgttgaggagctccgacggagagacttttgaggtggaggaagcggtggcggttgagtcgcagacgatcaagcacatgatcgaggacgattgcgccgacaacgagatccctctcccaaacgtcaccagcaagatcttgtccaaagtccttgagtactgcaagaagcatgtcgatgctgctgccgacaaggaaaagactcccgatgacgaactcaaggcttgggatgctgattttgtcaaggttgaccaaaataccctctttgacctcatcctggcagcgaactatctgaatatcaagagcttgctggacttgacctgccaaactgtggctgatatgataaagggaaagacacccgaggagattcgcaagaccttcaacatcaagaacgatttcacccccgaggaagaagaggaggttaggagggagaatcaatgggcattcgagtgataggaaagcctttaaatttaatgttgatattattatagtttctatgcttttctcgctaggttttcaagttggggaaaaaaattaagaacattggctttcttttggcttattttgttatatgcattagtgtcttctattctagaggatatttaatatgaacttctcccctcctctattatcataatataattagaatttcttaaaaaaaaaaaaaaaaggacggccg

SEQ ID NO: 10361 - DNA, 483 bp, Gossypium hirsutum
  Clone ID: GOSHI-09MAY01-C13787_1
ggtaaaaccattttcaaactttgaaacccagaagcaatctataatcaaaaccaaaaacccaaaatcatacagcagaaaaaaaaattggtaacctctttcatctgccccccttttcaacggcagcagcatataagggtcgtatctttcccagaggaaagcctccattgtttctttgtagagcaagaaattggaggcgaatcgtctgggattttaatcttttggggcttttttttttgtttttttggtagaagatgataagatggtggatttcttcttttcaattagctgagctgtttattagctcggtggttcatcttttatatgggttttatgtgtacagcactgctggtgctgcggacctttcacaggctttgagtgaatgtgttttcaagtctaatgttagcttagaggtgaaaaagcaagatcccagtaagtctactgttgatgatctgcctctattgttttggttcatggcatttttgg

SEQ ID NO: 10362 - DNA, 959 bp, Gossypium hirsutum
  Clone ID: GOSHI-09MAY01-C13747_1
ccaggactcttcgccaagccatggctcggtgggtcactcgagccatcaagttccggttctgccccatccttgaagaagctcaagccaaaagtgagcctgttgatctacaagacgtattgcttcggctcacgtttgataacatttgcggattagcttttggaaaagacccggaaacatgcgctcaacgactccccgagaacggcttcgcgtctgcgtttgaccgagccaccgaagcatctcttcaaaggtttattttgccagaggttttatggaagcttaagaaatggcttcggcttggattagaagccagtctgagccgaagccttgtccacatgaatgagtatttatccgacgtaatcgttacacgtaagcaagaactgctgagtcagcagaaagatgggaacccacacgacgatttgctctcaagattcatgaggaaaaaagaatcctactcggaggaatttctccaacacgttgcacttaattttattctagcgggacgtgacacttcatccgttgctctttgttggtttttttggctcctcactcaacatccaattattgaagataaaattttacatgaaatttgcactgtcctggtcgaaacacgtggtattgacacgacaacatggttcgatgagcctttaggatttgaagaggttgatcgattgatatatatgagagcagcattatctgaaaccttaaggctatacccgtcggtgccggaggattcaaagcatgtcgtggtggacgacgtgtttccggacggaacgtttgtgccacaggttcgtcggtgacatattcaatatattcggtggggagaatgaggtcgatttggggtgatgattgcctccagttccgtcccgagaggtggttaacggctgacggcaaggaattcatcatgcacgactcatacaaattcgtggcattcaatgctgggccaagaatatgtttgggat

SEQ ID NO: 10363 - DNA, 375 bp, Gossypium hirsutum
  Clone ID: GOSHI-09MAY01-C13767_1
cggacgcgtgggttgcagaggccagcgttttacttgtgacatgcattgtcctgttttcaggacatggcgtctttgctttctcctatgacgaggctgcaacaatggagtgcttggcagcgcccaagagagctcaatatggtggagggatgattgggttcaatcaaagaacaaatggatccacattgtcgagtgaattaggagtttcaaatgatgggttacacaatacaacactctcattgaagactgtaaagctcgagaaaggaaatttatatacattttcagctttgggttcaaaatcagcaatggggagtgaaaagtgagacctgtagctgtgtgcattcaaggcttctaaatggtgaattggtacatggaggt

SEQ ID NO: 10364 - DNA, 1125 bp, Gossypium hirsutum
  Clone ID: GOSHI-09MAY01-C13707_1
aaaggaaataaaatctctgaaagggagaaaaaaactcaaaatcaacagatcgaagtgaaaatggagtgcgtgttcggtttagtgggcaacgactttgccatagtggcggcggacacgtcggctgttcacagcatccttgttcacaaatctaacgaagacaagatcatgatcctcgattctcacaaactcatcgccgccagcggtgaatccggtgacagagtgcagttcacggagtatatacagaaaaacgtggccttgtatcagttccgaaacggtattcctttgacgactgccgccgccgctaatttcactcgcggtgagcttgccactgccttaaggaagaatccatactttgtgaacatccttcttgctggctatgacaaagagacaggcccatctctgttctatatcgactacattgctacacttcataaggttgataagggagcatttggttatggatcctacttttctctcgctatgatggacaggcactaccacagtggcatgacagtggaagaagccattgatttagttgataaatgcataatggagatcagatctagactggttgtggcaccaccaaactttgtcatcaagattgtcgataaagatggagcaagagaatatgcctggcgtgaatccgtcaaggatgctgcagttccttcggcctgagattttatcacgtacttgctctcccgttctggatgttttaatttgcatttaccgataggaaacaatgtgtgacggcagtgaaaattagtatatgaaaaactatttactttgatttgattatgttctgaagtggaaatttgatgatattttatcttggaatggaaacctttttatgtgcctccaggtagagggaagaccatgaaaaaaaaaaaaaaaatataaaatgaaacaaacaaaagatcatacataatctaaaaataaataaaaaaaaaaaaaatataaaaaataaaaaaaaaaatataaataaaaaaactggggggcccgttttaaagaaccaaattttccttcccgtgttttggaaattattatttttttttttgggcaacaaaaataaatttaatgggccggggtttaaaacggtcgaaaatggaaaaaccttgggtttcccaa

SEQ ID NO: 10365 - DNA, 564 bp, Gossypium hirsutum
  unsure (1)..(564): unsure at all n locations
  Clone ID: LIB3825-029-Q6-K6-H1
ggttatttcggtttcatttttgtgattttttgtttttgagacgttgcttgagtactacaaaccctgcttgaatttttgaattagttgtgtattttgtgatatgccattgaagagagcttgttgtttttgttgttangatgatggaaaataaatatatgttgttagattttcatgttttaattaataatttttgataaaaaatgtgtattaaggactaaattaagaaaagtgtaaattgaggggtcaaaatgtgaaataaatgaaatgtgtagacttagatggactataggaatattcggccctggcatgataaatgcaaattttgtgtattttgtgttttatgcaatagggactaaattgtaaaaagtgtaaaatgtcaggggcaaaatggtaattttcctatttatgtgtttttggattaaattaaatggaattatgtttaaataagtttaatttcaatatgtttagatcatgaaccaaagaaaatggatttgngatcgagggaaaaacaaaaataatcgaatagtcgtctattccgtccgtcgatatccgaggtaagtttat

SEQ ID NO: 10366 - DNA, 605 bp, Gossypium hirsutum
  Clone ID: LIB3583-007-P1-K1-H9
caaaagcctcaaaatcaaatctccaaaaaataaaaaagaagtaagaatggattgtgtgttcggcttcgtaggcaatggctttgccgtagtggcggcggacacatcggcggttcacagtatcctcgtccacaaatccaacgaagacaagatcatggtcctcgattctcacaaactcatcgccgccagcggtgaatccggtgacagagtgcaattcacggagtatatacagaaaaacgtggctttgtatcagtttcgcaatggtattcctttgacaactgccgccgctgccaatttcactcgcggtgagcttgccactgcattaaggaagaacccgtacttcgtgaacattcttcttgctggctacgacaaagagacaggcccctcactttactacatcgactacatcgctacacttcacaaagttgataagggagcattcgggtacggatcctatttttctctctctatgatggacaggcactaccacagcggcatgactgtggaagaagccatcgacttggtagataaatgcataatggagataaggtcacgacttgttgtgcacctccaaactttgtatcaagatcgtcgacaaagatggagcg

SEQ ID NO: 10367 - DNA, 484 bp, Gossypium hirsutum
  unsure (1)..(484): unsure at all n locations
  Clone ID: uC-gsflmaxxa009b05b1
cttctttcatttccccatattacctgttttctcttttctctcatctttccccccaactcttgtcaaatgatagaaaggaaacatgacagtaattcaagccaagtgataaaaagtttcagcctgctgttactgtctctggtttcttttgaccgttttttaaaactctgtttcttaattcgttgctcctctactttgcattcattctctgttttcattgacatgggttataaaggtggtctgatgaagctaaatatatgccgattttggtatgacttttgaagcacctctattgatccgacactggcataaaagggaatggatagtttgtgaacatcctatttagtggctatgacaaagagacaggaccatctctgttctatatcgactacattgctacacttcataaggttgataacggagcatttnggtatggatcctacttttctcttgctatgatggacaggcactaccacagtggcatgac

SEQ ID NO: 10368 - DNA, 390 bp, Gossypium hirsutum
  Clone ID: LIB3165-032-P1-K1-A11
tgccacttttgtagtgcctgtccatcatagcgagagaaaagtaggatgacagtggaagaagccattgatttagttgataaatgcataatggagatcagatctagactggttgtggcaccaccaaactttgtcatcaagattgtcgataaagatggagcaagagaatatgcctggcgtgaatccgtcaaggatgctgcagttccttcggcctgagattttatcacgtacttgctctcccgttctggatgttttaatttgcatttaccgataggaaacaatgtgtgacggcagtgaaaattagtatatgaaaaactatttactttgatttgattatgttctgaagtggaaatttgatgatattttatcttggaatggaaacctttttatgtg

SEQ ID NO: 10369 - DNA, 410 bp, Gossypium hirsutum
  Clone ID: uC-gsflmaxxa009h08b1
cggtcgacgaacagtcgactcagaactggtacggacatggagggtgtgttctgtttagtgggcaacgactttgccatagtggcggcggacacgtcggctgttcacagcatccttgttcacaaatctaacgaagacaagatcatgatcctcgattctcacaaactcatcgccgccagcggtgaattcggggacagagtgcagttcacggagtatatacagaaaaacgtggtcttgtatcagatttgaaacggcttttccatggtcgagggaggtcgggtgctattttacaagatcatgaaccaaagaaaatggatttggatcggggaaaaataaaaataattgaatagtcgtctattccggccgtcgatatccgaggtaaggttataagcaataaatattataaattttaa

SEQ ID NO: 10370 - DNA, 290 bp, Gossypium hirsutum
  Clone ID: LIB3493-018-P1-M1-G10
ctgtcacgtgactgaacccgatgcaaaaaaaaccttataatcatcaaatcgagatgagattggcgtgcctgtacagtgtaactggcagcgactctaacatataaactgccgacacatggactgctgacaacattgttgtgaacaaatgtaacgtgaacactatcatgattaccgatgctgaagggtcattcgccgccagcggtgaatccggggacagagtgcagttcacggagtatatacagaaaaacgtggccttgtatcagtttcgaaacggtattcctttgacgact

SEQ ID NO: 10371 - DNA, 436 bp, Gossypium hirsutum
  Clone ID: GOSHI-09MAY01-C13727_1
cggacgcgtgggcggacgcgtgggttaaaaataaagaagaaaactctgaaaagagttgagggtaaaccctcggagcgccgtggtgtctccgtcattgggttccctccgcgcctacgcgtcgacgcgccaccaccaacgccacccagtgcggtggccagaactcgaaaagtctcgactttctgatgtgattctaacgatctctcgcgagaaatccggtgatggaagagtcgctagcgttgatggaggcctgaagtctggtggtggtgtcgatgaggcgctgattagggaggcagagccttgagtgatggctttgattggggagctggacagacgctccccaaaccttccagaacttgttgtggcgcgaggggaaagagaggcagaaaccctacggtttcatgcctcggtataatggtttgggccagttgggccactg

SEQ ID NO: 10372 - DNA, 747 bp, Gossypium hirsutum
  Clone ID: GOSHI-09MAY01-C13677_1
aaaaccctactggctatctgcctggaagaatggcacctctgatgaacttctatggcttcatgtccctcgcttttgtgatcctcggaatcttttggttcctgcaatatgcaagattttggagagaagttcttcctttgcaaaattgtataacattagtaataacccttggcatgcttgagatggctctttggtattttgattacgctgagttcaatgacagtggaaccaggcccgtggctttctccctgcgggctgtcatctgtgttctttgggctccttctcagaattctacacggtaaatatcaaacttattgagccctaagcttctctttctgcctttccttttctgctacggttgtttatgaactgttttatggacattcaaaatgaaagaagaaaaaacttcatactcacaccctcatttgtttaatatatttcctggatcgttaataaaggtaaaacttggcaactatttcctgatcgttaataaaggtaaaacttggcaacttgagatgtctgtgtaggcttgattaccttgtttaatttgtagctagttcctctgtgtacagaattttaggtggtatggtggtatatgtggctgagtccccaaatttaaaattgggggaccttggatttatttagaggttcgcgtcttaaactaccccttggtttccccctaaaggtgggcctggagaccatgaatttcacaaggactattcccttaaaccttcacccttaaaattatgg

SEQ ID NO: 10373 - DNA, 426 bp, Gossypium hirsutum
  unsure (1)..(426): unsure at all n locations
  Clone ID: LIB3147-006-Q1-K1-G11
agactatttttggttcttccggttgcaatcttagatgccttcttcattctttggatatttacttcactctcttcaactttaaataaacttcagacaagaaggatggtggcaaagctggatatatacaggaagttcacaaatgcattggcagtagcagttattgtctctgtcggttggatttgctacgagatttacttcaaggcaaatgatgtttacaacgagcagtggcagaatgcttggatcatcccagccttctggcaaatcttatctttctctctgctatgtgtcatctgtgttctttgggctccttctcagaattctacgcggtatgcttactctggtgaagcaaatgaagattttgacaaagatgatactaatttgacactcataaaaccctctccaacaccttcaaaagattntagaact

SEQ ID NO: 10374 - DNA, 231 bp, Gossypium hirsutum
  Clone ID: LIB3189-014-P1-K1-E7
gcctggaagaatggcacctctgatagaacttctatttcttcatgtccctcgcttttgtgatacgaagaatcttttgggtcctagaagatgcaagattttggagagaagttcttcctttgcaaaattgtataacattagtaataacccttggcatgcttgagatgtctcttttttatttttatcactcttatttaaataacataattatccattcctgtattatttcatctt

SEQ ID NO: 10375 - DNA, 611 bp, Gossypium hirsutum
  Clone ID: GOSHI-09MAY01-C13617_1
agtgaactgaaagaaactccagtactacaccctgttcgttatttggtccgcagcaccccgatccggatcgtaacaaactcattttccgccattggattcaatctctctgccctcctaatcctgcgccgccgtctgtcttcggccgaccgcttttaagttttcgccctccaggccaggaaagagtggatgctaaaggtggaatagagaatggacaaattaagggaatttgggagaaaagctttgttctatgttagggttctctccggatatgaagaacctagaattcgaaactacagattgcagctcgagcaacgcctgcagcaggcacaagcaaggaaagcagccttaagaaagattcctgagcagactgtgttacaagaggttcgccgaatggttgaggatatgcaagcgctgaataaaaggcttgaagaaactgaagctgccattgaagagtacttcaaaccaatagacaaggaagtggagacaataatgaaaatccagcttgatggagaagagaagacaatgaaagagatgatggcaacaatgcagagacaagccttgcttgagaaaatggaagctgagaaaatcgcaaacacgcatcaaccagacat

SEQ ID NO: 10376 - DNA, 466 bp, Gossypium hirsutum
  Clone ID: GOSHI-09MAY01-C13177_1
cccacgcgtccgcgagaatgtatattcttcctcaaatctttcgttgagaggtaaaggattaaatccttttaagaaataaagtttttgctcggaatatgaatcaaaccgagggaccccttaactcttagggggattaatagaacgaatcacacttttaccactaaactatacccgctacaatgcgattattgtgtttagggtatatttattggatataaatataaagggaccctttgtcaaacaggggaattgggcgtaatcaagataggattacaagataggagcctaaaaaatcctgaaaattagggccttgccaccttttgaccttttgtcagaagacttgtgttataggatttttgatagacaggattcgacaaaaggacttagtcataacataaataacataaaaatggattgtgcaaaaatccataggtctttttttattacttattctagttattctagt

SEQ ID NO: 10377 - DNA, 403 bp, Gossypium hirsutum
  Clone ID: GOSHI-09MAY01-C13127_5
tcgtgttttttttccctcgcgtccgttgcttggtacttctattgattttattgtctcttgtttgaattggatgcattcttattcatttgcttgcttccctgtttcatttctatagttgggcttttcaaggattacaatcagttcatatttccgagattcatgtttgagatgagttaattgtttttttccctcttcgttttagcttatttgtacattttgattcttctcgtctggtggagctgcacatggaccagtacgagaaagtagagaagattggtgagggaacctatggcgttggttataaggctcgtgaccgtgtcaccaatgaaacaattgctttgaagaagattcgcttaaagcaagaagacgagggtgtacctagcactgcaattagagaaatctc

SEQ ID NO: 10378 - DNA, 1360 bp, Gossypium hirsutum
  Clone ID: GOSHI-09MAY01-C13127_1
tccgcccacgcccgtccggcttgaaagcatcatttgcttacgtctaaataccttaaatagaaataagaatacataccatctcgtctctttctctttccctttcctcaacttactcaccacgtctcgcttgggaaatcaaatcccgactgggtcactcgtgcccttatttgtaccattttgattcttttctcgtctggtgggagcgtgcacgagggaccagtacccgagaaagtagagaagattggtgagggaacctatggcgttgtttataaggctcgtgatcgtgtcaccaatgaaacaattgctttgaagaagattcgcttagagcaggaagacgagggtgtacctagcactgcaattagagaaatctctctcttgaaggaaatgcaacatggtaatatcgtcaggttgcaggatgtagtgcacagtgagaagcgtttatatttggtatttgaatatctggacttggatttaaagaagcacatggattcatgtccagaatttgggaaagatccacgaatgataaaaacattcctttatcaaattctccgtggcgttgcttattgtcattctcatagggttcttcatcgggatctaaaacctcaaaatttgctgatagatcgccgtaccaatgcactaaagcttgctgattttggtctggcccgagcatttggtattcctgtcagaacatttacacatgaggtcgttactttgtggtacagagcacctgaaatactgcttggatctcgccattactctactcctgttgatgtatggtcagtgggctgtatatttgctgagatggtgaatcaacggccattatttcctggggattctgagatcgatgagctgttcaagatcttcagaatcttgggtactccaaatgaggatacatggcctggagtgacttcattgcctgattttaagtcttcttttccaaagtggccagctaaggatttggcaactgttgttccaaatcttgaatctactggaattgaccttctttctaaaatgctgtgcatggatcccagcaaaagaattacagcaaggagtgctcttgagcatgaatacttgaaggatatagggtttgtaccctgaggataccttttgaaccgccttcccccaactatcttcctgagaaagtgtctatattagttaaatgtattgtgtagcaatttgtgggattttaattgtgagaaattaaatggtgtgtggtctagtctattatatttttctttgttttgttttgtttcgctgtgttcaatttcccatggacggagcagatagattttatatacttttattaaatggaactggcttttttgcagttaaaaaaaaaaaaaaaaagtcgacgcggccg

SEQ ID NO: 10379 - DNA, 538 bp, Gossypium hirsutum
  Clone ID: LIB3829-011-Q6-N6-B1
gagatgatattcactcgcttatgagccaaacaaacattaagttcagtcagactcaagacattggaaagggtacataattccaaggtaactgcaaaaaaaaaatgctcttaggaaaagaaaaaaaataccacaccatttctcacaatcaaaaacccacaaaatgctacacattgacattgattgatatacgcttctctcatgaagacggcaaatggtattaaggtacaaacccaatatccttcaagtattcatgctcaagagcacttctagccgtaattcttttgcttggatccatgcacagcattttagaaagtaggtcaatgccagctgactcaagattaggaacaacagttgccaaattcttagcaggccactttgggaaagcagacttaaaatcaggcaatgatgtcaccccaggccatgtatcctcatttggagtacccaagattctgaagatcttgaatagttcatcaatctcggaatctccaggaaataatggccgctgattcaccatctcagcaaatatacagcctactga

SEQ ID NO: 10380 - DNA, 565 bp, Gossypium hirsutum
  unsure (1)..(565): unsure at all n locations
  Clone ID: AI726445.1
cttttagggttgatgcttgagagcatcatttcttactctaagtacttaaatagaaataagagatacatacatctcgtctctagctcctctcctctcctcaacttactcactctctcgcttgaaatcaaatccgactgtcacttgagcttatttgtacattttgattcttctcgtctggtggagctgcacatggaccagtacgagaaagtagagaagattggtgagggaacctatggcgttgtttataaggctcgtgaccgtgtcaccaatgaaacaattgctttgaagaagattcgcttaaagcaggaagacgagggtgtacctancactgcaattagagaaatctctctcttgaaggaaatgcaacatggtaatatcgtcaggttgcaggatgtantgcacagtgagaagcgtttatatttggtatttgaatatctggacttggatttaaagaagcacatggattcatatccagaatttgggaaagatccacgaatgataaaagcattcctttatcaaattctccgtggcgttgcttattgtcattctcatagggttcttcact

SEQ ID NO: 10381 - DNA, 622 bp, Gossypium hirsutum
  unsure (1)..(622): unsure at all n locations
  Clone ID: LIB3829-011-Q6-K6-B1
aaacatttgggcagaagaaaagaaggaaactgaanacgcgagagggatcgagaagtcaaatggatctcgcttttttttaggcttttccccttgtaacctcgactttctgcagttcttgagcaacagacccaacatttgatgtgctctagaccgcatggaccagtacgagaaagttgaaaagattggtgaagggacttatggcgttgtttataaggctcgtgatcgcatcaccaatgaaacaattgctttgaaaaagattcgcttggagcaggaagatgagggtgtacctagcactgctattagagaaatttctctcttgaaggaaatgcagcatggaaatatcgttaggttgcaggatgtagtgcacagtgagaagcgtttatatttggtttttgaatatttggacttggatttgaagaagcacatggattcatgtccagaattcgggaaagatccacgaataataaaaacattcctttatcaaattctccgtggcattgcttattgtcactctcatagggttcttcaccgagatctaaaaccacaaaatctgctgatagatccttgtactaatgcactaaagcttgctgattttggactggcccgaacatttggtattcct

SEQ ID NO: 10382 - DNA, 524 bp, Gossypium hirsutum
  unsure (1)..(524): unsure at all n locations
  Clone ID: LIB3493-032-P1-M1-E9
tcactcgacccactcatcctcttactccattgcaaaaatagctttaaccttaaagtgcataganaaacttctagaatgtggcaatctttnttctactcacctatttctctaaccatcttgctcaaacaccttgtcacctataaaacaattgctttgaagaagattcgcttatatctttaatactacggtgtacctaacactgcaattagagaaatctctctcttgaaggaaatgcaacatggtaatatcgtcaggttgcatgatgtagtgcacagtgagaagcctttatatttggtatttgaatatctggacttggatttaaagaagcacatggattcatgtccaaaatttgggaaagatccacgaattataaaaacattcctttatcaaattctccgtggcctttcttattgtcattcttatagggttcttcatcgagatctaaaacctcaaaatttgcttatagatcgcccttccaatgcactaaaacttgcttatttttgtcttcccccacattttgtatt

SEQ ID NO: 10383 - DNA, 502 bp, Gossypium hirsutum
  unsure (1)..(502): unsure at all n locations
  Clone ID: LIB3493-024-P1-M1-F1
gaaaaggaaaggaaaactgaagaaggcgagaagggatcgagaagtcaaatggatggcgcttttttttaggttcttgagcaacagacccaacaattgatgtgctctagaccgcatggaccagtacgagaaagttgaaaagattggtgaagggacttatggcgttgtttataaggctcgtgatcgcatcaccaatgaaacaattgctttgaaaaagattcgcttggagcaggaagatgagggtgtacctagcactgctattagagaaatttctctcttgaaggaaatgcaacatggaaatatcgttaggttgcaggatgtagtgcacagtgagaagcgtttatatntggtttttgaatatttggacttggattntgaaaagcacatggattcatgtccagaattcgggaaagatccaagaataataaaaacattccttatcaaattcttcgtggcattgcttattgtcactctcatagggttctttaacgagatctaaaaccac

SEQ ID NO: 10384 - DNA, 829 bp, Gossypium hirsutum
  Clone ID: GOSHI-09MAY01-C13087_1
atttttttttttttttttttttaaataaaaattaacaataaataaataaaattaactaaacatcaaataaagaagaaataaaatccttctaaaagaaacaaagcaagaactagaaaaccagatcgaaaaatgtcgggaatcatgcacaagatcgaagaaacccttcacatgggagggcacaagaaggaagaagagaagcacaagggagaagctcatcacgaaggcggccatggctatggcgctgctgagcacaagggagaagttcatcacgaaggcggccatggctatggttatggcgccgctgagcacaagggagaagttcatcacgaaggcggccatggctatggcgccgctgcggccgccggtcacggtcacggtcacggcgagcagcaaaaggaagggtttatggataagatcaaggacaagatccacggcgagggaggtcatgaacatggtcacgagggcgaaaagaaaaagaagaaggagaagaagaagcatgaagatggccatgaaagcagcagcagcagcgacagtgattagatcttccatcatcgtcttactattcctctcccttatagtatcgggtgcatggaatgaatgtgaaggcttgtcaaaatatttgtatcatctttatttttatatgcggaaaaaatgaaaaaaaaaagtaaaaaaaggggttgtatttggtgtatgatggtaatagtgtgtgatgtatttgacaagctatgaatgtaatatgatatgagaataaatttttgtcattatctatactccaaatattatgtacatgtatgtttacttaattaaattaagtagaagtgattcactc

SEQ ID NO: 10385 - DNA, 322 bp, Gossypium hirsutum
  unsure (1)..(322): unsure at all n locations
  Clone ID: LIB3147-038-Q1-K2-C11
caaaatatttgtatcatctttatntttatatgcggaaaaaatgaaaaaaaaaagtgagaaaaaggggttgtatttggtgtatgatggtaatagtgtgtgatgtatttgacaagctatgaatgtaatatgatatgagaataaatttttgtcattnaaaaaaaaaaaaaaaaaaaaaaaaaaaaaaaaaaaaaaaaaaaaaaaaaaaaaaaaaaaaaaaaaaaaaaaaaaaaaaatatagaaaaaaaaaaaaaaaaaataagggggggccctttaaaaaaagggggggccctttttaaaggttcaaagttttattacccttttt

SEQ ID NO: 10386 - DNA, 388 bp, Gossypium hirsutum
  Clone ID: GOSHI-09MAY01-C13007_1
ccatccttaagctgtacttactcttctacctagccattgtccatttcactcaattcttctttttcttctttaattccgtttcagcgagtgaaactggttggatctacttctaaagcaacgaccaggagtttcttcttgacagctagggcaatggctgagctcgttaaagataaggaatccggtgtcgccgctgctggaggcggctagatggacattgagcattcccgtaccttccttgaagctcgctctgaggaagaactcctatctggaattaagaaggaagtagaagcacgaaggttaccttcaaatgttgcagcaggaatggaagaattctatcggaattataaaaatgctgtaaactgctaatctggaactcttacttcagttc

SEQ ID NO: 10387 - DNA, 399 bp, Gossypium hirsutum
  Clone ID: GOSHI-09MAY01-C13357_1
tgaacttttggtcaaattggggtccaaaaccctcttctcctgcgcacagtaaacaaaatccatggatcttgaaaacggaactgttcgatacgaagatgaatatataacgaattctcgaggactaaagctatttacatgcagatggttaccagtaaacgaagaacccaaagctttaatctttctctgccatggttatgcccatggaatgcagtatcaccatgaacagtactgcaatccgattggtgaaagcaggatatgcagtttatggcatagattatgaaggccatggcaagtcttcggggttgcagggctatatctcaaagttcagtcatgttgttgatgattgttccgattatttcactgatatttgtgagaaaaaggagaataaaaagaagatga

SEQ ID NO: 10388 - DNA, 375 bp, Gossypium hirsutum
  Clone ID: GOSHI-09MAY01-C13337_2
ctttttcttccttcttatttacagcttcctccctttatctgacaggccatttccctttctgatatccttccctccctcactctctcttcttctgcctttgatctgctctctatccctttctctatagtatttagtggcatatttagaaaaagtgttagtgaagataaagcgtgagagggagattaaattttttgcattgcgtatatttggttttcagtttgtttgtttgtttgatgggttttacttctcttcaagtttgcatggattcatctgattggcttcagggaatgactcaggaggtgccaggaatggattcttcatccccatgtggggatattctcacatgctcaaggccattgatagaaaggagggcta

SEQ ID NO: 10389 - DNA, 513 bp, Gossypium hirsutum
  Clone ID: GOSHI-09MAY01-C13337_1
ttctctttccttatcattcattttggtctcccaagtttcaccaaaagaaaccccgtttcacattcaaagcctttgatgcacacatactaaggtaacatcacgtctacctcttcattcatctcagaccaatccgattcgccactatgtcaatcaaaaccaaccatttccatcctctatttctatttctgaccataagcttcctaatcgccactgttgcataccccatcgacgctttggaatcaaggaagcttgacgagagcacagtaccaggtgatcaaggcatcaagtgtaccccatcatgcgtacaaagtcctccaccaccgtcgccgtcttcaccaagccctccaccaccatcaccgcccgctcttccgccacctacaccaaaaaaagtcgccatcccaatactgtccaccaccacctagcccgccttcctttatctacataactgggccaccggggaacctgtaccctattgaccaaaatttcggtgctgcaagccgcacatttgagatg

SEQ ID NO: 10390 - DNA, 405 bp, Gossypium hirsutum
  Clone ID: LIB3272-052-P1-K1-A11
attttggtctcccaagtttcaccaaaagaaaccccgtttcacattcaaagcctttgatgcactgataggaaggcaacatcacgttaacctctttattcatgtcagaccaatgcgatttatcgctatgtctatcaaaaccaacgcacatatatacgaataagtgtatgtgaggcaaaagcgtgagagggagattaaattgtatgcattgcgtatatttggttttcaatttggttggttggttgatgggttctacttctcttcaagtttgcatggattcatctgattggcttcagggaatgactcaggaggtgccaggaatggattcttcatccccatgtggggatattctcacatgctcaaggccattgatagaaaggaggctaagacctccgcaggaacaagctg

SEQ ID NO: 10391 - DNA, 307 bp, Gossypium hirsutum
  Clone ID: LIB3189-008-P1-K1-D3
acgtagttctagatcgcgggcggctcgctcgcgatctattttttccaaaagaaaccccgtttcacatgcaatggctttgttgcacttatggttagggtacatcacctctacctttctattcactgtagaccaatcctattcgccggtttctcaatcaaatcctaccattaacattctctatttctatttccgaccatatgctatctaatcgccactgttgcataccccatctacgcttttgaatcaaggaagcttgacgagagcacggttccaggtgatcaaggcatcaagtgtaccccttcatgcg

SEQ ID NO: 10392 - DNA, 540 bp, Gossypium hirsutum
  Clone ID: GOSHI-09MAY01-C13287_1
cccacgcgtccggaggaaaataaaaaaaaaagatctacacttctcccttcaatattaggccgaccgatggttacccatgattgttcatctgcctctcacttcgactccctggaacggtcgatcaaggttttattgaaccaaggagattcatgggtctcgcttaccagccccaaatcgccactgtgtttcgatggtggcgaaacaagcggaaactcgaaggcttcggaacgcaggtaagcttcatcacttttcttttttcttgttgatgatgaagtaacagaggactcgagtagataaaaaaaacaggaagagcagagagtttaaaaaaagagaagggaaaatcaccttcttttcgtctaattgcttttccttgctttgcttttgcatatgttttcagtatcttttcaaaaggggaaccccttcttacaattgaaacaaaggctttatagccgaaaagaaaagagagaaaaccaaaaggaaaaaataaaaaatcgaaatacaaatttcattcctctctctttgctatttttttgtttgttt

SEQ ID NO: 10393 - DNA, 1664 bp, Gossypium hirsutum
  Clone ID: GOSHI-09MAY01-C13267_1
ctctctcttattatctttttctttctttggtttataaaagaaaaaaaaaagaaaatcccaataccataacaatgagagaaatcctccatgttcaagccggtcagtgtggtaatcaaattggtggcaagttttgggaggtagtatgtgatgaacatggcattgatgccagtggtaactatgtcggcacttcgcctgttcagcttgaaaggcttaatgtttactataatgaagccagtggtggcagatatgtgcctagagctgtgttaatggatcttgagccaggaactatggacagtttacgaacaggtccttatggaaaattgtttagaccagataactttgtgttcggccaaaatggagctggcaataactgggctaagggacattatactgaaggagctgaattgattgattcagttcttgatgttgttcgtaaagaggctgagaattgtgattgtttacaaggttttcaggtttgccattcactgggaggtggaacagggtcagggatggggacattgttgatatcaaagatcagggaagaataccctgaccggatgatgctaacgttctcggtgtttccatcacctaaagtatcggatactgtggttgaaccctataatgcgaccctgtcagtgcaccagcttgtggaaaatgctgatgaatgcatggtccttgacaatgaagctctttatgatatctgcttcagaactcttaagctcacaaatcccagctttggtgacttgaaccatttgatttcaacaaccatgagtggagtcacatgctgccttcgcttccctggccaactcaattccgatcttcgaaaactagcagtaaacttgatcccattcccacgcctccattttttcatggttggttttgcacctttaacatcccggggttcacaacaataccgagctttaacgatccccgagctaactcaacaaatgtgggattccaaaaacatgatgtgcgcggctgatcctcgtcatggaaggtacttaacagcctcggcaatgtttcgaggcaaaatgagcaccaaggaagttgatgaacaaatgatcaatgtccaaaacaagaactcttcgtactttgtggagtggattccgaacaatgttaaatcaagtgtttgcgacatcccaccaaccgggttgacgatgtcatcgacgtttatggggaactcgacgtcgatacaagagatgtttcgacgtgtttcggaacagttcacagtgatgtttaggaggaaagcatttttgcattggtatacaggggaagggatggatgaaatggagtttactgaggctgaaagtaatatgaatgatttggtttctgaatatcaacaatatcaagatgctgtggttgatgaagatggtgaagggtatgaagatgaagctgaggaaaattgacgggatccttttcaactttttatagtaatggcctagagaaaaaaaatcaaatgtggtgttcattttgatggttctaaataaggaggccatgttttttcatttgtgctgggatttttagtaatgtgaattgtgaatttgtatatttatatcaaatgtgaagtgtgatttaataaattgggagtgtaaatttatgtaatgaatttggaatcacaagtttcaagttttcaagatcaaagaaggaaaaaaaatgacgctttc

SEQ ID NO: 10394 - DNA, 583 bp, Gossypium hirsutum
  Clone ID: GOSHI-09MAY01-C13217_1
gccttcttccatccactattttcgttcatgagggaaggctcgaacgaatatagaattactatagagttttatgggtggtagtctcaaccatcttctccattatttttcttcttatagacattagctttgcttaatcaaaattccctttttgatttccattcacaaagttccgttttagataaataagtgaagacagaaacttcagaatagaaacaaccattcaactataagaacaaagaatatattccccatggctctgttctccggtcatcagcattctattatcaccttcttcagcatcattctccttgtgtttcttgatggtgttacggcagccacctttacattcatcaacaaatgcgattacacagtatggcctggaattctagctaatccaggaagtccaaaacttgaaagtacaggctttgaacccaccaaaggcagctctcgtcctttccaagctcctacaggttgggcaggtcgcttctgggcagaacaggatgcaatttcgatgactctggccacggctcatgcgctacaggggactgtggctctggcgaaatggaatgcaacggagctggag

SEQ ID NO: 10395 - DNA, 731 bp, Gossypium hirsutum
  Clone ID: GOSHI-09MAY01-C8984_1
cggtccgaaaagagcttttaaaaaccagacccaaacaaaccaaaccaaagggggggactgctatgggctggttttctgatccatgttcatcttctccttctcggtttctcagcttttcttgtaaggatcacctcaacactttccggctgcttgcgtcagcttcccggcaaaccatttactcctgaggttttttttacatcatctatgcaaaacttagagctacataaaggaaacagtatctatttttgtgatagtgggtattgaattgtagagagaatgagtcaattttcctccatgttcaatggattagcaaggtcattttctataagaagagggaaaaatccagggaatggtgatggaagagaagctgcagaggtcatggcaaaggatgccaagaaaaatgacctgattttaaggtcgtctggttttgtaaacattgatggttccaacaactttgcctcggttttctccaaaaggggcagaaaaggagtgaatcaggattgtactattgtatgggaggaatttggatgtcaagcagacatgctgttttgcggcatcttcgatggtcacggtccgtggggtcattttgttgcgaaaaaggtccgagaatcgatgccgtcgtccttgctttgtaattggcaagagactctagcttaggcatcactcgacccgtagttcgatttggaattatataaaaagccttacaggtttcatatatggaagcattctta

SEQ ID NO: 10396 - DNA, 789 bp, Gossypium hirsutum
  Clone ID: GOSHI-09MAY01-C8974_3
gtcaaaccctacaaaaaatgctgagtgcaccccagaggaagctttctcgattgtaggcgacaacattatatttgcaagtggaagtccatttagagatgttgatcttggaaatcgtcaaattgggcatagcaaccaaggaaacaacatgtatctctttccaggtattggccttggaactcttctgtctggctctaggatcatttcggatggcatgctacaggctgcagcagaacgtctggctgcctacatgacagaagatgaagttctcaagggcatgatattccctccaatatcaaagataagagatataacaaaggaggtagcagcagctgtggtgaaggaagctgtagaagaggatctggcagaaggatatcgtgacattgacgctagagagctccaaaaaatatgtcagaacgaggaggaagttttagaatatgtggagaacagcatgtggagcccagaatatccaactctagtttacaaaaggggttagttggcttggtggatatgccatctttttattccaaatggaaagaaatagcagggggttgatcttgctgtgtcattggttccagccaaagacatcagatgtcatgggcataatagcataaaatagttggatttgtgtaaggaatttggttaataatatgcaccgtcattatctatatattgtatagatttatgagtggataggaaattgttgtgaagagcaagcttagtttcatgctttcctttgtttgcacacctcaattccaaatgaaatgaatgaatatatcatatgacataggc

SEQ ID NO: 10397 - DNA, 1093 bp, Gossypium hirsutum
  Clone ID: GOSHI-09MAY01-C8974_2
cccacgcgtccgataaaataaaaaaatgtgcctttttgcgtcgtatatgaagaaagaccgagtctgaaactccaatgaaagatcaaaaactcaactttacagtttgatttcaatttccaaaggatatagattttttgttttgaaggtttggtgaaaatggacaagaatttgactttttcgttttcttttatcgcttctgagttatgttatcaaatacattgtcaagtctctttattctttcacagttaaaagcctttctttaatctggctaaacaggtgcggcaggtgcggcctgatgtgcttcttgggttgtctggtgttggaggattgttctccaagaggtgttggaggctcttaaaggttcgacttcagctaaaccagctatctttgcaatgtcaaaccctacaaaaaatgctgagtgcaccccagaggaagctttttcgattgtaggcgacaacattatatttgcagtggaagtccatttagagatgctgatcttggaaagggtcaaattgggcatagcaacccaaggaaacaacatgtatctctttccaggtattggccttggaactcttctgtctggctctaggatcatttcggatggcatgctacaggctgcagcagaacggtgtggttaatttatattttgtttttgataaatatttctccaaatgcttctgaatttttcacctgccaagactatgagtttattttgttgttctttggaataaacttttagccattattagtatatgtgaaatttaggtaatttatgagtatgcaaagggataaagacagtaccagtgactggatcccctcttcctcagagccacataaaaattttcttcaagaaaattagggattaggatctgtttgctgtacttttctactttctggaggcatttgtaagtaactagtgcattaagttctaataattgtaatatatattattaacatactaaaatattgttagttggttcccaaatggcatgccagaagctgtctgatatatggatttggatcattaatttatttctttttcccttaaaactcctcgagcaaaaaaaagaaaagaagaaaaagaagttaatgg

SEQ ID NO: 10398 - DNA, 1118 bp, Gossypium hirsutum
  Clone ID: GOSHI-09MAY01-C8974_1
aagaaatttaataaaataaaattaaaaaacgtgtctttttgcgtcgtatatgaagaaagaccgagtctgaaactccaatgaacgcacgcgtccgcaactttacagtttgatttcaatttccgaaggatatagattttttgttttgaaggtttggtgaaaatggacaagaatttgatggacaaagtttctgcctttggtgagctcctgaagacagaaggagccgaggtgggaagaaagatgagtgctggcatgagctcagttagctttaaagtgaaggagctcttccaaggccctaaccctgctgataagcttgtcgacgatgccacctcagaggcccttgatgagcctgactgggccttgaatctcgatatctgtgacatgatcaaccatgaaaaaattagcagtgttgaactgattcgtggcataaaacgaaagataatgttgaagaaccctagggttcaatacttgtcattggtgttgcttgaaacttgtgtcaagaattgcgagaaggcattttccgaggtagcagctgagagggttcttgatgagatggttaagcttattgatgatccacagactgttgttaataatcgaaacaaagctttgatgcttattgaagcctggggggagtcaaccagtgagctccgctatttgcctgtttatgaagagacttacaagagtttaaaatcaaggggtattcgctttccgggtcgtgacaatgagagtttggcacctatttttacccctcctcgctcagtttccgcagctgaagtggatgctagtcttgcaaatcagtttcaacatgacatgcagcttcagcatgacactcctccccaagcctttaccgccgaacaaactaaggaagcatttgatgtagcaagaaatagcattgaacttctttcaactgtgttatcctcatcaccacaccaagatgctctcgaggatgacttgacaactacacttgtccagcaatgtcgacagtctcaatccactattctaagaatcattgacactgctggagataacgaggccttgctttttgaagctttgaatgtgaacgatgagatccagaaagctctctcaaagtttgaagagttgaatgagccatcagcagttcg

SEQ ID NO: 10399 - DNA, 372 bp, Gossypium hirsutum
  Clone ID: LIB3083-078-Q1-L1-D7
tagcgagttttttctttttccattgaagaaattggtgggtgtgtttagccattatttcttgtttgaaattggttgaacatatcgtcgtgttgcttttttgaaggcttggtgaaaatggacaaaaatttgatggataaagttagtgcctttggtgaacgcctcaaagttgaaggagctgaggtgggtagaaaggtgagtgctggcatgagttcaatgagcttcaagataaaggagctctttcaaggccctaacccaactgatcaacttgtcgaggatgccacctctgacgccctcgatgagcctgattgggccatgaattttgatatttgtgacatgataaaccatgaaagagttaatagtgtagatttaatc

SEQ ID NO: 10400 - DNA, 331 bp, Gossypium hirsutum
  Clone ID: LIB3493-029-P1-M1-F10
agaaaactcaacattacgcaggcgctacgcctcgacgtcttctttgatttgatatctcaactgagcttggtgaaaatggacaaaaatttgatggataaagttagtgcctttggtgaacgcctcaaagttgaaggagctgaggtgggtagaaaggtgagtgctggcatgagttcaatgagcttcaagatgaaggagctcttccaaggccctaacccagctgatcaacttgtcgaggatgccacctctgaggcccttgatgagcctgattgggccgtgaatcttgatatttgtgacatgataaaccatgaaagagttaacagtgtagatttaa

SEQ ID NO: 10401 - DNA, 634 bp, Gossypium hirsutum
  Clone ID: GOSHI-09MAY01-C8924_1
ggaatggcccggggcgaccccacgccgtccgattacccccctcctacttgcaatttctctagcaaatacactatcaagagagagagaaaagagagatattttgtgagtaaaaaaaaaaaaaggaaaaggactaaagttggatggttgtagggttttgcacgtaaaagctcgtgtttaatcatcataatgactagcattatgggcacagaggatgataagtatagcacgattaacttcgaagagacggagttgcgtttagggttgcccggcgccaatggaaacgacggtgaaactaccaaaaacaacggaaaacgagggttctcagagaccgttaatttgaagcttaacctttcatcaaaggagactgtagccgaggattccgacaagatgaaggagaagagctcaactgaccctgcaaagccacctgccaaggcacaagtggtgggatggccaccagtcaggtcattccggaagaacatcatggccgtccaaaaagccagttccgaggaggaaggtggcagcaagaaggccggaaacagtgcagccgccattactaccaccacggctgcggcgtttgttaaggtcagcatggacggtgcaccttatctacgcaaagtggacttgaaactataca

SEQ ID NO: 10402 - DNA, 506 bp, Gossypium hirsutum
  Clone ID: uC-gsflmaxxa046c02b1
cggattcgtgggcggacgcgtgggcggacgcgtgggcggacgcgtgggcggacgcgtggggagagatattttgtgagtaaaaaaaaaaaaaaaggactaaagttggatggttgtagggttttgcacgtaaaagttcgtgtttaatcatcataatgactagcattatgggcacggaggatgataagtatagcacgattaacttcgaagagacggagttgcgtttagggttgcccggcgccaatggaaacgaaggtgaaactaccaaaaacaacggaaaacgagggttctcggagaccgttaatttgaagcttaacctttcatcaaaggagactgtagccgaggattccgataagatgaaggagaagagctcaactgacactgcaaagccacctgccaaggcacaagtggtgggatggccaccagtcaggtcattccggaagaacataatggccgttcaaaaagccagttcctaggaggaaggtggcagcaagaaggccggaaacagt

SEQ ID NO: 10403 - DNA, 723 bp, Gossypium hirsutum
  Clone ID: GOSHI-09MAY01-C8894_1
cccacgcgtccgctaagacaaagtttcaagtcattcacatgctttgtttaatttttgtctgaacatcaaatatttttcccaggttttcttcaatctgcatgcgaaaaagaaacatggggttctctaaactgtttgttataattcttgggttgctcttagctctcaccctggatcagtgcactgctcaagaattcagatgtagctccccgagttcatgccgtgcacttgtcgggtacatcaccgtcaacaacaccaaccttggcgctatccaatcgcttttcaacgtcacgagcttccagagtctcctcggagccaacgacttgcctctttccactccgcgcaaccgcaccatagctgcacgacatctcatcagagtccccatcaattgtgcttgttacaacggaaccgggacttccagcggcggtcccacatacacgattcaaccaggggacgggctttaccacatagcggccgaggtgttctcgcaattagtgctgttcccgcaaattgcagctgccaacaacatttcgaatccagattgatagctgctggggacactctgcaaatcccgttgccgtgtagctgcgatgacattgacggtcagaaagtggtgcattacgcacacgttgtggaaccctacagtactttgcagagaagctcaggagtttggaaccaatgaagcaactttacttcgattaatgtatcacggccagatcaggtaaa

SEQ ID NO: 10404 - DNA, 525 bp, Gossypium hirsutum
  Clone ID: GOSHI-09MAY01-C8864_1
caaaaggaaggatcatatcatcatcctccaccttttatcaaagcccaaaatcacccatttttaaaacgttttctcaactcttccaccctttacatcaaattcaactcatccttcaaagaaatttccttcctttttctttcctttctatacaagttagttcaagcttcaatcccaatctttgtttttttcttttttctatccttttctgtttacggggtataaataaagggtgcaaaaatcttgattttatttccctcttccgagaaacactaattttactgtttcgatctgtggaaagttttcagtttttctttttcaggagaatatggccatctgggttatcgggtcggggcaactcgagtggttccaaagggttcgattttgggtccgatgatattctttgctcgtatgaggactactggaaccaggaatcgtcaaatggtagccacgccgaagctgcactcggtaccagtaccaccagtcttttcacggattttcacaaaggcagagtggcacggtcaatat

SEQ ID NO: 10405 - DNA, 1157 bp, Gossypium hirsutum
  Clone ID: GOSHI-09MAY01-C8834_1
ctgcgctcagcgaagagctagcggagatcgacggacaagtcgccgacatttttcgagctttatcaaatggattccagaaactggagaagattaaggacgttaataggcagagtaggcaattggaagagcttactgacaagatgcgagagtgtaagaggctcatcaaagagtttgatagggaagtgaaggaaacagagcgtagaactgatgcaaacacccacaaaatgctaaacgaaaagaagcagtcaatggtcaaggagttgaattcatatgttgcccttaagaagcaacatcaaagcaatcttgagaacaacaaacgagttgatctctttgatgggcctagtgaaggctttggggaagaaaatgtctggctagcttcatctatgacaaatcaacagctaatggatagtggaaaccatatgatggatgagactgatcaagccattgacagggctaagaaggtcgttcaagatactgttgatgttggaacagaaactgctgcagctctcaaggctcagactgaacaaatgagcaggatagttaatgagctggattctatccatttctcaatcaagaaagcatctaaactggtcaaagaaattggtaggcaggttgctactgataagtgcattatggccttgttgtttcttattgtcattggtgtcatagccatcataatcgtgaagctggtgaatccaaacaacaaggacattcgagatattccaggtttagcaccacctgcaatgaacaggcggctactttggactcctaattgaagaatttgaatgaaccacctgatgatatttcgggactatttgcagccaccatgaattgaagagtccctactacttatacctcggggcccggtgggctacccttgttggagaactggtatggtcctgcagttggatttttttgttaggatagtcctggtgcatccattaagagggtttcagaacttcccatgtgctaacctgccactagttatcatttcattgaatagcattagcatgatgagatctgtacgattccgttttattgttccagactgaagatattttgtccccatagacgaaagggaatatcatgtactttgagagtgtattggttcctatcatactttgtataatataacacctgcatgattcttttttttt

SEQ ID NO: 10406 - DNA, 678 bp, Gossypium hirsutum
  Clone ID: GOSHI-09MAY01-C8824_3
cggacgcgtgggattaaaccagcgatttttttgaattcgaacgtgtaataatggtggtatgtaatagcaaaactaacagtgggatattgatgaaatgttttggcagtttataacatttggttttgcttgtactccattgtacttcgtgtgggagaaagtgatagggatgcatgacacgagaagcatttgtttgagggcgctggctaggctgccagtggtgattccgatatggttcttggccatcatcttcccattcttcggacccataaactcggcggtcggcgctcttttggttagcttcaccgtatatatcatcccagctttagcccatatgctcacctatagaaaagcctctgctcggcagaatgctgcagaaaagccaccattcttcatgccaagttggactggaatgtatgcattaaacgcctttattgtggtgtgggttctagtgatcgggttcgggttcgggggatgggctagcatgaccaatttcattaggcaaattgactcttttggcttgtttgccaagtgttatcaatgcaagcctccaacaccaacatcaccagctgctgctatgcaccattaagctcactctcaaccaacatcaactactccccgtttttctccagtcaaattccgattttggtccctctattatgctcaaatttgaaatttagt

SEQ ID NO: 10407 - DNA, 1202 bp, Gossypium hirsutum
  Clone ID: GOSHI-09MAY01-C8824_2
gaatgttaacttcaagaatcatgtcattcagtggttcgaagtgcttgatgggttattgggtccatattggaaggcattaggacttgccttcaattgtactttcctcttatttggatctgtcatacaacttataggctgtgcaagtaatatatactacgttaatgacaaattggacacgaggacatggacctacatatttggagcttgttgtgcaacaacagttttcataccatcttttcacaactaccgtatttggtcttttcttggccttgggatgaccacttatacagcttggtacttggctattgccgccctcgttcacggccaggctgagggcgtgacgcatagcggtccgacgaagcttgtgctttatttcaccggagccaccaacattctctacactttcggcggacatgccgtcaccgtggaaattatgcatgcaatgtggaagcctcaaaaattcaagtacatatatttattggccacactttacgtttttacccttacacttccgtcagctgctgccgtttactgggccttcggtgacgaactcctcaaccattccaatgccttctctctcctccctaagaatggcttccgtgacgccgccgttatcttaatgcttattcaccagttcataacatttgggtttgcttgcacaccgctgtacttcgtgtgggagaaagtaatagggatgcatgacactaaaagcatttgtttgagggcattggcacggctgccggtggtgattccgatatggttcttggccatcatcttcccattcttcggccccataaactccgcagtcggtgctcttttggttagcttcaccgtctacatcatcccagctttagcccatatgctcacctacagaaaagcctctgctcgacagaatgctgcagaaaagcctccgttcttcttgccaagctggactgcaatgtatgccttcaacgccgtcgttgtggtgtgggtgctggtggttggatttgggttcggtggatgggctagcatgaccaatttcatcaggcaaatcgacactttcggcttgttcgctaagtgctatcaatgcaagccacctccaccaaccggagcagcagcagctgctgcaaaccaccactgagtgactcgacccaaaaacttatatagcaagaaacaaaaaccaaagaaagaaacattgaattccctggtttccttccatatct

SEQ ID NO: 10408 - DNA, 764 bp, Gossypium hirsutum
  Clone ID: GOSHI-09MAY01-C8824_1
tcgggttcgggggatgggcttgcgtggccaatttcattaggcaaattgactcttttggcttgtttgccaagtgttatcaatgcaagcctccaacaccaacatcaccagctgctgctatgcaccattaagctcactctcaaccatctcaaacctcaaatttcaactattccccgtttttctccggtcaaatttcgattttggtctctctattatgctcaaatttaaaatttcgtctctataatttgaaataatttgatctctcttttataaattcattagttagcccgaaatagttaatagtatccagttaattatgctaacgtgaaattttcctaaaaacacccattccaacaccagaagaaaacatatcagcatgatgaatgagaagggttgtttttaagaaaaagttcaatgttagctttttaattggaaagatacagatgttaactactttggactagctcatggcattataaaaataaaaggacaaatcatgtcaaattaaaatacagagaccaaattccaaatttaaacataatagaaggaccaaaccgaaatttgaccatttcctccctatctcaaagagagagaaaaaaaaaacccgccaatgatttccatgttttcctccatatgttgtatcatatattgggggagatagcaatattctcccctacatgcttagtgtgctggatttttgccctttgcttttcctatttttttctttttttttccttcaaatttctccattaaattagttgataagt

SEQ ID NO: 10409 - DNA, 606 bp, Gossypium hirsutum
  Clone ID: GOSHI-09MAY01-C8584_1
gattgattagtgtttctatcaaagacccctccccccctcttcttcctctccgatcggtgctgtcgtttgctgtatttatatattttttgcttcaactcattcaatcaccacaatttctcttatttctttctttttataaatacccttttatttttacttgctttttctatttctcctttgactggttcagattagccgttgatagtttagtgattaatatatagaactctttaaagctttggaaagatccttttttttcacttggtatcaagcatggaagatcgcaaggagaaaaatgcaccatggctatcagtaccacaatttggtgattgggatcaaaagggacaggtgccagattactctcttgacttctcaaagatcagggaaatgaggaagcaaaacaagagggaagtttcaagagccagtcttggtaatgaagaagagttcattaacccaactgcaaacactgttagcactactcctagtgatgatcatcaccacaattaccctcagaaccatcactctccatctacaaggagggagttctttagctacttcaattgctgcgtcaaggcttaagggttagggtttaagggctcgcatgaa

SEQ ID NO: 10410 - DNA, 550 bp, Gossypium hirsutum
  Clone ID: GOSHI-09MAY01-C8574_1
cccacgcgtccgcccacgcgtcacgacggatggaaactaagagcagcggcgtagccggcggcggatcagtctcagagtcgtcgaccatgatactccacaacgcggtggtcgtcacaatggattctgattgccgagtctttcaaaacggagctgttttcatcgacaaagacaaaatcaaagccatcggtcaatctcccgatattcttcaacaattctcccatgtcgctcaccacatcctcgacctccacggtcaaatattgcttccaggattcgtcaacacacacgttcacacttcgcagcagctcgggagaggaatcgccgacgacgttgatctaatgacgtggcttcaccatcggatctggccgtacgagtccaacatgaccgaagaagactcttacatctctactttactttgcggagtcgaacttattcactccggtgtcacgtgcttcgctgaagctggagggcagcacgtgactggaatggccagagccgttctgtggctcggattgcgagcttagctaacgagtccagtcatggactccggtga

SEQ ID NO: 10411 - DNA, 1114 bp, Gossypium hirsutum
  Clone ID: GOSHI-09MAY01-C8504_1
taagaatccatcaacagggggggtatgctgcaaatttagctccagctaaattagttgataaattgctaaatttttttgatagtactgcacaccttgttgtggggagtctgccaccacctgctccatcggcatcaaatggaaattttcaaggtaatgatcagttccaccaacaaactgggccaagagtatctgctagccaatcaacaatggctatgtcatctttgatgccctcttcttcaatggagcctataagtgattgggcaggcaggggggctgatggcaaaatgacaatgcataatagaagtgtttcagagccagactttggcagaactccaagacaggttgattcatcaaaggaagcagaagcatccactacacaagtcaaagcatcagggtcggtaggggcatctcgctttggttttggttttggctcacagcttctccagaagactgtgggattagtcttaaggcctcgctcagataaacaggctaagctgggtgaaaagaataaattctactatgatgaaaaacttaagagatgggttgaggaaggtgctgaacctccagctgaagaaccagccttggcaccacctccaaccactgctgcattccagaatggaaggtctgactacaacttgaactctacattgaacagcgaggtctctccttcgaatgggagcccagaattaaaaaatctaaccccagttgaacctgcttctggggtcccacctattcctaccatctccaatcaattctcagctcgtggacgaatgggtgttcgagcaagatatgtggacacattcaaccaaggtggtggtggccaagcaaatttattccaatcacctgctgttccctctgttaagcctgcaatggcagcaaatgcaaagttctttattcccattcctgcatcaacaaacgagcaaatgatggaggcaatagccgaaaatgcacaagaagaaaatggaactagtaataaccctacgacatccaatgcgaatgagttctatgaatctgccttgaatatacagaagtttcctagcgtggataatattacaaaaactgccaatggttttccacttcactcaagacgaacagcctcatggagcggaagcaa

SEQ ID NO: 10412 - DNA, 788 bp, Gossypium hirsutum
  Clone ID: GOSHI-09MAY01-C8464_1
cccacgcgtccgcccacgcgtccgggaaattaaaaaaagaaagaaagcagggaaatgcttaatctatggaatcttctcttcctctcctttgttcatttctcatcattcagtgttactttgggtggggtgtcgggaaacccatttactccaaaatcctccttcattcgctattggaacaaagagctccacaaggaaatccccaacacccattttttactctctaaagtttcaccattaactgccgtcgactccgccagtttctcgaaactcgccgcccacaacaacctcgcttctcgtcttccttccttttgttcctccgctaaactcttttgcttccccgacttatcgcccagtctcgagaaacattccaaagacgttaacttcgccgtctacctcgacaggaacttcactaattacgactccgatcgactcgctggactcgactccttcaagaactactctgaaaacgacaacgttgtcattgactcttttcgtcgctacagccgggactccgcgggtcacaaggaccaattctccaattacgccagtgcatcaaatgtcgtcgaccagagcttcaacacctacggcggagccgccactggtggttccgggaacttcaacaactacaaccatgaagtcaacgtccctaacctccgattcacttcgtattcggatgattctaacgggcatgggcagacattcacgcactacacagtggagaccaacgccgggcagcagtcattttcaaattacggcaaaaactgtaatggcgtccctaacgactttac

SEQ ID NO: 10413 - DNA, 794 bp, Gossypium hirsutum
  Clone ID: GOSHI-09MAY01-C8774_1
tttcatgggtacatctttccttttgcgtctgcttggaagctagcgaggaagatcattcggcggcagatacaggaccattgccatctctaccggtatacttatgacccttgaggtatactcccgtctcattttgccattatgaagaaagtctaaaggaaaaccaggtttaaccaacctacagagattggccataggcctagtgctatcaacgttgggaatggcgggcgcggcactagccgagaagaaacgattggccgtggcgagaaccgtgggtgccaacacaacaacgctgcctataagcgtcttcatgctgatcccacagttcttcctagtgggggctggtgaggccttcatctacacaggccaacttgattttttcatcactcaatcccccaaaggaatgaaaaccatgagcactggtctcttcctcacgacactatcgctgggtttcttcgtcagcagtttcttggtatcagtagtgaaaaaagtgacgggaagcaatgatgggcaaggatggctagcggataacataaaccatgggagacttgattgcttttatggacttttagcagttctaggcgtgataaacttcgtactgtatcttgtttgtgcggtgtggtataaaccaaagaacccaaaacctgccctacagatggagaccattgtcaatggctcatctgctgagaataagtgctagaaacgtgttataattgcattttgttggtgttgttgtaacttagtttcatcgccttcttttgtgtattaataactggtttgggtttggtttcctttct

SEQ ID NO: 10414 - DNA, 1069 bp, Gossypium hirsutum
  Clone ID: GOSHI-09MAY01-C8704_1
cccacgcgtccgctcaaaaaagggaataattttcgtctccattcaatctttctgctgctgaccattctttcctaagggcattatggatgcgagattcgggctcttgttcctcttcatgttgggtgctacttgggcatgtaacgcccgacaactagaagttgttgaggtagtaatctcggatccatcagttgtccaggtaaactggaggcaagatgaaaaagtgatagaaacggtagctcggaatgacaacgtgtgcaccttgtgtgaggaatttactactgaggcagttgattacctttcacagaataaaacgcagactgagataattgagattcttcacaaaagttgctcccgtttacgagcttttgagccccagtgcattacacttgtggactactatgcacctctcttcttcttggaaatatcttcagtacaacctcaagatttctgtacaaagttcaacctttgtcaaaaagttgcacttatatcttcacaattccgcgaagatagttgtggcatgtgccaccgtgctatttctgaagtactaatgaagttgcaagatcccgatacaaagttggagatactcgagcttcttttgaaaggatgtaattcagtgcagaactatgtgcaaaagtgtaagcggttggttttcgagtatgggccattgatcctcgcaaatgccgagcacttcttggaaactaccgatgtttgcaccatacttcatgcctgtgatggtggaaagcaagaatcagtggcagattcttgattttattttatgaaaaccacaaaggatattttgttgtaatatagtgtctgtatatacacgtaaaacattttaatcccaggtttgcaaattgtgtgttgaacgaattataaatattgaaaatgttatgtatttgctcgaatttgaacttgacttaaaaaaaaaaaaaaaaaaaaaaaaaaaaaaaaaaaaaaaaaaaaaaaaaaaaaaaaaaaaaaaaaaaaaaaaaaaaaaaaaaaaaaaaaaaaaaaaaaaaaaaaaaaaaaaaaaaaaaaaaagggggggccttttaaaagaaccaaattt

SEQ ID NO: 10415 - DNA, 623 bp, Gossypium hirsutum
  unsure (1)..(623): unsure at all n locations
  Clone ID: LIB3828-012-Q1-K6-F4
taatcttttagcttcttttatgctagtatagaagacatcgacttttcctttctttagcattatnngggaaactcatgctnnatttaatgaaaaactccaggcattatggatgcgagatttgggctcttgttcctcttcatgttgggtgctacttgggcatgtaacgcccgacaactagaagttgttgagatagaaatctcggatccatcagttgtccaggtaaactggaggcaagatgaaaaagtgatagaaacggttgctcggaacgacaacgtgtgcaccttgtgtgagcaatttactactgaggcagttgattacctttcacagaataaaatgcagactgagataattgagattcttcacaaaagttgctcccgtttacgagcttttgagccccagtgcattacacttgtggactactatgcacctctcttcttcttggaaatatcttcggtacaacctcaagatttctgtacaaagttcaacctttgtcaaaaagttgcacttatatcttcacaattccgcgaagatagttgtagcatgtgccaccgtgctatttccgaagtactaatgaagttgcaagatcccgatacaaagttggagatactcgagcttcttttgaa

SEQ ID NO: 10416 - DNA, 577 bp, Gossypium hirsutum
  Clone ID: GOSHI-09MAY01-C8724_1
caaaaaccacacaagaaaacaaacaaaggaacgataaataaaaaaaaaaacattcgcagtttcaacaatggcagagtcgtcaaacaacgttgtcgagacgatcaaccgtgattgtcacgattttaagtctcttctctcttcttcagacagggatttcctcgttcgcaacaacggtgatcaggttaaaatcgatagcttgaaggggaagaaggttggattgtatttctcagcatcttggtgcggtccatgccgtagattcaccccaaatttaatcgaggtgtacaccgagctctcaacgaaaggcgatttcgaggtcatttttatctcggcagatgaagatgaagagtcattcaatggttacttctccaagatgccatggctggcaatccctttttctgattcagaggcacgcaagcgcttagatgagccgtacagtgtgaagggaatacctcacctcgtgctcttggatgaaaatggtaaagtcttgaccgaagagggggttgtgatttttcgtgagtttggagaggaagggtaccctttcgcccccgagaagatccaagaattaaaagatttagaa

SEQ ID NO: 10417 - DNA, 511 bp, Gossypium hirsutum
  Clone ID: LIB3493-041-P1-M1-G6
aaaaaaaaacattcgcagtttcaacaatggcagagtcgtcaaacaacgttgtcgagacgatcaaccttgattgtcacgattttaagtctcttctctcttcttcagacagggattttctcgttcgtaacaacggtgatcaggttaaaatctttagcttgaaggggatgatggttggatagttattatatttcatttcagtatttgtaaattcttttttattttgttcaatttctttttaagttgttttcgtttattatatctttattttgttttaatttttttccttttttttgctatttttctacttttgtatcttttttttttgtttttttaattttttttttctgtttgattgattatttttctcttttttgtataatttttaagcatgttttatcaattttttactttttttcgtgattttttttttcttttttctatttttttcttgttttttcgaatttattttgttgtttgttatcttattttttttctttgttttaatattttt

SEQ ID NO: 10418 - DNA, 296 bp, Gossypium hirsutum
  Clone ID: LIB3166-023-P1-K1-B9
cccacacatccggttctacttccttatcggccgcccactattttaagtctcttgttttttttttatacaggtatttcctcattcgcaacaactgtgatcatgttaaaatctatagcttgaaggggaagaaggttggattgtatttctcatcatcttggtgcgttccatgccttagattcaccccaaatacaatcgaatttttcaccgtgctttcaacgaaaggcgatttcaaggtcatttttatcttttcagatgaagatgaagagtcattcaatggttactgctccaagattcca

SEQ ID NO: 10419 - DNA, 454 bp, Gossypium hirsutum
  Clone ID: GOSHI-09MAY01-C8684_1
cccacgcgtccgcggacgcgtggggaaaaatgaagaaagtagagctgatattcgttccaacaccaggagccggccacttggccccaactgttgtattcgtaaagcgtctcatccatcacgatgatcgaattttggttactattctttccattgagtggcattcttcgggtttcgccgatgcctacaccgaatcgcttgctactttgcaatctgatcgaatccaggtaattcaggtttctcgggtagatcctcccccgttacatctttggaccttggcacccgaagcttttgtctatgcattaattcagagctacatccctcatgttagaaatgctgtcacaaatattttgtctatgaaatccacttcggattcaacccgagttgcaggcttagttcttgatctgttttgttcgcccatggttgatgtcgcaactgaactcggtctttcttctta

SEQ ID NO: 10420 - DNA, 493 bp, Gossypium hirsutum
  Clone ID: GOSHI-09MAY01-C8664_1
tttatcgcgtgggcggacgcgtgggcttccttccatctcaaggaccaaactgcatcatctcctctcaccatcttttccggccaggggcggccacaaaacgtcgccctcaaaagagatcttaatgcctccgaactccagcagcgccgctatacactctcctaaaaaaacaaacagctcctccacctctctccatcttcaacctttttcatttctatggctgctccttttcatcgtctcacttcaggtaaccattctctttatggctcgcgccgcccctttctacaatcgccgaacccatttcccgaacccagtatccgacccgtgctcgtcgggtcgtatcttcgtttacaacttgccacctgttttcaacgaagagttgttggataattgccacgagctggacccatggaattcacgttgcgaagcattgtccaacggtgggttagggaggaaaggcgacgggattatccggcgtcgtaccggaagagttgat

SEQ ID NO: 10421 - DNA, 431 bp, Gossypium hirsutum
  Clone ID: uC-gsflnu33B036a01b1
ccgatgattccggcgaccccaccggaagtgagaggggtgtttttttgcagacttcgtcatgtatcactcacgatactttcgggacgggagctggtacaggccgactcgctcaaaggtgatggtaatgatgtctgggatgcggtgagcttgttcccagtccaccagaggcccataaactatggtgaccaggttctatcctaagtgacgtggaactctatggctgctccttttcatcgtctcacttcacgtaaccattctctttatggctcgcgccgcccctttctacaatcgccgaacccattttccgaacccagtatccgacccgtgctcgtcggttcgaatcttcggatacaacttgccacctgtttataacgaacaggtgttggataatagccacgcgctggaccggaggaatttcacgccgtgaagca

SEQ ID NO: 10422 - DNA, 581 bp, Gossypium hirsutum
  Clone ID: GOSHI-09MAY01-C8614_1
cccagcgtccgaaaaaacaagtaaaaactacataaatgcttgaaaaatacaccccaaaaaagaaaaccacccaagaccaccgacacctccgccgatcatccaccgccgaccaccactacttccattcacttcccatactggaaagatctttgggttttatttttaaatgtgttttttaattgcaattaatcatcatatcattctttgattcctcagttttagggaatttttggggtatttaaaaagaccaaaaaggggttcatatttttaaaaaaagcttagatcaaatcttaaaaaaatggggattattcggtggatttaggattttgagggggcttttgggttttgtgagggtttttttttattgagagatgtctgatgcttcagggattaatgaatctgctctcggtttgttggaacccatttgggcatgaagtagaaagtcacgaaacaaacggcgtccttggcggcggcgatggcggtggtagtggtggctcaagggaaggtaaagatgggttgctttggtttcgtgatatagggaaatatgggtccggtgaattttccatggccgtgatccaagc

SEQ ID NO: 10423 - DNA, 710 bp, Gossypium hirsutum
  Clone ID: GOSHI-09MAY01-C8624_1
cccacgcgttccaaaaaggcagttaggaaccagaaaccaaggcaatggcttctcttgcaaccttagctggtgttcaaccaacgaccatcaagggccttggtggcagctctctcaatggaaccaagctcttggtgaagtcaactcgccagagtttcaaacccaaaaactacagggctggtgctgtggtagcaaagtatggtgataagagtatatactttgatttggaggatattggcaacacaactgggcaatgggacttgtatggatccgatgcaccttcaccgtacaacccactccagagcaagttctttgagacatttgcagctccatttaccaagagaggattgttgctcaagttcctgatcttgggaggcggttccctcggtctttacctcagtgccactgcttccgatgaccttctaccgatcaagaaaggtccgcaactcccacccaagcctgggccgcgtggcaagatataatttagttaaactctttaagcttttcattgtatgtatcttgtttcagttttcaaacatgtaatcctaaaatgtgcccttggctatcgatccaatgacatttgtttcccgcttaactggggcattgctttcagctttaaaatttcttctctttgataacgatcctacccccccccattactgatctgacctgtcattgaagaactaataatatgtcccttgcccttgggtttt

SEQ ID NO: 10424 - DNA, 365 bp, Gossypium hirsutum
  Clone ID: LIB3148-023-Q1-K1-A6
aaaaaaggcagttaggaaccagaaaccaaggcaatggcttctcttgcaaccttagctggtgttcaaccaacgaccatcaagggccttggtggcagctctctcaatggaaccaagctcttggtgaagtcaactcgccagagtttcaaacccaaaaactacagggctggtgctgtggtagcaaagtatggtgataagagtatatactttgatttggaggatattggcaacacaactgggcaatgggacttgtatggatccgatgcaccttcaccgtacaacccactccagagcaaatgcatagcatatggatcagtctccatatgaaagtacttgtagagtgggaaatgaaaagaagaaaaggaact

SEQ ID NO: 10425 - DNA, 1042 bp, Gossypium hirsutum
  Clone ID: GOSHI-09MAY01-C8124_1
gctttttgaaattattatttaaaaaaaaaaaaccttttgctcctttctctcctcctttggcgaccgctaaaacgtttcctggtcttaatccaaattccgatcggaagatcaagttagggctttcagtcgattttcaatggaaagaatcagaagagcttcgcatgcaggatcttggtacactgataacccaaaaaaactggcggaagagcttgatggatggatcacggcggctggcttgcctaaatcctctgatgtaagaggtgtaattgctccgcatgcaggttattcatattcaggtcgtgctgcggcctatgctttcggaaatatagacccaacaaacatttctcgggtattccttcttggtccatctcaccattattacactccaaaatgtgctctgtcaactgctacagtatacaagacaccaataggggacctacctattgatttggaagtcatcgaagagctgaaagctacaggaaaatttgaactgatgaatcttcgtgttgatgaagctgagcatagcatggaaatgcacttgccttatcttgtaaaagtatttgaggggcattcagtgaaagttgtaccaattttggggggtgctcttagtgcggaaaatgaagcaatgtacgggaagttgttggccaaatatgtagatgatcctcataatttcttctccgtgtcatcagatttttgtcactggggttctcggttcaactacatgcactatgacaagaagtacggggccatacacaaatcaattgaggccctagacaagatgggcatggatataatagaaactggagatgcagtcgccttcaagcaatatctgtctgagtatgacaacacgatctgcggacgccatcctatcagtgttttccttcatatgctgagcaacagctcgacgagaataaagatcaagttcctccgttacgagcaatcgagtcagtgcaaaactacgcgagacagtagtgtaagttatgcatctgcagcagcaaaggtgggatcctggaagatgtgaaatacataaaaaaaggtgggg

SEQ ID NO: 10426 - DNA, 388 bp, Gossypium hirsutum
  Clone ID: LIB3165-025-P1-K1-G2
ctgaatctaaaatccaattccgccgacaaaaataaattttttagaaaaaaattacggctgggatgggattctcaacggaaaaaatcagaagagctaagcatgcatgatcttggtacactgataacccgaacaagttatcgtaagagcttgatggatggatcagggcggttgtctagccaaaatcgtctgaagtaagaggagtcattactctggatgccggctaaacatcttcaggtcgtgctgctgcaaatgcttttggaaacatagaccccacaaacatgacttggcaattccttattggtccttctcaccaggataacacttcaaaatgctctttctggaccgctacagggtacatgacaccaataggggacctaaccattgatgt

SEQ ID NO: 10427 - DNA, 693 bp, Gossypium hirsutum
  Clone ID: GOSHI-09MAY01-C8094_2
cccgcgcgtcgtgatatttttgaacaagcaaataaaagctctcactacctaaccttcaaacccccctcgcggctcctttgtggattagaaaactagagatcaaaagataggcaactaggaaaaaaaaaaagataagtgaaagatgtcaactgcttcttcattgtgttcatcaactcagattaatggctttggagggggacttggggttctaagaacccatgtttctcaacccaagacactttctttcacaagaaggagaatttctacggtagtgaaggcaacatctcgagttgataaattctcaaaaagcgatatcattggttctccatctattctctctgctaatttcgcaaagttgggggagcaggtgaaagcagtagaagttgctggctgtgattggatccatgttgatgtaatggatggccgatttgttccaaacattacaattgggcctcttgtggttgatgctttacgacctgtgacggatcttccgctggatgtgcatttgatgattgtggaacctgagcaacgagttccagatttcatcaaggctggagcagatatagtcagtgttcactgtgaacaatcttcaaccatccatttgcatcggacgcttaatcaaataaaaggtctgggtgctaaagctggagtatcctaaatccggcaaccccacttactacaatagaatatgtg

SEQ ID NO: 10428 - DNA, 940 bp, Gossypium hirsutum
  Clone ID: GOSHI-09MAY01-C8094_1
tcttatgtcacccggggggggagagattttaacatacaaaaaaaaaaccaaaagaaaaactaaggctctaatttccaaactccattacagattagatataacggagagcagtttttgataagaaaagagacggtaaaaggaaattaaagatgtcaacagcttcttcattgtgttcatcaactcaagttaatggctttggagggggacttaggcttctaagaacccatctttctcaacccaagtccttttcttttactaggaggagaactgctacagtagtgaaggcaactgctcgagtcgataaattttcgaaaagcgatatcattgtttccccatctatactctctgctaatttcgctaagttgggggagcaggtgaaagccgtagaagtggcaggctgtgattggatccatgttgatgtaatggatggccgatttgttccaaacattacgattggacctcttgtggttgatgccttacgacctgtgacggatcttccgctggatgtgcatttgatgattgtggaacctgagcaacgagttccagatttcatcaaggctggagcagacatagtcagtgttcactgtgagcaatcatcaaccattcatttgcatcggacacttaatcaaataaaaggtctgggcgctaaagccggagtcgtcctaaacccggcaaccccgcttactacgatagaatatgtactagatgtggttgatctagtcttgattatgtcggtcaaccccggctttggtgggcagagctttattgagagtcaagtcaagaaaatctctgacttgagacgtatgtgcgcggagaagggtgttaatccatggattgaagtcgatggtggagttggtccaaagaatgcatataaggttattgaggcaggagcaaatgctctagtggctggttcagctgtatttggtgcaaaagattatgc

SEQ ID NO: 10429 - DNA, 487 bp, Gossypium hirsutum
  Clone ID: GOSHI-09MAY01-C8024_1
aacaaagtgaatgaagaaataatattaagctgaaaacttcttcaaattcaagagaaggaaagctcattctttcaattttgtcatggattatttgaaaacagtggttccttctcaactcctcgctgaacgtggctctaatctcgtcgtcatcaacccaggttctgcaaatattagagtagggttagctaagcaagactctccttttagcattcctcattgcattgctcgtcgcagcaaccagttacccaagttaaatgttcaagatcagttgcttaattctcaagttaccacagcgcagcatatggagcgcgaaaaggcatatgatgtgattgcgtcgttgttgaagatacctttccttgatgaagaggttgccaataattctattccccgaaagatgggacgtgttgatgggtataatcctcagaatccaaggaaagatggagccttcacttggactgatacacatgtgaaggacctagattcatca

SEQ ID NO: 10430 - DNA, 542 bp, Gossypium hirsutum
  Clone ID: GOSHI-09MAY01-C8394_1
tgccgctgtatgtgtttttattagtttatacctcatggcttcttggaactcagtttttctttcatggcttaagaatttcagtaatattttcaagtacaaaatggatgaagtccagcttggttcacatactataaggtcccatggtctcaccattgcaaggacacacatgcatgattggcttattcttgtattgcttgtggtgatatgggttgtcatccttatcattcatccattttatcgctttgttgggaaggatatgatggatgatctaagataccccttacaaagtaatacagttcctgtttgggctgtgccgatgtatgccgttctgttgcccatgctgatttttatctttgtgtacattcgtagaagggatgtttatgatcttcatcatgctgtactaggccctcttgttctccggtctagtgaccgctgttatcactgattcgataaaaaatgcagttggaagacctcggccagacttcttttggcgctgtttcccagatggaaaggatgtttatgataaatggggaaatgtcatc

SEQ ID NO: 10431 - DNA, 735 bp, Gossypium hirsutum
  Clone ID: GOSHI-09MAY01-C8384_1
tactccaggtattgtatatcagtgcaatctaggcactgagacaccagatatgaagatattccgtgaaattagtgttcctggatttgaccgctcagagtatgaagtcaatcaggtatttgtgccaagtaaggatggtacgaagattccaatgttcattgtgggcaggaagaacattaatttggatggatcacacccttgtttgctatatggatatggtgggtttaacattagtctcacaccaacattcagtgtgagtcgtattgtacttacaaggcatctcggtgctttttattgtgttgccaacattcgtggtgggggagaatatggagaggagtggcataaagctggtgctctttccaagaagcaaaattgctttgatgacttcatttcggctgctgagtatcttatatctgctggctatactcggtctgaaaagttgtgtattgaaggtggaagcaatggtgggcttctcattggggcttgcataaaccagagaccagatctttttggttgtgctttggctcatgttggtgtgctggacatgttacgatttcacaagttcaccatcggccatgcatggacatcggattatggatgttctgacaaggaggaagagtttcactggctgatcaagtactcaccactacctaatgtaccaagaccctgggaaccgcatcctgatcagccattacagtaccctcctactatgctgttgactgctgatcatgatgatcc

SEQ ID NO: 10432 - DNA, 566 bp, Gossypium hirsutum
  Clone ID: LIB3826-002-Q1-N6-F3
aaaaaaagctcaaaattgaaccaataaaaagtacttaaattctaatgcaattgagtatccacaattgattttaaacttttaaactcaaacaacttgagccatcaagcaattctagaagataaaatcagtcctcaactatctgcataacatcatggttggcagctaaatcttctgagccaatcacaaccttaacaagattagggtccatgtactcctgagctaaccgatgaactgttgcaggccatgtagcactgaacattaccatctgatgagctgcaaaggttaaaagcaacatgaggatttccaacctaattgctcatgcattattctaccaagatacagaacaatattttttagcttgattaaaccttaagttatcaatgtttagtggcgtttactcataagcatcaataaaagctttaatctaagcatcttctaggagtttaaaattccaatgtaccaacaaagagacataccagaacatgtctttcccaataaaaaaaaaaacatgacagcataatattctcaacaaattcaatattgaaaatattgaatattcagcataa

SEQ ID NO: 10433 - DNA, 430 bp, Gossypium hirsutum
  Clone ID: LIB3135-012-Q1-K1-A9
tcgccgaccccgtgcatctgataaatccctaaccccttccctcctttttttcccccaaatcgaagatccatcttcacctccgccgatccaccatttcacctccggtcctccacgactccacctgtgctctaacagtgcttctagccttgtacgtcttctacctttgaatttcaaagctcatcagatggtaatgttcagtgctacatggcctgcagcggttcatcggttagctcaggagtacatggaccctaatcctgttaaggttgtgattggctcagaagatttagctgccaaccatgatgttatgcagatagttgacgttttagatgatcgtgcacattatgagcgattgactgcatttaaaatttctcttcattggctaaatagaatgggcagcatttaaaatttgtactctggatgtgtgtgttct

SEQ ID NO: 10434 - DNA, 415 bp, Gossypium hirsutum
  Clone ID: LIB3166-001-Q1-K1-E12
gtcagatggtaatgttcagtgctacatggcctgcagcggttcatcggttagctcaggagtacatggaccctaatcctgttaaggttgtgattggctcagaagatttagctgccaaccatgatgttatgcagatagttgaggttttagatgatcatgcacgttatgagcgattgactgctttgctcaagaaataccatgaatctcagaggaatagagtgttggtatttgtcttgtaccaggcagaagctgatcgaattgaaaatatgcttaagagaagtggctggaatgttgtttctatacatggtcgcaaagcgcaaaatgaacgcactaaggcactatcattatttaagaaaggaagctgtcctttgatggtagctacagatgtggctgctagaggattggatattccagatgt

SEQ ID NO: 10435 - DNA, 404 bp, Gossypium hirsutum
  Clone ID: LIB3146-030-Q1-K1-C10
cgcaaatccctagcccgactgccctccatttttttctcaaccttcaccttcatctccggcagcagtcctccaccgatccacctccagtcctccatttcagtcacctctatttaagatgaagctgatcgaatgcttgacatgggtttgaagaggatgttaactttatattgggaaagacatgttctgctcatcagatggtaatgttcagtgctacatggcctgcagcggttcatcggttagctcaggagtacatggaccctaatcctgttaaggttttagatgatcgtgcacattatgagcgattgactgcatttaaaatttctcttcattggctaaatagaatgggcagcattttaaaatttgcactttggttgtgtgtgactgtgtgttctctaacattttaa

SEQ ID NO: 10436 - DNA, 1017 bp, Gossypium hirsutum
  Clone ID: GOSHI-09MAY01-C8344_2
gatccgttttttaatcttttatctgtattgaattagattcatatacccgcattttcaatcgtttagttattgtttaattcctcacaattctccattttcctcagttttaagtgctgtagagctcccctgttgagagagaagagaagttggaatcttttttgagcaatggaaggatcagtttttactccatcattggaaggaatgaagcatatcaattctccgcgaaggggaaatgctttccaagccttctttggatgtctgcaagttgattttgccagtcctcgataagttcgggtctgctatgagccttgtgaagagtgatgttggtggtaacatatcgaggttggaaaagaaatatgaaactgatcccgctaaatacaatcacttgtacagtatggtgaaagaagaggttgattgtaaaacagcaacagattcatctagttgtaccaatggtcttctctggttgacacgagcaatggatttcctcgtagaattgttccgcaacttacttgcacatccagattggactatgactgaatcttgtaccgactcctatggcaaaaccctgaaaaagttccatgactggagatgttaatgctgacatggagaaattttgttcgactttccccccatttcttgaggagaatcccaaatatctggccaagtttggcttggatgatatgaaggcatgatggaataagtttaatgagtagaggagagactacctacctatatttttactcccgcgttcgaacttccagtatcttgcttccggcttaaaccttcgtttttacttggaataattaatgactaatgactttgaacacatacgctcgaatgcttagtttttagtaattgttggctaagtgtcttgaccctcgcttgatgaacacggatgtttggaattatgttccaaactataattgaatagctacaaaactatatgatgctgccttggtctctgttgctgaagatattggacctcgtgaccggggtagatacgctgaacaaccctgc

SEQ ID NO: 10437 - DNA, 1163 bp, Gossypium hirsutum
  Clone ID: GOSHI-09MAY01-C8344_1
ttactcgtccgcggacgcgtgggcggacgcgtgggctcgtcttcaatatttcaaccgaatccaattctcaaagaaaaaaaatcgccagttaagagagaaaaaaaaagttgaaatcttttttgagcaatggaaggatcagtttttactccatcattggaaggaatgaagcatatcaaatctccggaaggggaaatgcttaccaagccttttttggatgtctgcaagttgattttgccagtcctcgataagttcggatctgctatgagccttgtgaagagtgatgttggtggtaacatatcgaggttggaaaagaaatacgaaactgatcccgctaaatacaatcacttgtacagtatggtgaaagaagaggttgattgtaaaacagcaacagattcatctagttgtaccaatggtcttctctggttgacacgagcaatggatttcctcgtagaattgttccgcaacttacttgcacatccagattggactatgaccgaatcttgtaccgactcctatggcaaaaccctgaaaaagttccatggctggattgctagttccgctttcacggttgcattgaagttggctccagataggaagaagttcatggaagtgatagctgggactggagatgttaatgctgacatggagaaattttgttcgactttccccccatttcttgaggagaatcacaaatatctggccaagtttggcttggatgatatgaaggcatgatggaataagtttaatgagtagaggagagactacctacctatatttactcccgtgttcgaacttccagtatcttgcttccggcttaaaccttcgtatttacttgaaataattaatgagttatgactttaaacacatactcttgaatgcttagtttttagtaatttttggttaaatgtcttgacccttgaatgatattattgaaattatgttcagttcttctccctaaaaaagtcgacgcggccgaaaaaaaaaaaaaaaaaaaataaaaaataaaaaaataaaaaaaaaaaataataaaaataaaaattatttataatttaataaaaataaaaaaaaaaaagggggggcccttttaaagagtcaaagtttttttccgggtgtatgggaagtataaattttttttaaggggccccaaaataaaattacctggc

SEQ ID NO: 10438 - DNA, 352 bp, Gossypium hirsutum
  Clone ID: LIB3147-024-Q1-K1-H4
cggacgcgttttaccatatcatttctccagtttgggaaatgcttaccaagcctggtttggaggtctgcttgttgattttgccagtcctcgataagttcggatctgctatgagccttgtgaagagtgatgttggtggtaacatatcgaggttggaaaagaaatatgaaactgatcccgctaaatacaatcacttgtacagtatggtgaaagaagaggttgattgttaatcagctacagattcatctagttgtactaatgggcttctttggttgacacgatctttgtaattttttgtataatttgttctcatcttacttgaatctttcttatgtgtttaatgatttatttctta

SEQ ID NO: 10439 - DNA, 489 bp, Gossypium hirsutum
  Clone ID: GOSHI-09MAY01-C8364_3
tgcatcttcgcccaaatcaagaggactatcgatcatttctacatgtctcctccactttttccagtttcattgtatctactttgttacagaatccagctgcccatgctgcagcaagctttgcagcaacgtcctcgcctgcggcgaatattgaaagctctcgcgattctccttgcatgccgcttaggaaggttgcccatcttgaccaattcaactctgctccaagtatggctgcaatcgctgctgccactgtagcagctgccactgcatggtgggccgcccatggactgctttctgtatgtgctcctctgcatacaggctttacctgttttcctgcatccactgctgcagttccaccaatggagaatggtcaacctccagctgccaagacagaacaaaaggggtaaactgatcaagctctatctctgcaggttgagcaactagaccccgaaaactcttgaactttgcaaggtcagcattcatcatctaaat

SEQ ID NO: 10440 - DNA, 593 bp, Gossypium hirsutum
  Clone ID: GOSHI-09MAY01-C8364_2
agctcttgtacattcagggagtttgtccctttgccaaaagagatatttcatgataatggtacaaatgagatgaaagctgctcaaaattatcctcggcatgttgctgtgcatgtcctagatggaagccttagaacatgtgttcaaaatccttccctggctgcatcggcaactactgaacatcccacgcgtccgccaaaatctactcatcaggcattgccaccttttcatattccctttatacatcttcggcccgatcaagaggagtatcgatcatttctacatgtctcctccactttttccaatctcattgtatctactttgttacagaatccagctgctcatgctgcagcaagctttgcagctacattttggccatatgcaaatgttgaaagttctggcgattctcccgcttgtgacctgagaggtttcccttctacacaaacgaactctgctcctagtatggccgcaattgctgctgctactgtagcagctgccactgcttggtgggccccccatggactgcttcccgtatgtgctcctctgcacactggctgtacctgtgctcctgcatccactgctgcagtaacttctat

SEQ ID NO: 10441 - DNA, 1201 bp, Gossypium hirsutum
  Clone ID: GOSHI-09MAY01-C8364_1
acctagcagagatgaaaaatcttcaaatctgaaagaaattctagatgataattgctctgaggtttttacccttctccatgaagcaaactgctcctccatgtcttctgtgaacaagaattttataccaacatcaacagcgcttagaaattcttgccctcttagggagtttgtaccttcactaaaggagacaattaataaagatacaagtaagccttcaaacttggagaattcttgcacttcatatgagaaaccagctcaagttcagagaaaagatgatatggacggtgctacatgtacagatgagatgcaagccactcataataatcctcaacatgttgctgtgcatgtcctagatggaagcccaggaacatgtgctccaaatccttctatggatataacttttcaggattctatatttcaccctatgggtgatattcatggacaagttaacctgtttgcaaatccagcggcatctgctaccactgcacatcagaataatgcaccaagatcaactcatcaggcgtttccaacgtttcatactccctttatgcatcttcatcccaatcaagaggactaccgatcatttctacacgtctcttccactttttcaagtctcgttgtatctactttattacagaatccagctgctcatgctgcagcaagctttgcagctacattttggccatatgcaaatgttcaaaattctgatgattctcctgcttgtgaccaggaaggttttccttctagacaaatgaactctgctacaggtatggctgcaattgcagctgccactgcttggtgggctgcgcatggactgctttccgtatgtgctcctctgcagactggctgtacttgtgctcctgtatccactgctacagtaacttctatggtgaatggtgaagctccggctgcatagatggaatgatatatgtatgctgctctatatccttccatgcagatataacggttggatcctatatattcatgaatcttgttattgtcaactatagttatttattcacatacattattctcagtctcgtttagatatctgtgtaggatatatctactatctataggaattatctttatatatgactttaatactcatcttgtcatattttgaaactatttatcgatctattgtgtatcatatctccagttatgtatatgtaatatatattgtcacttctgtctataa

SEQ ID NO: 10442 - DNA, 411 bp, Gossypium hirsutum
  Clone ID: GOSHI-09MAY01-C8314_1
cttcaaaagtcaagtgaagcaaatggccatgtcatccacccccaacatcttattatggctcttttccattcattctttgctttcgttagcacagatcaatgaggccaaagttcctgccatcatagtgttcggggactcatcggttgatgctggcaacaacaactatatccccaccattgccaggagcaattttgagccatatggtcgtgatttcaatggtggccatccaacaggtcggttctccaatggcaaaatcgctaccgacttcatctcccacgcgtttggtctcaaaggggccatccctgcttacctcgacccttcatatagtatatcggatttcgccactggagttaccttcccttctgctggaacccgctacgacaatgccacttccaatgttctctcagtgat

SEQ ID NO: 10443 - DNA, 418 bp, Gossypium hirsutum
  Clone ID: GOSHI-09MAY01-C8334_1
gcagattattattagttttatattcctccctattgtctttctgttttctttcttccggttaaccatcttgggaaataagtcgggaaatcgccagatacattctcatacattaaggtcacttcaaactttactcagaatctcttttagatacttctgatgttttatattcagcacttagtatttataccagacattcatttatggtattatattaagaatttaggtctttatgatcaacacaatgacaattttcgacaagagagaagctatttctgagcagaactttttggtaatacaagaacaacttaaaactatgttacttaggctatggtgtgactgtcagatggtagtaagtgctagaggggtacctaaagaaaaactagcctttgaagaactggtttggagctgcatttgatcg

SEQ ID NO: 10444 - DNA, 423 bp, Gossypium hirsutum
  Clone ID: GOSHI-09MAY01-C8254_1
atttttaacagtgcatgtctgcttcaaaactttacactgcaacaaccaaaacccaacgctctatactggtctccttcaatggcagtgcagatggctatccgagtttcacccactgcaaggctttctcttccaccaccatcaccatcaccaccttctccttcagtaccatcatccacaatctcaaccaaaccttctttaaaaccccaacaacccaaacccatctctctatcactcccaacatccacagctatctctttattggctttattttcacctccccatgaagccaaagctatcaatcttagcatagaacaaattatttcatctctcaatgaagtggagaaaaccattgatcaagttcaagaagccagttcaagtgccttggatgttgcacaacagatatttgatgttgtcggaaaagtt

SEQ ID NO: 10445 - DNA, 390 bp, Gossypium hirsutum
  Clone ID: GOSHI-09MAY01-C8204_1
aaaagacacagatatgagttctgcttccctttcctgctctctcccgcccaccgcctctgcctccgccggttcccgccgcaatccccacctccggattcccaaaacccttttcacttttcaccatcctcatcatcatcatcatcaccacccttttctactcagagttacaaatgaaactagcaggactgaagtgtctactactgatcctatcaatgagagattggaaagcgataagattgttgatgggatggactttggcgagctttgcaacgagttcgaatgcattagtagtcccttagtcgaatcaacagcaagacaactcgtacgtgacatcctagagctccgagaagggaaccgtgcactcggaacatacgctgtttctgtcaaata

SEQ ID NO: 10446 - DNA, 796 bp, Gossypium hirsutum
  Clone ID: GOSHI-09MAY01-C9974_1
ccccgcgtccgaattctttttcactcagaaagaaatgctttcttaggatttagtttgatattttctttttcttttttaattacccatttgtttctctgagaacacagtcttctcttgccagccaccttatctctctatctatctcccttcctctctttacctttcccccgtgtctctctttggttctaaaagatttcagggcttatcctctggggatttcatttcccagttctttgaaaagagaaccttaagagagacatggaagctgttttacaaaccagatgtcttctctcattgccaccaaacccaaccagagtgagagtcagaagccttttgaacccatcacaaggcttgaagcagaggctttttgcttcaaaacccttaggccttagtgatttatctctatcttataaggaagttccaagctttgttgccaagccaaatgggttgtccccaaaagggaagaacttcattcgcaaggctgaggctgctgctgcaactgatgaccagcctttgtttggtgaaactcagaaacctaagttcttgggtattgagcttgtgactcttaagaaaatatcccacttggcttaatgttcttttgtatccttttcaattatacaatccttagggatacaaaggatgttattggttgtgacagctaaaggaagcagtgctgaaattataccatttttaaagacatgggttaatttgcctatggctattgggttcatgttgttatacacaaagctggctaatgtgttgtcaaagaaggcccttttctacactgtcattgttc

SEQ ID NO: 10447 - DNA, 401 bp, Gossypium hirsutum
  Clone ID: LIB3166-020-P1-K1-F8
gaaattgttttcttaggatttagtttgatatttttttttacctttttttttttccttggtgggatacccatttgtttctctgagaaaacagtcttctcttgccagccaccttatctctctatctatctcccttcctctctttacctttccctgtgtctcttttaggttctaaaagatttcagggcttatcctctggggatttcatttcccagttctttgaaccttaagagagacatggaagctgttttacaaaccagatgtcttctctcattaccaccaaacccaaccagagtgagagtcagaagccttttgaacccatcacaaggcttgaagcagaggcttttttgcttcaaaacccttacgccttagtggtttatctctatcttataaggaagtccaag

SEQ ID NO: 10448 - DNA, 558 bp, Gossypium hirsutum
  Clone ID: GOSHI-09MAY01-C9964_2
atcatttcaggcacatcaatgtcttgcccgggtgttagtggcttagctgcaacggtcgcggcggctcatcctgaatggagtccagcagccattaaatctgccctcatgaccacagcttatgcagctgataaaactggtcaaaagatcgaagatgttgccactggaggaccagcaacgccgtttgattatggtgccggacatgccgacccagttgcagcccttgatcccggccttgtatacgatgccactatcgatgactacctcggttttctttgtgctttgaactacacaccaaatcaaattaagagcactacccacagagacttcacttgccagacaagtaaaaagtacaccttgggagattttaactacccatccttctctgttcctctggaaactgcgtcaggcagaaggggtggtgctgacccctcaagcatcatcaaatatactaggacccttactaatgttggtgccccggcaacttataaggtttatttgcattcacagactcatagcttgaaaatttcagttgagctcgtaatacttagcttcaaagca

SEQ ID NO: 10449 - DNA, 1099 bp, Gossypium hirsutum
  Clone ID: GOSHI-09MAY01-C9964_1
atctgattccatggtgccactagtttatggttgttatgtgagtaattcaagtggtggggcggttttcatggccggaagtttgattccagaaaaagttgccaggaagatagtggtatgtgatcgaggaggtagtgcgagggtccaaaagggtgttgtggtgaaggatgcttgtggcatagggatgattttgacaaacacagatacttttggagaagagttagtcgctgatgcgcatctcttaccttcagcagctgttggacagaagaccggggatgcaatcaagaaatatatatcttctactcgtaatccaacagccaaaattggtcctggaaccacaaagttgggcgttcaaccatcaccagtggttgcagcattcagttctagaggtccaaacccagtcactccagcaatacttaaaccagacattattgcaccaggggtcaatatcctagctgggtggactgctgctgttggtccgaccggattacagagtgacccaaggcatgtaaacttcaacatcatttcaggcacatcaatgtcttgcccccatgttagtggtttagctgcaattctcaaagctgctcatcctgaatggagtccagcagccattaaatctgccctcatgaccacagcctactcaacttacccaaatggtgaaaagattaaagatgttgccacagggggaccagcaacaccgtttgattatggtgccgggcatgtggatccaatcgcagccctcgaccctggccttgtctatgacaccaccatcgatgactatcttggttttctttgtgccctgaactacacacctagtcaaattaaatccaccacgcaaacaaatttcacttgtcagaaaagcaaaaagtacaccctgggagattttaactatccatccttctctgttcccttccaaactgggttgcgcagcaccgtgaaatatacaaggaccattacaaatgtgggtgtaccagcaacatacaagatttcactgtattcgcagacacaagcagtgaaaatgtcggttgtgccagcaatattaagtttcagtgcacaatacgagaagcagagctatacagtgacattcagagctatttctatg

SEQ ID NO: 10450 - DNA, 356 bp, Gossypium hirsutum
  Clone ID: uC-gsronu33B143d05b1
ggaaccccgcccacccccgaatggagtccagcagccattaaatgtgcccgcaggaccacagctcatacagcttataaaacggacggagagatcgaagatgttgccactggaggagcagctgctaccgtttgattatggtgccggacatgccgacccattggcagcccttgatcccggccttgtataccaagccacattgggtgacgggcctaggattactttgtgctgtgcactacacaccaaattgctcgaagacgcgtaactggaacagagtaaagacccagagcacgaaagagctcagcctgacagagcctagacatctacggtgctttgcttctttgatagtgcgacaggca

SEQ ID NO: 10451 - DNA, 557 bp, Gossypium hirsutum
  Clone ID: GOSHI-09MAY01-C9924_1
gcgaatacagatttgatatattcttttcttttgtgtcaggcacggccaccggcggcgagggagtctttgttagccaattatgcttcctccgacgacgatgaaccccaacaaatcactcaccctcctcctcctcctcctcctaaagtttcctctctccctcaacccaaatcttcttcccttttcactaatcttccgcagcctaaacaatccctcaaatccttcacaaaacaccacgacgaagacggaaacggcggtggaggaggtgaagtagctgttcgtgttcccaaacctgctgttcctcatcccaaaaacccatccaatcttttctctcatcttccccaacccaaaccacaacagccacccaatcctcctgtcgccaaaagaatcgttcaattcaagcctcctataaaccccaatacccacgtggattccgacgatgacgacgaggaggagaacgaaaggccaaagcggggagaatccgaaaccctagctcaaggtccttccgtgaaatcctttctatcaagcatacctgctcccaggaactccactacattagg

SEQ ID NO: 10452 - DNA, 545 bp, Gossypium hirsutum
  Clone ID: GOSHI-09MAY01-C9844_2
cgtacgcccacgcgtccgccgagatctcgtcttcctgtctcaagttagctgatctccaaagctctgtattttgctgagttctctacttcatttgcaatggcggacgaggaacctgttgatcagaaaaaatatcttgaagatggttgcaagcctaaatgtgtgaaacagcttcgttcatatgaggcatgtgttaagagaatccaaggtgatgaaagtgggcacaagcattgcactggtcaatattttgactattggtcttgtgttgataaatgtgttgcaccatcgctattcacaaaactgaaataaccagggccagagttgtacaacggtagcatcatgtcatgctgttgaatgattgtttcagacaatttggctccataaacttgacaagtgttaaaatttttttgtgttactttggaagcatttaaataaatttggatcctgggatacatccctcttgggaataggatcacaagtgttttgacaagcttgagtgcaaaaatattgactgttggataccatgatgttagcccctgagagtcttc

SEQ ID NO: 10453 - DNA, 626 bp, Gossypium hirsutum
  Clone ID: GOSHI-09MAY01-C9844_1
tccgagggaaaaaggtagccgtagcttagtattttctgctcctatccccgcgtccggccctccaaagctcttcactgttgcgtttttcatttcatttgcaatggcggatgaggaacctgttgatcaaaagaagtatcttgaagagggttgcaagcctaatgtgtgaaacaacttcgtgcttacgaggcatgtgttaagagaatcgaaggtgacgaaagtggccacaagcattgcactggtcaatattttgattattgggcttgcattgataaatgtgttgcacaaactctattctcaaaattgaaataattgagggccaatgttgtgtaacattagcatcatgtggagctgttttgagttgaaaagcgagttaattgtttcataaactattggtatccttgtaccttagacatgagatgatgcctgctgcgtctctaatctgagcactggtaaacatttttgttattgttattgtggaaacgtttactcattgtcaataaatttggttcctagtaggcatgcccgtgggcgacagagttggaacgatctttgcttacatttcccactcttcatttgaaaaaaaaaataaaaaaaaaaaaaaaaaaaaaaaaaaaatttaataaaaa

SEQ ID NO: 10454 - DNA, 609 bp, Gossypium hirsutum
  Clone ID: AI726200.1
gagtgaccttccaaagctcttcactgttacatttttcatttcatttgcaatggcggatgaggaacctgttgatcaaaagaagtatcttgaagagggttgcaagcctaaatgtgtgaaacaacttcgtgcttatgaggcatgtgttaaaagaatcgaaggtgacgaaagtggccacaagcattgcactggtcaatattttgattattgggcttgtattgataaatgtgttgcacaaactctattctcaaaattgaaataattgagggccaatgttgtgtaacattagcatcatgtggagctgttttgagttgaaaagcgagttaattgtttcataaactattggtatccttgtaccttagacatgagatgatgcctgctgcgtctctaatctgagcactggtaaacatttttgttattgttattgtggaaacgtttactcattgtcaataaatttggttcctagtaggcatgcccatgggcgacagagttggaacgatctttgcttacatttcccactcttcatttggaatagacttttgatgatgcaatgggccactagtgcttaagttggtttgtgtaaaaaaaaaaaaaaaaaagtcgacgcggccg

SEQ ID NO: 10455 - DNA, 567 bp, Gossypium hirsutum
  unsure (1)..(567): unsure at all n locations
  Clone ID: LIB3825-029-Q6-N6-E8
aactattaaataataaatattaactccattaaaataggactcccagatacctccatcgtttttttctttaaaagaaaanaatgaagagtaggggtgaatctaggcaagatgattctagcttgaagcattacaaaggccgagggttgcaatagaaatttccccgggtagctaatctgtgaatgcaacattttatccagttaaagggtaatatttaacaataatttttaacgattttaatggcgaagcatctgaagaaacttctaaaaattacacaaccaacttaagcactagtggcccattgcatcatcaaaagtctattccaaatgaagagtgggaaatgtaagcaaagatcgttccaactctgtcgcccacgggaatgtctactaggaaccaaatttattgacaatgagtaaacgtttccacaataacaataacaataacaaaaatgtttaccagtgctcagattagccacgcagcaggcaccatctcatgtctaaggtacaaggataccaatagtttatgaaacaattaactcgcttttcaactcaaaacagctccacatgatgc

SEQ ID NO: 10456 - DNA, 424 bp, Gossypium hirsutum
  unsure (1)..(424): unsure at all n locations
  Clone ID: LIB3166-019-P1-K1-B2
aaaaatgttagggcggatgaggaacctgttgattaaattaagtatctngaagagggttgcaggcctaaatgtgtgaaacaacttcgtgcttacgaggtttgttataaatgatttgttttgcaaactgagctaggttttttgaatctttttcaccattctttcaaatatatgagtttgataattgctgttacaagtattaattcatgcgtgttgttttattctttaaatattggaatttcataatgctagcaaacttttcatcaaattcatcccatttcctacttcaacccagagcttcatttctgcagaaatgctatgctgtttgtatataatgcatcagtttgggaaatcctataaaaccggcatatttactcctttatttcttgttttttaatctgcctccctatattttcatatgattttc

SEQ ID NO: 10457 - DNA, 1417 bp, Gossypium hirsutum
  Clone ID: GOSHI-09MAY01-C9814_1
cccacgcgtccgcccgcgaaacacccttttttactgtgttttattttctcttgtactaaaactgtttggtcggcaagaaaactttagaatcatgggagtgccggaaactgatccattggctcaattgagcttgccgccggggtttcggttttatccaactgatgaagagcttttagtgcaatatttatgcaggaaagttgcagggcatcatttttctctgcaaatcattggcgaaatcgatttatacaaatttaatccatgggatttaccgagtaaagctttgtttggtgaaaaagagtggtattttttcagtcctagagacagaaaatatccgaacgggtcacgacctaatagagttgcagggtccgggtactggaaagctaccggaactgataaaattattacaacggaaggccgtaaagtgggtataaaaaaagctctggttttttacgttggaaaagctcccaaaggaactaaaactaattggattatgcatgaatatcgactcattgaaacttctcgtaaaagtggtagctccaagttggatgattgggttttatgtcgaatatacaagaagaattcaagtggtcaaaaacctttgtcaagtgtttcaagcagagagcaaagcacgaatgggtcatcatcatcgtcttcttcacaactggatgacatgcttgactcattgcccgagttggacgatcgtttctttgctttgccgcgcgttaactcgttcaaaacgcttcaaaacgatgtgaaactggggtttcaaaatctgggtatagggaatttggattgggggagtcttggtgggcttagctcggtgcctgagctggtaccgagtggacaaactcaaacacaaactcaaactcagagtcaggggattactagttatggaaatagtaacgtatatgtcagcacaatgccgcctacactttgtcagatggacgtgtcgacaaataagattggtaactcggtggaagaggaagtacagagtggactcagaactcagcgagctgataactcggggatagttcaacaaaattcgaatgtgttgaacagtcataacttctctaactcgattgacccgtatgggtttcggtgcccgactcaatcgggtggatttgggtttagacaataaaaagaaaaaattatatgtagatggaccaggaaaggaatttcagaaattgtgtaaatattttgaattcttttgggctaaccttttggaattatagaaaccaaaagagtttataaagatagccaaaattcgaaattttgctctgttttttagcataattaaaattataagatttagtttccgttcataatcaaatttttcattaagttatgaaattttaattgtttccccaacacaaaaaaaaaaaaagggcggccctcgcgatctagacccaggcgtccc

SEQ ID NO: 10458 - DNA, 424 bp, Gossypium hirsutum
  Clone ID: GOSHI-09MAY01-C9804_1
agggacgcgtgttatttatccacctatttgatgttaataagaatgtaatagtggggggtactctttctccttggcctgaaacgctgtcaaataacaagaaaagggttattcaacaactggttcatgggcaagagtgtgctactcagcttcagattcttttccataatccctctgaagaaggtgggcgtttgtcggctgaggaaatacttgtgcagaacatcttgacatctttcaatcacacactttctgctctgagttgcatcgactcttctgaggtttctcagaaccagacaacctgtaatgatgattccccatggtgtgaagatcggagatccgagggttgtagtgagagcagcaagagacctggctctaaggataagaggggctgttacaagagaaagtgggatgccgtcgctcggcctgt

SEQ ID NO: 10459 - DNA, 1056 bp, Gossypium hirsutum
  Clone ID: GOSHI-09MAY01-C9594_1
agccttcggctttatttggacttaaggtggcttttggcaaatttgccaccgaaggttagtttcaagaaggcaattggaagtgtgagtgtttctggccataagtttgtgggttgtccaatgccttgtggtgttcagatcacaaggatggaacacatcaatgtgctttcaagcattgtggaatacctagcatcaagggatgctgcgatcatgcgaagtcggaatggtcatgctcctcttttcctttggtatactctcaatagaaaaggttataaaggatttcaaaaagatgttcagaaatgcctcagaaatgctcactacttgaaagaccgactgcacgaggctgggatcagtgctatgctaaatgaactcagcagtacggttgtgtttgagcggccccgggatgaggagtttgttcgtaggtggcaacttgcttgtgaagggaatatagcacatgtggtggtgatgcctaatgtgacaatcgaaaaactggatttcttcttgaatgaattagttgaaaaacggtcgacttggtatcaagggaatgttcaacctccttgtattgcagcagagatagggaaagcgaattgcgtttgtgctctgcacaagtgaaaaaaaatatcagtctatgattcgggaattcctctattttcatgcagcttgtcatttggttttaatgaaatatagattatattcataagtttttcgttttacattctcattgttatggtaaatagtagcgcctatcgacatgttcatatattggctattctgtctgccgtggtcaggggcttttgtgtgcggcttgtgacatattcatataccaactttattgaccgagtaacctatgtctggtcttgtaaggcatatgtcctgtaatgctcctaccacacttcgattatgtattatgccgtcatttttatgctgcacttctcgttgcatgaagttgtgagtaggggtgtaattgagtcgagctatgttaaaatattgttaagcttgaacttgatatttggctcgagtttgatcggatatttatttttaagttcgagttcggcttgg

SEQ ID NO: 10460 - DNA, 581 bp, Gossypium hirsutum
  Clone ID: LIB3585-025-P1-K1-F7
gaagacccacgcgtacccagacgctcggtggcagctattcctaacgagactgtcgaaacactcgatgtcttcttgaatgaatgagttgaaaaacggtcgacttggtatcaagggaatgttcaacctccttgtattgcagcagagatagggaaagcgaattgcgtttgtgctctgcacaagtgaaaaaaaatatcagtctatgattcgggaattcctctattttcatgcagcttgtcatttggttttaatgaaatatagattatattcataagtttttcgttttacattctcattgttatggtaaatagtagcgcctatcgacatgttcatatattggctattctgtctgccgtggtcaggggctgttgtgtgcggtttgtgacatattcatataccaactttattgaccgagtaacctatgtctggtcttgtaaggcatatgtcctgtaatgctcctaccacacttcgattatgtattatgccgtcatttttatgctgcacttctcgtagcaagaagttgtgagtaggggtgtaattgagtcgagctatgttaaaatattgttaagcttgaacttgatatt

SEQ ID NO: 10461 - DNA, 414 bp, Gossypium hirsutum
  Clone ID: LIB3149-013-Q1-K1-H5
taccgggttggaacacgcgtccggatgccttttgtcaaacgggcaccgaatgtttgtttcaagtttccaattggaagtgtgagtgtttctggcgataagtttgtgggttgtccaatgccttgtggtgttcagatcacaaggatggaacacatcaatgtgctttcaagcaatgttgaatacctagcatcaagggatgctacgatcatgggaagtcggaatggtcatgctcctcttttcctttggtatactctcaatagaaaaggttataaaggatttcaaaaagatgttcagaaatgcctcagaaatgctcactacttgaaagaccgactgcacgaggctgggatcagtgctatgctaaatgaactcagcagtacggttgtgtttgagcggccccgggatgaggagtttgttcgt

SEQ ID NO: 10462 - DNA, 374 bp, Gossypium hirsutum
  Clone ID: LIB3147-011-Q1-K1-H8
cccacgcgtacgggtatctgggatgggctattcacaaagagtagtgcattcaaagagggagatatagcacatgtggtggtgatgcctaatgtgacaatcgaaaaactggatttcttcttgaatgaattatttgaaaaacggtcgacttggtatcaagggaatgttcaacctccttgtattgcagcagagatagggaaagcgaattgcgtttgtgctctgcacaagtgaaaaaaaatatcagtctatgattcaggaattcctctattttcatgcagcttgtcatttggttataatgaaatatcgatgagattcataattttttcgtttacattctcaatagtactggaaatagtcgggctattcaacttgttatt

SEQ ID NO: 10463 - DNA, 590 bp, Gossypium hirsutum
  Clone ID: GOSHI-09MAY01-C9544_1
gtcactctctgttactctctgttattactctctctttataaatgtactctcttgccttgagataaggataaacatactgtcacacatcacagcaaaaaagaaagaaaagtagagagatctaggagggggcgactgtaaccagagaacacaccaatttttcagagaaaaaaatgggtgggaaaagtaccatggctgctcttttagtaattttagctgcaaatctgttgcagagtacttatggcagaacttacacagtgggagactccaccggttggggaatccctgctaataataacgatgatttttatgatgattgggctgacaataaagatttccttgttggggatgttctagtgttcaactttactaatgggcaacataatgttgtcgaagtgaccgaaggtggttacgatgcttgcaacgctgcaaatcctgtatctacggtgagcaccggaccggcgaggattacgcttaacaggacaggggagtactactttatttgtggtatccctggtcactgttctgccggccagaaactaaacgtggaagtacgaaaatggtaccccaccggcggtgttactccgtcaacc

SEQ ID NO: 10464 - DNA, 558 bp, Gossypium hirsutum
  Clone ID: GOSHI-09MAY01-C9514_3
cccacgcctccggcggccctctttttcctctaccaggtgattttagctttgtgtgagttcctttaagcaatccgccaagatgcagaacgaagagggtcaaaacatggatctttacatccccaggaagtgttccgccactaacaggctcatcacctctaaggatcacgcttccgtccaaatcaacgtgggacacttggatgagcttggcagatacactggcacattctccacttttgctctttgtggatttgtccgtgcccagggtgatgctgacagtgctctcgacaggctttggcagaagaagaaagctgaagtccgacagcagtagttggatacctttttaccctagtctatctccgagcttgggaatgaaaaatctcatggcagcgactattatgttctaggtcttttcaggttaaactatgtcaaatttatatttttgttgattggatgacatttcagacttggttttcttatatttgaacctaatatatatgccttcggtcatgttaatcgacaaaaaagaaaaaacaaatgtaaaaaacaaaaaaaataaaa

SEQ ID NO: 10465 - DNA, 579 bp, Gossypium hirsutum
  Clone ID: GOSHI-09MAY01-C9514_2
cctgctgcagcagcagcctctctttctcatcttgtgatttgagcttcgtgtttgtgttgggttaagcaattcgccaagatgcagaacgaagagggtcaaaacatggatctttacatccccagaaaatgttcggccactaataggctgatcacctcgaaggatcatgcttctgttcagattaatgttgggcatttggatgagcttggcagatacactggaactttctccacttttgctctttgtggttttgtccgtgcccagggtgatgctgacagtgcacttgacaggctttggcagaagaagaaagctgaagtccgacagcagtagtgggagttggattgctttttactacttgcttggtctctgaattttggagggaaaatgtgttttttttttaaatcagtgacctttaagttctatcttggtttttttaaaatggattatgttgaatttgatctgatgatgtttcgtacctaatttgcttgcattgaacctaatatattatctttttgtcgccctattaattttgcattaaatcttgtattcggaggaaatgtcaaaggttcaaaacgtcggttg

SEQ ID NO: 10466 - DNA, 565 bp, Gossypium hirsutum
  Clone ID: GOSHI-09MAY01-C9514_1
tcccacgcgtccgagcagcctctctttctcatctggtgatttgagctttttgcgtttcttgttcggtttagcaaattgcaaagatgcagaacgaagaaggtcaaaatatggatctttacattccccgaaaatgctcggccactaacaggctcatcacctcaaaggatcacgcatccgtgcagatcaatgtcggtcatttggatgagcttggcagatacactggcacattctccacctttgctctttgcggctttgtccgtgctcagggcgatgctgatagcgctcttgacaggctttggcagaagaagaaagccgaagtcaaacagcagtagtcgggtaccgttttattacccgtctctgaacttggtagggaaaattcttggcaatgactgttaaattctagtttgtttaggtagataaagttgaaagttgtttttgtcaaattgttgatgtttagtctcttgcattcgatatatatacacacacatacataccaatgtcatgctcatgctcagtttttgatactcacatctaaatctatgatgatatttttatgctttagaat

SEQ ID NO: 10467 - DNA, 571 bp, Gossypium hirsutum
  unsure (1)..(571): unsure at all n locations
  Clone ID: LIB3825-018-Q1-K6-D10
gtgattttagctttgtgttagttcctttaagcaatccgccaanatgcagaacgaagagggtcaaaacatggatctttacatccccaggaagtggtatttttatttgcttcgtcatgtttatgttcttacgatatttgtttatgtaggaagctttatatgtagttcgttgttattgttgttgcagttccgccactaacaggctcatcacctctaaggatcatgcttccgtccaaatcaacgtgggacacttggatgagcttggcagatacactggcacattctccacttttgctctttgtggatttgtccgtgcccagggtgatgctgacagtgctcttgacaggctttggcagaagaagaaagctgaagtccgacagcagtagttggatacctttttaccctagtctatctccgagcttgggaaagaaaaatctcatggcagcgactattatgttctaggttttttcaggttaaactatgtcaaatttatatttttgttgaatggatgacatttcagacttggttttcttatatttgaacctaatatatgccttcggtcatgttaatcgac

SEQ ID NO: 10468 - DNA, 443 bp, Gossypium hirsutum
  Clone ID: LIB3147-013-Q1-K1-D6
cccaaaacaaaaaacctaaaccccattgcttttgcggccctttttttcctctaccaggtgggtttagctttgtgtgagttcctttaagcaattagccaagatgcagaacgaagagggtcaaaacatggatctttacatccccaggaagtggtatttttatttgcttcgccatgtttatgttcttacgatattgtttatgtaggaagctttatatgtagttcgttgttgttgcagttccgccactaacaggctcatcacctctaaggatcacgcttccgtccaaatcaacgtgggacacttggatgagcttggcagatacactggcacattctccacttttgctctttgtggatttgtccgtgcccaggttcgttcattgtttcaagctcgtgttaagtctatgcttgttgatgttcattattaatgcttgtgatgttttatga

SEQ ID NO: 10469 - DNA, 397 bp, Gossypium hirsutum
  unsure (1)..(397): unsure at all n locations
  Clone ID: uC-gsronu33B108h02b1
gggccgctccgcacattcttggctcgtcccactcgtccgtgtttttctactaataggctgatcacctcgaaggatggtgggtctgttcagattaatggggggcattaggatgagcttggcagatacactggaactttctccacttttgctctttgtggttttgtccgtgcccagggtgatgctgacagtgcacttgacaggctttggcagaagaagaaagctgaagtccgacagcagtagtgggagttggattgctttttactacttgcttggtctctgaattttggagggaaaatgtgttttttttttaaatcagtgacctttaagttctatcttggtttttttaaaatggattatgttgaatttgatctgatgatgtttcgtacctcannnaaaa

SEQ ID NO: 10470 - DNA, 554 bp, Gossypium hirsutum
  Clone ID: GOSHI-09MAY01-C9534_1
cgaagaatagggcatgtttccgcagtctctttatcgtagcagctttggtctgcggtgcttatttcattagtaatgcatttatcactaacgaatacaaagatagattatcgagatgggaagtgattaatatgcttcggaattcaaaatctgttacgtgcaagaatcaatgcaggccacctgggagtgaagcattacctcaaggaatcgtggtcaaaacatcgaacttgcaaatgcaaccattatggtgcgtcagtgtgaaaaacgtcaatcctgcgacagcttcaatcttgttagccagtgctgtcgggattaagcaaaaggaaatcgtggaccaaattggtaaaaagtttcccgtaagtgatttcgtcgttatgcttttccactacgatggtatcgcggatgaatggaaagattttgagtggagtgatcgtgccatacacgtgtctgcagtgaatcaaacaaaatggtggtttgccaaacgtttcttgcatcctgatatagattccaaatacacgtatatattcctttgggatgaggatcttcgagtggattac

SEQ ID NO: 10471 - DNA, 498 bp, Gossypium hirsutum
  Clone ID: GOSHI-09MAY01-C9494_1
cgcatagataatcattcagaggattcaaggagaaaggattcagagaattggagagttgtggagagtatggatggagggagatccacgaagatttctagaccggaaaaaattcttcttgagattgtgtctgagtcgattcctgccatggctcaaataatgcaggagctgcctgaagaaaccctcgaatcgaccaaagaatacttgaggaatcttattggaaacccagagtggaaggaagaattagttggacttcaaaatcgacttgacaggagatctgatcttagcaaggagactctctcaaagtgccataaggatcagctagcaatcttagttgcagtgaaaatgggcctgaaaagcttcttgtccgggaaagtaggactttccatgaccgagctgctggagattttcttgtttatgagatgtaggaatctgacttgcaagagtgtactacctgttgatgactgtgattgcaggatatgctcaggaaataaagggttt

SEQ ID NO: 10472 - DNA, 786 bp, Gossypium hirsutum
  Clone ID: GOSHI-09MAY01-C9474_1
cagaaagagaaccttgggtgttttcttccgcttgagttatctccatttgtccctgcaatttgaggtaagccaaagccagcctctttgcttctcttctttacgagtattaatactttttattaaattagaaatcggtcgttccttttttccccgaaaagtctgatctttggaatgaactcatcagccgttctcagaaggcaaaaactcttaaagctcataaaaaatctacatatctttcatccctggtgcccaaaacacaaaacccaccaaaacccatgtgctcaaatacataatctcttcaagggtttttggggtttcccaggagttcaactcaatccaccaagttccccgagtaccagatgccctctgtcacttggggtgttgttcaaggcaaaaaagagaagctagtgaaccgtgtcaggatctgtgattatcttaagaccttaggaattatccctgatgaattagagaatctagaattaccctctactgtaaaagtgatgtctgagcgtgtccagtttttacagaaacttggattaactattgatgatatcaacgaataccctttaatgcttggctgcagtgtccgtaaaaacatgatacctgtattaggttacttggaaaaagtcgggattccaaagtcaaaactaggggagtttgttaagaactatccgcaggttttgcacacaagtgtggttgatgagcttggtcctgatattaagtttcttaaggggcttgatgttgagaagcaagatattggatatggtctacagaagtatccataac

SEQ ID NO: 10473 - DNA, 665 bp, Gossypium hirsutum
  Clone ID: GOSHI-09MAY01-C9414_1
cccactcgtccgcccacgcgtccgcccacgcgtccgcttcagggtggagtgagcaaataagggtttgctccgcgacgtcattagaggggcctctggatgatggatattgctggcgaaaatatgggcagaaagatattcttggatccaattttccaaggggatattatcgatgcactcatcgtttctcgcaaggctgcttagccggtaagcaaattcaaagatcagacgaggacccaacaatcttcgaggtgaaatatcgtggaagacatacctgtaaccaagtctctcacttggttgctacgcccaaagagaaaggcaatcattatcgggaaaagcagcaagttgaagagaaacaaaagcaatccgaggaattgttgttgagttttgaaacagggcttaaggttaatacagaggacttggacaacagagagaacatatttccttcattttctttccccattgagtcagaggaagttcaaaatgggttattgcgtaattccctaatgaaaaacatatctccggcatttgtgtcaccagctacatctgaatccaactattttccagtgtcagcgttccacatgggcagctttgatttcagccaaaatgtgcagacttcggaatctgaacttacagaaataatctctgcaccagcttcagttactaat

SEQ ID NO: 10474 - DNA, 1603 bp, Gossypium hirsutum
  Clone ID: GOSHI-09MAY01-C9434_1
cctttttctccaaagtccaaactccactagcaacaagaagatggagagtggagcaaagaaatggggtttccaagggaagcagggcctggaggcagcgtccaccaccaccgtccgaggatatctcaacctattaatgggcaacatcaaccaagataattgccttacagtcgttcctctcggtcatggcgacccctctcattttccaagcttcaggattacccctgctgctgaagatgccatcgttgatgctctacgttcggctaagcataattgttattcgaccactgttggtattcttcccgcaagaagggcacttgcagattacctcaaccgtgaccttccctaccactcatcgcccgatgatgtttatttaacaaatggatgtactcaaggaatagaagttgttatatcaattctttcccgccccggtgccaatattttgcttcctagaccgggcttcccactctatgaagcttggtgtgcttataaccatcttgaaatgcgtcattatgatcttcttcctgaaaaaggttgggaggttgatcttgatgctgtagagactcttgcagatgagaacactgttgctatggttattataaatccaggcaacccttgtggaaatgtcttcagctatgaacatttgaacaagattgcagagacggcaagaaagcttgggattttggtcattgctgatgaagcttatgacaatctcgcatttggaagcactccatatgtgccgatgcgagtgttcggattaaccgtgcctattctcaccttgggttctatatcaaagagatgggtagttcctggttggcgcctcgggtggcttgtcacaagtgatcccgatggcattcttcaaaaatctggggtaatcaattcgatcgcaggattcctcaatatctcttctgatcccgctacatttatccaggcagcgattcctcaaatccttgagaatacaaaggaggattttttctcaaagattatcagcaccctgagggaatgtgctgatatatgctacaatagaattgaagagataccttccttaacttgtccaaagaaaccggaaggatcaatgtttgtaatgttgaagctgaacctatcaatgttggaagacattaatgatgatgttgatttctgcctcaaggtagctaaggaggaatcagtcttcattctaccagggatagcaatggaattgaagaactggcttcgcgttacgtttgctatcgagccttctcttctccaagaaggattggcaagggtaaaagccttttgccaaaggcatgccaagaagcaataaaataactgttgtaggtggtgtgatcaacatgaaggccttgtatttcatacccagttcaatttgctggtaaacttacgtgtttaccaataaactattcccttaatagtaacatgatcccctgtttctgtgatcatgcaactctttcaaagatgctagcactgggttttggtggtcaactgctttactttgatattcggattatggtttaaacaaggatgctgcacaagttgtattaaacgccggctattattaagcgtgtaatgcaaatgtgactatatcattcgcctctccttcacaaagagacac

SEQ ID NO: 10475 - DNA, 299 bp, Gossypium hirsutum
  Clone ID: uC-gsronu33B002c02b1
gttatcatctaccaagaaaagcgcccaacaggggggccgggtaggacatggagacctttctcatcatccaagcgggaggacaacccccggtgctgaagatgccctagtggacgctctacgttcgggtcagcataatagctattcgaccactggtggtattcttcccgcaagaagggcactagcagacaacctcaaccgggaccttagctaccacttatcgcccgatgatgtacatcgaacaataggatggactcacggaatagcagttggcatatcaatactgtcccgccccggggcca

SEQ ID NO: 10476 - DNA, 404 bp, Gossypium hirsutum
  Clone ID: GOSHI-09MAY01-C9424_1
ctttgaagcaagtattgggagaagaagcagggattaggaacaagagagcagatctggaagtgataacattgatggagtttcaggcgacgatcaagatgccgccaacaaccgtcctaggaagaagagataccaccgccacactcctcaacaaatccaagagcttgaagctctctttaaggagtgccctcatcccgatgagaaacagagattggagcttagcaaaaggctttgcttagaaaccaggcaggtgaagttttggttccaaaaccgccgtacgcaaatgaagactcaattggaacgccatgagaactctttgctgaggcaagagaacgacaagcttcgagctgagaacatgtctattagggaagctatgaggaaccccatttgcaccaactgtgggggtc

SEQ ID NO: 10477 - DNA, 1076 bp, Gossypium hirsutum
  Clone ID: GOSHI-09MAY01-C9744_1
ccggaccggaaggcccggcccaggcgaccgctttaaaagaccgattgaaagagcttggttatgagctttacgatgaacagctgggcaacatattctggcgcttcaaagcagtagctgaacaaaagaagagagtcattgatgctgatctaatagccttggtttcggatgaagtttttcaacctgaagttgtttggaagcttcatgatctgcaggttacttgtggaactcttggtctttctactgccacagttaaactcattggtgctgatggcgaggaacatgttgcatgctcagttggaactgggccagtagattcagcttataaagctattgatctcattacaaaggaaccagttacacttcttgagtactccatgaatgccgttacagaaggcattgatgctatagccaccacccgcgttctaattcgtgctgagaaaagccgcatatcaactaatattttgaccggtgaaattgttcagcgaacattcagtggaactggggcaggaatggatatcgttgtttccagtgtcaaggcttatattggtgcattaaataagatgttgggtttcaaggaacaatatcagacaaaagcttcgatagaacgaaccccggtttctgcttaaggcgggtatcgatcccgtacgtgcatgcatcatgtcagttttgtgaatacatgtgctctccttttagtgacaatgctttgaaaggtacttgtgtatacaagtttcataaacagatatgtttgtttcttttgctacatcatagacagaaatgttaagtaaagacaatgttggttttttgttatttcttgtgaatttgtagtaagaagttgtcaaaacttagtgaagcgtcagttgttatattaaagacaaacaagtttctttggaccaaaaaaaaaaaaaaaaaaaaaaaaaccaaaaaaaaaaaaaaaaaaaaaaaaaaaaaaaaaaaataaaaaaaaaaataaaaaaaaaaaaataaaaaaattttaatatttaaaaaataaaaaaaaggggggggcccttttaaagaatcaaattttatttcccttggtatggaaattattatttttt

SEQ ID NO: 10478 - DNA, 605 bp, Gossypium hirsutum
  Clone ID: GOSHI-09MAY01-C9764_2
aaagaaggggatccccttacaatattagaatcggcctcatatagccgaaataaaaaagaaaaataaaacaaaaatctccctttttttcatattttcgtcctttttttgctgttattctctgctattctcgtgtcttctctgttgttgctgcgttttttgtccgtctttgtttgttttctgtgcaggtacaggtacggagaccgtacggtgacgtggcgcggtgcaacgcgtgaaggcgtggtccctggtggcggcgtggctcggctcggaggcgtggctttggcgcggaggcactacatgcgcgcgggcataacacgtgcgagggggaaggctggctctgttgcggcgctggaggctcaccctagctgctagggtttcgcttatggctttgggcttaggtgatttgggccattgggtttagtgggtcaggctggtattgggttaacagtttaggcttgggactttggattttgtaatcgggtttgggcttaatctacttggtttgtaatttggactgttaataatttaattttttatattattattttttcattcggcttaaaaaaaaacccacgcgtcaacgaacgcgtgggcggacgcgtggg

SEQ ID NO: 10479 - DNA, 920 bp, Gossypium hirsutum
  Clone ID: GOSHI-09MAY01-C9764_1
aggccctttgaaacaaaaacctagcactccccttttctctcctgcgccgttcatcgcctcagaacaggggctttccgaatcccatgctcgactccgattatgacggagagagcacaaggccggtcccaggtgcgttctgactcctctttttcttttatttgctttcttttacaaacaaataatagcacaacgtgaacgtttttggaatagaacagaaaaaatcgaaaagaaaaaaaaaactttcagatcacctttttctttgaaactttttgtttttttgtatttccaccggttttttgatatacaatgcgtaaaaaaagaaggggatccccttacaatattagaatcggcctcatatagccgaaataaaaaagaaaaataaaacggaaatctccctttttttcatattttcgtcctttttttgctgttattctctgctattctcgtgtcttctctgttgttgctgcgttttttgtccgtctttgtttgttttctgtgcaggtacaggtacggagaccgtacggtgacttggcgcggtgcaacgcgtgaaggcgtggtccctggtggcggcgtggctcgcctccgaggcgtggctttggccccgaggcactacatgccccccggcataacacctgtcgagggggaaggctgggctctgttgcggcgcctggaagctccccctacctggctaggctttccccttattggctttggggccttaggtgtattgggggcccttggggtttagttgggttcaggctgggttttgggggtttaacattctaaggcgttggggaaatttggaatttttgttattctgggttttggggctttaatcctaactgggtttcgtgtactttgggaacggttaaactaactttgaatgttgttctatgtgacgcaaaagaaaaacaaataaa

SEQ ID NO: 10480 - DNA, 937 bp, Gossypium hirsutum
  Clone ID: GOSHI-09MAY01-C9714_1
cccacgcgtccgaaaaccgcaagcttatgagggaaatgtaagtaacaccccgcgcgtccggtcaaaatttacgagcacaagtgttactgaaaaacagtatcaagcccctttagctcgggtgtcttctttggaagatccatgtactgaaatttcagagtatgacaaagcacctccgacaagcatgcaggttgcagcaacagattcggagaatgttagagctcttgtagctgacacgaagaacttgaaactggaaaagattcctgaagtgttggataaatctcaagtaaaggagccatcgaaagggtttcgacggttgttgaagtttggaaaaaggaatcatagctcagctagaagtgaacatagtattgactcaaacaatgaggctgatgagttggttgcaaacggtgcctcatctagtgaagttcaatcgttgaagaacctaatctctcaggatgaaaccccgacagccgataatactccacaaaagtcttctcgtacattttcattgttatccccgttccgaagcaagacaagtgaaaagaagtatatggcttgacaatgaaggtgaaaccccaaactttgttttcttctgcggatttggctgtcttaacatttacatttccctcgcctccgccctcccctccgtgcaacctgaaaaaaaagtatgtcccattaagaatatatgtttgtaaaaaaatgttctgcagtcgcattcattggttaatgttgttgaactgaattggctttttagcagactcttcccctttacatgattatatatagcttattttttctacagccaaaaagaccataacttaatatagaagccaagagaatgtgaaagattattgactcatacacgctatagatttagtttacacaagtctctctacacgatactttttgtcttttcacataaaccgctcgaagaaatcta

SEQ ID NO: 10481 - DNA, 316 bp, Gossypium hirsutum
  Clone ID: LIB3146-025-Q1-K1-G7
cccacgcgtccgcccacgcgtccgtgcaacctgaaaaataagtatgtaccattaataatatatgtttgtaaaaaaatgttctgcattcgcattcattggttaatgttgttgaactgaattggctttttagcagactcttccactttacatgattatatatagcttattttttctaaactaaattatgtctataaccactgggaagtcaataatatctgtcagataaatgatcatacagtcttttgaagtgttttgcacgagtctctctacattatactatcatctctaaaagagcactctccatggaaaatctttt

SEQ ID NO: 10482 - DNA, 432 bp, Gossypium hirsutum
  Clone ID: GOSHI-09MAY01-C9704_1
ttttaatattcaaatttcaataatcagatagagaagaaagaaaaaacttttgtttccgctttgctcgtcaattccgtggtagatctgggacactgcaatttggttccagagagggaaaactttatgcaaaattcgaactttgtgattttctttttcattctgggtacaaagttaaaaactgacaaaacggcgttgatcgcaattcatggagaattcgagtaaccctgatggggaagacacaagaaatcagacaataccttccacttcttcaacatcctcctccgatgattaccgtttgtttgatcgtcaaggttctcttcaccagtttctaggtggtggtaaagcggctgatatactcttgtggaagcggtggagtgtttctctcggtgtcattgttgttgcttctgttgcttggctcatatttgagtggtc

SEQ ID NO: 10483 - DNA, 406 bp, Gossypium hirsutum
  Clone ID: LIB3149-060-Q1-K1-C11
ctcaaaccaaaaatctttgtcctctttttttgtgtctctttcaaattttcatttcaaggtttttggtatgaggagatacagtcctcaatactatagtccaccaaggagaggttacggaggcagagaaaggagtcccccaaggaggggctatggtggtggtggtggtggtagtggtggcggcggcggcggtggaggagggtatgggagaaggagggagcagaataatggaagccttttggttagaaacattcctttggattgcagacctgaagaacttcgaattccattcgagagattcggacttgttcgagatgtgtatattccgaaagattactatacaggggggtatattggtttgaagtaaaaaacaagccgaagccccacatttgatgaatccgaggatttt

SEQ ID NO: 10484 - DNA, 404 bp, Gossypium hirsutum
  unsure (1)..(404): unsure at all n locations
  Clone ID: LIB3166-017-P1-K1-F8
gaaacattcctttggattgcagacctgaagaacttcgaattccatttgagagattcggacttgttcgagatgtgtatattccgaaagattactatacaggggctcctcgagggtttgcgtttgtgcagtttgtcgattcttatgatgctgccgaagctcaatggcgcatgaatgggaagatatttggtgggagagagatatctgtcgttgttgctgcggaatcaaggaaaaggccagaggagatgcggcataaagcaaggcaaagaggaccatcgggatacggnggacgatcatcttattatgggcgttcccggtctcgttcagcatcttcaacgcgctctcctngccgtccttcaggttctagaggccgatatcgctcaaggtcgtactcccctgcttcaaga

SEQ ID NO: 10485 - DNA, 705 bp, Gossypium hirsutum
  Clone ID: GOSHI-09MAY01-C9684_1
cggacgcgtgggctaccatagtgcgattgggaggacgaaaccaacaaagaaaagcggacagtgaggagcaacagcagcaacaatggtgaagttcctgaagccaaacaaggcggtggttgtccttcagggtcgctacgccggtcgtaaggcggtgatcgtcaaatccttcgacgaaggaacccgcgaccgcccttacggtcactgtttggttgcagggattaagaaatacccaagcaaagttatccgaaaggactcttccaagaaaacggccaagaaatcccgcgtgaaatgcttcctcaagctcgtcaattaccagcacgtgatgccgacgcgttacaccttggatgtggacttgaaggatgtggtcaccgtcgactccctccaaagcaaggacaagaaagtctctgcttgcaaggctaccaagcagaagctcgaggagaggtttaagactgggaaaaacaggtggtttttcacaaagttaaggttttgagatctgggtttctgttattttggattgattttgagagtttatttagtgttttgaccatttgttttatcatcacatattattgctggttttgagcatcgttttatgataaatttgagctttgctttatgataaaagttgcaaattgaggggatgtggttttctcccaaacatgaagctttaggcaaatggttaagaaaaaaaaagagagctagttt

SEQ ID NO: 10486 - DNA, 915 bp, Gossypium hirsutum
  Clone ID: GOSHI-09MAY01-C9644_1
agccttccgcggacccgtgggtgcagtcaaggaattcttgaatgaggagccgtatactgctcaagaggttgagaaaattactcagaaggatcttccatcaatcttgcgtgataacccaacttctttagatgtgctaaaagcggccaagcatttcaagttgcatcagagagctgctcatgtctactctgaagccaagcgtgtttatgctttcaaggatactgtggcatcaaagttaagcgaggaggaaaagctcaagaaactcggcaatcttatgaatgaaagccaccacagctgtagtgttctttatgaatgcagctgcccggagttggaggaaattgtaaaagtatgccgagacaatggcgctatgggagcaaggcttaccggagctggatggggtggttgtgccgtggccttggtaaaagagagtatcgtaccacagttcatcctcaatttgaaggaacaattctacaagtctaggattgacaaaggtgtgataaaccagaatgaccttggtctctatgtgtttgcttcaaagccttcaagtggtgctgctattcttaaattttagtatgtttcatttaacttattggttgtgccataaaacattttcaatttcacatgccgaagatttaaaaaagggaaaatcagtttagggaatagagaacatcaaaattcaataaaaatttgatcgttttgtgtatggttttagacaaattggacactgatttcgctctatgtaaatggattagtgacgttgagcgggtagacattaatttatttaccggctgtttctctttcttcaaaatcatctcttatttatcctaagaccgacttgaaaatggttttttttccttaatttttggaagttattattattataaatacaaaaaaaaaaaaccatgagttgtacgtggt

SEQ ID NO: 10487 - DNA, 412 bp, Gossypium hirsutum
  Clone ID: GOSHI-09MAY01-C9674_1
gagaatgtttccatcattccaattgtggggttaggagggttaggaaagactgctttggcgcaatttgtctataatgatgaaatggtcaaaaatcattttgagttgatgatgtttgtgtgcgtttcagatgtttttgatgtcaaaataattgtagaaaatatgatcaaatctgcaactggtgaagcaccaaatcaaaaactcgaaatggatcaattgcaaacccaacttcgaggaaaaattggtgggaaaaaatatttgcttgttttggatgacatttggaatgaggagtgggaagaatgggttagtttaaaagagttattagtaggtggggctaaaggaagtaggataatagtaactactcgctctttgagagtagcaaagattacaagtaaatgtcaacctaatgttctga

SEQ ID NO: 10488 - DNA, 518 bp, Gossypium hirsutum
  Clone ID: GOSHI-09MAY01-C9624_1
agctgtttggctgatagtaaagtctgtactgatttccacgataagtatctgaatacttctgcctcggagttttcccagacgcatttgtcttccgttcagtctggttgctgtaagccatcaaacgactgccaattcacgtatgttgggccgacgaactggaccagagggagtgcggaatccaacaatcccgactgcaatttatggaataacaacttgaatactctatgcttcgactgccagtcatgcaaggctggattcatagacaacctcaggagttcttggaagaaggtggcgattgtcaacattgcgttcctcatcttcctcattattggctactctgttggctgctgcgctttcaggaacaataggagagacaattattatcagcagcagacctggaaaccttgagcgaatctttgttcttagtttccgattttggatatgggtacacgtacgttgggtctgggctgctgtatttgcttcctattgttttctgcattgtgttttagtgtctatgc

SEQ ID NO: 10489 - DNA, 313 bp, Gossypium hirsutum
  Clone ID: LIB3272-060-P1-N1-G7
aagcatataaacgatcaaatatataatatccaaaatgtgggggagaaaaacggctatacaataaaagatccaatatgtaaagcatagacactaaaacacaatgcagaaaacaataggaagcaaatacagcagcccagcccatatccaaaatcggaaactaagaacaaagattagctcaaggtttccaggtctgctgctgataataattggctctcctattgttcctgaaagcgcagcagccaacagagtagacaataatgaggaagataaggaacacaatgttgacaatcgccaccttctttcaagaactcct

SEQ ID NO: 10490 - DNA, 434 bp, Gossypium hirsutum
  Clone ID: LIB3543-022-Q1-K1-F4
aagcatataaacgatcaaatatataatatccaaaatgtggaggagaaaaacggctatacaataaaagatccaatatgtaaagcatagacactaaaacacaatgcagaaaacaataggaagcaaatacagcagcccagcccatatccaaaatcggaaactaagaacaaagattagctcaaggtttccaggtctgcctttgtcagcaaagctcatttgaaatccattggaaggactcttttcaatatatattgcgcggcatgtggttcttgtgtattctgtggttttccttctatttagaaattgagcttggttttattgaagtatgttatcttagcttcggtgctgatgcaggctgaagtttttatttccttgtcatatctcgtttcatttcaaagcaaaatgttccaagttaatctgttattcttctttttaat

SEQ ID NO: 10491 - DNA, 392 bp, Gossypium hirsutum
  unsure (1)..(392): unsure at all n locations
  Clone ID: LIB3166-016-P1-K1-E2
gtaagccatcaaacgactgccaattcacgtatgttgtaccgacaaactggaccagagggagtgcggaatccaacaattccgactgcaatttatggaataacaacttgaatactctatgcttcgactgccagtcatgcaaggctggatttatagacaacaataggaagcaaatacagcagcccagacccaacgtacgtgtacccatatccaaaatcggaaactaagaacaaagattcgctcaaggtttccaggtctgctgctcataataattgtctctcctattgttcctgaaagcgcagcagccaacagagtagacaataatgaggaagatgaggaacacaatgttgacaatcgccaccttcttccaagaactncgcttttcatactcattt

SEQ ID NO: 10492 - DNA, 156 bp, Gossypium hirsutum
  Clone ID: LIB3149-031-Q1-K1-H6
gcagacctggaaaccttgagcgaatctttgttcttagtttccgattttggatatgggtacacgtacgttgggtctgggctgctgtatttgcttcctattgttttctgcattgagttttagtgtctatgctttacattattggatctttaattgata

SEQ ID NO: 10493 - DNA, 363 bp, Gossypium hirsutum
  Clone ID: uC-gsronu33B062d01b1
ttattttcgctcttgagctcaagaagctgcggatagacaacagccttttggatgtctcacagtctgatttggaagttaatctttttaagctaatggagcgccgtggctctggggaagcggtcttggaccgtcccatggttgtagcctgacattcaccatcaaaaggtccctttggcgacacttgttgaacacacgccctgtgttgctactgatactcttccttctcatctcgcccagtggctgaaccttgcctaatgtcttacagacagatatggtttatgaatcgctgcgcacagcaacggatgcaccattggcatccactcctgtatgggaacgggatttcagctcctcccaggagtttgg

SEQ ID NO: 10494 - DNA, 351 bp, Gossypium hirsutum
  Clone ID: LIB3166-011-P1-K1-C2
taactgtcacaaagattccgaatcatgtagcaattaatatcgctcttgagctcaagaagctgctgatagacaacagccttttggatgtctcacagtctgatttggaagttaatctttttaagctaatggagcggcgtggttatggggaagagtatataaatcggctcaagatgattaccagatttcaccatcaaagggttcctttggtgattcttgtttgtggaactgcctgtgctgggaagcctacaatagccacacaacttgcacagaggctgtacttgccttatgtatcacagacagctatggtttatgaatcgctatgcacatcaactacatgcaacattggcatcc

SEQ ID NO: 10495 - DNA, 671 bp, Gossypium hirsutum
  Clone ID: GOSHI-09MAY01-C9144_1
gtttgaatgtgatactacttataccttatttttactttccctttatcagggtatagatacttcaactgtcacctagctttgggtttgaatgtgttaaagtttttgtggatgatgaagagctttgtagcaatctttttcgccatcctgctgtttttggcaaccatggaagctgatggaaaacgaatgaccctggagaaggagcgcgagccaagtaatcatcagctgggtcgaaaggccgacatcggagctaaagacgatatagatctaacgggagaagatggttctgctatagaattgatcgcttccaagaatagacttatcgattcacgtcaccatatctacatgaacgataccagccctatcccccgcaagcatccgtgacactgataagcttgctagttgtttacagcttggtttgagctttacggaatatggtgtgcctaagaataaaactggaaattaacatgttagtaaaaccctaagcatatatatacacatatatgcatatgaagttatgaacatgttaagtttccatctccataacaaaatcagtgtgttcagttcagttatataaacaatatctgtatcaaaatctgggtctgcaactacctaattaagatgtgtaattagtgtaatacagtttgcatgaaataaagataccaagcttacct

SEQ ID NO: 10496 - DNA, 396 bp, Gossypium hirsutum
  Clone ID: LIB3272-013-P1-K1-E6
gagatttgaagctatctttttcgccatcttgctgtttgtggcaaccatggaagctgatggaaaacgaatgaccctggagaaggagccagagccaagtaatcatcagctgggtcgaaaggtcgacgtcggagctaaagatggtatagatctaaccgccgtcgacggtgccggagaagatgactccgatgtggcccttttggcttcccagaacaaagttacgacagaatcacgtcaccatttcttcccaaacgaaagcaacccttatagacacaatagaccttgaaactgatgatcaccttgcaaattgctaagcaatttggtttgagctttaccaaataaaactggaaattaacatgttagaataacctaaaagcatatatgtatatgtatatgcat

SEQ ID NO: 10497 - DNA, 285 bp, Gossypium hirsutum
  Clone ID: LIB3166-043-P1-K1-H11
gtatattgccaccctgctgtttacggcgaccgggggagttcatggaaaacaaatcaccctcaagaaggagcgcgagccaagtaatcatcagctgggtcgaaaggccgacatccgagctaaagacgatatacatctaacgggagaagatggttctgctactttcacccttttccttaccctctatccacctcagaacagcttccgaaccacaaccgcataatcctcaccacttcttcttcttcttcttcttcttcacctgcttcttcatccttcttctagagaaga

SEQ ID NO: 10498 - DNA, 746 bp, Gossypium hirsutum
  Clone ID: GOSHI-09MAY01-C9124_1
cggtccggaaacccggggcggccccacccgtccgattccttccattttctctcttttacttccttgcttttctccaattgcaaccatgggtttgaaaggtttcgttgagggaggcattgcatctatcgtcgccggcgcttcaactcatcctctcgaccttatcaaggtccgtatgcaacttcaaggtgaatcccatctccctaatccttcccttcaactttatcgtccggcacttgccgtcaactctgctgccgttgggaatgtttcgatctcgcaacctcgtgttggtcccatttctatcggtgtccgtatcatccaattggaaggtgtagcggctcttttctccggtgtctccgccacgatgcttcgacaaacgttgtattctactacccgtatgggactttatgaaattataaagaacaaatggactgacaaggaaactgggaatttgccacttacgagcaagatattggctggacttattgccgggggtgtcggcgccgccgttggcaaccccgctgacgtagcaatggttcgaatgcaagctgatgggcgactccctattgatcagcgacgcaattacaagagtgtaatcgatgcattgagtcaaatgacaaaacaagaaggtgtgggcagcttgtggcgcggctcagctctcacggtgaatcgcgcaatgatcgtcaccgcatcgcagcttgcgacgtacgatcaagtcaaggagacgatactggaaaaaggagtgatgg

SEQ ID NO: 10499 - DNA, 524 bp, Gossypium hirsutum
  Clone ID: GOSHI-09MAY01-C9054_1
tcgggtttggaattcattattggaagcctttatgaccgttgtgaatgccccttgtggggcggttggagttactgctttgcattctgctgttgctggtggttcggattcttcggttgagattgtcaagttgttgcttgatgcatctgctgatgctaatcgtgttgatgctaatgggagcaagcccatcgatctggttgtgccggctttaaaatccttgagtagttccaaaagaaaggtgatcgagttgttgctgaaaggtgttagtggctgtgttcttaacgagaaggctgaatctgaaaagacggtgttgcctcagttgttcaaagaagggtctgagaagaaagagtatcctattgatgtatcgttgcctgatatcaacaatggtatctatggaactgatgatttcaggatgtatacctttaaggtgaagccttgctcaagggcatactcccatgattggaccgagtgtccttttgttcatcccggtgagaatgcgaggaggagggacccaaggaagtaccctt

SEQ ID NO: 10500 - DNA, 585 bp, Gossypium hirsutum
  Clone ID: GOSHI-09MAY01-C9014_1
cggtccgattccgggtcgcccacctccgcctcctcaccgtcatatccactttttcctcttctacatttctcagatcttttttagggcttcactctcctcgctgcttttctttatgtctacctgataatcatggatgcacactgttatgtggcctgagttgttgttctttatctatatttctgctttcgtgatggtgaaagcatatgcgcaagagcacatttacaaacatccgtgggagcgagtaacttctgcatcttggcgtaagttcgctgaccctgaaaacaagcgtaccttgtctcatattctagaagttgacacattgaatcgcaaactcgatcctctctccggtaagctttacactactcgggctcttaccatccatgctccagggccatggtttgttcgcaaaatcattggccaggacatctgccactgtgttgaatcaacagtggttgatgcccaatcaaagtcaatgcagcttgcaacccgtaatgtcagtcttcagaagtttatagaggtagaggagaagataaggtatgatcctcacccagataatccaacaggatggaccatttgtcgacagga

SEQ ID NO: 10501 - DNA, 323 bp, Gossypium hirsutum
  Clone ID: LIB3135-041-Q1-K1-E4
cgtcaatatccaactttttcctcttctacatttctcagatcttttttagggcttgactctcctcgctgcggttctttatgctttcgtgatggtgaaagcatatgcgcaagagcacatttacaaacattcatgggagcgagtaacttctgcatcttggcgtaagtttgctgaccctgaaaacaagcgtaccttgtctcatattctagaagttgacacattgaatcgcaaactcgatcctctctctggtgatcgttacactactcgggctcttaccatacatgctccaaggccatggtttgttcgcaaaatcattggccaggaca

SEQ ID NO: 10502 - DNA, 274 bp, Gossypium hirsutum
  Clone ID: LIB3166-009-P1-K1-A8
ttccccgctgcttttctttttccttccgggttgttgaaagcttttccccaggaccccttggccaaacttccgtgggagcgagtaacttctgcttctgggcgtaagttcgctgaccctgaaaacaagcgtacctggtctaatattctagaagttgacacattgaatcgcaaactcgatcctttctccggtaagctttacactactcggcctcttaccatccatgctccagggccatggtttgttcgcaaaatctttggccaggacatctgccact

SEQ ID NO: 10503 - DNA, 928 bp, Gossypium hirsutum
  Clone ID: GOSHI-09MAY01-C9354_2
cccactcgcccgcctcccctcacctcacctgtatcattctcactcattcactccttcacagttgaaaaaccctttaattttaaaaaggatattttggttatatactgagaaatccaacttcttttgtatctttatccttttggtacttcaattatcaaaagaaagaaaagcatcaacaacaacaaaaaaaagcccatacacttaagtgaaaaaccagacaagagagaaaacaagaaaaatgggtgttctggatcatgtttcagatctgtttgactgttctcacagttccaagcacaagaaacgtaagcagttgcagacggtggaaatcaaggtgaaaatggactgcgaaggatgcgaacggaaagtgaaaaaatcagtggaagggatgaaaggggtgacacaagtggacgtggagcggaaggccagcaagttgacggtcgtcggatatgtggacccgaagaaggtcgtggcacgagtggcgcatcggacggggaagaaggtggagctatggccctatgtgccgtacgacgtggtggctcacccatacgcccccggggtttacgataagaaggctccggctgggtacgtccgcaacgccgaggacccgcaagtgtcgcatctcgcacgtgctagctccactgaagttaggtacaccacagctttcagcgacgaaaaccctgctgcttgttcggttatgtgattgattgagaatatgattaaaccccacaaaaaagaaaaaggtcataccaagatattttgtggtagcagtgaattgattttgtgtgttggtaaatttgtattagtttaaggatttggttgtaaaatttgctatcttgggtttttatctatatttctatttgtgtattttggactgtatcataatgttttctagtggataacatttggaagtaaaactaccttgtagcta

SEQ ID NO: 10504 - DNA, 679 bp, Gossypium hirsutum
  Clone ID: GOSHI-09MAY01-C9354_1
ctcactcattcactccttcacagttgaaaaaccctttaattttaaaaaggatattttggttatatactgagaaatccaacttcttttgtatctttatccttttggtacttcaattatcaaaagaaagaaaagcatcaacaacaacaaaaaaaagcccatacacttaagtgaaaaaccagacaagagagaaaacaagaaatttgggtgttctggatcatgtttcagatctgtgtgactgttctcacagttccaagcacaagaaacgtaagcagttgcaggtgcatctccttacctatgccgtcgatttccctttgggtgtagatcaagatatctggtggatgtttttattaagttaaccaaattgtttctattgttttctttaattttattttttgtcgttataagatgattagatttaagtggtttagggttcggatctggccgtcaatattgctaagattttatgtttaatggcgttttctttgttgatctaagcttgatggtctaaaaaatgtggaaagttccaaaccccaaattttatttgaataataataattcattttcttggtttactttactgccaactgggtctatctattataagtatttatttaattgctgcattaattgtttctgttctccgttccatctgtccagtataccttatttgttggattag

SEQ ID NO: 10505 - DNA, 1084 bp, Gossypium hirsutum
  Clone ID: GOSHI-09MAY01-C9304_1
atcgggtttgccgccagaacacaggtgtcgtgaaaactacccctaaaagccaaaatgggaaaggaaaagactcatatcaacattgtcgtcattggacacgtagattcgggcaagtccaccactactggccatctgatctacaaatgcggtggcatcgacaaaagaaccattgaaaaatttgagaaggaggctgctgagatgggaaagggctccttcaagtatgcctgggtcttggataaactgaaagctgagcgggaacgtggtatcaccattgatatctccttgtggaaatttgagaccagcaagtattatgtgactatcattgatgccccaggacacagagacttcatcaaaaacatgattacagggacatctcaggctgactgtgctgtcctgattgttgctgctggtgttggtgaatttgaagctggtatctccaagaatgggcagacccgagagcatgctcttctggcttacacactgggtgtgaaacaactaattgttggtgttaacaaaatggattccactgagccaccctacagccagaagagatacgaggaaattgttaaggaagtcagcacttacattaagaaaattggctacaaccccgacacagtagcatttgtgccaatttctggttggaatggtgacaacatgctggagccaagtgctaacatgccttggttcaagggatggaaggtcacccgtaaggatggcaatgccagtggaaccacgctgcttgaggctctggactgcatcctaccaccaactcgtccaactgacaagcccttgcgcctgcctctccaggatgtctacaaaattggtggtattggtactgttcctgttggccgagtggagactggtgttctcaaacccggtatggtggtcacctttgctccagtcaacgttacaactgaagtaaaatctgtcgaaatgcaccatgaagctttgagtgaagctcttcctggggacaaggggggcttcaatgtcaagaatgtgtctgtcaaggatgttcgttggggcacctttgctggtgccagcaaaaatgacccaccaatggaagcagctgccttaactgctaagg

SEQ ID NO: 10506 - DNA, 439 bp, Gossypium hirsutum
  Clone ID: LIB3196-046-P1-M1-C2
caagtttgtacgctgaagcacgctggtgccgcgccgcgatttccgggatgaaacacactacttgctggtgataacaaaaaggattccactgagccaccctacagccagaagagatacaacggaattggttaggaagtcagcacttacattaagaaaactggctacaacccggacacagcagcatttgagccaatttctggccggaatggggacaacatgctggagccaagtgctaacatgccttggctcaagggatggaaggtcacccgttaggatggcaatgcccgtggaaccacgctgcttgaggctctggactgcatgctaccaccaactcgaccaactgacaagtccttgcgcctgcctattgcggatgtctacaaaattggtggaattggtactgttcctgctggcccagtggagactggtgttctcaaacccg

SEQ ID NO: 10507 - DNA, 351 bp, Gossypium hirsutum
  Clone ID: GOSHI-09MAY01-C9334_2
ttccttttaaaatccccacaaacaataaagaagctctcccccccccccagaaattgatgccccatatagggctttacatggcaaaaaaaaggggagccaagattgcaaatgaagtcttatttggtgctttaaaataagttcataagctagtaggaggcctgaaatagggtatcttgaatttagaagctcgagtttcttttggatagagatcaagtatgtatgacctgttaagttgaacattttttttttttgagccttgttaagttgaacatttactcttacatggtgggccttaaaaattataatgccgtgtatgggttaattagcacaattatctctctttctgccttt

SEQ ID NO: 10508 - DNA, 1137 bp, Gossypium hirsutum
  Clone ID: GOSHI-09MAY01-C9334_1
ctcgaaaattattctggatagatccccaagtcttatcctttgatacaacctcttttgaaatacagcaataattgagatatttttcaagctctttttggagtctagcatggctaccgttttcaaaattcaatataactgccctcgcgcccctgaaactccttcactttggttttgcaatttcgaggtcccctgttactaaatttcgaaaaatggtgtcccaaaccattgatgtgttgaagaacgagctgcctcttgagcaggagcttgttgttttgcctgaagatgttgtcactggccttgttcttgtcgatatcatcaatggcttctgcactgtcggtgctggaaacctggccccaagagaacccaacagacaaatatcaagaacgatcagcgaatcagtgaggctggcaagacttttctgcgacaagaaattgcctgttatggcgtttcttgattctcatcatcctgacaagcccgaggatccttatcctcctcactgcattcaaggcaccgatgaatctaatttggttccagctttgcaatggatacaaaacgaaacaaacgtgacaatcaggcggaaagattgctatgatgggtatctgggttccatggaagctgatggttcaaatgtttttgcggattgggtgaagaacaatcacattgaagctatattggtagtaggggtgtgcacagatatatgtgtgctggatttcgtgtgttcgacattatcagtgaggaatcgaggatttctggctccgctcaaggatgttatcgtgtattcgcgtgcctgcgcaacctttgatgttcctcttcacatcgccacaaacacaaaaggagctctgcctcaccctcaggaattgatgcaccatatagggctttacatggcaaaagaaaggggagccaagattgcaaatgaagtcttgtttggtgctttaaaataagttcataagctagtaggaggcctgaaatagcgtatcttgaatttagaagctcgagtttcttttggatagagatcaagtatgtatgaactgttaagttgaacatttactcttacatagtgggccttcaaaattataatgccgtgtatttgttgttaataagcacaattatctctctttctcacttaaaaaaaaaaaa

SEQ ID NO: 10509 - DNA, 561 bp, Gossypium hirsutum
  Clone ID: GOSHI-09MAY01-C9254_1
ctggaccccctggccctcccggtcctcctagctgtggttatgacttcagcttcctgccggagccaccttaagagaagtctcaagacggtggccgctactaccgcgccgatgatgccaacgtggtccgtgaccgtgaccttgaggtggacactaccctcaagagcctgagccagcagatcgagaacatccgcagccctgagggcagccgcaagtaccccgcccgcacatcccgtgacctcgggatgtgccactctgactggaagagcgcagagtcctggatcgaccctaaccaaggctgcaacctggatgccatcaaggtctactgcaacatggagacaggtcagacctgtgtgttccccactcagccctctgtgcctcagaagaactggtacatcagcccaaaccccaagtgagaagaagcatgtctggtttggagagagcatgaccgatggattccagttcgagtatggaagcgaaagttccgatcctgccgatgtcgctatccagctgaccttcctgcgcctgatgtccaccgaggcctcccaaaacatcacctatcac

SEQ ID NO: 10510 - DNA, 633 bp, Gossypium hirsutum
  Clone ID: GOSHI-09MAY01-C4984_3
aataaccgggccgacgcgacgcgtccgcccacgcgtccggctcgatggcttcgatgttcttggaaacatcaaagttctgatggcaacgaacatgccagacacactagacgctgcattattacgtcccggacgattagatcgtaaggttgagtttggtcttcctgatttagagtctcggacacagatattcaaaatccatacaagaacaatgaattcgcccacgcgtccgcggacgcgtgggtagatctgagcttttagcccgactttgcccaagattccacgggcggccgacataagaagtgcgtgcactgaggctggaatgcccgctattcgggctcggaaaaaaacagtgacggagaaagacctccttgatgcggtgaacaaggtcatcaagggatatcaaaagctcagtgcatcccccatatacatggtttacaatttaacccaaactctggtgccacccttttgatttgcagctccggaacacacatgataggggctcaagctggcgcaatagtatcggatttagatattgcctgtgctgcttacctggatttgatttcatagttgcctatactttggatgtgcgatgcttaatatgctgcaattccacttcttctctcgtgttagaat

SEQ ID NO: 10511 - DNA, 588 bp, Gossypium hirsutum
  Clone ID: GOSHI-09MAY01-C4984_2
gaaccagcttgatggctttgatgctcgtggaaacatcaaagtcctgatggcaacaaacaggccagacacactagatcctgcattattacgtcctggacgtctggaccgcaaggtcgagtttggtcttcctgatttggagagtcggacacaaattttcaaaattcacacaagaacaatgaattgtgagcgtgacattagatttgagcttttagccaggctgtgtcctaattccactggagctgacataagaaagcgtgtgcacagaggctggaatggatgccattcgggctcggagaaaaactgggaccgagaaagacttccttgatgctgtgaacaaagtgatcaaaggttatcaaaagttcagtgcaactcccaaatacatggtttacaattaaccgggttttacctctaccaactcctaaagacatgttctacattcaaaccaaaacatatatacctttttcaatgtattggaatagatattcaatgctgtttctttttatgaatttgagttgctttaatgtggattttacacttccctatatatacactaatggtcaatatatagacattgatttttactttact

SEQ ID NO: 10512 - DNA, 1409 bp, Gossypium hirsutum
  Clone ID: GOSHI-09MAY01-C4984_1
tgatatctccgctcatataaccaagctggggtccccaaccacggcaccagaaccagaggacgagatcaaggacgagaaaagtcccgcgacctcttgatgaagacgatatcgcgcttctcaaaacctatgggttacggccttattcaacgagcataaagaaagttgagaaggacattaaggaaatggcaaagaaagtaaatgacttatgcggcatcaaggagtcagacacgggattggctgcacccagccaatgggatctcgtctcagataagcaaatgatgcaggaggagcaaccgcttcaggtggcaagatgcacaaagataattaatccaaatacagaagatgccaaatacgttatcaatgttaagcaaattgccaagttcgttgttggccttggtgacaaagtctcaccaactgatatagaagaaggcatgcgggtgggggttgatcgcaacaaatatcagatacagattcctttgcctccaaaaattgacccaagtgtcaccatgatgaccgtggaggagaaaccagacgtgacatataatgatgttggtggatgcaaggagcagattgaaaagatgcgtgaagttgttgagctaccgatgcttcatcctgagaaatttgtcaagctcgggattgatcctcctaagggtgttctttgctatggtcctcctggaactggtaagacacttcttgcgagggctgttgcaaacagaactgatgcttgcttcattcgtgttattggaagtgagcttgttcaaaaatacgtgggtgaaggagctagaatggttcgagaactgtttcagatggcacgttcaaagaaagcatgcattgtgttctttgatgaagttgatgccattgggggtgcacgttttgatgatggtgtgggtggagacaatgaggttcagcgtaccatgcttgaaattgtcaaccagcttgatggctttgatgctcgtggaaacatcaaagtcctgatggcaacaaacaggccggacacgctagatcctgcattattacgtcctggacgattagatcgtaaggttgagtttggtctccctgatttggagagtcgaacacagatatttaaaattcatacaagaacgatgaactgtgaacgtgatattagatttgaacttttagcccgactttgcccaaattctaccggggccgacataagaagtgtgtgcacagaggctggaatgtatgctattcgggctcgaagaaaaacagtgacagagaaagatttcctagatgcggtgaacaaggtcatcaagggatatcaaaagtttagtgcaaccccaaaatacatggtttacaattaacccaaattttggtgccacactctcaactcgtaaaacacatgtatgtggttctatcttgttcaatgctgcttccctggatttgttttc

SEQ ID NO: 10513 - DNA, 781 bp, Gossypium hirsutum
  Clone ID: GOSHI-09MAY01-C4954_1
ctcagattttcgataggctcttagtattataccacaatcccctgttcttttttctggagctgtgcgattaaacctggatccattcaatgagcacaatgatgctgacctttggcaggctttagaaagggcgcatttgaaggatgtgatctggaggaactctttccgtctggatgctgaggtcttggagggtggggagaatttcagtgttgggcagaggcaattattgtgtcttgctcgagcattgttgcgaaggtcaaagattcttgttcttgatgaagcaacagcagcagtggatgttaagactgatgcttttatccagaaaaccattcgtgaagaatttaaatcttgcacgatgctagttattgctcacagactaaataccatcattgactgcgaccagattcttgtgcttgatgctggtcaggttctagagcacagtactccagaggaactgctagctaatgaagaaagtgcattctctaaaatggttcaaagtacagggcctgcaaatgctgaatacttacgaggcttaatttttggaggtgaggagaataggtttagtggagatgatgcccggttagatggtcggaagagatggctggcatcatcccgctgggcagctgctgcacaatttgccctagctgttagcctcacttcttcacagaatgaccttaaaaggtttgatattggagatacaagcaatatcgtcaagaaaactgaagatgcagtcataactctgcagagtgttttggagggaaagcatgatgaagttatagatgat

SEQ ID NO: 10514 - DNA, 650 bp, Gossypium hirsutum
  unsure (1)..(650): unsure at all n locations
  Clone ID: AI055004.1
acaatcccctgttcttttttctggaactgtgcgattaaacttggatccatttaatgagcacaatgatgatgacctttggcaggctttagaaagggcacatttgaaggatgtgatcttgaggaacactttccgtctggatgcagaggttttggaaggtgggaagaatttttagtgttgggcagagaacagtattggtgtcttgcccgagcattgttgcgaaggtcaaagattctggttcttgatgaagcaactggngcagggatgttaagactgatgcttttatccagaaaacattcgtgaagaattcaaatcttgcccatgctgattattgctcacagactaaataccatcatcgactgtgaccggattcttgtacttgtgctggtcaggttctagaaccaatactccaaggaactgctatttacagagaagcgctttctcaaatggtcatgtacaggctgcaatgcgatcttactagtattctgaagtgagaaaaggttataggacacccagcgttgatgtcganagaggcagctatcatgatgtgtgcatcgnctgcgagctactttcntagactaaactgactgatagaaatctagatacttgatataacgaccactagtagcccaagaatggtactttcagntctg

SEQ ID NO: 10515 - DNA, 579 bp, Gossypium hirsutum
  unsure (1)..(579): unsure at all n locations
  Clone ID: LIB3825-003-Q1-K6-B3
tttattattggaaaacttttttatatatcgtttaaaacaganaagggaagtgttgatgaaataattctgctccatccttgttgaaggtcttagagagtggggagaatttcagtgttgggcagaggcaattattgagtcttgctcgagcattgctgcgaaggtcaaagattcttgttcttgatgaagcaacagcagcagtggatgttaagactgatgcttttatccagaaaaccattcgtgaagaatttaaatcttgcacgatgctagttattgctcacagactaaataccatcattgactgcgaccagattcttgtgcttgatgctggtcaggtgtgccttctcactcgttgttattcttggatatttctggttctttttctttcttcgattttccctcctgtttaatagacatattctagcactacaatatccttaaggcaagattgactgttttcctggaatggcttggctagtctagcttaaatatacaaggactttatgtatgctatgattaagtcttctttggattgggaaattactggtgaccagataagttctgattctgttctttcaggtt

SEQ ID NO: 10516 - DNA, 1236 bp, Gossypium hirsutum
  Clone ID: GOSHI-09MAY01-C4964_1
cggcgcgtgggctttctcgcccccacccgtgcggaaaagcgaccgcttggaaacaaaaaaagaaggaatgagagaagaaggagaagatccgcagaaacttaagagaatagcggcggcagcctacgactacgagaacgatccccgatgggcagattattggtcaaatatcttgattcctcctcacttggcttctcgctctgatgttgttgatcacttcaagcgcaagttctaccagcgctatatcgatcatgatcttgtggtagagtccatgccatcaaacaaaccatcgcaatcagcaaagtcttctgcttcatcctcaacttcatcgtctgcagtaaataatggggttcgacctcgcaatgcaggttcggcctctataagttcaggggcatcagcagctgctggttcaaatagaacttctatgcattgggatcgacaaacactacaattttctgtcaatgcttgggtgtttattgttgctgtgctagccatctttccacttgttcctagaagtctttcgtacagggcttaccggctgtcatttgtgggcactgcttgttcctctctatactctttgtatgcactatatgggagaccaagggcgtggaatttgcaggcacttcaagtgtattttcagtcaattattgcaacgaaagattgtatatacttaatctactgccttacatttgtcacggcacgtcttttccttaaatttgctttgattcctgttttatgccgaacacttgagcacatcgcgtagttcttgaggcgtaatttcaatcattccaccttgtataggaagtatttggaagatccttgtgtgtgggtagagtcaaacacgactaccattaacatactctcttcgcatgctgagattggactcggcttccttctaattgtttccttgttctcgtggcaactcaatatcatacaaactttcatgtactgacagctattgaagctaatgtaccatgctccggttagtgccggttaccaccaaagtgtttgggtgaagattgggaggacagttaatcctcttgtccagcgttatgcaccatttttgaaccctccggtttctgcaattcaacgatggtggttcagatagtagtaaaatcatatagatcataaacatgaatcaatagttgagatagtagtaaaaaatggatgatatatatatcatgaacatgaatcattctacatttgcttttgttaaagaagactacttgattcggatat

SEQ ID NO: 10517 - DNA, 293 bp, Gossypium hirsutum
  Clone ID: LIB3083-105-Q1-L1-D1
ctagatgggctgattattgggccaatgtcttgattcctcctcacatggcttctcgctctgatgttgttgatcacttcaagcgcaagttctaccagcgctatatcgatcctgatcttgtggtagaggctatgtcatcaagtgcacaaacagggtcagcaaaaccaacttcatcgtcagcctcatcatcggtagcaaatggtgaagctcgagcgttcagtgcaggctcaacagctagaacttcagggccatcagcaggttcaggttcaaatgcaacttctctgcgctgggatcgg

SEQ ID NO: 10518 - DNA, 1167 bp, Gossypium hirsutum
  Clone ID: GOSHI-09MAY01-C4904_1
cgcccgcagtaccgccccggcatacccggcgccccccgcccgcccggcttatccgagagcatccaaacaaacaaaaaaacaatgcattttcaacagctcaatcatgggttcatccaatgattacattcacatcgtaatggttccattcatggctcatggccatctcattccattcttagctttagcaaagcaaatccatcaccaaactggcttcaacatcgccattgctaatacccctcttaacatccaatacctccgttcaactctccgaggaaaccccattcccggtatccattttttggagcttcaattcaacagttccgaccatgggttaccacccaacacagagaatacggagaacttatcgttagatctcatcggtaaattctttgcttcatcggtttatttgaaaactccgttttataatttgctacaagatattggtaaaacacagtgcaaaccacctgtttgtgctattgctgatgtgttttttgggtgggctgttgatgttgctaatagtttaaacactataaacattgcgttttcaaccggtggtgcttatggcactttagcttatgtttcgttatggactaatctcccacatcgtagaacagataatgcagagtttaatgtgcctggattccctgatagatgcggattgtcatgtttctcaactccatgatttttttgagaaaagctgatgggactgatttatggtccaagtttatgcagccacagattttaagctctttgaaatcctttgggtggttgtgtaatactgttgaagagatcgaaccatatgggttggatttattgaggaaatacatcaaatcccctgtttggtcgattggtcctcttttgcctaaatcatggttaatcaactcatcggcatcggggagacaacatgcaggaaaagagccagggacatcacctgagaaatgtgttcaatggcttgatatgcatagtgatgattcagttctatacatttcatttggttcacaaaacactattagtccatcaaatatgatggaactagcaaccgggttagaaaaagctgggaaaccgttcgcttgggttatcaagccaccgcttggtttcgacttgaaagccgaattcaaaccggaatggttaccggaaggtttcgaagaccgaatgaataggaataac

SEQ ID NO: 10519 - DNA, 435 bp, Gossypium hirsutum
  unsure (1)..(435): unsure at all n locations
  Clone ID: LIB3197-060-Q1-M1-F6
atcgaaacaaacaaaaaaaaacaccccatcttcaacatctcaatcatgggttcatccaatgattacattcacatcgtaatggttccattcatggctcatggccatctcattccattcttagctttagcaaaacaaatccatcaccaaactggcttcaacatcgccattgctaatacccctcttaacatccaatacctccgttcaactctccgaggaaaccccattcccggtatccattttttgcagcttcaattcaacagttccgaccatgggttaccacccaacacagagaacacggagaacttatcgttagatctcatcgataatgcagagtttaatgtgcctggattccctgatagatgcaaatttcatgtttctcaactccatgattntttgagaaaagctgatgggactgatttatggtccaagtttatg

SEQ ID NO: 10520 - DNA, 920 bp, Gossypium hirsutum
  Clone ID: GOSHI-09MAY01-C4894_1
caagttgggctgaccgtcatggtgcagttctctcactgttctccttgctcaggcataacccttccaccatatttatgtctccagagtgcccgtctattttactccgtctcaaaagctccttgaaagatgagaagttcccactacgtgaaacatcaaccaaggcactggggaggcttttactctatcaagttcaaagtgacccccttaattccgctgcccttttggatgttctttcatctgtgctgtcggcattgcgggatgactccagtgaagtaaggagaagggcattatctgctataaaagcagcttccaaagcaaatccatctgttatcatgactcatctgtcattaatcggccctgcccttgctgaatgtttaaaggacagcagcaccccagttagacttgccgcagaaagatgtgccctccacagcttccagttgacaaaaggtactgaaaatgttcaagctgcacaaaaatacatcacaggcttggatgctaggcgcatagcaaagtttcccgagcacagcgatgatcgtgatgaaagtgaagatgaacaagcaagcagctaaaaatattttccttgatcatatgtttcatcaaggctcgagactcgaatggaagtgactgaaacttctaatcatttgaagcgctcctgcctaaagttttccaaggtgtacgtcggtgtttgttcataggaaatatagatttatacaagaacaagagcccgattttttttcccatatggctgtttttataatatcaatgtagttgccactccttagctatgaacatgatatagaatccagaaatctctggcctcgttgcttccttcaactttattgtaccgaattttgttgttcacaatcgaggtcaaattgtcacattgaaataaggcttttatatgtaccaaattttggctc

SEQ ID NO: 10521 - DNA, 865 bp, Gossypium hirsutum
  Clone ID: GOSHI-09MAY01-C4854_1
tttcaagctaagaagaagaagcacaaaaaaaaccctaatggatcttcatttcatcaccattttagctctcattatcttccttataaccccaaggggtgtatatggtgcttcgttcacattcatcaaccggtgtgattacactgtatggcctggtatattagcaaatgcaggtactcctagtctgggaaccaccggattcgagctcccaaaagactcttctcgttcattccaagctccgacgggttggtccggtcgtttttggggtcgaacggggtgtaaattcgacggatccggctccggaacttgtctcaccggcgattgcgggtcgggtcaagtagaatgcaacggactcggtgctgctccgccggtgactctagctgagttcactcttggaaccaccggtggtcaagatttttacgacgttagtctcgtcgatggttataatatgccgatgatagttgaaggccgtggtgggtcgggcctttgttcttcgacgggttgtacgactgatttgaaccgaaaatgcccgtcggaactacgggtcggtaatggtgatgcttgtaagagcgcgtgcgaagcgtttgggagccctgagtattgttgtagcggtgcgtatggtacacccgccacttgtaaaccgtcggtttattccgaaatgtttaaggcggcgtgtccgagatcttatagctatgcgtatgatgatgctacgagtacttttacctgtaccggtgcagactatacggtgacgttttgtccctcctctcctagtaaaaaatcttccaaagatgctacaccggttccggcagtttcggaagaaactaccccgacgacaggttcaacaccacaaggatcagggtcggaatcg

SEQ ID NO: 10522 - DNA, 483 bp, Gossypium hirsutum
  Clone ID: uC-gsflnu33B143d01b1
atttcgcgctcgtcaccaacctagatcggattagcatacttataaccccgaacgcgtgtataaggacctgaggacacgatgatcaaccgtagtgaagacactcgagagacagcattattaccaaatgcgagtgctgctaacttgagaaccacctggttccagcgcccaaaagacaatcttaggtgatacaaagctccgacggataggagcaatcgttcccggggactctcgtggtgtaaattcgacggatccggctccggaacttgtctcaccggcgattgcgggtcgggtcaagtagaatgcaacggactcggtgctgctccgccggtgactctagctgagttcactcttggaaccaccggtggtcaagatgtttacgacgttagtctcgtcgatggttataatatgccgatgatagttgaaggccgtggcgggacgagctttttgtcttcgacgggtctgacgactgattcgaccgaaaat

SEQ ID NO: 10523 - DNA, 873 bp, Gossypium hirsutum
  Clone ID: GOSHI-09MAY01-C4864_2
ccccacgcctccgtctttgctaccttttattgcgaacagagagacttttcagttgttcaatccggtggtctttgccaaagtctctcctctccaaggtttctcttctccagcgcattccggaccatttctgggattcccctctccaggtaaaagctttctccactatcgagagcctccgttgcaatagtataagcgtagatgttattaacttttggaataaaagaaaactcaaccttctggtatctgcgtttcttgctctgaatatctctgattattgctcctatgaccgatctatcaataatagaattttggcacttcttgataaccgtttttgaatctcccataacttcaagtatgggggactcccagactaatacctaggtttactgcttgtaatcctgcatatgcctctgctgtaaatgggtcttctatgttggagtgatgaactgcctatgacgccaggatttctccctccccattccatgctattagtcccgatgccgatctgaacgtctgactggtcaaaagctgcgtcgagatgaactgttgcccttccccttttgaacaccttgtgacacttatccgaagagtgtaaattgatttctattaaaccaaataaaccagagaccacaacagaatattcgaagttgctcatcatttccttgtccaaagattccaagctagtttaactttcatagatcagcccggtcagagatggcagcaacaaggtttgaaattgagaagttcgatggtgagacaaatttcaatctgtggcaagttcggatgatggcaattctagttcaaaatggcttgaaaaaggttattacagggaaaaagcctgagaatctaaatcaaacagattaagaagagctt

SEQ ID NO: 10524 - DNA, 1107 bp, Gossypium hirsutum
  Clone ID: GOSHI-09MAY01-C4864_1
ctccttggttttgaggttgcaaaaggtgggataaagttccatgagatcctccaaatcatcatttttatcttagatgggatatgtaaattccatagctttctgtagaaatttgtagtttcggtatgtaaaattaattcattagggtccaataaaaactcatgttataggttataggcgctcctcactggaaactccccgggtggctcccctctccaaacttgaaaggcgtcatggtccggctacgccaggggtatcttcaaaactttctcagcaatcttcggtcggaagatcatcacaaactaaaattttatcacctctccccaccctccagcgaagacctttttcaagcagacctttcgcagaccatacacttttccaggatttattctttttcatcatcaatagacagcccggcgaaatctgactccatggacaattacatgagaaacagattaagagaattattttagaccctttagatggtagccgtcaaaccaagaaacttttgaaaacctagacttgccaaggaggcagacagaaacatgctagggtagcatacgtaattttgggttcccgaggttggatttcatggtcacatatttttttcggatgggatctgtatcaatccgagtaaagtttctgacattgctaattggaaagctccgaaaaatgtttcagatgtgagaagttttctgggcttagcaggttactattgtcattttattaagaatttctctatagtttcttcaccgctgattagattgttactgaaaaatgttgagtttgtttaatcagacaagtgccaacagaattttgatcagttgaaaaatatattgacagaagcccctgtactaactcagcctgaatccggaaaatagtatgttgtttatagtgatgcgtcacttagtggcttaggttgtgttttgatgcaagctggaaaggttgtagcttatgcttcttaatagttaaaaccacacgagagaaattacttgacacgatctcgaattggccgcggttattttcactttgaagatttggccacattacttgtatggtgagagatgtcacgtttactctgatcattaaagccttatgcatttgatgact

SEQ ID NO: 10525 - DNA, 417 bp, Gossypium hirsutum
  Clone ID: LIB3148-030-Q1-K1-E7
ttcggccaagccttcgaattccggctttgccttttgcggaaatgggtcttctatgttggagtggtgaactgcctatgacgccaagatttctccttccccattccatgctattagtcccgatgccgatctgaacgtctgactggtcaaaagctgcgttgaaatgaactgttgcccttccccttttgaacaccttgtgacacttatccgaagagtgtaaattgatttctattaaaccaaataaaccagagaccacaacagaatattcgaagttgctcatcatttccttgtccaaagattccagatttcttcatcatcatcatcaatagacagaccggcgaaatctgactccatggacaattacgtgagaaacagattaagagaattatttcagaccctttagatggtagccggcaaacc

SEQ ID NO: 10526 - DNA, 404 bp, Gossypium hirsutum
  Clone ID: LIB3148-056-Q1-K1-C12
cggacgcgtggggtaatcctgcatatgcctctgctgtaaatgggtcttctatgttggagtgatgaactgcctatgacgctaggatttctccttccccattccatgctattagtcccgatgccgatctgaacgtctgacggtcaaaagctgcgtcgagatgaactgttgcccttccccttttgaacacctggtgacacttatccgaagagtgtaaattgatttctattgaaccaaataagccagagaccacaacagaatattcaaagttgctcaatatttccttgtccaaagattccaggcactgttgaaagatatggtaactgttttcttcttcacaatcacacctgggacattgagtattcattactactcacttggttttgaggttgcaaaaggatgggata

SEQ ID NO: 10527 - DNA, 1100 bp, Gossypium hirsutum
  Clone ID: GOSHI-09MAY01-C4804_1
cccagcgtccgcgccaaggggacgtccttttccttttagtgtcgataagggatttatccgttcccagaggaggcaacggaagcattagagaggattgtcgaacccgcggtgtgtgcacgggatcgaacttgtgccatcaccgaagcgcatggctctcagtgaagaagatcggaagaaatggattgagcgtaccggaagggatttaaacttcacgattccacccgaggctagtgagtttaggtcatggagaaacctcccaaacactgattttgagctcgagagacctcagataataaagaacataccacattctcactcgaggaaactgctcaacgggtctggactcaatttatctactcaatcatcgagccatacgtacggtgatggcacagacttatcacttgtgagcaacaagaggaggaaagacgatgattgctttttgcctgtcatttctcctcctgaccgaatcccggacatggaaattcatcctagtgaaccacactggttaaacgacttcagcggggtaatgaaaagcacttacggtcctgttaccgctgcaaaagccatctacgaggacgaagccggttacttgatcattatcagcttgccttttgttgatcttcaaagggtaaaggtctcatggaggaacacactcactcatggtattataaaactatcttgtttgagcacatcggctatgccgtttatcaaacgacacaaccggacattcaagcttacagatcccgctcccgagcattgccctcccggcgaattcgttagagaaatcccattgtcaactcgaatccctgaagatgcccacatagaagcatatcacgatgggccaggatccgtgcttgagattatggttccgaaactacgaatggtgcccgaagaacacgaaatccgggtttgtcttcggcctaaacatgtggggaatgatctcatgttgacatgaattataaaagggtagttgctatggttggtgctgcattgtttttactgacttttgtaccatacaatgtaatctataaaaacaaaaatatgggtcctacattttatgtttttaccatttttgccccacttaatgatatatttctttg

SEQ ID NO: 10528 - DNA, 380 bp, Gossypium hirsutum
  Clone ID: LIB3493-054-P1-M1-A9
cacgattccacctgaagctagtgattttagttcatggagaaacctcccgaacactgattttgagctcgagagacctccaataatgaagagcgtactcaatttatctactcaatcttcgagccatatgtacagtgatggcactgacttatcacttgtgagcaacaaaaggaggaaagacgatgattgctatttgccagtcattcctccatccgaccgaatcccagacatggaaattcatcctagtgaaccacactgggtaaatgacctcaacggggtaatgaaaaacgcctaccggcccgttacccctgccaaagccatctatgaggatgaagcccgttacttgatcattatcagcttgccttttgttgatcttcaaaggg

SEQ ID NO: 10529 - DNA, 2141 bp, Gossypium hirsutum
  Clone ID: GOSHI-09MAY01-C4834_1
gctgctgctgctgctgctgctcctagtgtttttttgcctattgaaaaattttcgagtgttgatttcagtagccatcgaaaccctaattcctctttcaccatgaactgttcaatctccggtgaggtgccggaggagcccgttgtctccacgaaatccggcttgctctacgagaaacgcttaatcgagcgtcatatttcggattatgggaagtgtccagttactggggaggcacttactatggacgacattgtcccggtcaaaaccggcaagattgtgaagcccagatctttaacagcagctagcattcctgggatgcttggaatgtttcagaatgaatgggatgctttaatgctatccaattttgcattggagcagcagcttcataccgccaggcaagagttaagtcatgcactctaccagcatgatgctgcctgccgtgtgattgcaagacttaaaaaggaaagggacgaagccaggtcattgctcgcacaggctgagaggcaggcaccgttgcctgcatcagcagctactgccaatgtttctgctctcagcaatggaaagagagctgcagagagtgaagatatgggccctgccggcgcgtgggtgcgtcctggggtttctgatagtattattgctgagttaacagaatgtaatgcagctctgtcacaacagcgtaaaaagcgccagatacctcccactttagctcccattgatgctttggagaggtatacccaactatctagtcatcctcttcacaagactaacaaacctggaatcacttcaattgatatcaatttttcaaaggatattgttgccactggaggggttgattcaagtgctgtactctttgatcgaacatctggagagatcttatctacactcagtgggcattctaagaaggttactagtgtaaaatttgtagcccagaatgatgtatttttaagtggttcagcagataagactgttcggatttggcaagggtctgaagatggaaagtatgattgcaggcatattttgaaagatcatacagctgaggtgcaagctgtcacggtccatgccactaacaactactttgtaactgcttcacttgacatgacgtggtgtttttatgatctttcgtctggtttatgcttgacccaggttgaagacccatcaaattctatgggctatacgtctgcagcttttcatcctgatggccttatccttggaactggcaccactggagctactgttagaatttgggatgtgaagagtcggggaaatgttgccaactttgatggacacactggggctgtaacagccatatctttctcagaaaacggttacttccttgcgactgctgctcatgatggtgttaagttgtgggatctacgcaaattgaagaactttcgatcttttgaattatatgatcaagacacaccaaccaactcagtggatttcgaccatagtgggagttaccttgcaattgctggctcagatataagagttttccaagttggcagcgtaaaagctgaatggaattgcatcaaaactttacctgatctgtccggcacaggtaaatcaacttgtgtcaaatttggtccagatgcaaagtacttggcagtgggatcaatggatcgcaaccttcgcatatttggccttcccgaaggtgatgatgcttcaacagaatcataaaaaggaaccccttctgttcttcatatatgataagttgcgactgctcggtttcgtggttaaagaactgtcagatttttaggtgggtttaaatcttttagtcttgtgcttctgttcccaaaaatgcttttttgaagctagggagggcatgaatgtctaccattgttgccattcctccattaatgtatgtgccactgtctcatttaaaaaggttttgaagaaatgaagccaggtgaaaatatattatagacaattccaactcctagaactgaaccatcactagtgggatttttatcttaactaggcagcacttatgcctttctctccgggtttaggtttgttgtggccttagatggtagtatttatttgtatacactgcaagagtggatggtacatttaaagtttttatgtaacatttttaatgttggcttgtttttgaggattcctcataaaaaaaaaaaaaaccccca

SEQ ID NO: 10530 - DNA, 609 bp, Gossypium hirsutum
  Clone ID: GOSHI-09MAY01-C4584_1
cccacgcgtccgctctctcatatggattgtccctcaatggtgtgttgttcatgtccatatatttcagttgttacgtgggaaataggatggtttcagttgaaagaataaagcaattttcgagtattcaacctgaagcagcatggcataacaaaaaccatcttccacctccaaattggcctgcccatggcaatgttgagctcaaagaccttcaggttcgataccgtccaagcacgcctcttgtacttaaaggcattactctgagcatcaacggtggtgaaaagatcggtgttgttggtcggaccgggagtgggaagtcgactttaatccaagttttcttcagactggttgagccaactgctgggaaaataatcattgatgatatagatatctgcatgctaggactgcatgatctccgaccacggttcgggatcatccctcaggaacctgtccttttcgaaggatctgtgagaagcaacattgatcctgcaggacagttttctgatgaagagatatggaagagtcttgagcgctgccaacttaaagatgtggtggcttcaaaacccaataaacttgattctttagtggttgataatggcgacaattggagca

SEQ ID NO: 10531 - DNA, 933 bp, Gossypium hirsutum
  Clone ID: GOSHI-09MAY01-C4554_4
aatttctgtttcttccatcaatttttgcctcaaacgctgattcggtctctccttcactggaagtgctattgcccacattgatattggcttcttagggtttttgtttgtttttgaaggataaaccagtgaagttaatctcatgttgaagatcttcaagaagaaaacatctcccaaaggtattttagatttgattccatcgttgctttcttgctctcttttttctttttcctgcattttgcggtcattctctaattgctcacttcctctgttatgtggtcattggtttgtggcacaacaccatgtatgatatgtggttcaggagaaattgaaggagccctattgaaccacttgggggttaagcggaatgaggtaacaagcgatggtttgttctcaggtggagaaatggaatgtatgggatgttgtgtaaatgctcctatgatcacagttgctgattactccaatggatctgaaggatacacatataattactatgaagatattaccccaaaaagagttattgagatagttgagatgctaagaaggggagagaagctaccgcctggcactcaaaatccaaaacgaatcaagagcggaccagaaggtggaaataccactttgctaaccgatcccaaacctcctccatgccgtgatcttgatgcctgctaatgttaacatgccaccgcagtctcaaataatgtgaagcttgggtttgccaaggcttttttggatgtatgttcttgttgaatttgtgaagctcaaccaatcatatattttgaattttccatgcaatttcaacttggtataagttatgagatgactaaatttgcattgtaccaaataattgatgttaatgtttttgccataatcttctatgaaagcaggccataattgttgtggtggaatcaaaaaaattaaataaaaaactcgaatatt

SEQ ID NO: 10532 - DNA, 1067 bp, Gossypium hirsutum
  Clone ID: GOSHI-09MAY01-C4554_2
acgccacgcgtacgggtcgcctcattttcttcactcgttcagtctttggttggttttgttcggtcttgaaaatgcttgctcggctcgcgtctcgacgttttctcgagatccgtcaagctttccgtcaatcttctcaggcctctcgatctttgtccactgccctgaactatcatcttgataccccagataataatcccgaccttccatgggaattttcggaggcgaacaaacaaaaggtcaaggagatattgtctcattatccatccaactacaagcaatctgcagttattcctttgctagatcttgctcagcagcagcatggaggatggcttccagtttcggcaatgaatgcagttgcgaaggttatagaagttgctcctattcgtgtgtatgaggttgcgacattttattcaatgttcaaccgatcaaaggtcgggaaatatcatctgttagtttgtggcacaacaccttgtatgatacgtggttcacgagaaattgaagaagccctattgaaccacttgggggttaagcggaatgaggtaacaagcgatggtttgttctcagttggagaaatggaatgtatgggatgttgtgtaaatgctcctatgatcacagttgctgattactccaatggatctgaaggatacacatataattactatgaagatattaccccaaaaagagttattgagatagttgagatgctaagaaggggagagaagctaccgcctggcactcaaaatccaaaacgaatcaagagcggaccagaatgtgatcactttggagtttcagagacaaaaggcaaaggagctgcaagaatactttaagcagaagaagcttgaggaatctagtcaagggcctttctttgggttccttgcgaagaatgagattgctaatggaagatgggcaatgtttggttttgctgttgggatgttaaccgagtatgcaacaggctcggattttgtcgatcaagtaaagatcatgctcttcgatttcggataatagatttggaatgactcttttcttgtataccacaatgctgctgctattcatactttatgatttct

SEQ ID NO: 10533 - DNA, 643 bp, Gossypium hirsutum
  unsure (1)..(643): unsure at all n locations
  Clone ID: AI054525.1
cctggctcaaacgctgattagggattccttccctattctttttttctattccattttctgccctcatcaagcttccgttccatcgattctcccacgtttcccttccagaggataaaccagtgaagttaaatctcattttgaagatcttcaagaagaaaacatctcccaaagatgctttgcggacgagcaagtgagaaatggcggttgcaacacgaggtatgggtttttttttttaaattctatatctacttcgcataaaatctttgttgttgaagctttttcatttctcctaaattatacgaatctgacatatgtgttctgaaacatatttgatttgaatgagtgactatgattctcgaaatgtaaggaaaaatacttacctgaaagttgaattcttagattctggattgaagtttgttcattcttnccgtggagctgaacttttatgtggaatcataaatgctttgtacccttttacttctattctagtttaactcctttctgcatgtgatctttgntgagacagttgatttagaaagaaaaaaaaagaaagtgccaggaaattggccactgtgtttggaataagcttaatgactcactngtattttgaacaccacttncttcngatatatacatgngcggn

SEQ ID NO: 10534 - DNA, 517 bp, Gossypium hirsutum
  Clone ID: LIB3584-053-P1-K2-D7
gggagtgaggctgctgctagaattttagctcgccaacttgtacgactgcgtcaacagataactaatttgcaggggagtcgtgcccaaattacaggcattatatgccaacacctcgatttctacgggaataaaaggagcaactaaggcaatggtggcaatgaacaagatagagatgatgtcagaagctattgatgaaactttagataaagatgaggtcgaaaaggaaacagaaaagctcaccaaccaggtgagatattttatttactgatatatatttgttttgatttctttttttgtttcattgccattgttcccagtaagtttttcccctattactctaatttataagcttttaaccgatcaggtgcttgatgagattgttgtggatattgcttctcaggctggattcttgaaattgaccttataaaaaaatttctgtaacatgttccatttttctaattactagaatgtgtcgataaaagcttaaccttgtcccattcttttaatagttatcttc

SEQ ID NO: 10535 - DNA, 415 bp, Gossypium hirsutum
  unsure (1)..(415): unsure at all n locations
  Clone ID: LIB3197-019-Q1-M1-G8
gtggtcattggtttgtggcacaacaccatgtatgatatgtggttcaggagaaattgaaggagccttattgaaatacttgggggttgagcgcaatgaggtaacaaagacggtttattctctgttggagaaatggaatgtatgggatgttgtgtaaatgctcctatgattgcagttgctgattacaccaatggatttgaaggatataagtataattactatgaagatgttactactcaatgagttgttgagatagttgcagtgggattttgccaagagaactgatgcctcaaagtgttactgcaaggcttccaacctcagaggagctcgatgcctatgcacatgagcaatgggagctttgtaagcaatgtttcttgctgcaacttataagttcangacaagctgaaaaatcaacgag

SEQ ID NO: 10536 - DNA, 405 bp, Gossypium hirsutum
  Clone ID: LIB3149-061-Q1-K1-B9
cttcgacattttcacgcgctcacactggtcttgcgtctcttatttccattcaaaggggtttgaagataaaccagtgaagttaatctcatgttgaagatcttcaagaagaaaacatctcccaaagatgctttgcggacgagcaagagagaaatggcggttgcaacacgaggcgttgaacgggagattgcgtctcttcaactggaggaaaaaaaattggtggcagagattaagaagacggccaaaactggaaatgaggctgctacgagaattttagctcgccaacttgtacgactgcgtcaacagataactaatttgcaggggagtcgtgcccaaattagaggtgtcgcaactcatacacaggcattatatgccagtacctcgatttctactggaatgaaaggagca

SEQ ID NO: 10537 - DNA, 352 bp, Gossypium hirsutum
  Clone ID: LIB3145-043-Q1-K1-C5
atcttcttcttcccaaaatctctcattatcgagtttaaccaaggaagggtcttaaaaactcctgcctttgaaatgctttctccacttgcgtcacagcgtcttatcgaggtccgtcaagctttccgtctatctgctcaggtgtatcgatccttctccactgccttgaactatcacattgatggcccagataacaatcccgaccttccatgggaattttcggaggcaaacaaagcaaaggtcaaggggatattgtctcattatccatctaactacaagcaatctgcagtaataccttctgtagatcttgcacatcaacagcatggagggttggtttctgtatcaaccatgaatg

SEQ ID NO: 10538 - DNA, 575 bp, Gossypium hirsutum
  Clone ID: GOSHI-09MAY01-C4514_1
cccacgcgtccgcggacgcgtgggaaaagaaagaacgagagatagaaacatgtcgaggcgatcagggacttgcttgaggctatgtcgtagtaacctttgctctaatttccgcattggcaggatgtggaccagctctttactggggattcaagaaaactctcaagttgggtccttccaaatcctcttgtcctccttgcatctgggattggcctcctccgctttcccttggcaacattgcccctgggttgaccaatctctcaatcgcagattgccgaagcaatgaccctgatctcaagcaagagatggagaagcaattcctggaccttctaacagaggagttgaagttgcaagagacttgtcgccgaagagccactcccgccatatgaacatcacctttggtgaagctaaaagggtggcttcccagtaccagaaggaggcagaaaaatgtattgcagccaccgaaacatgcgaggaagccagagaacgagccgaggcctcgctaatcagggagaagaaagtaactacagtgtgggagcaaagagctcgacaaatgggcttgggaaggggaataaact

SEQ ID NO: 10539 - DNA, 608 bp, Gossypium hirsutum
  unsure (1)..(608): unsure at all n locations
  Clone ID: AI728429.1
attaccttttatgtaggaatctgcagcttgttggtttccttattctatgtttattctagtttcaggcgcaatggttgtaaaagtttgtgtcaatgcgtctgctactaaaaccttttggttatctctgtgaattacttgacatgttttttgtgcctttgttcttcttttgcagggttgaccaatctctcaatcgcagattgcggaagcaatgaccctgatctcaagcaagagatggagaagcaattcctggaccttctaacagaggagttgaagttgcaagagactgtcgccgaagagcactcccgccatatgaacatcacctttggtgaagcaaaaagggtggcttcccagtaccagaaggaggcagaaaaatgttttgcagccaccgaaacatgcgaggaagccagagaacgagccgaggcctcgctaatcagggagaggaaagtaactacagtatgggagcaaagagctcgacaaatgggctgggaaggggaataaactgttggtataattcattgtctattaaatcttgttanggcaaaaaggccccccaatatgtttccctcccacctgtactttcacctgttaactgtgatactgctgtgtgg

SEQ ID NO: 10540 - DNA, 839 bp, Gossypium hirsutum
  Clone ID: GOSHI-09MAY01-C4534_1
tacattacgaccttcgaggagtaccagattcagagatatgagggtgcctccacgctgtatggtccgcacacactcagtgcctacattcaggagttccagaagctcacaagtgctcttatcaaaggccaagctgttgaacctggcccgcaacctcctgatcttctaaagaaacaaataagctttctcactcctgttgtaatggactctacccctgctggtgtaaatttcggggatgtcagctccgatgttccggctaactcaacttttaagagaggtagcacggtgactgtggtcttttggtcagcttgccccaggaacgatctcatgacagaaggtacattcgctcttgttgagatactccaagggaaggattcatgggttccaacttatgatgatgacgatttctgccttcggtttaagtggtcaagaccttcgaaactaagcccccgaagtcaagcaaccatcgaatggacaatccctccatctgcctcactaggagtttacagaataagacattttggtgctgcgaaacggcttatgggatcgattcagcatttcacgggtacatccagtgctttcgtggtagcatgatgaaatagatcaaactatatgtatatacgtatggcagcttagatgtttcatttttgttgcgctttatatgtaacgagttgccattagattataacacgtcgaatctgtaatgctgaaactcttctagctcatttgatttccacttcagaacatgaaatttccgatgaattaaaatctgtctttgatggttcatttacgaaaaaaaaaaaaaaaaaaaaaaaaaaaaaaaaaaggggccggccgtttta

SEQ ID NO: 10541 - DNA, 428 bp, Gossypium hirsutum
  unsure (1)..(428): unsure at all n locations
  Clone ID: LIB3148-031-Q1-K1-H9
tgataatatttagatttatgtaccaactatttaatagatacgaactctatatttaagtagagttagtatttattatactgatagtatactttttttattccacaagcattattnaaaaaaaaaaaaaaaaaaaaaaaaaaaaaaaaaaaaaaaaaaaaaaaaaaaaaaaaaaaaaaaaaaaaaaaaaaaaaaaaaaaaaaaaaaaaaaaaaaaaaaaaaaaaaaagagaaaaataaaaaaaaataaaaaaanannnnnaaaaaaaaaannaaaaaaaggggggcccttttaaaaaaacaaaatttttgttcccggggtatgaaaaaatataatttttttttggtgcccccaaaaaaaaataaaggggcgggtttttaaaaacattttgaacgggaaaaacctggggttacacaaaaaaaaaacccttg

SEQ ID NO: 10542 - DNA, 375 bp, Gossypium hirsutum
  Clone ID: LIB3584-046-P1-K2-A10
cccacgcgtccgatgaggtgctatcatgagattcactgataatatttagatatatgtaccaactatttaatagatacgaactctatttaagtagagttagtatttattatactgatagtatactatttttattccacaagcattattaaaaaaataccacttgtccctttcttttaaaagaaactttgagaactacaatcattgggctaaaaggaatagatgccaagtcaatgatactctctttttcaagtacatgatagggtcagactcggtgctgttggtaacaagataagatggcttatcatgcaacaccagggtttttattcaggctctaccagaaggagattcactctttacattcgatcggtcgggtcc

SEQ ID NO: 10543 - DNA, 810 bp, Gossypium hirsutum
  Clone ID: GOSHI-09MAY01-C4404_3
acaaataaagaacatttaaaaaaatgatcaaaagcgtctattttcttgttccaaaagttacatttatccatacaacaaaaggaagcaacatttgatgtctcttcttttaaaaaaagggaatgttgatggcatcgtcaaactcccccattttaggcattgaagagacagaacaaacctttcatacataaaactaaatttaaaaaaaaacaacccaaaacataacaaaaaagaaagaaacattgagcctccctatcccatggcatacttctgggtccagctccttgcagttgtctcgtacttgttcctgtctgtcttgtacatgtgtgcaatctccggcaccaatggatcatccggatttggatcggtcagcaatgaacatattgatagcaataccttggaaatagttagtgcaggactccactgctctttcaagatgtctaggcaaatgcttccattgctgttaatattagggtggaatacctttgttctaaatgccaccttgggtggcttaaaaggatagtctggaggaaaatgaatggtcacttggaaaacacccccagcatacggactgtctggtggacccatgatagttgcctgccaatgaaacatgtcttcagcaacaggaccagcactgcaagatgttggaggatccttttgtaaatccttcaattccttcaagattcgcttcgatgccatagcgaaaccagaaaagataaatttgatcgggggggtcctttttgatgcctgaaggaactttggatcggcaggagaggaaagctcggatcgaagaaagaagacgaaaatgagagc

SEQ ID NO: 10544 - DNA, 828 bp, Gossypium hirsutum
  Clone ID: GOSHI-09MAY01-C4404_2
atttttttttttttttttttttttttttttttttttttttttttttttttctctgttccaaagttcacgtttatgcattcattcaacattagaaaaagcaacaattgcttcttcttttttcaaactcaagccaggttgttgacctccttttaagtcattttaggattcaaatgacagaacaaacattcatcatgcatagcccttttttaaaaaccagaatatacgaaaaaagaaaaaaaaaagggggggggtttccccttgcacacaacaatgctcgttagcccatggcgtacttctgggtccagctccttgcagttgtctcgtacttgttcttgtcggttttgtacatgtgagcaatctccggcaccaatggatcatcagggtttgggtccgtcagtaaagaacagattgataacagtaccttggatatcgttagcgcaggactccactgttcctttaagatgtctaggcaaatgctcccattgctgttaatattaggatggaatactttcgttctaaatgccaccttgggaggcttgaagggataatctggaggaaaatggatggtcaccaggaaaacacccccagcataaggactgtctggtggacccatgattgttgcctgccaatggaacatgtcttcagcaacaggaccagcgctgcaagatgtaggaggatccttctgtaaatccttcaattccttcaagatccgcttcgatgccatcgcaaaacctgaaaagatgatcctcctttggcggtaagagagctgaggtttttgatcgaggaaaggagaaaatgaagaagaaaaaccaaggcggaaaaaaatta

SEQ ID NO: 10545 - DNA, 718 bp, Gossypium hirsutum
  Clone ID: GOSHI-09MAY01-C4404_1
ccttagaaattgaagtgacagaacagattttttttttccagatagaacggataaaccaaaataaatatatatactatataagaaaaacatagggcctaaccccacgtacggtgggcttgtttcagcccatagcatacttctgggtccagctccttgcagttgtctcgtacttgcttctgtcggtcttgtacatgtgagcaatctccggcaccaatggatcatcgggatttgggtccgtaagcaaagagcagattgatagcaataccttggaaattgttagtgcaggactccattgctccttcaagatgtctaggcaaatgcttccgttgctgttaatattggggtggaatacctttgtcctaaatgccaccttgggaggcttaaagggataatctggaggaaaatgaatagtcactaggaaaacacccccagaatatggactgtctggtggacccatgattgttgcctgccaatgaaacatgtcttcagcaacaggaccagcactgcatgatgtaggagggtccttctgcaaatccttcaattccttcaagatccgcttcgatgccatcgcaaaacctcaaaaaggtgtttttagttatcctttttttaatatattgcgtttttcaaaaacttgaaggagctttaggtggattagagaagagaaatattaatcgaagaagaagaaggccggccgcctgagcccggaattccaaaccgg

SEQ ID NO: 10546 - DNA, 585 bp, Gossypium hirsutum
  Clone ID: LIB3543-037-Q1-K1-C4
cccggtcgacccagcgtccggttaaaaaaagataactaaaacacctttttgaggttgcgatgctcgaacggtcttgaatgattgaagttttgcagaaggaccctcctacatcatgcagtgctggccctgctgctgaagactgtttcattggcaggcatcattcatgggtccaccagacagtccatcttctgggggtgtttcacctagtgactattcattttcctccagattatccctttgagcctcccaaggtggcattgatgacaaaggtgttccaccccaatattaacagcaacggaagcattggcctagacatcttgtaaggagcaatggagtcctgcactaacaattcccaaggtattgctatcaatctgctctttgcttacggacccaaatccccatgatccattggtgccggagattgctcacatgtacaagaccgacaaaagcatgtactagacaactgcaaggagctggacccagaagtatgctatgggctgaaacaagctcaccgtacgtggggttaggccctatgtatctcttatatagtatatatattgattgtggtttatcagttctatctgg

SEQ ID NO: 10547 - DNA, 417 bp, Gossypium hirsutum
  Clone ID: LIB3146-041-Q1-K1-D4
gttctttactgagggacccaaaccctgatgatccattggtgccggagattgctcacatgtacaaaaccgacaagaacaagtacgagacaactgcaaggagctggacccagaagtacgccatgggctaacgagcattgttgtgtgcaaggggaaacccccccccttttttttttcttttttcgtatattctggtttttaaaaaagggctatgcatgatgaatgtttgttctgtcatttgaatcctaaaatgacttaaaaggaggtcaacaacctggcttgagtttgaaaaaagaagaagcaattgttgctttttctaatgttgaatgaatgcataaacgtgaactttggaacaagaaaatttgtgtcctaactctgaaaatgttaacaattctccttaatcatagttatatatttgat

SEQ ID NO: 10548 - DNA, 253 bp, Gossypium hirsutum
  unsure (1)..(253): unsure at all n locations
  Clone ID: LIB3585-048-Q6-K1-H1
gcgtccgagcactctcattttgggttacttgttttgtactccattgtttattgatgtagaaaataatatattccttggaagagtgatagataattgaagtcttatttatatnataaatgggttttgcaggtggcatttagaacaaaggtatttcaccctaatattaacagcaatggaagcatttgcctagacatcttgaaagagcagtgtagtcctgcactaactattaccaatgtggttgtcctaccaatat

SEQ ID NO: 10549 - DNA, 587 bp, Gossypium hirsutum
  unsure (1)..(587): unsure at all n locations
  Clone ID: LIB3828-026-Q6-K6-C3
cccggtttgtcccagcgttcgcccacgcgtnccgcttnacatatggggggggggtgggggccgggcacgtaaagccaatcagagactatcaatagaagtcggtccagcgggggtaatataccgccactacaccttattataaattctcctctcatttgtttttgtttttctgttcttccccacattaaaagcctgccttgtgggggggggggggaatatttctcttctctaatccacctaaagctccttggaaggtgttgaaaaacgcantagtattagagaaaaggataactaaaaacacctttttgaggttttgcgatggcatcgaagcggatcttgaaggaattgaaggatttgcagaaggaccctcctacatcatgcagtgctggtcctgttgctgaagacatgtttcattggcaggcaacaatcatgggtccaccagacagtccatattctgggggtgttttcctagtgactattcattttcctccagattatccctttaagcctcccaaggtggcatttaggacaaagggtttcccaccccattttaacagcatcgggaagctttgcctagacaatcttga

SEQ ID NO: 10550 - DNA, 258 bp, Gossypium hirsutum
  Clone ID: uC-gsflmaxxa069f05b1
cggacgcgtgggtgtttttcgccttggtttttcttcttgattttctcctttcctcgatcaaaaacctcagctctcttaccgccaaaggaggatcatcttttcaggttttgcgatggcatcgaagcggatcttgaaggatctgtaggatttacagaaggatccttctctctttctcgcattcttttcttctttcactttatcttttacttttctctcttttttttcctattttcttttatcattttctttttttatctc

SEQ ID NO: 10551 - DNA, 529 bp, Gossypium hirsutum
  Clone ID: GOSHI-09MAY01-C4434_1
cagagaaagaaaagaggaagactgaaaaggaattggaggatgagaatggtggtgctggtgtgtattctgctagtttgaggaagaactatatactggcaaatgatgaatggaaagaggacacaatgcctgaaattcttgatggtcacaatgtgtacgattttatcgaccctgatatcttgttaaggcttgaagagttggagcgtgaagagggtcttcgacaagcggaggaggaaggtgatgactttgagatggatggccaagaattatccctggaagagcaagaagcactggctgagatcaggaaaaagaagagcttgcttattcaacagcataggatgaagaaaagcactgcagaaagtcggcctgttgtaccaagaaagttcggcacagatagaaagttcacaacagggaggatgggccggcagctatcttctttggggctggatccctctcttgcaattaatcgcgctcgtagcaagtcaagaggccggaaaagggagcgatcagttgataagaaaaaaggtgatga

SEQ ID NO: 10552 - DNA, 472 bp, Gossypium hirsutum
  Clone ID: GOSHI-09MAY01-C4704_1
agttgaccttaaggacaaatggaagaatatcgtggccaaagagatctcgaaagggtaataggggtactaattacaacggaacaagcaaggtgatgtcttttgttgtgaatatgtctgtctttgccgtgattatcttttacagagcagataggtggctcaatgtctgatatgtgtaacaagtagaagttaaaggttttgtgacacatttagatgtgcttaagtagttctacgacgttatgcagcatcgttgacatgcaggtaaatctccggattccccaacaggaaattgaaagtataaacagtattttggaataggttagcagttaggatctgtttccatgttatcagctattgtaatacagaactcatctaaaattatcatgccctttgccttgtaagagttttggtcatgttcacggtcacgtttatataatggttatggtaacatcttggaaaaaaaaaaataaatagg

SEQ ID NO: 10553 - DNA, 683 bp, Gossypium hirsutum
  Clone ID: GOSHI-09MAY01-C4734_2
cggacccgtgggtttttttttctttttttttttgttaataagaattcaaaagtttcttttactgaaggaattaaatcatgtttatcttcgattggttctatgggatccttgcttcccttgggttatggcaaaaagaggccaagatcttgtttttagggcttgataatgccggcaaaaccacgctgcttcatatgctcaaagatgagagattagttcagcatcagccaacacagcatcccacatcggaggaattgagtattgggaaaatcaagttcaaggcattttgatttgggaggccatcagattgctcgaagagtttggaaagattactacgccaaggtggatgctgtcgtgtacctagtggatgcttacgacaaggagaggtttgccgagtcaaaaagggagctggatgctcttctctcagatgaagctttggctaatgtcccgttcctcatcttgggcaacaagatcgatataccatatgctgcgtcagaagatgagttgcgttatcaccttgggctcaccaatttcaccacaggcaaggctaacgcctttttcggacactccttcctccctccaagttctgatattggattcacatcatccgtccaagcatgtatctgcttaatggctgtgaaactttcttatgtttgtcaagtttttaagatgattgaactgtctgg

SEQ ID NO: 10554 - DNA, 900 bp, Gossypium hirsutum
  Clone ID: GOSHI-09MAY01-C4734_1
cccacgcgatttctttttttcttttagggttaattagttttagtgaaggaaaaaataaatctagatcatgtttttgttcgattggttctatgggattcttgcttccctcggtctatggcataaagaggccaagatcttgtttttagggcttgataatgctggcaaaaccacgctccttcacatgctcaaagatgagagattagttcagcatcagccaacacagcatcccacatcagaggaattgagcattgggaaaatcaagtttaaagcttttgatttgggaggccatcagattgctcgaagagtttggaaagattactacgccaaggtggatgcagttgtttacctggtagatgcttacgacaaggagaggtttgctgagtcaaaaaaggagttggacgctctcctctctgatgaatctttggctaatgttccattcttgatattgggtaacaagatcgatataccatatgctgcctcggaagatgagttgcgttatcaccttggcctgaccaatttcaccacaggcaagggtaaggtcaatttgggagactccaatgttcgtcccctcgaggtattcatgtgtagcattgtccgaaaaatgggttatggagatggtttcaagtgggtttctcagtacattaagtaggtagctaaagagaaatcagacatgctatgctttctttcttaatgttatttttatactggatttagttgggttatcccttttcactttttcttccatttttgtttgaattggtaagcatacctcccctttacgaaacaatgagacatataagtaattgatgatttgggttaatttagagggtgcccctttcactttttcttccattctatgttatccctttttgcatatgaaaaaaaaaaaaaaaaaaaaat

SEQ ID NO: 10555 - DNA, 539 bp, Gossypium hirsutum
  Clone ID: LIB3825-028-Q6-N6-C7
gactaaaccaaaacactctaaattaacattaggtcccaaatcatcaatcagaataaatcatcattacttgtatgtctcattcattgtctggtaaagaacgaagtttaccgattcaaacaaaaatggaaggaaagaaaaagaaaagggcaagagatgagggaaaagggtagggtaacaggggggttgaaacacatgtaacaacaatttctcaaagtgtttgatccaattcaatttagtataaaaataactcctatagctaacctacttaatgtactgagaaacccacttgaaaccatctccataacccattttacgaacaatgctacacatgaatacctcgaggggacgaacgtttgagtctcccaaattgaccttacccttgcctgtggtgaaattggtgagcccaaggtgataacgcaactcatcttctgaagcagcatatggtatatcaatcttgttgcccaagatgaggaatgggacattagccaaagcttcatctgagagaagagcatccagctccctttttgactcggcaaacc

SEQ ID NO: 10556 - DNA, 478 bp, Gossypium hirsutum
  Clone ID: LIB3585-015-P1-K1-E12
cccacgcgtccgttttaatgggatttggcagagattagttcagcatcagccaacacagcatgccacatcagaggaattgagcattgggaaaatcaagtttaaagcttttgatttgggaggccatcagattgctcgaagagtttggaaagattactacgccaaggtacatttcttttacctacaaatccatctgattagttgcaatttgatatgcgtgtgtgtgtgttaggtgttcattaatgatgtgcagcatagacttcatcggttggaaatgttattcattgtttaattgagcattaggtaataaattctaaagtgcataagcgaattgttattcatgtttggtaactatggtaatgtttgttggattacataaatagggagtttaaaaatatgggttatggggtcttggttggatgctttttttctgtgatatttcactggaggatctgtgcgattgcaatagtgtttgtcgtag

SEQ ID NO: 10557 - DNA, 327 bp, Gossypium hirsutum
  Clone ID: LIB3083-040-Q1-G1-H6
caatcagaataaatcatcattacttgtatgtctcattcattgactggtaaagaacgaagtttaccgattcaaacaaaaatggaaggaaagaaaaagaaaggggcaagagatgagggaaaaaggtagggtaacaggggggttgaaacacatgtaacaacaatttctcaacgtgtttgatccaattcaatttagtataaaaataacattaagaaccaaagcatgctaaatttcctatagccacctacttaatgtactgagaaaccacttgaaaccatctccatagaccattttacgaacaatgctacacatgaatacctcgaggggggg

SEQ ID NO: 10558 - DNA, 868 bp, Gossypium hirsutum
  Clone ID: GOSHI-09MAY01-C4694_1
caagaatttgcaagagtgcttaggtggctctaaagatgcaaaggacaatgactcttacagtttctaccaggcagtggacgggcagcacatcattctccatcctttaaatgtgaagtgtctcctacaccattacggaagctatgattcacttccgcacagagtaagtggtaggattttagagttggaaactatcactcaatctgaggcagttaggaggcggtatcgttacttgagtcatttttccttaacaacaacttttcagctttgtgaaattgatttgagtggtgttcttcctcctgatgctctgcatccatttatggatgagataaagaagcgtgaaaaacagaggaagcagctggctagaaaggagcaaaaggagaaaatcaaggctgaagttgctgctgcagtacaagttacacctatgatatctaatttcgggcactgctcttacaatgattcccccacattctctatggatgacttcgaagcccttggaagttctactgtgatatcatcaagtcccccagttactggggagaggaaactgttttcaaatgtcacgaggcttggttttgctgctgcacatgattctccttcgttgaaaattgaggaaggaaatggtatgcataacaatgagggggcaaccgattccactggtgcagctggctctagaagttcaggcacacaatcatttgccaatgtgatatctagagcaaaggctcctgaaaatttacagacgcctaagatgaatgagataggaaagaaaggaaagaaaggagggcgggtccttttgtccacagctggtggtcgacgctattgacatttggcctgtactctactcccaactctgtttagccatcataatcaa

SEQ ID NO: 10559 - DNA, 679 bp, Gossypium hirsutum
  Clone ID: GOSHI-09MAY01-C4614_1
tagagttcgtaaattgaagagtgcaatgaccagattgactgctcgggtacaaaaggtaagggatgaacttgaacaactactggatgatgatgatgatatggctgacctttatttgtcgagaaagttggctggaacttcacctgttagtgggtcaggtgctgcaaattggtatcttgcctctcctaccataggatcaaagatttctagagcaagtagagcaagtatagcaacagctcgtggagatgagaatgatgtcgaggagcttgaaatgttgttggaggcctactttatgcaaattgatggaacattgaacaaattaacaacgctgcgtgaatatattgatgatacagaggattacatcaatattcagcttgacaaccaccgaaaccagctaatccagttagagctctttctaagttcaggaactgtgtgtttatccatctattctttagtggctgcaatatttgggatgaacattccatatacgtgggatactaaccatggatacatgtttaaatgggtggtcattgtctctgggatattttgtgcaactctgttcatactcatcatgtcctatgctcggctgaagggtttggttggatcttgagactctcacaatactacatttaatgatgttcttgcaggaaagcttgctggccattctttgcatgtgaactac

SEQ ID NO: 10560 - DNA, 516 bp, Gossypium hirsutum
  Clone ID: GOSHI-09MAY01-C4604_1
cccacgcgtccgggcatactaacagcagaagagaatgccatagaaggaccagagtttagtagcaagtctcctgatgagatgaaggacattataccaaatattcaggtaatggcacggtcaaagccttccgataagctcaatttcgtaaccaatttgagaaatatgtttggagaagttgttgctgtgactggtgatgggaccaacgatgcttcagctttgcgccagtcagatattggacttgctatggggataagctggaacagaggttgcgaaaggaaatgctgatgccattgtaatggatgataattttgctaccattgcaaatgtagccaaatggggacgtgcagtttacataaacatacaaaagtttgtgcagttccagttaacagttaatgttgtagctcttataatcaattttgtctctgcatgcatctcaagatctgcccctctcacagctgtacaattgctttgggttaatatgataatggacactcttggggcattggcactagctac

SEQ ID NO: 10561 - DNA, 948 bp, Gossypium hirsutum
  Clone ID: GOSHI-09MAY01-C4634_1
gaaagaacaaggtggcagcctgtgctaagcattatgtgggagatggaggtacgacaaaaggcataaacgagaacaatactgttattagctggaacggattactcggcatccacatgcctgcatatttcccccccgtcccaaagggcgttgcaacaattatgacatcctattctagctggaatggaaaaaagatgcatgctaatcacgatcttgtgaccgacttcttgaaaaacaagcttaagttcaggggtttcgttatatcagattggcagggtcttgataggattacctctcctccacatgctaactactcatattctgtagaagctggagtcggtgccgggattgatatggtcatggttccttataacttcacagaatttattgatgacctaacctatcaggttaaaaacaatatcattccaatgagccggattgatgatgctgtaaagcgaatcttgagggttaaatttgtgatgggtctctttgagaatccaatggctgataacagcctggtcaaccaacttgggagtcaggaacatcgggagttggcaagggaagctgtgaggaaaagtctcgtcctactgaagaatggtgagtctgccgataagccattgttaccccttccaaagaaagcaactaagatactagttgctggcactcatgccgataacttgggctatcagtgtggaggctggaccattacatggcagggtcttggtggcaacgatctcacaactggtacgactatcctccaggctgtcaaaaatacagttgattcaagtactcaagttgtatacagtgagaacccggatgcagggtttgttaaatctggcgaattctcttatgccattgtggttgtgggagaaccgccgtacgcagaaacatatggtgacagcctgaatcttacaatatcagagccgggtcccaatactatttacaatgttt

SEQ ID NO: 10562 - DNA, 461 bp, Gossypium hirsutum
  Clone ID: GOSHI-09MAY01-C4124_6
cggacgcgtggggccccacccggccggggaaaaatggacgcaattgattcagttttcgatccgctaagagagttcgctaaggatagtggtcgtcttgtcaagagatgccacaagcccgatcgaaaagaatttacgaaggtggcgtttcgtacagcgatcggattcgtggttatgggattcgtagggtttttcgtcaagctcatctttatccccattaacaacattattgttggatctggttaggaagcatgagaatcagtaccaagtttcagactgtaggcaaaagatagaagttagaactggatgcaattgactgagaggtacatcatctgatttcatgaactaattcaaacttagacatgggaatttctaggtttctttatattcaatatggttgagattatttttggtttagcattgtaatagaatcttgttgaaataaacacaatcattctgacctc

SEQ ID NO: 10563 - DNA, 426 bp, Gossypium hirsutum
  Clone ID: GOSHI-09MAY01-C4124_5
gaaaaaatcaaacctttttcatcgtagagcatagctaaaccagaagaaaggggaaaatggacgcaattgactcagttttcgatccactgagagagttcgctaaggacagtgttcgtctcgtcaagagatgccacaagcccgatcgcaaagaatttaccaaggttgcgttccgaacagcgatcggattcgttgttatgggattcgtaggatttttcgtcaagctcatctttatccctattaacaacattattgttggatccggttaggccttgtcaacgtttgctgaaaatcggtagaatgtttaagttaagaggtacgtcatgagtttatgaagtaatttcaatttagacttgggtttgtctttaaattcagttttgttgaaaaagggttcaattttggtgtttgtaatagaatcttgttgaagct

SEQ ID NO: 10564 - DNA, 547 bp, Gossypium hirsutum
  Clone ID: GOSHI-09MAY01-C4124_3
cccacgcgtccgcaagaatcaaactctaccttcaaaactaggagaaaaaactaaaaatggacgcaattgactcagtttttgatccgctaagagagttcgctaaggacagtgttcgtcttgtcaagagatgccacaagcccgatcgtaaagaatttacgaaagtagcggtccgtacagcgatcggattcgtggttatgggattcgtaggatttttcgtcaagctcatctttatccctattaacaacattattgttggatccggttagccttgcttcatgttacagactcacaggaaggacgggaactggtagaaattttcaacactgagataaaagaagaactgtatgtttttagatcaagagctatatcatgtgagtttttgaactagttttaatttaagccccgggttgtcttatatttggttttgttgtaatagaatcttgttgaagcaagtgagttttggtctaaatgaattttatgttcaggctaacagtgtacttgatgaaaatccaatgaaatatccgtaaaactcaagcgactgactcaa

SEQ ID NO: 10565 - DNA, 496 bp, Gossypium hirsutum
  Clone ID: GOSHI-09MAY01-C4124_2
gcgttcgccttattcagctaaataaacaggaaaaatggacgcaattgactcagtttttgatccgctaagggagttcgctaaggacagtgttcgtctcgtcaagagatgccacaagcccgatcgcaaagaatttacgaaggtggcgctccgtacagcgatcggattcgtggttatgggatttgtaggatttttcgtcaagctcatctttatccccattaacaacattattgttggatccggttaggtttgctttcatgttactgactcaacagcacagatcgagagataaattgtctgagatctcgaactaatttcagtatagactttggttttcctctatattcatatttgttggattttggtttagtttttagcgttgaaatggaaactacttgaagcaaatacaatccttgagttttggtccattgatttatgttttttccttgtatcgatgcttatcttgggtaaaaagatcatggatgtccttgtgcttttt

SEQ ID NO: 10566 - DNA, 635 bp, Gossypium hirsutum
  Clone ID: LIB3543-054-Q1-K6-H6
gctaataaacagaaaatggacgcaattgactcattttttgatccgctaagggagttcgctaaggacagtgtccgtctcgtcaagagatgccacaagccggatcgcaaagaatttacgaaggtggcgttccgtacagcgatcggattcgtggttatgggatttgtaggatttttcgtcaagctcatctttatccccattaacaacattattgttggatccggttaggtaaggttaggttccttctgtttttactttatttttcacattattacgaggttcgctgtcttaattactatagatctgtcactgattcggtatttatctgtatttatgtgaatcgttttggaagttaatgcattggaaaacgaaatcttctggatcttgtgaaaatctgttctccacaactatgaaaattgaaaattttctgaagtttagattcttgagtggtagggaaaacctggaaattgaattagtttttaactacatagtattgttcttcattgatgaatccccatttggcgtcccatggtcggtattacgtagaaaaaggaataaacaattggtcatggtaaaataataaggggaaaactcctttcctgctacggtgattcataggattgtcttagaaacctttt

SEQ ID NO: 10567 - DNA, 470 bp, Gossypium hirsutum
  unsure (1)..(470): unsure at all n locations
  Clone ID: LIB3148-002-P1-K1-C12
gcaaagcagaaatcagctaaataaacaggaaaaatggacgcaattgactcactttttggtgcgctaagggagttcgctaaggacagtgttcgtctcgtcaagagatgccacaagcccgatcgcaaagaatttacgaaggtggcgctccgtacagcgatcggattcgtggttatgggatttgtaggatttttcgtcaagctcatctttatccccattaacaacattattgttgcatccggttaggtttgctttcatgttactgactcaacagcacacatcgagagataaattgtctgacatctcgaactaatttcagtatagactttggctttcctctatattcatatttgntggattttggcttagcttttagtgttgaaatggaaactacttgaagcaaaatcaattcttgagtttttgtccaaaataaataatttttatattttattttttttgtctgcctttttttt

SEQ ID NO: 10568 - DNA, 264 bp, Gossypium hirsutum
  Clone ID: LIB3148-044-Q1-K1-G3
caaataacattcttcaaattcatttgattttgattaaggaacccaaaggaaaaaaaaaaggaggggaggaagcaatgcctgatgtaaactcaggcatacaagtttgtggtttggctttcatgttactgactcaacagcacagatcgagagataaattgtctgagatctcgaactaatttcagtatagactttggttttcctctatattcatatttgttggattttggtttagtttttagtgttgaaatggaaactacttgaagc

SEQ ID NO: 10569 - DNA, 910 bp, Gossypium hirsutum
  Clone ID: GOSHI-09MAY01-C4004_1
gatatggctgatgctagtccgaggactgacatctcaacagatgcagaaacagatgaaaaaaatctgaggtttgatagtgaaaaactgaatgctgctgttgcagcttccgattcaagtgaccgatcaaagagtaatttggatcaaaagattcttcgcagacttgctcaaaatcgcgaggctgcaagaaaaagccggttgaggaagaaagcatatgtgcaccacctggagagcagccgtttgaagttgccacaacttgagcaggagctccagcgggcacggcagcagggtatcttcatatcaagctcgggagatcaaagccattcgttgggcggaaacggtgccatggcatttgatgtagaatatgcacggtggctggaagagcacaaccgacaaattaatgagctgagaacggcagtaaattctcatgcaggcgatgcagaacttcgtattattgttgatggtgttatggctcactatgatgaaattttcaggctgaagagcaacgtagctaaggctgatgttttccattcgttgtcaggcatgtggaaaacacctgccgagaggtgtttcttatggcttggtggtttccgttcatctgagcttctaaagcttcttgtaaatcaattggagcctttgaccgagcaactagttggtgggagttaggcaacttgcagcaatcctcccttgcaggctgaagacgcactatcaccaagggatggaggcattgcagcagtctctggctgaaacattgtcgactggatctttaggctcttctggatcatctgggaatgtggcgaactacatgggtcaaatggccatggccatggggaagctcgggactcttgaggggtttattcgtcaggctgacaacctacggcagcaaactctacaacaaatgcaccggatattg

SEQ ID NO: 10570 - DNA, 503 bp, Gossypium hirsutum
  Clone ID: uC-gsronu33B027e10b1
tttttatttctccctgactgttgcataacaaataaccagcaccatcttgtggatctcctgatttttttccatttgcatgtcaagtagcttgtgaggctaaaatttccacgtatttattggtttctctattcttcttgttcgcttcgttttctttgtaggtgccatggcatttgatgtagaatatgcacgatggctggaagagcaaaaccgacaaattaatgagctgagaacggcagtaaattctcatgcaagcgatgcagaacttcgtattattgttgatggtgtaatggctcactatgatgaaattttcaggttgaagagcaatgcagctaacggctgatgttatccatttgttgtcaggcatgtggaaaacacctgccgagaggtgtttcttatgcttgggggtttcacgtcatctgagcttctaaagctttttgtagatcaattggagcctttgaccgacaacagttggtggggataggcaacttgcagcaatcctccca

SEQ ID NO: 10571 - DNA, 1020 bp, Gossypium hirsutum
  Clone ID: GOSHI-09MAY01-C4374_1
caacactcaattccaaaacacacaccaaattccagcacccaaaataatggccctctgcaagccgtattctaggttggtcctagcactggccatggcattggtggcagctacggtgcctgtttatgggcagagaactatcaacactccatgcaccccatcggcacttaacatcttcactccttgtatgaacttgcttaccaatagcagtgccaatggtacttcgcccactgcagattgttgcaactcgcttaaaacgctcacatcgagcggcatggactgtttgtgcctcattgtcaccgggagtgtcccgttccgtttacctatcaatagaactctagctatttctcttccccgagcttgtagcatgcctggtgtccccctccaatgcaaagcctctgttggtgcacctgttcctgctccaggtccaatttcacttgcaccaaccctttctccaggaacatcaccaactttaagcccaaaaggttccattgtgccagaaccaacaggacctgctgaagcaccggaatccaacaccatcccgaccgccacgacgggtagccgccctgttctgaaccccacagcatcagctgccgatcgttcctacggtttttcaccatcacttgtgttgttgacattagggtttgctgttttcaagtactactaggcaaccaatatttctatttctatgttcttatttatgggttgtttgtgtaaagtatattctttttagtggtctgaactgaaaccattgttttctagagcatattgggtgattgtttttaaataaactggttaatttgaagtttgcaacaaattaacaaacatatgttatatctaaaaaaaaaaaaaaaaaaaaaaaaaaaaaaaaaaaaaaataaaaaaaaaaaaaaaaaaaaaaaaaaataaaattgaaaaaaaaaaaaaaaaaacccaaaaaaaaaaaaaagggggggggcctttttgaggagaaaaattttgttccgcggggttgcgagagtaaattttttttttgggggcccc

SEQ ID NO: 10572 - DNA, 1316 bp, Gossypium hirsutum
  Clone ID: GOSHI-09MAY01-C4224_1
tcggttcgtgatcttttcaaaggccaaggagaatgccccctgtatcgtctttgtggatgaaattgatgccgttggacgacaaagaggaactggtattggtggagggaatgacgagagagagcaaactcttaaccagctttggaccgaaatggatggtttcgagggtaacaccggtatcatcgtaattgcagcaactaacagagctgacattcttgattccgctttgttgaggccaggacggtttgatagacaggtcactgttgatgttccggatatcagaggcagaactgagatactaaaggttcatggtagcaacaagaagttcgaaactgatgtatcatttgatgttatagccatgagaacgcctggttttagtggagcagatctagcaaatctgttaaacgaagctgctatgttggctggtcggcgtggcaagaccgcatcttcatctaaagaaatcgatgattcaattgataggatcgtggctggaatggaaggaacagggatgactgatggaaagagcaaaagcttggttgcataccacgaggttggccatgccatttgcggaactttgacaccgggtcacgatcctgttcaaaaagtcaccttgattccacgtggccaggcacgtggtcttacctggttcattccttcagatgaccctaccttgatctccaagcaacaactctttgcaagaattgttggtggacttggtggcagagccgcagaggaaatcatcttcggtgaacctgaggtgacaacaggtgcagctggtgatttgcagcagattactggtttggctaaacagatggtggtgacattcggaatgtctgaaattggtccatggtcccttatggactcatcagcccaaagcgccgacgtcataatgagaatgatggcaagaaactcaatgtcagaaaaactcgccgaagacatcgatactgccgtcaagaggttatcagacagtgcttacgagattgcgttgcaacacataaggaacaaccgtgaagccattgacaagatcgtcgaagtcctccttgagaaggaaacgatgagtggtgatgaattcagggcaatcctttcggagtttgttgaaatcccggccgaaaatcaggtccctccttcagtacccaccccggtctctgtttaagcagacagtgttaaacaagttgtacaagtagttcactctttttatgttacacattaaatggtttaaatttatactggtatctttcacttatatgtaattagaaaatgtatgtatactgatttttaatttaggaatgagaaaatggaacagtttttgagctttgtcc

SEQ ID NO: 10573 - DNA, 844 bp, Gossypium hirsutum
  Clone ID: GOSHI-09MAY01-C5944_1
gcccacgcgtccgcggacgcgtgggcaagaatccatctgtggagcaaagcaagaaattggctcctagatgccttgggcatgtccattagtttaggtccctcgagttctggcccatctccccttactgcaacaaggaaatctttaattatggagaaaatgggagataaggacatcgtcaagcgagcatttaaaacatttcagagtaattacaatcaattgaaaccttccagtcaggaacggtctccagcagcaaagccggtgcctacaaaggggagagaatcaaggctttccactttgacgactccgcaaaaggagaacggagggtcttctaaagttagtagtatggagaaaaagaatgctaaggctgctccatcttattctggcttgaaaagtgatgaaagacctgagagaagaaaggagctctccaagaaactggaaggaaaatccaatggaagggaagccgaaaggaaaaatctccagacaaaatcaaaggataacagagacgcagagatcaaaaaattaaggcagagccttaattttaaagctacaccactgcctggtttttatcatggacagagaacatcaaaaagtcctctcgataagataggttccaagagtgacatccattggcaacctggcttcctcgggtaaacgaattgggcttcatctacaactagtgggaggacatatcaagaattttttaaaaatgaaaaacagtaggaaaagacggaagcataagaagtacaccagctttggaggctaactacattgctgggcaaaaagaaaaggtctatctgaattctgaaggcatgtttttcattgaggacacatgccatgatattac

SEQ ID NO: 10574 - DNA, 437 bp, Gossypium hirsutum
  unsure (1)..(437): unsure at all n locations
  Clone ID: LIB3147-019-Q1-K1-C4
ttctataatcatattgagcagtaatagacatttatattgcaagaccttccactcaagaaggagcttcatcagcgaagccggtgcctacaaaggggagagaatcaatgctttccactctgacgactccgcaaaaggagaacggagggtcttctaaagttattagtatggagacaagaatgctaaagctgctccatcttattctggcttgaaaagtgatgaaagacctgacagaagaaaggagctctccaagaaactggaatgaaaattcaatggaagggaagccgaaaggaaaaatctccaaacaaaatcaaaggataacagatacgcatacatcaaaaaattaaggcatacccttaattttaaagctacaccactgtcttgtttttatcatggacagagaacatcacatagtnctctcgaatagatangtttcaaga

SEQ ID NO: 10575 - DNA, 891 bp, Gossypium hirsutum
  Clone ID: GOSHI-09MAY01-C5964_1
cggttggcgataggttgagtcaatttgcagaaagttacggagtgagtttgaaatttaatgtgatatccggactcaaactcagcgatctgagtcgcgactcactggttatcgaacaagacgaaccattggccgttaatttcgcgttcaagctttacaggatgccggacgagagcgtctccgtcgagaatccaagagacgagctcttgcgccgcgtgaaaggattagcaccgcgcgtggtgacattagtggaacaagaaatgaacacgaatacggcgccgttcgcgttaagagtgggagaagcatgcggatattacggagctttattcgactcggttgagtcgaccgtgttgagggataacccggagcgagcgcagctagaggaagggctgttacgcaaaatcgccaactcagttgcttgtgaaggtagggaccgcgttgaaagatgcgaggttttcgggaagtggcgggcccggatgagcatggcggggttcgagttaaagccactgagccaaaccgttgccgaaacgatgcgcgccaaactcaactcatgcaaccgagtcaacccaggcttcaccgttaaagaagaaaacggaggtgttagcttcggttggctgggccgaacactcaccgtcgcatctgcttggcgttaaacttggctttccctcatttctctctctaataataaaattatgatattattattaatggttattatatttctaacgttttccttagaagaaaaagaatatgaaaaagcaagagaaaaaaaatatcccaccaaacccaaataataaaaaggagtgtttggataggaagaaatttctgcgtcttattaatgttttttttttacatttttgtgtgtggaatgaagtgttcgggataatgctgact

SEQ ID NO: 10576 - DNA, 516 bp, Gossypium hirsutum
  Clone ID: GOSHI-09MAY01-C5914_1
catcaacgaaagtagcacccttcatactgtgcgctgctctcgacctctaagacaacacaaataagcggtgctggcatcatgtgtacgctaagtatttaacaaatctgtgttgaatatatacctcacgcatcgaagttcctaagaatacacttccatttgaccgaataaatgatttcttgagaagaactaataccttggtgaacgtaccatcaaagggagccttgaagcatactcttgcatacacacaggaacttgataaaagactttctctcagtttggaaaatgagatccttgactctcttgggaaatcttcagataccgactcctcaccagttgaattcctgttgagcagatcaagccggaagacgttgatctacttggtgcttaccctctatcacatgtatccagattatgacttaagtgcagttaaagcacaccagttcttcactgaggaaatctgggatacttttaagcagatttttgaaacctacatgcttgaagcctcaaaagaatgga

SEQ ID NO: 10577 - DNA, 696 bp, Gossypium hirsutum
  Clone ID: GOSHI-09MAY01-C5854_1
tgcaattttcacaccaaggggtcggtacagtgtcgaacttgatctttcattcttgagactccaagggcaggcaaatgatttcaaaattcagtatagcagtgttgttcgcctgtttttgcttccaaagtccaaccaacctcacacttttgttgttgtcacgctggatccacctatccgcaaagggcaaactttgtacccccatattgtcttgcagtttgaaactgattatgtcgttgaaagcaccttgtccataaatgaggatcttttgaataccaagtacaaagacaggctggaaccatcttacaagggacttattcacgaagtttttaccacaataatgcgtggtttatctggtgccaaagttaccaaaccaggaaaattccgtagctgtcaagatggttatgctgtcaagtcttcattgaaagctgaagatggagtcctgtatccacttgaaaagagcttcttttttctacccaaacctcctacacttattcttcatgaagagattgactatgttgaatttgagaggcatgctgctggtggctcaaatatgcattattttgatcttcttataagattaaaaactgagcaagaacatttatttcggaatattcagagaaatgaatatcacaatttgtttgacttcatcagttctaagggtttgaagattatgaaccttggagatgtacgaaccgc

SEQ ID NO: 10578 - DNA, 796 bp, Gossypium hirsutum
  Clone ID: GOSHI-09MAY01-C5554_1
aaggttgcttaggacagcacgactctgcagccgatgaaactgccacgtcgacctcttgatctcaatctcttgcgcttatatcatttagctctttgtctttcaaagatttacccgtacaaaataaggggggcaaattttaaaaaaaaaaaccgagaaggatggagaaaccggcgacggaagttataaaaggtgacggttgggggcgttttcccgatgatttggagtatcattcaggatttggcaatcattttgaatcggaagtgatcgccggatctctgccacgtggccaaaatagtcctcttatttgcccatttggactctatgctgagcagatctccggcacttcctttacttctcctcggaagcttagtcaacgcagctggttctatagaatcaaaccatcggttactcacgagccgttttggcctcgtgaaccgagtcataaaaagcttgtgagtgaatttgatgggtccaacacggtagcaaacccgactcagctccggtggaagcctgtggatattcctgattcgccgacggattttattgatggtttatacactatatgtggagctggcagctcattccttcgccatggatttgctattcacatgtatattgccaacaaatcaatggacaattgtgccttctgcaatgcagatggtgattttttggtagttccccagcaaggaaggctatggatcactactgaatgcggaagattgcaggtgtctcctggtgaaattgttgtcttaccccaaggcttccgctttgttgtagatttgcctgatggcccatc

SEQ ID NO: 10579 - DNA, 542 bp, Gossypium hirsutum
  Clone ID: LIB3583-027-Q6-K1-B11
aaaggagaaaggaagggtactgggtgtttccctcactttgcattcattcccctctcgcttcctctttgcatctctaacccgaacattcacactcaaatttgataaatgaggaaactttgtccaaacatcgacaaagaagatggccttgagacggttctggaggtccctgtccccgaagaaatgttcaccagcatgggcaacaatcttcaagcccgtctggaaaacatgttaacatggatgaaagctcaagcatccgataagtggtcccaacccatgcttgccggtcggattaacgagctgcgcttcctactttaccttgttggatcccctcttatccctctccaggtgcaattgggccactctgttcacaaacctgtcaaggactgctccattcaagcttcaacagcaaaatacattgtgcagcagtacatagctgcaacaggtggacaacaagctttaaacgcagtgcatagtatgtgtgtaaccggacaggtgaaaatcactgcatcggagtttcaacaaggcgatgtaaacgttaaagt

SEQ ID NO: 10580 - DNA, 484 bp, Gossypium hirsutum
  Clone ID: LIB3583-027-Q6-K1-B5
acgcccacgcgtgcgtttgtcagtctacgatatgtcaaaggtcatccaaatggaaagtctgacccgaaacgaggggtctacttctggacatgtgcattggctttgactgaaagctaacgttggcagacatccactaataatacggactttagacgtttctgactgttcatgatcccaaatatatgttcaccagctatgatcaacaatgttcaaacccgtctggaaaacatgttaacatggatgaaaactcaagcatccgataagtggtaccaacccatgcttgccggtcggattaacgagctgcgctttctactttaccttgttggatcccctcttatccctctccaagagcaattgggccactctgttcacaaacctgataaggactgctccattcaagctttaacagcaaaatacattgtgcaacaatacatagctgcaacaggtggacaacaagctttaaacccaatgcataatatgtgtg

SEQ ID NO: 10581 - DNA, 617 bp, Gossypium hirsutum
  Clone ID: GOSHI-09MAY01-C5564_1
ttcccttcgtacgaacaggcccgggacaacaatcacctccaaccccaccaagaaaattttcgaaattactgcttcctctatcaactggttctgaaatccaaaccctaattttcctaatccgaaaccctaatcgaactaattttcaaatcagttaagaatttccggccgaatcaggaaccctagattccatggcgtcgaggaaaaaggaatccgaagggattgccttgctatccatgtacaacgatgaagatgacgaagaaatgggagacatcgaagaaggtgaccaccggcaaaaccaacaaactggggaagaagaagaacaacaacaagaagggcagccgctagaagaagaaaacgattacagagaatctaataacaatatggaagaagattcgagaaccaacgataatacgcctccttttcctcaccaaaacaccattctttcacaacaacagcaggagccttctgtttcttcgccgcagcaacctcaaactttggtttcgtcgaagagaagtggaggaggaaggctgaccattgttgattatggccaccatgaatctgccatgtcaccggagcctgaggaaagggaactagaaacagtgatgacctcatgatta

SEQ ID NO: 10582 - DNA, 605 bp, Gossypium hirsutum
  Clone ID: GOSHI-09MAY01-C5504_1
aaaatctgaaatagaaaggaaagtaaattagtgtgtatggagagggcagatcgtaacgatcattaacaaaatatggttcagcttcaacaagctagctcaacgttgcacttctttcagttagatctttcttctcgcttctgattcaaatcagatcttaagaaaaccgtgaaccgcatcgatctgatctgcaaaattactagggatttcgtagggcaaaaaatataaacgaaagaagaaatggcgggggcagcatctgcactatttcttctagatataaagggccgtgttctggtgtggcgtgactaccgtggcgacgtctctgctgctcaagctgaacgcttcttcaccaaactcatcgaaaaagagggagatccgcagtcgcaagatccagtggtgtatgataatggagttacgtacatgtttatacaacacagcaacgtgtacttgatgactgcaacaaggcagaattgccatgctgccagtcttcttttcttcctttaccgtgtagttgatgtttttaagcattatttcgagggattagaagaggaattcgctaagggataactttgttgtagtgtatgagttacttgatgagattatggatt

SEQ ID NO: 10583 - DNA, 963 bp, Gossypium hirsutum
  Clone ID: GOSHI-09MAY01-C5534_2
cccacgcgtcgctttttttctgaaggctaatatatcatttgtcatttgatgtttctctggttacccattctctggagagaatttgaggaaacttataattttagaattgcatagtgcgaagcatcttctcaagaagttttcttggataattcctacaatgagcagttgtctcagtgaagttagaaagatgcgaaattttctgctacttctcttaaccctatagaagttttagactgctcagaaaaattctttcctcaataaaagaagaccacccaaaagaagccaattataactgagttgaagtgccactcttatagcgtcattttcatggacaaacaagttgacagttctgaagtttgcttttccttttcctccccaaatgtctcagtgcttcccacgcgtctcgtgttgggaattttgtgcaatctgttgtgcctcgccagctggtttatggcaccatggtctatgtccgacaaacaattgtttctgatgcttcttgtgctttagctagggcagtttgtatttgcaacaaggtacagtgctgttcgtagacaatttggttcccagaatggcggttcaaagacccatgtgattgactataaactcattaaagcaaactcttgtatttgattggattgtgcaaagattcaaaattggtgtttagtaggttaaattgctttacacttgatttacacaaaaattggaagccaatgattttcttccacatttactccgaggcttaatgtcatgtacctgcaaggggtttaaaatctaatgactaactttctgtaacctgcagaatgctaattgaatgattgctcggaaattattgtgcgtggtccatgggttatcttctctaacaagtgtggctcctctgagattatttgctagtttattatacctaacctgtacctatgaaggaaaacattttggtgctgttcttacaaggtgcaagatttttta

SEQ ID NO: 10584 - DNA, 1237 bp, Gossypium hirsutum
  Clone ID: GOSHI-09MAY01-C5534_1
cgaaaggataatagaactatgctatctaggaaggacttgtttaaagatactttgcgaaaagctggtcatgcatggaagcggataattgagcttcgtctctctgaagaagaggcctctaaattaaagttttttgtcgatcaaactgttttcacagatcttcactggggaatgttcatacctgcccctcgcggccgaggaaatgaggagcagcaacagaagtggcttccattggcatataagatgcaaattatgggatgctatgcacaaactgagcttggtcatggctccaatgtccaagggctagagacgactgcaacatttgatcctgagactgatgaattcgtcattcatagtcccacattgacttcaagcaaatggtggcctggtggactgggtaaagtatccacacatgctgtggtttatgctcgtcttattacagatggacaagaccatggagtgcatggttttattgtccagctgcgtagcttggacgatcacttacctcttcctggcataacagtgggagatattggaatgaaatttggaagtggggcatataacagcatggataatggtgttctgagatttgatcatgttcgcattccaagggaccaaatgctaatgcgtgtttcacaggttacaagagaagggaaatttgtgcaatctgatgtgcctcgccagctggtttatggcaccatggtctatgtccgacaaacaattgtatctgatgcttcttgtgctttagctagggcagtttgtattgcaacaaggtacagtgctgttcgtagacaatttggttcccagaatggcggcccggagacccaggtgattgactataaaactcagcaaagcagactcttccctttgcttgcttctgcctatgctttcagatttgtcggtgagtggctgaaatggctatacgctgacgtgactcgtatattgccagctaatgatctctttacattaccctgagctcattctagtactggaggctataaactattactaccttttgtaactgctaatcttttaatatagccgcatatatacttggtattggccattctttaactcggacttcctgtatctctcaagttaatttccactcttccctctaggaaccttgtcccgttcctgctcgttcttgattttatttaaccgcttcacttgatctcgcactaaccctcttcatcacctttattcatattatgtccctaggccttcgtatttctttccc

SEQ ID NO: 10585 - DNA, 1324 bp, Gossypium hirsutum
  Clone ID: GOSHI-09MAY01-C5484_3
gttttcttttgatttcgtgttttgttgatttatactcgttgttgcgatggggaaagtagcggtgggtgcggcggccgtgtgtgccgcggccgtgtgtgccgcggcggcgttggtggtacatcaccggatgaagagttcggggaagtgggcccaggctcaatctatactgaaagatttcgaggaaaagtgcggcacgccgatttcgaagctgaaacaggtggcggatgctatgaccgtcgagatgcacgccgggctcgcatcggaaggcgggagcaagctcaaaatgatcatcagctacgtcgataatctccccactggtgatgagaaagggctgttttatgcgctcgacctcggtggcaccaatttccgtgtgctacgtgtacacttgggtggtaaagaacaccatgtcgttaagcaggaattcgaggaagtatcgattcctcctcatttgatgaccggatcttctgacgcattatttgattatattgccgaagctcttgcaaaatttgttgctacagaaagtgaaggtttacatttttcacccgatagacaaagggagctgggggttacgttctcatttcctgttcggcaaacatcgatatcgtctgggactcttataaaatggacaaagggcttctcgattgaagatgcagttggtcaagatgttgttggagaattgactaaagccatggaaaggattggcctcgacatgcgtgtgacagctttggtcaatgacacaattggcacattggctggtggaagatataacaaccccgatgttgttgctgctgtgatattgggtacaggcaccaatgcagcttatgtagagcgtgctcatgcaattcccaaatggcacggtcttctacctaagtctggggacatggttatcaacatggagtgggggaacttccgggcttctcaccttccaatatcagaatatgaccaagcactggatactgagagcttaaaccccggagaacagattttcgagaaattgatttctggtatgtatttgggagaggttgtacgcagagttctgtacaagatggccgacgaagccgcattttttggtgatactattccggaaaaactgaaaattcctttcatactaagaactcctcacatgtccgcaatgcatcaggacacaactccggatctcaaaattgtggcgacaaaactaaaggatatcttagagatatcgaatacctccctgaaaatgagaaaagttattgttgagctatgcgacattgttgcaactcgtggtgcccgactatcggctgcgggaatttgccgcatcctcaagaaaatcggaagagacacattg

SEQ ID NO: 10586 - DNA, 1066 bp, Gossypium hirsutum
  Clone ID: GOSHI-09MAY01-C5484_1
ccgaatgtgaccaagcactggatactgagagcttaaaccccggagaacaggtcactttcttcagccccgagtttctagtgtgcggctgattaattttctaaacgatatgatgttaactctattaactactatttccagattctcgacccagcgtccgcccgcgcgtccgggggaggggttgcacgcagagttctgtacaagatggccgacgaagccgcattttttggtgatactattccggaaaaactgaaaattcctttcatactaagaactcctcacatgtccgcaatgcatcaggacacaactccggatctcaaaattgtggcgacaaaactaaaggatatctcagagatatcgaatacctccctgaaaatgagaaaagttattgttgagctatgcgacattgttgcaactcgtggtgcccgactatcggctgcgggaattgccggcatcctcaagaaaatcggaagagacacattgaaagatggtgaaaagcaaaagtcggttgtgtctctagacggtggattgtacgaacactacaccaaattccgtacctgcatggagagccccccccccgagttgctaggagaagaagtctccgaaaacatcattatcgaacattccaccgatggttccggcatcggggcagccctcctggcggcttctcactcccaatacatcggaattgatgaatcctgaagatcgttgaacttaaaaagtaagacatcgtagatcgaagaatcgaactattgtgatttttgtatatttttcagctgttgcgaactaagagttcgtgctcgcaaatcgtttttaagttatggtcaatccggagtgtataatcaggtaatggatcaaatgtaacgagtgtctgcttctagccgccggaagcttcatcgctgcaacttgtcactcggctcgatccattcacgttcacggtgtttgaggatcaattccataacaccgatgtataagtacccgtcgatggtagttcgataagggtatgtaaaactccaatttcgagttattgatctttgcacatcgagaataaaaggtcatcttacggttc

SEQ ID NO: 10587 - DNA, 588 bp, Gossypium hirsutum
  Clone ID: LIB3828-010-Q1-K6-A5
gtttttccaacatgtagtttagcagtctttgatttttgggtgtgatgagaaattggagatcggttaacatttatctgttgattccgcagaactcctcacatgtccgcaatgcatcaggacacatctccggatctcaaaattgtggcgacaaaactaaaggatatcttagagatatcgaatacctccctgaaaatgagaaaagttattgttgagctatgtgacattgttgcaactcgtggtgcccgactatcggctgcgggaattgccggcatcctcaagaaaatcggaagagacacattgaaagatggtgaaaagcaaaagtcggttgtgtctctagacggtggattgtacgaacactacaccaaattccgtacctgcatggagagcaccctcaccgagttgctaggagaagaagtctccgaaaacatcattatcgaacattccaacgatggttccggcatcggggcagccctcctggcggcttctcactcacaatacatcggaattgatgaatcctgaagatcgttgaacttaaaaagtaagacatcgtagatcgaagaatcgaactattgtgatttttgtatattt

SEQ ID NO: 10588 - DNA, 1012 bp, Gossypium hirsutum
  Clone ID: GOSHI-09MAY01-C5424_1
cccacgcgtccgcccacgcgtccgcggacgcgtgggctccaaaggggtcaaattcaaattagtacataaatccacctaatctcgatgcaggctgctgaatgtacctggacacacttcgaaatgcttaggccattttgctttaaatccccatccacaacgcccttattttttaatttctccaagcatttccaaaagggttattccgattcttctttctttaggtctaattggagaatcagcaattacccgtctttcatggctaccatctcctccgtttccacccacaaagaccctgtttctactcacgatgccactcccaatatcacccaccaaccagttcaggttgcgaagcgattggagaagttcaagactacaatttttactcagatgagtatgcttgcaatcaagcatggagcaataaaccttggccaagggttccccaactttgatggtccagattttgtaaaagaagcggcaattcaagccattaaagatgggaaaaaccaatatgctcgaggatatggggttccagactttaacaacgccatagctgctcgcttcaagaaggatactggacttgtgattgaccctgagaaggaagttactgttacctctgggtgcaccgaagctattgctgcaaccatgttaggcttgattgatccaggtgatgaggtgatcctctttgctccattttatgattcttatgaagcgacattatccatggctggtgccaaagtaaaatgcatcacattgcgccctccggattttgctgttcctattgatgagcttaagtcaactatctcaaagaacactcgtgccattcttataaacactccacataatccaacggggaagatgtttactcgtgaggaacttaatacaattgcatcgctatgcattgagaatgatgttttggtttttactgatgaagtttatgataaattatcattcgaaaatcacatttcaatggcatcccttcctggaatgtatgagcgaacggtaactatgaact

SEQ ID NO: 10589 - DNA, 1257 bp, Gossypium hirsutum
  Clone ID: GOSHI-09MAY01-C5754_1
aatatctacctgttcaagctggtcatgctgtatcagtgcaaagtgctgcagtgccaaccccatcagttatcaacggtgaacatatagatgcgacagctataaaactcaaagaacctggaataggtgacatattttcttcgacagacagctctctacttggcaagctgaaaggtgaatctacagtgcagaagcgcagatgctgacttgtttcagagaaatattgctgacaatgacataaaggatattgaaactgggttactcgagccattattacatcccagtgtggaagtgccaccttcgtctcaaacaataacagaaactgaacatagaggtactgatgctggtgaagttcgtgaatgggaaattctgaaaagtatcgtctatggtggattaattgaatcaatcacaagtttaggggttgtgtcttctgcagccggtgctggtgccggtacattgaatgttttggctttgggagtggcaaatctgattggaggacttatcatcatttgtcataatcttagggaactgaaaaatgaccaacctcgagcttctgatgttgaggaagatcggtaccaagtgctgttaggacggcgacagaatttcaaactgcatgcatttgtagctattttatcattcctcgtatttggcttggttcctcctgtcgtctatggcttctcgtttcgcaatagcgatgataaagacttcaagctagcagcaatggccggtgcttctctaatatgcatcattttgcttgcactagggaaaggtcatgttagaaaaccaaaccgagcttatttcccaactgtattttattacctcagccttgggataacggcgtctggcatctcatacgtagttggtcaactgttgaaaaaactcgccgagcagctcggtttgtttgactcgagttcaactgtcagcatgccgtttttggagacgataccaatggagatgggaagggcatcctattgaaagttatgggattggattccgaaggaatttggaagagaatgatggcatgagagcatcaattctcagtgagtcacatagcatgtttttagcttatttcttggggggtggtacattttatattctcttcagcgacttgcatttttagctttagggcaccgaacaaacttattgaagaaataagtaaatttcccgaaagttcttcacgccatttttgcactcttttttttttggtaacatggcttatattattcgttaataaattataataaatactttttttttttt

SEQ ID NO: 10590 - DNA, 414 bp, Gossypium hirsutum
  Clone ID: LIB3135-035-Q1-K1-B9
tcggccaacccgttcggccaacccgtcggccaacccgtccgaaacctcaaagaacctggattaggggacatattttcctggacagacagctctctacttggcaagctgaaaggtgaatctacagtgcagaagccagatgctgatttgtttcagagaaatattggtgacaatgacataaaggatattgaaactgggttactcgagccattattacatcccagtgtggaagtgccaccttcgtctcaaacaataacagaaactgaacatagaggtagtgatgctggtgaagttcgtgaatgggaaattctgaaaagtatcgtctatggtggattaattgaatcaatcacaagtttaggggttgtgtcttctgcagcccgtgcttgtgccgatacattgaatgttttggctttggga

SEQ ID NO: 10591 - DNA, 281 bp, Gossypium hirsutum
  Clone ID: LIB3145-041-Q1-K1-G9
ccctttcgtcttgctactcgtccggtgcggcagagggggggtcttttgaaacaataacagacactgaatatataggcactgatgctggtgaagctccagaatgggaaattctgaaaagtatcgtgtatggtggattaattgaatcaatcacaagtttaggggttgtgtcttctgcagccggggccggcgccgctacatagaatgttttggcttcgggagcggcaaatctgattgcaggacttatgatcattcgaaataatctgacggaactgaaaaatgac

SEQ ID NO: 10592 - DNA, 1037 bp, Gossypium hirsutum
  Clone ID: GOSHI-09MAY01-C5724_1
aaaaaaataataagtaaaggttaaaattaaaatgaattagtaattagtaaaacaaggcattttgattgacgatctccacgaagctctctctctctctctcttttttcttctctttaaaaatttaatactcgcattctcttcttcacccttttcaaacttatttctttcgcctcttctttcttttttcggatcttctctctctctccaaagatcttcgattctttccgtctccttttcgttcgctctctgagtttggagaaatcgaagtttggagtgtgatggcttcgatagcgtgttcttcagctgcatttactggaacttcagcttcggatcttcttcgaagctccagtaacggcgtgagcggcatcccttcttaaaaccctagggaaggcaccattttccgtgaaaaaaagggatgcaactgtagttgcaaagctaaagaaagggaagaagcatgaatatccatggcctgcagatccagatccaaatgtgaaaggcggggtcctaactcatctctcccatttcaagcctttgaaagaaaagcaaaagcccgttactttggattttgagaagccccttgttgaaatcgagaagaagatgattgacgtgaggagaatggcaaatgaaactggtttggatttcagtgatcagattatattgttggagaataagtatcaacaggctctaaaggacttatacacacatctgacccctatacaacgtgtacacattgcccgacaccccaatagacctacattccttgatcatatatttagcattaccgataagtttgtggaacttcatggagatcgatcagggtatgatgatccagctattgttactggtataggaaccatcgatgataggcgatacatgtttatcggtcagcaaaagggtagaaacactaaagagaatattcaccgcaactttggaatgccaacgccccatggttacaggaaggctttacgcatgatgtattatgcagatcatcatgggttttctataggtacttttatcgacactcctggggcttatgc

SEQ ID NO: 10593 - DNA, 548 bp, Gossypium hirsutum
  unsure (1)..(548): unsure at all n locations
  Clone ID: LIB3584-034-P1-K1-E3
cccacgcgtccggccctctggtcttcctatagaacatcaaaaaatcctctgtttttttttttttgtgggtcagagacacttccttctgttagctttgccctgttttttggtaactggtgtattgatcaaagagagagaaaaaaatggaatatgaggacatatatggactatctccaaggcccaaatatgattgccttctctttgatcttgatgataccctttatcccttgagctctggtcttgctaaagcatgtggaaacaacattaaagattacatggttgaaaagctggggattggaaaggagaaaattgttgaattgtccaactacttgtataagaattatgggacaacaatggctggccttagggctgttggttatgactttgactatgatgattaccatagctatgtccatggagggctttcttatgagaacttaaaaccagaccctcaattgaggagcctattattgactntgcctattagaaaaattatcttcacanatgctgatagggtccatgcaattaaagctcttagtaaacttgga

SEQ ID NO: 10594 - DNA, 505 bp, Gossypium hirsutum
  unsure (1)..(505): unsure at all n locations
  Clone ID: LIB3585-038-P1-K1-H6
acgcatgcgtccgctcgttcgttcacgcatacgcccacgctgccgctggtctattgatcaaagggtgaaaaaaaactgcgtacgatgacatataccgactatctgcaaagcctaaatatgattgccttctctttgatcttgaggaccccctttatcccttgagctctggtcttgctaaagcatgtggaaacaacattaaagacgacatgactgaaaagctggggattggaaaggagaaaatagatgaattgtccaactacttgtataagaattatgggacaacaatggctggccttagggctgttgagagtgactggctctatgaggataaccatatgctatgtgcatggagggcttccttatgaaaacttacaagcagaccctcaattgaggagcctattattgactntacctattagaaaaattatcttcacaaatgctgatagggtccatgcaattaaagctcttagtaaacttggattagaagactgttttgaagggatta

SEQ ID NO: 10595 - DNA, 563 bp, Gossypium hirsutum
  Clone ID: GOSHI-09MAY01-C5154_2
tcgcccacgcgtccgaaacgccctcactctttcacttcgtcttctccaatttcctccgaaagtaagatggctgtggatccctcagagcttcggtattatgaggatgatgacactccaacaatgaaaacaatcaagggtgcaactactggttttgttgctggaactatctggggaaccgttgttgctacatggtatgatgtgcctcgtgttgagagaagtgttgccatacctgggcttgtaagaacgctaaagatgatgggaaattatggaatgacatttgctgcaattgggggagtctatattggtgttgagcaactggtgcagaattataggatgaagagagactttgtcaatggtgctgttggtggtttcgtggctggggcttccattctcggtttcaaaggcaggagcatctcaacagctatttctgccggatcagcactggctttcacctctgcggtgattgatgctggaggtcagactacaaggctggacacagggaaggagtattacccatacaccaccaagaaaaggcctgttgagtcataaatcttgcatgtcgc

SEQ ID NO: 10596 - DNA, 878 bp, Gossypium hirsutum
  Clone ID: GOSHI-09MAY01-C5154_1
tttcacttcgtcttctccatttcctccgaagtaagaggctgcggatccctcagagcttcggtattatgaggatgatgacactccaacaatgaaaacaatcaagggtgcaactactggtttgggggctggaactatctggggaaccgttgttgctacatggtatgatgtgcctcgtgttgagagaagtgttgccatacctgggcttgtaagaacgctaaagatgatgggaaattatggaatgacatttgctgcaattgggggagtctatattggtgttgagcagctgttgcagaattataggatgaagagagactttgtcaatggtgctgttggtggtttcgtggctggggcttccattctcggtttcaaagggaggagcatctcaacagctatttctgccggatcagctctggcattcacctctgcggtgattgatgctggaggtcagactacaaggctggacacagggaaggagtattacccatacaccaccaagaaaaggcctgttgagtcataaatcttgcatgtctctgttgagaaggcacttccagtgaaacgtgagataatcgatcctgttcgatgatctgtctttgttttttgaagatataatcatactcgcggactccattttgctttttgctattcacttttaaagtgaggatgttggtttgaataaaaatgcatccgaatttatggaattcttgacgacgaattgttgcatttgttaaatattggtgcctgttataatgagtatcgttgttaatgaaatgaaagagaagatctttgccttaaaaaaaaaaaaaaaaaaaaaaaaaaaaaaaaaaaaaaaaaaaaaaaaaaaaaaaaaaaaaaaaaaaaaaaaaaagtcgacgcggccg

SEQ ID NO: 10597 - DNA, 400 bp, Gossypium hirsutum
  Clone ID: LIB3083-009-Q1-L1-F1
gaaacatttctcatctgaaaccacacacgcactcttactgagcttggtcttctctgattgcatgagaaagtaagaagatatccatggaaccgtcagagcttatgtattatgaggatgatgacacgccaacgatgaaaacaatcaagggtgcaactacaggttttgttgctggaactatctggggaactgttgttgctacatggtatgatgtgcctcgtgttgagagaagtgttgccttaccaaggcttgtaaggacactgaaaatgatgggcaattatggaatgacatttgctggcattggctggagttatattggtgttgaacaccttttgcagaattttatgatgaaaaaatccttttttaaactgtgctgtttggtggtttattggctggggctttc

SEQ ID NO: 10598 - DNA, 649 bp, Gossypium hirsutum
  Clone ID: GOSHI-09MAY01-C5164_2
aaaagtagagcagagaagaatagaaaccgactcaacttacactgactcttcgatctcacctccagtctcaaaccctttcttaaattaaaagaaaagaatcacattaaaaaaaaaaaagcctgctgaaaaccactaaaagaatggcaactccagacgaaagtcctgcagctaagagatggcttcctctcgaagctaaccccgatgtcatgaaccagtttctttggggtctgggtcttccagagagtgaggcagagtgctgcgatgtttatggcttggatgatgaactcctatcaatggttccacagcctgttcttgctgtgctttttctttatccaataacttctcagactgaagaagagagattgcagcaagataatgagaaaagagatgttagcagtaaggtttatttcatgaaacaaactgtgggaaatgcttgtggaacgattgggcttcttcacagtgttggaaatattacttcagaaatcaagctacaagagggatcctttttagataggttttttaaatctactgcaatcatggatccattggagcgtgctgcatttcttgagacagatggagagatggaagttgctcacactgtggcagctacagctggtgatacggaggcttctgaaatgtggatactcat

SEQ ID NO: 10599 - DNA, 748 bp, Gossypium hirsutum
  Clone ID: GOSHI-09MAY01-C5164_1
atcaaaacaaaaaagcaagcaaaatggcaactccagcaggaagttcttctgctaagaggtggcttcctctcgaggctaatcccgatgtcatgaaccaggcgcccgggggtctgggtcttccagagagtgaggcagagtgctgcgatgtttacggctcgcaggatgaactcctagcaatggttcctcagcctgttcttgctgtgctttttctttatccaataacttctcagactgaagaagagagattgcagcaagataatgagaaaagagatgttagcagtgaggtttatttcatgaaacaaactgtgggcaatgcttgtggaacgattgggcttcttcacagtgttggaaatattacttcagaaatcaagctacaagaggggtcctttttagataggttttttaaatctactgcaaccatggatccattggagcgtgctgcatttcttgagaaagatggagagatggaagttgctcacactgtggcagctacagctggtgatacagaggcttctgacgatgtggatactcactttatctgctttacatgtgttgatgggcagctttatgaacttgatggaaggaagtcaggaccaatatcccatggttcatcctcacgaagtaccttgttgcaggatgcagccaaagtgatcaagggcatgatccaaaaaaatccagagtccctcaacttccatgtcattgcactccctaaaatgggattgggcacaggtgcattttaactggcaac

SEQ ID NO: 10600 - DNA, 380 bp, Gossypium hirsutum
  Clone ID: LIB3146-015-Q1-K1-G3
acgcccacgcgttcgatcaaattaccaaagtacatggtttagaattgacaatggtaactaatagatgtagtttctgatggtgactagaaaatgaaaattttaactttgattcagctcgaaactttttctctcttttttttgatgcgagtgtaggatgctagctgcaaagtttatttcatgaaacaaaccgtgggaaatgcttgtggaacgattgggcttcttcacggcgttggaaatgtcacttctgaaatcaagcttcaagagggatcgtatttagataggttttttaagtctactgccagcatggatccattggagcgcgcggcatttcttgagaaagaaagagaaatggaagttgctcactccgtgacagctacagc

SEQ ID NO: 10601 - DNA, 660 bp, Gossypium hirsutum
  Clone ID: GOSHI-09MAY01-C5024_1
cggacgcctggggtttcaagtcgtagagaaaaaagaaatcgataaaaatggcgatggcgagtgttcgatctggtctcctacgagcagcccttcgcggcggctctcgtcctactgctcctcccacgcgtggcttcgcttcctcttctcatcacgatgatgcttatgaaaccgcaaaatgggaaaagataacatatttaggtgttgctacctgcactgttttagcgatttataacctatcaaaaggtcatccccaccatgaagagcctcctgcatacccatatttgcacattcgcaacaaggagttcccatggggtccggatggtctgtttgagagaaaggagcatcactagggatggccggatggatgcatatctttccgagttcggcgcatttttatcatttctctgagaaatcaatcagataattctgtggatcttttgtaattttagcactcgatttccagtttatggactttgaattgcaagttcatcaggttttctatatggttgtgcctgcctaccatactctgtttcgaaataataagattactgaatggtttgttgtggatatggttctaataaaaaaacacctaataaaaaaaaaaaaaaaagaaaataaaaaaaaaaaattttttccgacactagacaacccaaatttccg

SEQ ID NO: 10602 - DNA, 406 bp, Gossypium hirsutum
  unsure (1)..(406): unsure at all n locations
  Clone ID: LIB3146-044-Q1-K1-D11
cccacgcgtccgcggacgcgtccgcccacgcgtccgcccacgcgtccgcccacgcgtccgggcgagtgttcgatctggtctcctacgagcagcccttcgcggcggctctcgtcctactgctcctcccacgcgtggcttcgcttcctcttctcatcacgatgatgcttatgaaaccgcaaaatgggaaaagataacatatttaggtgttgctacctgcactgttttagcgatttataacctatcaaaaggtcatccccaccatgaagagcctcctgcatacccatatttgcacattcgcaacaaggagttcccatggggtccggatggtctgtttgagaaaaaggagcatcactagggatggccggatggatgcatatctttccgagttcggcgcattnttatcatt

SEQ ID NO: 10603 - DNA, 666 bp, Gossypium hirsutum
  Clone ID: GOSHI-09MAY01-C5344_2
cgacccggtggtcaaccaaaactcttttagcacctgtatactctcactacatattcaggaacgatcataactggttggtcaaaaactgacactgcattgagacatttgaaagggactatcatgtggtctcactaatcgctcaggtaaccactctgaagtgtaagtgggaaagagaagataaagacaatgggttacgctgccttcagactcttgactgagactctgcaagctccgtcgtcgctggcagccgtaattctctcgctatttgtgatgatggcaagttgtttacttggggatggaaccagagaggaaccctaggggcccctccctagaccaaaactgataatattccaagtcaggctatggctcttgctaatgttaaaattgttcaggcagctattggtgggtggcattgtttggctgttgatgatgaaggcagagcttatgcctggggtgggaatgaatatgggcagtgtggtgaagagcctgagcggaaagatgatactggtaggcctttgagaagggacattgtgattcctcagcgctgtgcgccaaagcttgtagttcgccaggtagctgctgggggtactcattctgtagtgctgacacatgaaggatatgtttggacctggggtcaaccttggccacccggagacataaaacaaa

SEQ ID NO: 10604 - DNA, 1411 bp, Gossypium hirsutum
  Clone ID: GOSHI-09MAY01-C5344_1
cggacgcgtgggcaaccttctgtttttttctcataaaacctccccactactgatttctctatataatctaatgttctcccgttgttttagccgtctttaacacttttcaatggcttcctcttctgttattgcttggggctcaggtgaagatggtcaattgggtatcggaaacaatgaagaaagagaatgggtttgcgttgttcaagctcttgagcctcacaatgttcgctccgtcgtcgctggcagccgtaattctctcgctatttgtgatgatggcaagttgtttacttggggatggaaccagagaggaaccctagggcaccctcccgagaccaaaactgagaatattccaagtcaggttaaggctcttgctaatgttaaaattgttcaggcggctattggtgggtggcattgtttggctgttgatgatgaaggcagagcttatgcctggggtgggaacgaatatgggcagtgtggtgaagagcctgagcggaaagatgatactggtaggcctttgagaagggacattgtgattcctcagcgctgtgcgccaaagcttgtagttcgccaggtagctgctgggggtacccattctgtaccccgcgcccagggagggtgtgggggggccgggggtcaaccttggccacccggggacataaaacaaatatctgttcctgtgagagtacaaggtctcgaaaatgtgaggcttatcacagtgggagcatttcataatttggctctccaggaggatgggactttatgggcatggggtaataacgaatacggacaacttggaactggggacactcagccaagatcacaacctatacctgtccaaggattatctggtctcactttggttgatattgctgctggtggatggcattccactgcattgactgatgatggagaggtgtatggttggggaagaggagaacatgggaggctcgggttcggagataacgataagagcagtaaaatggtgccgcaaagggttcaacttttagctggggaagatattgttcaggtatcttgtggtggaacacattcggttgcattgacacgtgatgggcgcatgttttcgtttggacgaggtgaccatggacgactaggttatgggcggaaggcaacaacaggtcaacccatggaagtcccgatcaatctgccagctccaaaaagtgttagcggtagtggtgctgaaggatattggatctctaaacttgttgcatgcggaggccgccatacgcttgctatagtagaatggaagaccgatgaatctaagccataactgaagaatgtaatgttctcatatatataaatataaaacttgatgactgaagaacagcaaaacaaggttccatttaaaaagcatgatgaggaatagctgaataaatgaacgtactgttcactt

SEQ ID NO: 10605 - DNA, 819 bp, Gossypium hirsutum
  Clone ID: GOSHI-09MAY01-C5304_4
aaccaaccaaaaaacacaggggggggggggggggggcaaaaatacaacaccaagagagtggttgtggatgcaaggcatcacatgctaggaaggttggcttccattttggccaaggagttgttgaatggccaaaaagtgtggttgttcgatgcgaagagatttgtatgtgggggggggggggagtttttttttgaactacatgagttcttgaggaagcggatgaacactaagccttctcatggccccatccattttcgtgctcctgctaagatcctctggcgtaccattcgtggcatgattccccacaagaccaagcgtggggcagctgctcttgctcgattgaaggcttatgaggggattccagctccatatgataagacaaagaggatggttattcctgatgctctcaaggttttgaggcttcagaaaggacacaagtactgcttgttgggcaagctttcctctgagggtggctggatccttcctgccaccctcagggagctcgagaggaagaggaaggaaagggctcaggttgcatatgagaggaagaagcagctgaacaagcttagggtaaaagccgagaagactgcagaagagaaactcggctctcaactcgacatccttgccccagttaagtactgaatttctagtggctagctagtttcatagaattttgttaaaggttattggtttcactatttagttccttttgagatgtggaggttaaaatttttgttgaatcttgggttgtccctttttcttaatgaactttttggtgtaggatcattcaaatataattcatatatgccttttataatt

SEQ ID NO: 10606 - DNA, 973 bp, Gossypium hirsutum
  Clone ID: GOSHI-09MAY01-C5304_3
gagaaggggagctccaataaggcgaaaacaacgggggccggttctggagtgtgcgctacgaaggtggtggcggatgcccgccaccacatgttgtgggcggttggcttcgatcgtggccaaggagctgctctacggccagaaagtggtggttgtgagatgcgaggagatctgcatgtcgggaggactcgttcgacagaagatgaagtacttgagattcctccgcatacggatgaactccaagccttctcatggccccatccatttccgagctcccgccaagatcttttggcgcactgttcgcggaatggtacctcataagactaagcgtggagcatgctgcccttgctcgtttgaaagcttatgagggaattccttccccatatgataagattaagaggatggtcatccctgatgctctcaaggttttgaggcttcagaaggggcacaagtactgcttgttgggccgcctgtcctctgaggttggatggaaccattatgacaccatcagggagctcgagaggaagaggaaggaaagggctcaggtggcatatgagaggaacaagcaactcactaaacttagggttaaagccgagaaggttgctgaggagaagcttggtgcccaggtgggagttattgctcctatcacatattgattcaaagatgattgaaacatactggttacgtttcactgcacttccataatgtgcttgtgagttgctcataattctattcccccaatcgcttcaggtagatgctatgctatatatgttcctctgttatctcggggcttttccttctttgcttgagaaacattcctgattgctagattctgaatattgatatctaacgtttttcgggattggatcatgattttactagaactaagagtgcagtagtcttatcatttgagcaaacgactatgagccttttacatttttttgcctacacccatttcaaggtgggcattttaaca

SEQ ID NO: 10607 - DNA, 988 bp, Gossypium hirsutum
  Clone ID: GOSHI-09MAY01-C5304_2
ccgcttcattttcccttagaagaaaaaaaaaacagcaacagcagctgcgggaaaagatggtttcggggtcagggatctgcgccaaaagggtggtggtagatgcaaggcatcacatgttgggaaggttagcgtcgacattggctaaggaattgttgaatgggcaaaaagttgtggttgtaagatgcgaagaaatttgcatgtcgggtggattggtgaggcagaaaatgaagtacatgaggttcttgaggaagcggatgaacactaaaccttctcatggtcctatccattttcgtgctcctgctaagatcctatggcgtaccattcgtggaatgattcctcataagactaagcgcggagcagcagcacttgctcgtttgaaggcttacgaagggattccagctccgtatgataagataaagaggatggttattcccgatgctctcaaggttttgaggcttcagaaaggacacaagtattgtttgttgggcaagctctcgtcagaggtcggatggaaccactatgacactatcaaggagcttgaaaggaagaggaaggaaagagctcaagtggcatacgagagaaggaagcaactcactaagctcagggttaaagccgagaaggtggccgaggagaagcttggcacgcagttggaagttatttctccaatcgagtattgattcatctgggtttaagtttaatgcatctttctgagtagctcataattttattgttcttttgaagtagatgttaatgcttacatgcgtttggaggagacctttttttttttcctttgaaaaacatgtccttttactgcaaaaacaccactcagattttggtatctgattagaacagtattttcagacataagttttggttgcttgagttgtcagtgttacacttgttctggattatatggttatctaaatatatgactcaaaattaagtctgtttaggcaccgttatcaaagctaacgtcttaagcatcaac

SEQ ID NO: 10608 - DNA, 886 bp, Gossypium hirsutum
  Clone ID: GOSHI-09MAY01-C5304_1
cccagcgtccgtttttggttagaatagcatcagcagcatcagcagcagcagcaggcctaaacgatcaaccaaccagaaaagataaacaagatggtttcagggtcagggatctgcgccaagagagtggttgtggatgcaaggcatcacatgctaggaaggttggcttccattttggccaaggagttgttgaatggccaaaaagtagtggttgttcgatgcgaagagatttgtatgtcgggtggtttagtgaggcagaagatgaagtacatgaggttcttgaggaagcggatgaacactaagccttctcatggccccatccattttcgtgctcctgctaagatcctctggcgtaccattcgtggcatgattccccacaagaccaagcgtggggcagctgctcttgctcgattgaaggcttatgaggggattccagctccatatgataagacaaagaggatggttattcctgatgctctcaaggttttgaggcttcagaaaggacacaagtactgcttgttgggcaagctttcctctgaggttggatggaaccattatgacaccatcaaggagctcgagaggaagaggaaggaaagagctcaagtggcatatgagagaagaaagcaactcactaaacttagggttaaagccgagaaggttgctgaggaaaaccttggtccccagttggaagttattgctcctatcaaatattgattcatagaccatggagtcttgctgctttcgcgtcagggcccttccattctaatagggtctatttttgactggctcataatcttattggccttggatcttttgaacgagatcactttatgcttatatacattttatatgggactctgggttttttgtcctccaatattttcttcag

SEQ ID NO: 10609 - DNA, 401 bp, Gossypium hirsutum
  unsure (1)..(401): unsure at all n locations
  Clone ID: LIB3149-059-Q1-K1-A2
gccaagatcttttggcgcactgttcgcggattgattcctcataagattaaggttttgaggcttcagaaggggcacaagtactgcttgttgggccgcttgtcatctgaggttggatggaaccattatgacacaatcagggagctggagaagaagaggaaggaaagggctcacgttgcatatgagaggaagaagcagctgaacaagcttagggtaaaagccgagaagactgtagaagagaaactcggctctcaactcgacatccttgccccagttaagtactgaatttctagtggctagctaagttcatacaattttgttaaaggttattggnttcactatttaattccgtttgagatgtggagtttaaaattttttgtgaatctctggttgtcccttttttt

SEQ ID NO: 10610 - DNA, 366 bp, Gossypium hirsutum
  unsure (1)..(366): unsure at all n locations
  Clone ID: LIB3272-046-P1-K1-C3
gccgggtctgaattaccggggcggggacgcgtgtcgggccacgcgtccgaaacgatcaaccaaccagaaaagagaaacatgatggtttcagggtcagggatctacacgaagagagtgggtgtggatgcaangcatcacatgctaggaaggtgcgcttccattttgggcaacgagttggtgaatgggcaaaaaggagtgggtggtcgatgcgaagagatttgtatgtcgggtggtttagtgaggcagaaaatgaattacatgatgttcttgaggaaacagatgaacactaaggcttctcatggccccattcattttcgggctcctgctaagatcctctggcgtaccattcgtggcatgattccccac

SEQ ID NO: 10611 - DNA, 367 bp, Gossypium hirsutum
  Clone ID: uC-gsflmaxxa029g07b1
ggtagctttaaaaaggcgaaaacaatggtgttcggaggtggtgtgtgaattaagaaggtggtggtggatgcccgacaccacatgttggggcggttggcttacatcgtggccaaggagctgttgatcatacatagcgaggaaaatgaaagatgctaggagatctgcatgtagagaggactggttcgacagaccatgaattacatgagattcctgccaatgcgggttaacggtggacactaacatagtcctactcattgctgagcaaccgccaagatcttttggcgcactgttcgcggaatgatacctcataagactaagcgtggagcggctgtccttgctagattgaaagcttatgagggaattgctt

SEQ ID NO: 10612 - DNA, 309 bp, Gossypium hirsutum
  Clone ID: LIB3149-053-Q1-K1-A12
gagccaggcgtacgcatggctgatgttgcttattaaataaagatgtctctttacaagctgagggtcaaagccttgagtacggcttaatacaaactccgctctcaactcgacatccttgccccagttccagttctgaatatctagaggctagctagtttcatagaatcttgttaaaggttatcggtttcactatttagttccttttgagatgtggcggttaaaatttctgtcgaatcttgaattgtccctttttctcaatgaactttttggtgtatgaacattcaaatataattcatatatgcctttcat

SEQ ID NO: 10613 - DNA, 1009 bp, Gossypium hirsutum
  Clone ID: GOSHI-09MAY01-C5334_1
ttcatgtttgatcccatcagaggcaaattactcgattgggagaagagatacgtagttattattggaactgtagaaggtttagtttatcttcatgagaactacgagaccaaaattattcacagagatataaaagctagcaatatcttgttggattcgaagctgcgagctaaaattgccgacttcgggttggcaaggtctttccaggaagatcagagtcacatcagcactgccattgccggaaccctaggatatatggctccggagtacctagcccatggccagttaaccgagaaagcagatgtctatagtttcggggtgcttttactcgaaatagttacagggaagcaaaacaacaagagcaaagcaacagaatattcagacagcatagtaacagttacttggagacactttcagttagggactgtggaggagatttatgacccaaatctaatgttacacaatgacaaccatggcagcaactttaggaatgaaattttcagaggggtacaaattggacttctttgcacccaagagatcccatcactaaggccatcaatgtcgaaggtactacacttgctaacaaagaaagatgaagacctccctgcacctactaatccaccttttttggatgaaaagatggaattcaatgagacaagtgacaacgaatgctatcccctcaaccgagctgataatgattcaattgccactgtcacccacagttccttctacggaagatgatgtttagaacatggttggacgatccgacaccactcgcaatttttttaaggggaatgcttcaaaataacgtatatattggggggattgagataaaggagcatacgactggaatgtacaaaactataaccgtactatgaattttttgtgtccatttatagttcatcagatcatctattattgatacggtaaacatatagaaaataatgattcagttctgcggaaaattctgataccaaaaaaaaacccaaaaaaaaaaaaaaaaaaggggggg

SEQ ID NO: 10614 - DNA, 940 bp, Gossypium hirsutum
  Clone ID: GOSHI-09MAY01-C5294_1
atagtacatcaagatttggtacaagccgaacaaaatgcggggcgtggtttggcttgacgatcgcgtgaagtgcgtctgcggaggacaagcaaacccttccaccggttcgtgtctccagcgacacttccaacttcgcctacacgaaccggcaaggtcaccggtcggcgattcgaatatcgcggatcgtgacggagacgttgaggcttaagatggataatgtccggtggttcgtgatgggtgacgacgacaccgtgtttatcacggacaatctgattaggattttgaggaaatacgaccatacacagtattactacatcgggagcttgtcggaatctcatatccagaacatttttttctcctacggcatggcatacggcggcggagggtttgccattagctaccctttggctaaggctttggcgaagatgcaggaccggtgtattcagaggtacccaggattgtacggctcagatgaccgaatgcaggcttgtatggctgaactcggtgtcccgctcactaaggaactcggcttccaccagtatgacgtgtatgggaacttgtttggactccttgctgcacatcccgtaacaccattggtgtcactgcatcaccttgatgttgtcgagcctattttccccaacgtaaccagggttgaagcccttcagcggcttatgttgcctgtaaagctggattcagcaggaatcatgcagcaatccatctgctatgataaatccaagagttggactatatcagtttcatggggtttcgctgttcaaatctttagaggaatcttttcaccacgggagatcgaaatgccttctagaacattcttgaattggtacagaagagcagattacacagcatacgctttcaacactcgtccagttagccgaaacccatgccaaaagcctttttgtgtttacatgtaaaaggtgggaat

SEQ ID NO: 10615 - DNA, 684 bp, Gossypium hirsutum
  Clone ID: GOSHI-09MAY01-C5284_1
cccacgcgtccgatagcattcatcatatcccccccccccccaaaaaaaaaaaaacccaacatcctttgaatactatcttcttctttcttgttttctgtttttgattcagtagtttttttattttttgttgctgtcaacacctgaataagctctcacaagtcaaaccagattttaaagaaatgtacccgggggtgaaagtcaaagaacaagaccaagatgatcaacaagttatcaaggattctgttttgtctttgaaggatgttctgtctctctctatgcttgattcttattttccagggaaaaaacatgaagatgatgtttctccgatgcccacagcaagaattccaaagtcttaccatgcaccagaagtagataaacattcagattctacatctgaagaagcagagcaatacaagacgaaagctgaagaggaggaaactagaccgaacattagagtcagttcaactccacgtcctcggtctgtcatatcgagttctgacaatgacgcattgttcagaaataaaaacaagatcgaagggagacaacgaacggtgtctaagaatcataacacggttcaaaaccgactcacaacccgaacccatatctttgttaaaagttctgtaaaaacaaacaagtccaatgatggtggtggtgataactgtattgttgaaattatagggaaga

SEQ ID NO: 10616 - DNA, 532 bp, Gossypium hirsutum
  Clone ID: LIB3585-053-P1-K1-G7
ttcttttttcttgttttttgtgtttgattcagtggtttttttattttttgttgctgtcaacacctgaataagctgtgacaagacaaaccagattttaaagaaatgtacccaagggtgaaagtcaaagaacaagaccaagatgatcaacaagttatcaaggattctgttttgtctttgaaggatgttctgtttctctctatgcttgattcttattttccagggaaaagacatgaagatgatgtttctccgatgcccacagcaagaattccaaagtcttaccatgcaccagaagtagataaacattcagattctacatctgaaggtaggttttttttatttatggtacgatgtttggattcaggtgtgagtgtgagatatggtatgcttgatttttataagctttttcatatatttggaggatcgaacaacataatattatatgcacttcccaattcatttaatttgagtaagtgtctggtgcgatcaaggttaacgctctttacatattattttggatcttccgaagatgata

SEQ ID NO: 10617 - DNA, 790 bp, Gossypium hirsutum
  Clone ID: GOSHI-09MAY01-C5274_1
cctctcgtgggaacgacttcagtttattatctcttgatgaaaatccctttgcacaagaaactcgacgtgcctcttttggaggagcaactgaaattagtccttgccttcatgccaaacgaatagtgatagctggaatccctgtgaaaaaagagatggagcttacatcgtcagaaagctctgaccagagaaactggctggacagagcaccacagttaaatagattcaaggttccaattgtggcggagaggctaatggactacgatctggtcttagagcagtatctacctccatcttcaccattgcttgctggattccgactggatgcttttaatgcaataaaacctcgaattacccattcaccttcttcagatacagatatctgggacacgtcagaaacatttttagaagatagacatatctctccagctgttctatatattcaagtatctgcactccaggaaggaataggatccaacatggtgactattgcagaatacagattgccggaggccaaaccaggaacagtaatgtactttgatttccctagacaattacaaacagaaagaatctctttcaaacttctgggagatgttgcagcatttacggacaagccggcggagcaggatgattctagttttagagctcctgctgttgctgcaggcttgtctctgtcaaatagaatcaagttgtattactgcgctgatccttatgatcttggcaagtgggctagcctttctgcagtttgacattactttaacccaggtggaaaaaatgggtttaaaagatgggt

SEQ ID NO: 10618 - DNA, 573 bp, Gossypium hirsutum
  unsure (1)..(573): unsure at all n locations
  Clone ID: LIB3543-011-Q1-K6-G2
anaagaatgactatctctcccactggtcttttttattcaagtatttggacttccaggaaggaattgggaatcaaccatgggggacacttttggcggaattcaaattggcggggggccaaccaggggcaggaatggactttgattttccttggcaatttccaacaccaagaaattcttttaaacttttgggggatgttggagcatttacgggcaaaccggcggggccggaggattttagttttagagatcctggtgttgctgtaggcttgtctctgtcaaatagaataaagttgtattaccgcgctgatccttatgatcttggcaagtgggctagcctttctgcagtttgacattactttaacccacgtgggaaaaaatgggtttaaagattggttttgggtttctttgtgcttgttttcatattcatatatgtgtgtgttgtgtattagcgtagaagttaacaatttaatatctattggtgtggtaaatgatttgagcccttgctgattttaagtgatctatcttacttcctggatgaatttgttgggaggataggccttagcctaattttat

SEQ ID NO: 10619 - DNA, 225 bp, Gossypium hirsutum
  Clone ID: LIB3048-039-Q1-L1-B1
ccagatcgagggatctactttagtggataatctcttgataaaaaggcgcggttggcaagagactgggcgggcctcttttggaggaccaaccgagattaggacttgcctgtatgccaaacgaatactgctggctggaaccctgtgaaaaaagagatggagcttacattgtcagaaagctctgaccagagaaactggctggacagagcaccacagttaaatagattc

SEQ ID NO: 10620 - DNA, 543 bp, Gossypium hirsutum
  Clone ID: GOSHI-09MAY01-C5264_1
caaaatttctagtttattaagccccaagaatatccctaacttgactgcttgtaaccctacatgagcctctgccacaaatggatttgcgatttcggagtggatggtcgttttggatgctaaaatttttccttctgcgtcgtgtactaacaatgtctgaagacttgttggtcaaaggccgcgtcgaaagagattgtgacttctgatcttcttctttcctgtatcgctccttcagtagactgagcaactagccaaaggccgcagcaaaaacaacgaatctgttcagtcattctctaactaaaaacccaggacattgctgaaaaatatgataattgtcttcctcattttgtcggcagcgatggcaaagagcattttctactactttcttctgcttgagattaactaatgaagggatgaaattccaagatattctccatactgttaatgtaacttttgaagggatgtataatttccacaatttcctataaaaaaaaaaaaaaaaaaggaaaaaacttaaaaaaaaaataaatccaaatacattattat

SEQ ID NO: 10621 - DNA, 825 bp, Gossypium hirsutum
  Clone ID: GOSHI-09MAY01-C5204_1
taatgaatactaatctagttcagtctagtggcctgcatagtggtgggatgggaatagttggtttaccatctcctgcaagccatatatctccagatgtgatttcaaagaatagtgtagatacaactttatcaccggttccttatgtgcttggccggggaagaaaacgcagtgcagcattggagaaagtagttgagagaaggcaaaggagaatgattaagaacagagagtcagctgcaagatcacgagctcgcaagcaggcttatacatcggaacttgaagctgaagttgcaaaacttaaagaaatgaatgaagaattgctgaggaaacaggaagaagtgatgggaatgcagaaaaatcagatgctagaaacacttaatccagcatggggaggtaaaagacaatgcttaagaagaacactgacaggcccttggtagagtttgaggaactgctgattgtaaaaatgttgctttgatacacaatcttggtcggtgctacagtttaatgattgggatctgcatccattatctatatcttgatactgcttaaggctagatagctgtgaatatagaagcaaagggttttgagttgtaagttatgaacttgacagtattagtttgtagttttgattttgttattggcttgatctctgtttgcctatcatgatctaaccttgtcaacaagggcgggcttgtaagataactagatggatgctccaatatggtctttatgctctgcctacagacttggtcagtttcatcctgatttgacttgtaaattaagacatatctgttgtaagaaataagctatcggttttgattctgggtt

SEQ ID NO: 10622 - DNA, 490 bp, Gossypium hirsutum
  Clone ID: uC-gsflmaxxa029b10b1
caccttattaacacgacactgctcgctagtccgggtgctaagggttcagtggttggaattggtgacccttctatgaataataatctggttcagaccacagggctgcagggtggtgggatggggatagttggtttaggctcacccgcaagccagatatcttctgatgtggtttcaaagaacagcaccgataccacttcgccatcaccagttccttacatattcggccgaagaagaaaatggggtgcaaatttggagaaagtatttgagagaaggcaaaggagaatgattaagaacagagagtcagctgcaagatcacgagcttgcaagcaggcttatacattggaacttgaagcaaaggtcgcaaagcttaaagaaatgaccccaagaattgttgaagaaacaggttcctattatctgcttactaagattctttgtgttttatttgaaaaaacgtccggtagaccgccggtcttaaccatactttggttgg

SEQ ID NO: 10623 - DNA, 419 bp, Gossypium hirsutum
  Clone ID: LIB3146-055-Q1-K1-H3
cccacgcgtccgcggacgcgtgggttcgccttcaccagttccttacatatttggccgaggaggagaatgcagtgcaaatttggagaaagtagttgagagaaggcaaaggagaatgattaagaacagagagtcagctgcaagatcacgagctcgcaagcaggcctatacattggaactcgaagcagaggtggcaaagcttaaagaaatgaaccaagaattgttgaagaaacaggaagaaatgatggaaatgcagaaaaaccagatgctagagaaagcgaatcgaccatggggacgtaaaaaacaatgcgtgagaagaacaataacatgcccttggtagaaaatctcggctggcggtacgaacacgaggggattgcagcgtgcatcgatcatcgatcatctgtattgatgctgcaaaaggg

SEQ ID NO: 10624 - DNA, 818 bp, Gossypium hirsutum
  Clone ID: GOSHI-09MAY01-C6984_1
cccacgcgtccgcccacgcgtccgctgtctctaccactgaaagcaaagaaaaaatggcaacggagatggcccttgtaaagcctatctccaaattcagtacaagcagtccaatttttagcaactcccgatatgggaagttcacgaccgtcagaatgtcatctacttcccaatcaacagcaaaggccgccgcgaagggtggcaagaaagctgccaaaaccgccatcaaagagacccttttgacaccaaggttttacaccaccgactttgatgaaatggaggcgcttttcaacactgagattaacaagaaccttaaccagtccgagtttgaggcactgctgcaagagttcaagactgattacaatcagactcactttgtaaggaacaaggagttcaaagaagctgctgataagattgatggtcctttgagacaaatcttcgttgagttcttggagaggtcttgtactgctgagttctctggttttctcctctacaaagaacttggaaggaggctgaagaaaaccaatccagttgtggctgagattttctctcttatgtcaagggatgaagccaggcatgccgggtttctgaacaagggtttatccgatttcaatttggcattagaccttggcttcttgacaaaagccaggaagtacacttttttcaagccaaagttcattttctatgccacttatttatctgagaaaattgggtactggagatacattacaatctacaggcatctcaaagaaaacccagagtaccaatgttatcctattttcaagtattttgagaactggtgccaggatgaaaaccgtcac

SEQ ID NO: 10625 - DNA, 265 bp, Gossypium hirsutum
  Clone ID: GOSHI-09MAY01-C6924_1
tatgttttctggctgtaggtaagaagagaacctaggtagtttacaattcatattttgtccatattttgtagtggttcttcaattgtacatgtgaaaaaaggggggcttggatggtcaagcattctagtttagagaataaaacaggtaaaaattaaaacggcatcgttatatctcatatcttgatgcatttgttttggtgttgtaatctttaatgtttttttctttattgtgaaatatattaggtgtatgatttgaaagtttgctt

SEQ ID NO: 10626 - DNA, 508 bp, Gossypium hirsutum
  Clone ID: GOSHI-09MAY01-C6894_1
caagttgctgccgttggtgattgttgtcaaaagggagtcaaaaaaaattgcttgggtgatggcgggacgtcgacccggtgatgttgaaactgtttatgcttcaacgaagaaggctgagctgggattgaattggaaggcaaaatacggcatcgaggagatgtgcagggatcaatggaactgggccagcaagaacccgtatggatacgcatctccgaacttgaattaactcggtgccaatacttttgtcaggtcacacaatacctatgaggttagattttcttaactttatacagatttaattgggtttgatttatcattttagatgatttattaagaataaggtgggaatttgttttgatcaaagctttgtgtagtcttttaaacaagttgctgccgttggtgattgttgtcaaaagggagtcaaaaatgaaaaaaccttagaactatttttagtaacactatccttgttgtcttgtgtctttattttgttcatcttttgtattgctat

SEQ ID NO: 10627 - DNA, 351 bp, Gossypium hirsutum
  Clone ID: GOSHI-09MAY01-C6594_5
cccacgcgtccggaaacttattcgatggtgatggagtttatgcgtgttatctagaattctgtctacaaatatggtcatgtttctgtagaataaaggttaaattttaatgcattgtgccttgttgcgtaaaacggaacattgtaacacacagaaaagcttgttcagatgtggtgtctatgttgtaccgtttagccaatgcattggaatttgttgtttatgtggttcggtattatggtttgggtagtcagattataaattccaagattcatgaaagggctaatcataaatttgtgtcataaattcagcttggtttttgcctattaataatattccttgcaactgtgctacctg

SEQ ID NO: 10628 - DNA, 510 bp, Gossypium hirsutum
  Clone ID: GOSHI-09MAY01-C6594_2
cccacgcgtccggtgaaggtgcccattgcgatattgggagctgagcaggaccatatatctcccccagagcttttaaaacagtttgatgagatcttaaaagcgagtgaggttgatagctttgtgaagatatttcctaaagttgcccatggatggtcggtcagatacgatgtcaatgatccggcagctgtgtcgagtgctaacgaagctcaacaagatatgctggcgtggttcgcaaagtacgttaagtgagaaacttatccgatggtgatgggagtttatgcgtgttatctagaattctgtctacaagtatggtcgtgtttctggagaataaaggttaaattttaatgcattgtgccttgttgcgtaaaacggaacattgtaacacacagaaaagctttgatcagatgtggtgtctaatgttgtaccgtttagccaatgcattggaattttgttgtttttgtggttcacaatccaaaaaaaaaaaaaacaaaacaaaaaaaaaaaaaaaat

SEQ ID NO: 10629 - DNA, 1068 bp, Gossypium hirsutum
  Clone ID: GOSHI-09MAY01-C6594_1
gttggtctttgtttttatacagtagaagcaccatttgggcaatcatagcaagagagagtgttttttgcttaggagaaaagagaagaaaacaatgtcaggtcctcagtgctgttcgaatccaccaacattggattctgcaagtggggctggtcacgttgagaatcttgctggtctcaacacttatgtttctgggtctcttcaatctaagcttgctgtttttcttatctctgatattttcggatatgaggctccaaactttagaaagctcgcggacaaggttgcagccgctgggttctatgtggtggctcctgacttcttttatggagaaccctatgaccctaataaccctgatagacctctatctgtttggataaaggatcatggaccggataaaggttacgaggatgcaaagctcgtaattgacgctttgaaaagtaaaggggtttcatccattggagctgctgggttctgttggggtgctaaagttgtggctggactggctaaggatccccttatccaagcagctgtaatgttacatccttcatttgtgactgtggacgatatcaaaagtgtgaaggtgcccattgcgatattgggagctgagcatgaccatatatctcccccagagcttttaaaacagtttgatgagatcttaaaagcgagtgaggttgatagctttgtgaagatatttcctaaagttgcccatggatggtcggtcagatacgatgtcaatgatccgacagctgtgtcgtgcgctaacgaagctcatcaagatatgctggagtggtttgcaaagtacgttaagtgagaaacttatccgatgatgatggtagtttatgcgtattatctagaattctgtttacaatatggtcttgtttctacagaataagggtaaattttaatgcattgtgccttagttgcggtagaatttagaaaagcttgaacggatgtggtgtccatgttgtaccatttagccaatgcattggaattcctgtttatgtggttcagtataatggaatttctgtttatgttgtactaaagggctaatcataaattcagtttctatcc

SEQ ID NO: 10630 - DNA, 369 bp, Gossypium hirsutum
  Clone ID: LIB3196-003-P1-M1-A10
acgctaatgagaaaagagctgataccaatgtcaggtccttagagctgatcgaatgcaccaacattggattctgcaaggggggcataggtcacttatgagaattgacgatggtctcaacacttatattcgtggaaaactacaacactaagcttgcactgcctgttatatagtgaatgtgggacttcaggctgcagaactttagaaagatcgcaggcacgggtgcataccttatgtactatgtgctgtactcaggctaaggttcaggagaaccctatgaccctaagaaccctgatagacctctatcttaaaggataaaggatcatggaccggattaaggttacgaggatgcagagctcggaattgactctt

SEQ ID NO: 10631 - DNA, 361 bp, Gossypium hirsutum
  Clone ID: LIB3196-003-P1-M1-D7
cttatgagaaaagagaagaaaacaatgtcaggtcctcagagctgttcgaatccaccaacattggattctgcaagtggggctgagtacgttgagaatcttcgtatttgtcaacacttatgtttgtggagatcttcaatctaagcttgttcggcctgttatctctcgaatatatacacttgacggctgcaaactttataaagctcgcggtcaaggttgcagtcgttgggtactatgtggtggatactgacattccttatggagaaccctatgaccctaataaccctggtagacctctatctgtttggatcaaggatcatggaccggataaaggttacgaggatgctgagcttgtaattgacgc

SEQ ID NO: 10632 - DNA, 431 bp, Gossypium hirsutum
  Clone ID: GOSHI-09MAY01-C6564_1
cccacgcgtccgcccacgcgtccgtaaccttagccctcacttgctgccgatgtttctgttactcgacggtgtgacggccgctagtgttctttttcctctcttctccttctctcttctttcttcgtttctccttttctctcctctcttcttttttcttttctcctttctcttgttttttctttttctttatttcttttcaaaattttcgaagatctaaaggtgtcggggcccgtttcggtcactgtcgctggggttcccgttagccctcggtggccgtagccggattctccttttccgctggcgtctcccttcaaaaggtgagttgtatttttacttttatttttattttggttgtcttggttgttcgggtttttggtgatggtagaagaggaagggcaatgggtcggcgatgggcagtaacggtggtgata

SEQ ID NO: 10633 - DNA, 373 bp, Gossypium hirsutum
  Clone ID: GOSHI-09MAY01-C6524_1
cccacgcgtccgcagattcttcactcattcatcttttttctttggtttttgagcatcaccacacaaatccatagatacctcccctccacccccctctcaacccacaattttacacaggagaaatttatcacaaccatgaagcgagaccacaatcatctccaacccaacccagacccctcttctctccgcggcgctccttctaccggaaaggccaaggtttgggacgaagaagccgcccaaacaagactgtgggatggatgagcttttggcgggtttgggttacaaggccaaaactgcagacatggctggaggggctcaaaaagcttgagcagttggaggaggttatgtgtaatgttcaagatgatgggatttc

SEQ ID NO: 10634 - DNA, 755 bp, Gossypium hirsutum
  Clone ID: GOSHI-09MAY01-C6484_1
gaaaaaagcgtaattttaatgcgattcaaaagggggcgtaggaagtgggaaccaccacccatgtgccctccctcctgtctccaccagctgctgccgctcaatgattagcactctgctccctccccaatatccatccctctcctctctgtatttccattaatttgttttttttttttttttttgcttttcttttcacatcaaacacctacaataacactgcaaccaatcttttcagcttaaccccccccaacaaaaaaaaagaaaaaggaaaaagaaaaaaactaagtgagaacattttcagtgagcctagtcgaaattgtatacggttttggggttttgtttggtgccgcatgtcaaattcagaggctgctgctaaaaacggagcaacaatggatacccagagacaacaagcgccggggaacggtgcccttgccgtcaagaaacctccctccaaagaccgtcacagtaaagtagacggtcgtggacggaggataaggatgcccatcatttgcgccgctcgtgttttccagttgactcgcgagttgggtcataagtccgacggtcagaccatcgagtggctgttacgccaggccgagccttccatcatagccgctacaggtaccgggacgactccagccagcttctccacagtgtcagtttccgtccgcggcggagccaattccacttctttgccgtcaacgacttcttcgtcgttggattataagcctttgttgggttccaccccttttttactc

SEQ ID NO: 10635 - DNA, 818 bp, Gossypium hirsutum
  Clone ID: GOSHI-09MAY01-C6454_1
cccacgcgtccgcccgcgcgtccggctctttctcttgctctctttagagtaaatttcttttgcaatcctttgtagagctccgggatccattgtcaccatgtcttgctcaaatctgacaatgtgggtgtcctcaaaaccctctctttctgacacttcttcactctctttccgttctttcatcagcccttttcagctcccatctcagagctcaacccccggtaacccttccaggtcctcatctgtaaccccagttcactgtggtcttcgtgagcttagagaccgtattgattcagtaaagaacacgcagaagatcactgaagccatgaaacttgtggctgctgctaaagttaggagagcacaagaagctgttgtcaatggcagacctttctctgagtccctggttgaagttctttacaacatcaatgaacagctccagactgaagacatagatgctcctctcacaaacgtcaggcctgtcaaaaaagttgctttggttgttgttactggtgatcgtggtctctgtggaggtttcaacaatgctatcctcaagaaagctgaagctagaattgcagaattgaagcagcttggacttgattatacaataatcagtgtggggaaaaagggtaattcatatttcatccgcaggccctacatcccagtggacagattcctagatggtagctcactccctacagctaaagaagctcaggcaattgctgatgatgttttttcactctttgttagtgaagaagtcgataaagtggagcttttgtacaccaaattcgtatccttggttaagtctgatcctgtgattcata

SEQ ID NO: 10636 - DNA, 428 bp, Gossypium hirsutum
  unsure (1)..(428): unsure at all n locations
  Clone ID: LIB3165-037-P1-K1-G5
aaaaaccccttccttttttttttttaaaagaaaattttttttgcaagtcggtggtaaagcttccgggaatccattgtcaaccaatgtttggctccaaatttggacaatgtggggtggtccttcaaaaaccctttcttttcttgacactttctttcacttttctttttccgttcttttcatcagcccctttttcagcttcccaatctcagaggctcaaccccccggtaaccccttccaggtccctcatcnttgtaaccccagttcaactgtggttcttcgtgaggccttagagaccgtattgattcagtaaagaacacgcagaagatcactgaagccatgaaacttgtggctgctgctaaagttaggagagcacaagaagctgttgtcaatggcagacctttctctgagtccctggttgaagttcttta

SEQ ID NO: 10637 - DNA, 320 bp, Gossypium hirsutum
  Clone ID: LIB3120-028-Q1-K1-E8
cggacgcgtggggagatattggagattgttgctggttgtagacaatagacaaggtctttttcgggtcctgggcattatcaggagcattgctcatggcactcatcctagctgcaagctcactggctagtgattcctgcaaagccctcagaacctggctgctgctaaagttatgagagcacaagaagctgttgtcaatggcagacctttctatgagtccctggctgaagttctttacaacatcaatgagcagctccagactgaagacatacatgctcctttcacaaacgcaaagcctgtcaaaaaagttgccttgggtgttg

SEQ ID NO: 10638 - DNA, 435 bp, Gossypium hirsutum
  Clone ID: GOSHI-09MAY01-C6434_1
tgaaattggacggttctgatttgaagagacttacccacaattcttatgaagatggggccgctacgtgggccccattgtacatcaatccattgacgtggaatggccgaggaagggcgaatgtgcatttgtgggttgtcattggctgaatgaaatgccagggcgtggaaccaagttggtcggaccatgggggttagccaagcccctttgcggtgtattctaaatttgtatggtgtaattatgtgctttggagtattgtaaatctgcatggtgtacctaatctttgttttctttttcttggactagatagcagcgaaggaaataatgagcatatgtatgccccttccccatgtaattagcttgtggaatctggaaaggtgcactttctattccactcctaatataaatttcactggtcttaaatggctgggttgggtt

SEQ ID NO: 10639 - DNA, 843 bp, Gossypium hirsutum
  Clone ID: GOSHI-09MAY01-C6424_1
cccacgcgtccgcggacgcgtcttgatttccatctcccaaatttcaatttctttttcttctgattttccatgttagggaagcgaggtcgacccatgatcggaaacttatctgaattactagttccaacacataaatccgggttatcggatccttcaaggagccccaaaagtccactagacttattcaagaccccatcatcatcatcaagaagagggtcgatgaagagatgctatgatgtttttggtgatggagtagggcttggaatcattgcttcaatggagaaatccactgttgatcatcatccttcttgtaagctacaacacaccatttgtagattcaaaggaagatttcaagaaaattcagaagaggattacacttttgttacaagacatggagaatcatctacaaaagtttattttaatggaggtgacgaagaagaagaacagagacttgttggaaaaattaaggaaattacatctttaaaacccagatttgtgcaagatttcaactacccaacatcagatttcctcagttcttgtcatctttgtaagaaaaaattgcatggcaaagacatttacatgtataggggggaaaaggctttttgtagtgcagagtgtagatcaagtcaaataatgatggatgagaggaaagaacaatgtaaatcaaaagcttcaaaatctgggaaaaatcaaagcttgggttatgataaaacagagcaaattttctcaactgggattcttgcaatttaggccttttttccttttttgctctgtaaataaatatttatagaaaaatactatacaattttatgagggttaatatttgaattttcccccaatctt

SEQ ID NO: 10640 - DNA, 235 bp, Gossypium hirsutum
  Clone ID: GOSHI-09MAY01-C6604_2
gttgatggtgggtttacatcttccaatcactcattgcgtgtcttcagatgaggattgatgaaaatatgaaccaaaatgaggctcattagctttggttcaactattaccagattgtatttcccttctattttctcctgtcactggtatgtaatttgtaacaaaaaacttctaatataattttaattatatctatatataaaatatcatatgctttaatacaaatatccaagatttt

SEQ ID NO: 10641 - DNA, 540 bp, Gossypium hirsutum
  Clone ID: GOSHI-09MAY01-C6604_1
gtttccaggtgtcatcggtggcctaggacctcatgcatatacaggctctaaacatgctgttttaggccttactaggaatgttgcatctgagttaggtaaatacggaataagagtgaattgtgtttctccgtatgccgttgcaaccgaattggcctttgctcacttgcacgaggacgaaagaaccagcgatgtacgtactggttttcgtgctttcatcgggaaaaacgcgaacctggatggggtggatttgactgtggagcatgtggctaatgctgtgctgttcttagcaagtgatgatgcagggtacataagtggagacaatcttatggttgatggtgggtttacatcttccaatcactcattgcgtgtctttagatgaggattgatgaaaatgtgaaccaaaatgaggctcattagcttagctgcctaagccactagctttggttcaactattaccagattgtatctcccttctattttctcctgtcagtggtatgtaatttgtgacaaaaaaacttctaatataattttaattatatt

SEQ ID NO: 10642 - DNA, 541 bp, Gossypium hirsutum
  Clone ID: GOSHI-09MAY01-C6634_1
ctcaagagtacaggccgtccgcaattctttgtagagctgacaagtccattgtgaccatgttttagtcaaatatgacagggtgcagtgtccttaaaaccacatatggatgacactatttaactatgtcacagaggggggatcagccctgttcaggcccacatataaaagctcaacctccgttaacgcttacaggtccatatgagaagccccagttcagatgtggtcttcgtgagcttagagaccggcttgattcactaaagatcacgcagacgatcactgaagccatgaatcttgtggctgatgctcaagcatggagagcatcatgcagctgctgtctatggcagacctttctgtgagtccattggttgtagccctttcctccttgaatgaacagttccagactgcagacatagatgcgtctcttacaaacgataggcttgctaaaaaagttgatacggttgccgttactgcagatcgagggctatggggaggtcctaacaaggctatcacaaggtaagctggggcttgaacggcagcattg

SEQ ID NO: 10643 - DNA, 1950 bp, Gossypium hirsutum
  Clone ID: GOSHI-09MAY01-C6144_1
cgcaggttgaatacatcaaagcttatagaaaatagtgaatatttccaaaataagttggtggacaccatacatttcatggaaattcttagtttgaaagacagtgttgagaaggatactttctttcgtaagcttcctaatttagcagagcagcttcctcgcccaattgtgttgaagaagttacttcctttgttagcctctgcccttgaatttggttcagctgctgcccctgctttgactgcactgttgaaaatgggttctcgccttcctgctgaagaatttagtctgaaggtactgcctacaattgtgaagctctttccttcgggtgaccgtgctgtccgagttgctctccttcaccatatcgatcaattcggtgaatctttatctgctcaagttgttgatgagcaagtctacccccatgttgctactggatttgcagacacgtctgcgtttctccgagaattgactctcaagtccatgcttatattggctcctaagctttcacaacgtactttgtcaggctcattactgaagtatctttccaagttacaccttgatgaagaacctgcaattagaacaaataccaccatattattgggaaacattgcaagctacctaaatgaagggacacggaagagagttttgatcaatgcatttacggtccgtgcattgcgtgatactttctctcctgcccgaggagcaggagttatggctttatgtgccactagttcttattatcacatgactgagattgctacccggattcttccaaatattgttgtacttatcattgatcctgtcggtgatgtacggtcaaaggcatttcaagcagttgatcaatttttacagatagtgaagcagtataatgagaagggtaatgctgaagatacttctggtgctggaagtttagggatttcatcaatgcctggaaatgctagtttactgggatgggccatgagttccttaactcttaaaggcaaagcttctgatcaagctccagttgctactgcaaattctgtcacacctgcaactaccacagcctctacagccagctcaggactaatagaaactccaagtacagcaccagtccaccgagtaagttccagtacagattttgcagatcaactgatgcctccatctcctacttcaaccgatggatggggagaaattgaaaatggcattcatgaagaacatgacagtgacaaagatggatgggatgatattgaaccccttgatgagccaaagccttcttcagctttggcaaatattcaggcagctcagaagcgtcctgtttcgcaaccagtttcacagcctaaaccacaagcttcaacaagtttgagaccaaaaagcacagtgaaggcggccaaagatgaagacgacgatttgtggggttctatagcagctcctcctccaaaatctgcttctagaccattgaatgtgaaaacagctggagcagttgatgatgatgatccctgggcagctattgctgctccccctccgacaaccaaggcaaaacctttatcagcgggaagaggcagaggaaatagagcagctgctcccaaattgggtgcacagaggataaatcggacatcctccactgggatgtaaaatacgaaggaacagaacgcaaatggaggagaaaaatatcaggttttgtacacttttctctatctggactggcttaacattaaaatttcatggaagcctttgttgtctgcctagtactatctgatactgtgtctcttcctcttggtatattatttgatttgtaagcattctttcgtacaagatgttgcctgctgccttcttgtcccacagttactataaagagactggtgtgcagttttgatcatgtaattgtattttgtgtagggagcactataaaccaaatttagatgtattcctttgaaagaataataaaaaagttcagtgctataatcagagtttgatttt

SEQ ID NO: 10644 - DNA, 677 bp, Gossypium hirsutum
  unsure (1)..(677): unsure at all n locations
  Clone ID: AI055594.1
ctccgataattgactctcaagtccatgcttatattggctcctaagctttcacaacgtactttgtcaggctcattactgaagtatctttccaagttacaggttgatgaagaacctgcaattagaacaaataccaccatattattgggaaacattgcaagctacctaaatgaagggacacggaagagagttttgatcaatgcatttacggtccgtgcattgcgtgatactttctctcctgcccgaggacaangagttatggctntatgtgccactagttcttattatgacatgaactgagattgctacccggattcttccaatatnngttgtacttatcattgatctggacagtgatatacggtcaaaggcatttaagcanntgatcaatttttaccatagtgaagcagtataatgaaaagggtaatgctgaagatctttctggtccccgaagttaggggatttcatcaatgcctggaaatgctagtttactnggatgggcctggagttccttaactcttaaagcaaagctttgatcaactccantgctactgaaatnttgcacacctgcactacacagncttacaccactcagactatgaactcagtacagacagttcaccataatccgtcagatttcgacactgagctcattctactaacatgatggaaatgaatgg

SEQ ID NO: 10645 - DNA, 1034 bp, Gossypium hirsutum
  Clone ID: GOSHI-09MAY01-C6174_1
cggacgcgtgggcggacgcgtgggcggacgcgtgggcccacgcgtccgcaaaaaaaaaaaaaaagggaaagaaaagtttttatggctccccaagacaaaaatgcgagcaaaatcttgaagaaagctaacggtactggaagtacgagcagccaagaggtgcatttcaggggagtaaggaagaggccatggggtaggtacgctgccgaaatcagagatcccggaaagaaaagccgtgtttggcttggtactttcgatacggctgaggaagctgccagagcctacgacgcggcggcgcgtgagtttcgtggacctaaggctaagaccaacttccctttaccggatgaaaccaactgttacaagggccagaaccagcagagccctagccaaagcagcacggtggaggaatctggaagcccaacggtggagcgtggagtcaacaccgtgaccggggcagtagggagattccctttcgcgtgccaccagcagctggctctgggtggtggagtcgctaatggtgggattagcggggtgacccggtcgcggccggttctatttttcgaagcgttggggggagctggcgttgttggtcaggtttatccggttcggttcgatccggtgggagtacagttgggtatgggatttgcaagtgtagtccgaagtgaaccggactcttcatcggccattcattgcaaggcaaggagacctggccttgccctcgatcttaaccttcctcctccagtcgatgcttgatgttttgcatttttttttaaacggaaaacgccttttcatgatcttaattttaggcatctgagaggtaggaagctatgataaacaagaggtgatagtaatccgtgttttgtatcatttttgtctcggttttatcttttaaatccgatgtaaatagttttacgacagtaatccgtgtttgcaaactgaggaaaactatgatccattatctgagatgattttgtttataacctctcgttcaaaaattaaccactcttttttacttttaatgagaacctttcttaatt

SEQ ID NO: 10646 - DNA, 188 bp, Gossypium hirsutum
  Clone ID: LIB3147-040-Q1-K1-H1
cccacgcgtccgcccactcgtccgcggactcttgggaccaacttccctttaccggatgaaaccaactgttacaagggccagaaccagcatatccctagccaaagcagcacggtggaggaatctggaagcccaacggtggagtcgataatggtgggattagcggagtgacccggtcgcggccggttcta

SEQ ID NO: 10647 - DNA, 655 bp, Gossypium hirsutum
  Clone ID: GOSHI-09MAY01-C6084_5
cacagattgatgatggtgatgttgctgttgggaaggatatacaggataatcaaacacagattgatcagcaatatcccctgtactatttgtcctcgaggcagcctcaagcttacaacatgcctgtccagcaacctagcattaatgaagcccccacagggatcccatcgagccggccgcagactccttccaatcctaccatggctcctactcatgtagcatacaaccctatgagaaatgctcctcttgctaaacctgaaatgactgctgctgctggtgtatacagaacaacaaatactggtaacccacaactggttcaagtgcaaaacagccagcatcaacaacaatatgcgggttattctcagattcatcatgcatcacaatctgttgcacctacctccagcacggctgccccatatgcatatgaattcactgatccaactcatgctcaaatgtattacactcagcctatggcacccaacatgcctcctcagtaccaaaccatgactgcagtagtcttgccagatgcacccacgcaacttccgactgacaacatcaagccacagatcagaacttcacagccaatatagatcagtcaagaaagaaagcgacaaaattttgaaaagaagggtttggttatatctttaaaattctgttt

SEQ ID NO: 10648 - DNA, 541 bp, Gossypium hirsutum
  Clone ID: GOSHI-09MAY01-C6084_2
gcgcccacgcgttttatttcaacgaaaatatccacaggtatttcatcggatttctactttctccgaatccacagatccattttcacctatggctccagtagcagcaacatcttcagattctataaagcctagagatgtttgtgttgttggtgttgcacgtactccaatgggtggatttcttggctctctgtcatctttatctgccaccaagcttggttcgatagccatagaagctgctcttaaaagggcaaatgttgatccatcacttgtgcaagaagttttctttggcaatgtactcagcgcgaatttgggacaggctccagctagacaggctgcgctaggtgcaggaattcctaactcggtcatatgcaccactgttaacaaagtttgtgcatctgggatgaaagcaacaatgcttgccgcacagagtattcagttgggcattaatgatggtgctgtggctggtggcatggagagcatgtctaatgtacctaaatatttgggagaggcaaggaaaggatctcggcttgggcatgatact

SEQ ID NO: 10649 - DNA, 1604 bp, Gossypium hirsutum
  Clone ID: GOSHI-09MAY01-C6084_1
gcctccgatccgggtccacgttgaggatcagaaagagcataaagtgggaatcgaggaacagtttgctcaatttactgtgactgctacttctgctgctgctactggtggtgctggtggtgcagtgaagcaacaggatgaagtatttgcggctatgtcgatgccgccaccgatgcctgccggcatcgctgcttctggtggtggggtgggcttgaatccgggagtggttcctggggagtatttgaatcggggtctttccgatgatgagagatcggatcatggggttcctgtgggatataggaaaacacaaactccagtgattcagcctcagggtttacctcttcagaatcaacagaagtatagcagtggtcaagatttggcttctccagattccatctcaagtgacggtagttttacaaatccattatcacgccaaaagcctgtgatttatcaagacccagttgttcaaatcccatctggggttaacaggatccctgcaaacgctgtcgatccaaagcttaatatctctgatccgaactcaatcggccgagttcagatacaacaacaagttcaggattctggttatgtattgcagcaaccacaattcgatcaacagcagcaaccacaacagcagcagcagcagcagcagcagcagttcttgcatgctgctggtgccccgcattacattcatcatcaccagtctggggcagtgccgatctcagcttattatcctgtatatccttcccaacagcaacttcaccatcatcaaacacagattgatcagcaatatcccctgtattatgtgtccgcgaggcagcctcaagcttacaacatgcctgtccagcaacctagcattaatgaagcccccacagggatcccatcgagccggccgcagactccttccaatcctaccatggctcctactcatgtagcatacaaccctatgagaaatgctcctcttgctaaacctgaaatgccggcgcctgcgggtgtatacagaacgacaaatactggtaacccacaactggttcaagtgcagaacagccagccggacgcgtgggcggacgcgtgggctcagattcatcatgcatcacaatctgttgcacctacctccagcacggctgccccatatgcatatgaattcactgatccaactcatgctcaaatgtattacactcagcctatggcacccaacatgcctcctcagtaccaaaccatgactgcagtagtcttgccagatgcacccacgcaacttccgactgacaacatcaagccacagatcagaacttcacagccaatatagatcagtcaagaaggaagcgacaaaaattttgaaagaagggtttggtttatatctttatattctgttttaaagtcttgtgtttttcattggtattggcttgcgatatgtatttgtgaaaggtaataaggaactcaatggtcttttactatcttgtggatgtcatattgttggtattgtcataggaaatgaaactcatctgaagatttatactgtaaaagctcgaactcagatattgtgtgctttgtgcaattcatatatcttttacttagtaatgggttgttaaaaaaaaaacaaaaaaactcga

SEQ ID NO: 10650 - DNA, 493 bp, Gossypium hirsutum
  Clone ID: uC-gsflnu33B055e08b1
ccttcgcgtccgcccacgcgtccgcttgtgcaagaagttttctttggcaatgtactcagcgcgaatttgggacaggctccagctagacaggctgcgctaggtgcaggaattcctaactcggtcatatgcaccactgttaacaaagtttgtgcatctgggatgaaagcaacaatgcttgccgcacagagcattcaactggttcaagtgcaaaacagccagcatcaacaacaatatgcgggttattctcagattcatcatgcatcacaatctgttgcacctacctccagcacggctgccccatatgcatatgaattcactgatccaactcatgctcaaatgtattacactcagcctatggcacccaacatgcctcctcagtaccaaaccatgactgcagtagtcttgccagatgcacccacgcaacttccgactgacaacatcaagccacagatcagaacttcacagccaatatagatcagtcaagaaggaagcg

SEQ ID NO: 10651 - DNA, 445 bp, Gossypium hirsutum
  Clone ID: LIB3135-047-Q1-K1-H4
gtttgtgttgttggtgttgcacgtactccaatgggtggatttcttggctctctgtcatcgtgggatgtgtcaccaagcttggttcgatagccatataagctgctcttaaaagggcaaatgttgattcattacttgtgcaaaaagggttcatttgctgtgtacataaaaaaataattggggcaagcttaaagaggagagggctttcactatttattagaaacctaataatttctttgcttacactttttagcataggatttctatgagcagaaaaaatagcctatgaatggatctttcttataatcattctattaaataagtttattattttatattgggaaataaataaaaaaaaagaatttgattcttttggtgctaatttatttttttgttgtgattttggcttttattttacgcttttttctattccagatgatttttactt

SEQ ID NO: 10652 - DNA, 538 bp, Gossypium hirsutum
  Clone ID: GOSHI-09MAY01-C6054_1
gctttcaaagttgtttggggacaagaatctccgaaatgatttgaatgtgcgctctagtgatgctacaaacttggctgaacattctgaggatgtatttgaatgtagaaagggtgaagatatagaacaatatggaagaagaatatatgatcatgtatttggtcataacatagaagtggcattgtctaatgaagaaacttggaaaaaccgtaacagaccgcggcctatatatagtaaggatgtctttcctgacaaactaactaaggagaatggaaaaacagaaaaaggtagtgcaacagatgatgtctctgccatggcatctctgggcttgaagaatcctcaagatatatggagccttgccgagaattccagagttttctacgagtctttgagattatttttcttgaagagacaaaaggaaatcgggaacctgacttttgataaggatgatcaattggctgtggaatttgttactgctgctgcaaatattagggcttcttcttttgggattcctttacatagtctttttgaagctaaagga

SEQ ID NO: 10653 - DNA, 864 bp, Gossypium hirsutum
  Clone ID: GOSHI-09MAY01-C6014_1
cggacgcgtgggcggacgcgtgggcggacgcgtgggctctatgcggctaacagctgaatatttggggctgggacctgaggaaaggcagttccctaaccaacaaaatctgaatgatcctgacctttatcactatgcagtattgtcagacaatgttctggctgcttctgtcgttgttaactccacaatttcctctgcttaggagcccgagaaaattggttttcatgtggtgaccgattctctcaatctcccagcaatttcaatgtggcgtttatataaatcctcctggcaaagctacaattcatgtgtcagagcgtagaaaattttgattggggatccactcaggataattcgacacttgaatgaacagaagtcctatgatccaagatattcttctgcccttaaccatacttcggttctatctgcctgacatctttccagcactgaataagattgtgctcttcgatcatgatgtgggggtgcacagagatttaactgaaatttggagcattgacatgaaagggaaagcaaatggtgcagtggagacctgtctggaaagtgaagccccattttcgttcgatgcgtatgtttatgaacttttcagacccatttttggcaaggaggtttaatgcaaatgtttgcacatgggcatttggtatgaatttgtttgatctacatgaatggagaaggaaaaacttaaccatgctctatcgaaattacttgcaactgggacttaagaggtcattgtggaagggaggaagcttgcccataggttggattaccttctacaaccagactgtggctttagaaaagagatggcatacccttgggctaggttataactcagatgttccacggggtgatatt

SEQ ID NO: 10654 - DNA, 791 bp, Gossypium hirsutum
  Clone ID: GOSHI-09MAY01-C6394_1
atggcctctacttctcttctttcaccggccgccatagccaccgccgcgggcgccacttctatcacccacctttccctccatccctcctccaaacttcctgtccgtaacctcctcttcaaatccatttctggaaacaacagaccgtcctccaggctccacgtgtcctccccaactgaccaacccgccgcatccaccactcccgcccaaccctcctccaaaagccccaaagaagaaaccatcttcttcgacggcggagcccactacggggacctcttagccaatctgcttctgggtttcactcttctatggctgccgttgactctagccgccgtttcgagggcgtttttcctcaggtacaggttcaccaacctgcgggtgacggttatttcgggactgacgggtcaggataggagcgatttctcttacaaggtgattaaggacgtgcaggtggtgccgcgtttcataggtgagtggggtgacgttatcataaccttgaaagatgaaactaaggttgatcttaggagcgtccctaggtttagagagattgcaaagtactgtctcgccatggccgagaaacctgttgttttgaaagaaactggacctaaagggttttaggttaaagctggaaaggtatgtaaattctgggttttgctttgataattttttttatacaacgttggtgtcacattgttatagtttaattgagaagataatgtatctcttaaaattttcatttgatcaacaatatgtgttacaattctggggtcctttggttatgcatttagtactaa

SEQ ID NO: 10655 - DNA, 850 bp, Gossypium hirsutum
  Clone ID: GOSHI-09MAY01-C6344_1
ataagaaggggatagagtgacggccaaagctttcccttcctctttctctgaaattgtttcaaaaaatttccccttttcgattcaatcatgagtaacgaatatgattatctgttcaagcttctgcttatcggcgattcctccgtcggaaaatcctgcttgcttctcagatttgctgatgattcttatgtggatagctacatcagtaccatcggtgttgatttcaaaatcagaacagtggagttggacggcaagacaatcaagctgcaaatttgggatactgctggacaggagcgttttcggactattactagcagctactaccgaggagctcatgggataatagtcgtctatgatgttaccgagatggagagcttcaacaatgtcaagcagtggttgaacgagattgacagatatgctaatgacagtgtatgtaagcttctggttgggaacaaatgtgatttagttgagaacaaggttgtcgacacgcagacagcgaaggcatttgcagatgaaattgggattcctttcctggagacaagtgctaaagattcaatcaatgtagagcaggctttcttaaccatggctgccgagattaagaaaaaaatgggtaaccagccaactgggaacaagtctgccggaactgttcaaatgaagggacaaccgatcgaacagaagaacaattgctgtggctagtagccggtactcttttagatcgtaaacatgttgcatatcatatgaacgtttcagaaactaaaatgctgcctacttgaactttttctgtgtaagttgaagtaccaatgcatgttcctcggttcttatattttcgttagattatataccgtatttgctg

SEQ ID NO: 10656 - DNA, 394 bp, Gossypium hirsutum
  Clone ID: GOSHI-09MAY01-C6364_3
cccacgcgtccggctctcaggcatcaccatggcaacctctgctatccaacaatctgctttcgcgggccaaacagcggtgtagcagtccaatgagctcgtctgcatagatcggtgccgtcggtggtggtcgcgttcccatgcgtagaaccgtcaaaagtgctccaaccagcatctggtatggccctgaccgcccaaagtacttgggtccattctctgaccaaatcccatcatacctgaccggtgaattccctggggacatacgggtgggatactgctggattatcagctgacccagacacatttgccaagaaccgtgagcttgacgtgatccactgtaggtgggctatgcttggtgcccttggctgtgttttccctgaaattctttcaaagaatg

SEQ ID NO: 10657 - DNA, 453 bp, Gossypium hirsutum
  Clone ID: GOSHI-09MAY01-C6364_2
caggaaaaaggtatatgtatgtaatgatccaccagctcaaaagactagcagttgaattacatcagtacacagcaacagatgctacatagcaattaattgttacagctttcagagacatatctataatctaagttcattttccggggacaaagttagtggcataagcccatgcgttgttggccaccggatcggcaaggtggtcaaagaggttctcaatgggaccctttcctgtgacaatagcctggacaaagaatccaaacatggagaacattgcaaggcgcccattcttgatctccttaaccttcaattctgcgaacgcgtcaggatcatcagccagtccaagtgggtcgaaagcaccacctgggtaaattgggtccagtccttcaccgagtggtcccccaccaactctgtatccttcaacaaatcccacccacgcgtccgcccacgcgtccg

SEQ ID NO: 10658 - DNA, 806 bp, Gossypium hirsutum
  Clone ID: GOSHI-09MAY01-C6364_1
gcagcaaccaatagactgctgctgacaagatttcctgatccacaacatcttctgatttccattataaccccttcctctcctccaaaccaaaatagcccccacgcgcccgcggcaaacaaaccaagtcaacctaaagccttaggcaccatggcaacctctgctatccaacaatctgctttcgttggccagaccgctttgaagcagtccaatgagctcttacgcaaagtcggagctttcgatggtggtcgtgttaccatgcgcagaactgtgaaaagtgcccctaccagcatctggtacggccctgaccgcccaaagtacttgggtccattctcagaccaaatcccatcatacctgacaggtgaattccctggtgactatgggtgggacactgctgggttatcagctgacccagagacatttgctaagaaccgtgagcttgaagtgatccactgcagatgggcaatgcttggtgcccttggttgtgtcttccctgaaattctttcaaagaatggagttaagttcggagaggcagtttggttcaaagctggatctcaaatattctccgagggcggccttgactatcttggcaacccaaaccttatccatgctcagagcattcttgccatctgggcttgccaagttgtgctcatgggatttgttgaaggatacagagttggtgggggaccactcggtgatggactggacccaatttacccaggcggtgctttcgacccacttggactggctgatgatcctgacgcgttcccagaattaggttatgagacagattggcgcttgatgtttct

SEQ ID NO: 10659 - DNA, 402 bp, Gossypium hirsutum
  Clone ID: LIB3120-002-Q1-K1-E4
aaacaaaccaaataaacctaaaaacacttattcaccataaaaacctaatatatacggggatagtgatttaattgaccagagccggtttaaaacaatccaatgaagctcttacacaaagtcagagctttcgatggtggtcgtgttaccatgcgcagaactgtgaaaagtgcccctaccagcatctggtatggccctgaccgcccaaagtacttgggtccattctcagaccaaatcccatcatacctgacaggtgaattccctggtgactatgggtgggacactgctgggttatcagctgacccagagacatttgctaagaaccgtgagcttgaagtgatccactgcagatgggcaatgcttggtgcccttggttgtgtcttccctgaaattcttttaaagaat

SEQ ID NO: 10660 - DNA, 379 bp, Gossypium hirsutum
  Clone ID: LIB3120-012-P1-K1-C11
tgagatcataaagcaaaggtgctatttcagggaaaaaggatatggatttaatgatacggcagcgtgaaaagactagcagtgaattacatcagtacacagcaacagatgctacatagcaattaatgttacagctttcagagacatatctataatctaagttcattttccggggacaaagttagtggcataagcccatgcgttgttggccaccggatcggcaaggtggtcaaagaggttctcaatgggaccctttcctgagactacaataaccatcggcatacaaaccaagtcaacctaaagccttaggcaccatggcaacctctgctatccaacaatctgctttccttggccagaccgctttgaagcagtccaatgagct

SEQ ID NO: 10661 - DNA, 688 bp, Gossypium hirsutum
  Clone ID: GOSHI-09MAY01-C6304_1
ccgcccacccgtccaaaaatcttccttttttttaatgcatccaatgagacctgagcctcggcttcatgtctttctggtttcatttccaggccaaggccatgtaaaccctcttcttagattcggcaagcgcctcgcttccaagggtttgcttgtcacactatctacacccaaaggcttcggcaaacagatggctaaagccaacaacatcactgacgaccagcttatccctgtgggcgatggctttctccgatttgaatcgttccaggatggttgggacgacgacgacccgagacgcgcacacctcgaccaatacatgcaccaactggagctcgcaggcaaaccagcgatttcagcgatgataaagagatacgccgagcaaaaccgccccgtttcttgcttcatcaacaaccctttcattccttgggcatctgatgttgctgaaagtctcggcatcccttctgcaatgctttgggtgcagtcttgcgcgtgtttcgccgcctattaccattacaatcatgggttagtgacgtttcctactgaaactgatcctgaatttgatgttcagttgccgtccatgccgcttctcaagcacgatgaagttcctagctttttgcacccttcaactccttttgcttacttgaggacggccattcttgggggtaagatttaagaaacttgataagcaatt

SEQ ID NO: 10662 - DNA, 421 bp, Gossypium hirsutum
  Clone ID: GOSHI-09MAY01-C6324_1
aaaagctaaaacaacaacagcagcagcagcagctgctgagctgagttgagcttagctactcctttcttttcccctttttttcctctctctctctttgtctccaaacagtcaaatgtcagctgcctatttccctcatcttcctcttcctcttcctccattttgtttcctcttctaaccgccatctctcacctctgttaacaagggaaaacagaaaccctaactctaacgcagagcatcaagcggcgccggcagctcagccatgaagaagaacattctcattttggcgacatcctcgcttttgctctttaatttcttgctctctttcgccatcgaagatgacatcgcctgtcttgaaggactgaaaaactcccttaccggcgccgactcccctctttccacatggagcttcagcaaccgctca

SEQ ID NO: 10663 - DNA, 676 bp, Gossypium hirsutum
  Clone ID: GOSHI-09MAY01-C6294_1
cccacgcgtccgaaagacatcaatgttttggtggtgggttctaccggttatattgggaaatttgtggtgaaagagttgatcaatagagggtttaatgttatagtcattgctagggaaagaagtgggattagaggcaaaaacagcaaggaagatactttgagtgatttaaatggagctaatgtatgtttctctgatgtcaccaatttagacattttggagaattctgcgaaaaatttagggtttcccattgacgttgctgtctcttgtcttgctagccgtactggtggtgtttaggattcatggaaaattgattacgaagctgcaaagaacagccttgtcgctggtaagaacttcggggcttcacattttgtgttgctatctgccatttgtgtccggaaacccctcctcgaattccagcgagctaagctgaaatttgaggccgaattgatgaaagaagccgaaggagatgacgggtttacttacagtattgttaggccaactgcattctttaagagtttagggggtcaagttgacttagtgaaaagatggaaggccttttgtgatggttgggggtggcaaattatgtgcctggtaagccaatttgtgaacaagatttggcttccctcattggaaattggggtttggaagaagattaaaattatcaaatttttgccat

SEQ ID NO: 10664 - DNA, 508 bp, Gossypium hirsutum
  Clone ID: GOSHI-09MAY01-C6284_2
aaaaagctctctaaattccctttcccgagctgaaagataaacaaggtgagcctaaaagagctgaagcaatggcagtttgctcagcatacaccacccagtccctccattcaacgtgttcaatctccacaccagcgaaaacccatttaggttttcaccaaaaggaagtagttttctataggagaagcagcaagagaggtggcagcggcagcggcagcagcagcggcccatgcgtgataacatgctcggccggtgattcacaaactgttgtgattggtttggccgcagactcaggatgtgggaagagtaccttcatgaggaggctaacaagtgtgtttggtggtgcagccgagccaccgaagggaggcaatcctgattcaaacacactcattagcgatatgaccactgtgatatgcttagatgattaccattcactcgacagaactggaaggaaagagaaaggggtgacagcacttgacccaagagctaacgactattacctcatgtatga

SEQ ID NO: 10665 - DNA, 1678 bp, Gossypium hirsutum
  Clone ID: GOSHI-09MAY01-C6284_1
ggctctctactcccccgcgccccttcctagcagtcagaacctgagatagtgaggtagctaaacaatggcagtttgcccagtatacaccacccaatctctcaactcaacatgttcaatctccacaccatcaaaaacccacttcagttctcaccacaaccacctagttttctacagaactagcaagagaactagcaagagaggtggcagcagctcatgtgtgataacctgctcagctggtgactcacaaacagttgtgattggtttagctgctgactcaggatgtgggaagagtaccttcatgaggaggctaacaagtgtgttcggtggtgcagctgagccaccaaagggaggcaaccctgattccaacacactgatcagcgatatgaccactgtgatatgtttagatgattatcattcacttgacagaactggaaggaaagagaagggagtgacagcacttgacccaagagccaacgactttgacctcatgtatgaacaagttaaggctctcaagagcggtattgctgtcgacaagcctatctacaaccatgttactggtctcttggatcctcctgagctaattaagcctccaaagatccttgtcatcgaaggactgcaccccatgtttgatgaacgtgtgagggatctgttagacttcagtatctatttggatatcagcaatgaggtcaaatttgcatggaaaattcagagggacatggctgagagagggcacagccttgaaagcattaaagccagtattgaagccagaaagcccgatttcgatgcctttatcgatcctcaaaagcaatacgccgatgcagtgatcgaagtgctcccaactcagctgatcccagatgacaatgaggggaaggttttgagagtgaggttgataatgaaagaaggggtggagcatttcagtccagtttacctgtttgatgaaggctcaaccatctcatggataccatgtggaaggaagctcacttgttcttaccctggcatcaaattctcctatggccctgacacttactttggcaacgaggtttctattctggagatggacggccaatttgatagattagatgaacttatttatgttgaaagccatttgagcaacatctccaccaagttctatggagaagtcacccagcaaatgttgaagcatgcggatttccctggaagtaacaacggaactggcctcttccaaaccattgtcgggttgaagataagagatctctatgagcaaattacttccagcaaaactgcagcttcactagaagcccccgcggccgcccacgcgtccggtttcttcatacattggactagaccttgggtccataacaaattatcctctttccagctttcctctatcaaaggtttatttgagtgtttggctgttgttgctttcataagaatcgagtatgatcctatgcaatttattttatgctcgttattcagtggagatatgtaatatagagaaacaaaatcagagttcaatttcaactttgagaagttcatataagacaaagcctttctacatcatctctccacttctatttccccatattgctgcttcttggtgtaagttggaaccatttatgatgtcatgatctttggtttttttactccaaataaagaggattggctatggaagcgtggccataatggggacgtttccttg

SEQ ID NO: 10666 - DNA, 654 bp, Gossypium hirsutum
  Clone ID: GOSHI-09MAY01-C6224_1
taggagataactcatcccttccttctttttcactaatccaagaccctggttctttctccaggttcctcattcatttccatttctcaacacaaattttcatcacccatcaagcttttcatcaatggcttcccttcaacaagcttcaatctctcttcaacccaagcttctttcatcttctcaacaccccagatcccttccctctctcaacctctctttttcagccactttcccttccctcaaactctgcaccactcgccctcttcatggcggtgccaaaatgtcagcctccgccgcttccagctacgccaccgctttagccgatgtagccaagtccaacaacacccttgatgccaccagctccgacgttgaaaaggtcgagacaatcttctccgacccacaagtcctccagttcttcaccaaccccaccattgatgtcctcaaaaaacgtcaggttttggatgagattgttagctcctccgagcttcagccgcacacggcgaattttttgaacatcctggttgatgccaagaggattgatcttatcaaagaaatcgtgaaagagttcgagttggtttacaatcagctgacggatacagagctggcgggggggagttcagtggtgaaattggagtctcaacatttggcacagattgt

SEQ ID NO: 10667 - DNA, 466 bp, Gossypium hirsutum
  unsure (1)..(466): unsure at all n locations
  Clone ID: LIB3165-018-P1-K1-H4
cggaattggaagganccgaccccagcgcgtactcgcgtttcgctcaattcaaatttccanntttctcatacaccattattttnctttcaccnnncatcaagcccttttcatccagaggcgcttctcctttcaacctaagctttcaatcnntctcttcannacccaagcccttctttcaaatcttctcaaccactncccagatcccctnntccctctctcaacccctctctttttcacgccacctttctccttctcctcaaacctctgcaccacttcgcctctcttcatggccggtgccaaaatgtctagcctccgcccgcttccagctacgccactcgctttagccgatgtatccaagtccaacaacacccttgatgccaccagctcccacattgaaaaggtcgagaaaatcttctccgacccacaagtcctccagttcttcaccaaccccaccattgatgtcctc

SEQ ID NO: 10668 - DNA, 388 bp, Gossypium hirsutum
  Clone ID: LIB3120-048-P1-K1-H7
cccacgcgtgcgaccacgcgtccgcccacgcgtccgcaagcttttcatcaatggctgggctgtgaacaagcttcaatctctcttcaacccaagcttctttcatcttctcaacaccccagatcccttgcctctctcaacctctctgtttcagccactgtcccttccctcaaactctgcaccactcgccctcttcatggcggtgccaaaatgtcagcctccgccgctttcagctacgccaccgctttagccgatgtagccaagttcaacaacacccttggaggcaccagcttcgacgttgaaaagggtcgggaaatctttttcgacccacaaggtcttccggtctttacccaccccaccattggtgttcctaaaaaacggtagggtttgg

SEQ ID NO: 10669 - DNA, 1194 bp, Gossypium hirsutum
  Clone ID: GOSHI-09MAY01-C7974_1
cccacgcccccgcgcccggtttatatctcagttctccaagatgccctccttattcggcgctaacccttcatcctccgatcctgcaaacgacaccgtgccttccccttcctcttcttgttcctcctcctcgtctccggacatgtggaattacttttttatccctatcctcctctgcctcaccaaagaactttcccttgctaaagctcaaacctcaactggactcctcctcccgaatcaacgcggcgacggctcggccgatgattcactaatttccttttcgagttgcgcgaatgctgacccgaagctatattatcggcctgtgattgggatactgagtcatccaggagacggcgcgtcggggaggctgaacaatgatactaacgcttcctacatagctgcgtcgtacgtgaagtttgtggaagcggccggggctcgagtcattcctcttatttacaatgagccggaagagattcttttccagaagcttgaattggttaatggcgtgctttttacaggagggtggtctaaatacggcttgtactatgatattgctaaaaagattttcaagaaagttatagagaagaacgataggggagatcatttcccgttatatgccgtttgtttgggttttgaacttttaacaatgattatcagcgaagacaaaaatattcttgaaccattttctgcatcaaatcaggcctctagtctccaatttgtggaaaatgttaatattgaaggaacagtatttcaaagatttcctccaaatttgctgcaaaagcttggcacagattgcctagtcatgcaaaaccatcgttatggcatttcgccagagaagcttcaaaatactccaaatctgtccagattcttcaagatcttaacaacaagcacagataaaaataacaaggtatatgtctccactgcgcaagcacatggctatcctgtcactgccttccagtggcatccagagaaaaatgcttttgaatggggcttgcctatgattccacactcagacgacgccattgaagtgacacaacatgttgcaaactttttaatcagggaggctaggagatcgctgaataggccagctgctcaaaaagtgcttgacaaccttatttataattacagccccacgttttgtgggaaagctgggaggggtttcgatgaggtctacatctttacacaacgtcaagctcg

SEQ ID NO: 10670 - DNA, 593 bp, Gossypium hirsutum
  Clone ID: GOSHI-09MAY01-C7874_3
ccttaatatcccaagaatcatctttttcaaaacattttactccaacgttttgatttccatggagcaaaccttcattttcctcacaaaaacctcagtctggttctcagacccattcgtcctctagtgttttgactgcataccttggtaccgctccttccagtgttccagaatcggttcgtgacgactggcgcctccccctgtatagctcttcgtaacgtccaccgcatcgttaatacctccgccgtttccggccgtacaacgaccgttttcaggtacccattaatttttttgttagttttacattataaaagaattgtcctttatcaggccacagtatggttgggttttaacatatttttcaactaatattggatacacttaattattaaacattgttctttttaacttattaagttataaggcttctttataacatgttaatctattaatatttatgtggttcttatttttttctgtctttttgatatattatttattttagtcggattttttaaatttatttttatgtatttggatcatttgtttcatgtgttatttttatttgatagttttttatttgaattattattttt

SEQ ID NO: 10671 - DNA, 890 bp, Gossypium hirsutum
  Clone ID: GOSHI-09MAY01-C7874_1
tccacgcgtccgggacctattttagagccaacatggcctaatttttaatttatttatatattgcttttctgccctttctcgacagtgttccagaatcggttcgttaagacaatggctaccatcagaatagctcttcgtaacgtccaccgcatcgttaatacctccgccgttgccggccgtacaacgaccgttttcaggccacagtatggttgggtttcaacatatttttcaactaatattagtaacactcagccattaaacatcgatctttctaacgaagaaagcaaaaggcgtctttataacagattgttgtataggagcaaacaaagagggtttctggagctggatttggttttgggaaaatgggttgaagaacatatccattccatggatgaaaatggaattaaagctcttgttaatgtcctcgatttggaaaaccccgacctttggaaatggctaaccggtcaagaacaaccacccgaagcagtgaccgttaatcctgtcttctctgcagtgcaacagaaggttttgaaaaacctcaacaaccattcctctcccgagacccgagcaacccctggccggccatgggtgagagggtgggatgatatcaaaaaaggtcgcgacagcccaatcaccggaaatcagtagcttttcttttgcctttgaggtaacaggttctgaaggcttgtttatttcgaaacaaattaaggtttgtaatatgtaatttcttcgatattgtatgctagagtatgaaataaggatggctgcattgctgcagtgaagctggagatgtaagaaaaccctgaatgtatttggtataggccttatttaagttgatctatagcataaaaattgtggcttgaattgacatttcttctctatgctttagc

SEQ ID NO: 10672 - DNA, 399 bp, Gossypium hirsutum
  Clone ID: LIB3147-058-Q1-K1-C12
ctccttaatatcccaagaatcatctttttcaaaacattttactccaacgttttgatttccatggagcaaaccttcattttcctcacaaaaacctcagtctggttctcagacccattcgtcctctagtgttttgactgcataccttggtaccgctccttccagtgttccagaatcggttcgttaagacaatggctaccctcagaatagctcttcgtaacgtccaccgcatctttaatacctccgccgtttccggccgtacaacgaccgttttcagaaagcaaaaggcgtctttataacagattgttgtataagagcaaataaagaaggtttttggagcttgatttggttttgggaaaatgggttgaagaacatatccattctatggatgaaaatggaatt

SEQ ID NO: 10673 - DNA, 449 bp, Gossypium hirsutum
  Clone ID: GOSHI-09MAY01-C7804_1
gggaaaacccggcgcgacccacgcgtccgaagggatcagaaaagagtggtggagcaacatggctggttaaccaggcattctcagtggggggcgatggaagtcaatggggaacttcaagtatgcccttgtggttccgggggcaatttacagcacctactcgttcataatgtgcaaagatgaaaacgagaggaactggttcatgtttttggtcttaccatttctggtgtttagattgattcactatcaactatggatttcatactctcgctatcgcactgccaaagggaacaaccggatacttgacaagagcatcgacttcgaccaagttgaccgagagagaagctgggacgatcagataatactgaacggaatattgttctacggggcggggatagtgttaaaagatcaatttaacatgcctttctttaaagccgacgggacactgatca

SEQ ID NO: 10674 - DNA, 568 bp, Gossypium hirsutum
  Clone ID: GOSHI-09MAY01-C7834_1
cccacgcgtccgctagacttataaatttaagctaaaaaggcccctccatattggcacctaagttgctcctgcaggaaaaatggcatccatcaccatgacaacatcattccttagcaccactaacctcacaaagggttctccaagaattacccagcggagactagtggttgccaatgctgctaagggagctcaagtggagagtgtccagatgagcggtgagaggaaaacagagggcaacaatggcaggagggagatgatgtttgcagctgcagctgctgctatttgctcggttgcgggggttgcaacggcggagcctaaacgtggtagcgcagaggccaagaaggcgtatgctcctgtttgtgttactatgccaactgctaggatctgtcgcaactgaggcagtgccactgcacattgctcgagtgccatgagactatgcttgttatgggcaggggctgaaggatgtaatttaataatgcttgtaatttttcatttttataattgagaaacctaatttaaatttgtgttttttttaaaaaaaaaggattctatcttttttaaaacccct

SEQ ID NO: 10675 - DNA, 457 bp, Gossypium hirsutum
  Clone ID: LIB3829-026-Q6-K6-H4
ggtcgcccacctcgccgtccgctcctcactgcactcttcttacccataactacaaaggttctccaaaaattacccagcggagactagtggttgccaatgctgctaagggagctcaagtggagagtgtccagatgagcagtgagaggaaaacagagggcaacaatggaaggagggagatgatgtttgcagctgcagctgctgctatttgctcggttgcgggggttgcaacggcggagcctaaacgtggtagcgcagaggccaagaaggcgtatgctcctgtttgtgttactatgccaactgctaggatctgtcgcaactgaggcagtgccactgctcattgctcgagtgctatgagactatgcttgttatgggcaggggctgaaggatgtaatttaataatgcttgtaattttgcatttttataattgagaaacctaatttaaatttgtgtttttctt

SEQ ID NO: 10676 - DNA, 314 bp, Gossypium hirsutum
  Clone ID: LIB3165-025-P1-K1-D10
cccactcttccggaaaaatggcatccttttcatgtacaccacaatcccttaccacggtgagcttacaaaaggttcttcaaggattacccaaccgagactcttgggtggcaaagcttcttaaggagctcaagtggagagtgtccagatgagcggcgagaggaaaacatagggcaacactggcatgagggagatgatgttttcagctgcagctgctgctatttgctctgttgcgggggttgcaacggcggagcctaaacgtggtagcgcagaggccaagaaggcgtatgcttctttttgtgtttctatgccaactg

SEQ ID NO: 10677 - DNA, 893 bp, Gossypium hirsutum
  Clone ID: GOSHI-09MAY01-C7594_1
tgatctttcacctgcaccagctgtaagggaaggagtctgtgtgctgcttgagataattgacacatataacagcatgatggttcctgcttcagggaaaaagccaccttttgatccggttatatctgctttacttgatccaattattcagatgtgtgagcaagcagcagaggcacataaatcaaagggagctggccactcatcaagaagaagtcgaatgagttccgactcgggccagcttagtaaatctgcagttgatgcaattttgtcaaataacaactctgctactttctctcagaatactgaagctccatccaagatcttccttatcaactgcttgtgtgctatgcaacaaccattactcggacatgaggttgcagctgaatatgcaaagaaacttggcactacgattgataatcatgtaaatgttctcgtggaaaaagaagttgacacaattcttagaagatgtgatttatcaacgaagatgcatcacttccataattggtttaacaaggatacaacagctgggacgccattggctgagttagaagacacaactccagcttctctttcagagtgtttgaaggcctttttcggatttattttgggaagtgacagttcgctgcctgagtttgaacaaatgcaagttccaaagttgcgttctgatgcgtgtatacaggtagctaagtcattagcagacacttatgagcttatttacaatgcaatcatggatcccaaaaacaaatacccagatcccaaatcactggcaaggcatcctccagatcaaataagaaccattttgggaatatgaagctgtaaaccatatttgcttttaaaatggttgtaaagaaacagagtcatgctttggagtaatggaaacttttggtggcttttta

SEQ ID NO: 10678 - DNA, 433 bp, Gossypium hirsutum
  Clone ID: LIB3165-043-Q1-K1-A9
gtgctatctgaattgctatcttttgagttttgaagaagaataacgcagagaaaggttctttattactgttcatcagatttttcaactttagaagatgaggggaagtctttggcatcttggacaatcaattacacgccgtgtagctcaggctgacaagaaggctgcagcacgtcgattctttgcttcagaagctgatctgaaaaagactgttctttataacttccacattgctcatggtgggaagatggtcccattcgccggatggagcatgccgatccagtacaaggactcaattatggactctacggtgaattgcaggcagaatggttcactctttgacgtttctcatatgtgtgggttaagccttaagggaaaggactgtgttccattccttgaaaagctcgtcattgccgatgttgctggactcgcccct

SEQ ID NO: 10679 - DNA, 408 bp, Gossypium hirsutum
  Clone ID: LIB3165-017-P1-K1-D7
ctgaattgctctcttttgagttttgaataagatttacgcaaagaaaggtcctttaagatgaggggaagtctttggcatcttgggcaatcgattacacgccgtgtagctcaggctgacaagaaggctgcagcacgtcgattctttgcttcagaagctgatctgaaaaagactgttctttatgacttccacgttgctcatggtgggaagatggtcccattcgctggatggagcatgccaatccagtacaaggactcgatcatggactctacggtgaattgcaggcagaatggttcactctttgacgtttctcatatgtgtgggttgagccttaagggaaaggactgtgttccattccttgaaaagctcgtcattgctgatgttgctggactcgcccctggaacgggaaca

SEQ ID NO: 10680 - DNA, 435 bp, Gossypium hirsutum
  Clone ID: GOSHI-09MAY01-C7494_2
cccacgcgtccgcccacgcgtccgcccacgcgtccgcccacgcgtccgcgcgttttttaatcaactccggattttgtaatccgccgttcgtacgcggcggtgtaaaggaaaagagaggtgaggagaggaggatgttggaaaaccctacacccaccgcagctgatgccgctcctgccatcaaacgctatgctcctcccaatcaacgaaatcgttctctcggacgccgtaaatctggagagaagaatcaaggtgccacatcgagaaacattaatccagtcggggatgctgggagcagcgctatcctgaatgaagacaaccctcgtcatgctttgatacctttagaaggctgttctagaagtgatgcctctcggcttttaagcaatcgttgggcagctgtcttacatcgctaccatgatacatccattgatttgtctg

SEQ ID NO: 10681 - DNA, 944 bp, Gossypium hirsutum
  Clone ID: GOSHI-09MAY01-C7494_1
cgccgatcaactccggttttgtaatccgccattcgtacgcggcgcggtgcaggaaaacagaggtgaggagaggaggatgttggaaaaccctacacccaccgcagctgatgccgctcctgccatcaaacgctatgctcctcccaatcaacgaaatcgttctctcggacgccgtaaatctggagatcggtttgattggactaacaatgtttatgggaatgattcagagaagaatcaaggtgccacatcgagaaacattaatccagtcggggatgctgggagcagcgctatcctgaatgaagacaaccctcgtcatgctttgatacctttagaaggctgttctagaagtgatgcctctaggcttttaagcaatcgttgggcagctgtcttacatcgctaccatgatacatccattgacttgtctgaaagaccagttctgtactctggaattagtgattcagcctggaggaatttcagacttccccatcagatgatgtccccagcaaacaaaaccgggccttcatctggctcacagatggatttcttagctgagcttcgtcgtgcaattcgaaatgccaataccgacaactaactactgacacagtgtgataatggcagatgtggacttatgaagaacttcatgaaccttgcactcaaagtacctgctgtatgtgttcattagttactcaaatcaaatgctacttatttgggcgatccgtgttattcagtgtaaagcgtggtccaggcatttgtttatgtcctggtccttggacatgtaatttagatgaaaacgttatgaaatctgtcagctattcaatgttatattattactctggaactctaaggcggtgtttttattctctttccttttatgagacagtagtaggggaggggtattttgttgccggacctgtatggattttgatgaatgcaaatctctctctagt

SEQ ID NO: 10682 - DNA, 261 bp, Gossypium hirsutum
  Clone ID: LIB3148-007-Q1-K1-G6
cggtcgaccacgcgtccgcccacgcgtccgattcgtacgcggcggttttaattaaaagagaggtgaggagaggaggatgttggaaaaccctacacccacctcagctgatgccttttctgccatcaaacgctatgcttctcccaatcaacgaaatcgttctctcggacgccgtaaatctagagatcggtttgattggactaacaatgtttatgggaatgattctcagaagaatctatgtgccacatttagatacatttattc

SEQ ID NO: 10683 - DNA, 800 bp, Gossypium hirsutum
  Clone ID: GOSHI-09MAY01-C7484_1
cggccgcgtggggcaaaaataatggcagccatgggctgcgttgcaaagctcaatgactgctctttctctatcctcaaactccttcttgggccaacgtctctcaattcctccttctctctcccctcttcacatcaaaccaagagagaatccatgtctcattgtagtgaagcttaaacgatgggaacggaaggaatgtaaaccgaacagccttccagttttgcataaaatgcacgttaaggttggagataccatcaaagtaatatcgggtcgtgataagggcaagattggagagataagcaagatcttcaagcataacagcaccattgtagtgaaagatataaacctgaagacgaagcatatgaagagcagaggagaggatcaaccaggacagataattaagattgaagcaccaattcacagctcaaatgtgatgctgtattcgaaagagaaagaagtgacgagccgggtgggtcataaagtgttagatgacgggaaaaaagtgcggtacctcataaagacgggagaaatccttgacagtgacgagaattggaagaaactgaaggaagctgcaaaagagaaaactgaagtagctgcagctgctcctgctgcagatacgggtgctgcctcttagaacctaaaatatcataaaacttgaaaaactaatgtggcttctggaagtttagattattttttatctgtagtcttccatctttatgcaccaattacttttaaaatatagtggaaggtggtcaattctttttccaacagtaaaaaaaaaaaaaaaaaagtcgacgcggccg

SEQ ID NO: 10684 - DNA, 1143 bp, Gossypium hirsutum
  Clone ID: GOSHI-09MAY01-C7444_1
ccccgcgtccgcatttttttattaggaagccaagcacacatattgttatcttccaaacgccagccgactctgtacccttcatttcacatttcttccacaaatcaactgtttcttctcaaatctaaagcaaagcaaagcacgcagcaatcatggcagatgatgaagtgaaggatgaggtgccggaaatcacatcatttgatcctagtaaaaagaagaagaagaagaaggttgtgattcaggaccctgcagatgaatctgttgacaagttggcagagaaaacggaggcattatcagtttctgaagggcttgactttagcaatctgaaaaagaagaagaagaaaccagtagaggccaatacattcactgacgaaagtggggatgcaggagatgattttgatggtcatattgatggggatgaagaaggtgaaggcattgtcttgcaacaacggtacccttgggatggaactgaccgtgattatatatatgatgagctactcggtcgggtgttcaacattctccgggagaacaaccctgagcttgctggagacagacgtagaactgttatgaggcctccacaagttcttcgtgagggcaccaagaaaactgtttttgtaaatttcatggatctatgcaagacaatgcatcgacaaccagaccatgtcatggccttcttgcttgctgagctggggacaagtggatcacttgatgggcagcaaaggttggttgtgaagggcaggtttgcaccaaaaaagcctgaagggatcctaaggcgttacatcaatgagtatgtcatttgccttggatgcaaaagtccagatacaattctttcaaaggagaatcgtcttttctttctcagatgtgagaagtgcgggtctggccgatcagttgctccgattaaagctggttttgttgctcgtgttggccgcagaaatgctggtacttagggtttttgattccagccaaaatgatattccagaagtgagaaatttaggaacacctgttgttagtatctatgagtaaaacgttgatgagattttttttttcttttattgataataatgctgatgagattttgaatggtactaaaattgaaggaatgtgtgtgtttgagacatgttatttttccccatgcgatcaactttt

SEQ ID NO: 10685 - DNA, 323 bp, Gossypium hirsutum
  Clone ID: uC-gsflnu33B126a03b1
ttttcgtatttcatatatcaactcgttcgcgctgccgagggggggttttaatttcaatagtaaccggtggggaattatacgctcgtatgatgtaagtggatggtccgcggtggcctggaaactacattattccgaccccatttaaacgacgaagaagaagaaggttgtgattcaagaccctgccgatgaatctgttgacaagttggcagagaaaacggaggcatcatcattttctgaagggcttgactttagcaatctgaaaaaaaatactaaaaaatccagctgaggcccatacatttcactgaccgaaagtggggatgcag

SEQ ID NO: 10686 - DNA, 467 bp, Gossypium hirsutum
  Clone ID: GOSHI-09MAY01-C7434_1
cccacgcgtccgcccacgcgtccgacccaccattctgtcattagccctcaaccatacgccaaaatatggcagccacttttgcaagcccatcaaccgtcgttggcctcggtggcaccgccacctctatgtcatccccgccgatgaaaacccgcctctcttcagggtttttgaaatctggggtgacggctaggaaccctttgaggctggctggtgcttgtgggggcaagtttacttgcttcgagagagactggctacgaagggactttaacgtgataggatttggactgattgggtggatagcaccatctagcataccggccatcgatgggaagagcttgactggccttttctttgaaagcattggaactgagctcgctcacttccctacacctccgccacttacctctcaattctggttgtggttggtattatggcacctaggactgttcatcactcttacttttgga

SEQ ID NO: 10687 - DNA, 455 bp, Gossypium hirsutum
  Clone ID: GOSHI-09MAY01-C7764_1
tcggacgcgtgggcggacgcgtggggtaaagctaagccatgaaaccccaatcgctttgcatcttttttcttctccatttcttcgctttactatgcacggcggcgtcggagtatgaagatccgagcaacggcggaaccatcgtttttactacacttggccgatcaaattatgcttgggacatctatactcttccaacttccgacccaccaagtccttccaatgaacttcgggttaccgacggcgaatctgtcaacttcaacggccagttcccttcgacctcaccgtcctctgttctctctctgctacataaccgaagcctaattcgaaccccaggtccacaagctccgccgcccctccagctcgtctacgtgacggaacgcaatgggatgccgaatatttactacgacgcgctttattacagtgcgccgggaagtactagatcgagatcggcactt

SEQ ID NO: 10688 - DNA, 996 bp, Gossypium hirsutum
  Clone ID: GOSHI-09MAY01-C7724_1
cccacgcgtccgcccacgcgcccgtctgcaccttccccaccccctctcgttgctgatctaggtacttcagaataccctgctgaaatgaatcaaaagggcttgatttatagttttgttgcaaaaggaactgttgttttagctgagcacacatcatattctgggaactttagtaccattgctgttcaatgtttacagaagctgccttcaaatagcagcaagttcacgtattcttgtgacggtcacacatttaacctcctcattgacaatggatttgtgtttctagttgtcgcagatgaatcagttggcaggagtgtgcctttcgtttttcttgaacgggtgctagatgattttaaacaacgatatggtgcaagtataagaaatgagggtccccatcctttagctgatgatgacgatgatgacgacttatttgaggaccaatttagcattgcatataatcttgacagagaatttggaccaaggcttaaggagcacatgcaatattgtatgaaccatccagaagaaatgagtaagctctcgaagttaaaagctcaaatcactgaggtgaaggggattatgatggataacattgagaaggttttggatcgcggggagaagattgaacttctagtggacaaaactgagaacttacaattccaggctgatagcttccagaggcaagggcggcaactgcggcggaggatgtggctgcagaatctgcaaatgaaactgatggtggggggagctattcttgtgttgatcatccttttgtgggtttttgcgtgtggaggtttcaaatgttaacgttgataaccattgcattgccctatgttttcttttatatatacaaaaaataataattctacatttgtttagatgtacaaaatatagttatgctcttgactttgtcctgggtttgctgttgttatgtagcactaccttgccgtttaagatatgtaatcaaagctttgaattttatacttttttgaagttttctaa

SEQ ID NO: 10689 - DNA, 444 bp, Gossypium hirsutum
  Clone ID: GOSHI-09MAY01-C7664_1
gcgaccacgcgtccgccacgcgtccgattcatgtctctccttttctccttggtttttgccacttcaattttctggttaacttggatgtaccttttatcctagaagagggatgccgccacccccaccaggccctctaggcctccccttggtgggaaaccttcccttccttcgtactgaccttcactcctacttctctgaacttgctcacatctacggtccagttgtgatactccagcttggaggcatgcttgcgatcctgattacctccccatccacggctcgagaagttcttaaagacctagacatcgcgtttgctaaccgtgatgtgcctgtggttgccaaggttgtaaccggcggccgtgatatagtttggaacccctatggcccggaatggaagatgttaaggaaagtatgcgttatcaagatgcttagcaatgctacttt

SEQ ID NO: 10690 - DNA, 544 bp, Gossypium hirsutum
  Clone ID: GOSHI-09MAY01-C7194_1
cccacgcgtccgatttattgatagtctctgctttttagtccgcaatgagctgagatgtgatgtcatgtgtcaccagacaaaatccttcaaaagagtactaaccagtgaagcatttgctattatccacgcgtccgaaaacacccaggtacagaagcactaacattttctctttggcttaccaaccttggatctgaaatggcaaagtcacccgaagaagaacaccctgtcaagacctttggctgggctgcaagggacccatctggtcatctctctcctttcaccttctccagaagggtaactggtgaagaagatgtgaggtttaaggtgctgtattgtgggatttgtcattctgaccttcacagtatcaagagtgaatggggctcctccaactaccccatggttcctgggcatgaaatagtaggggaagtgacagaagtaggcagcaaagtggaaaaggttaaggtgggagataaagtgggcgtgggatgcatggtcggagcttgccacagctgcgacagttgtgcaaacgaccttgaaaattact

SEQ ID NO: 10691 - DNA, 905 bp, Gossypium hirsutum
  Clone ID: GOSHI-09MAY01-C7164_1
cccagcgtccgaaagatccagctccctcccccacgccgccgccctcgtttcgatttagaaagttcttttccgacagcaagcatacctgacgtagaaaacccaaagccaaagcgagggaaaggagaagacgtagaagacgttgaaagaagaatagagattatgacgttggctctctcttcggcaacgtctgcttcttatttcatcactcgtcataatgcaaagccttctccggttatcaaaacgaccttcatgactctgaaaccagcgtcgtttccttcccctttaaccgccgtcattgtgtctgccggggcgcggaggatcgtttcttgccaagctgtctccaccgcttccctcgacaaggacgagaaaaacgcgtcggcttcggggtccgccgaagccgacgaggaagctaaagtaggggccaaggttaaggtgaaggtaccgctcaaagtgtatcacgtcgttcgcgagccggagttggatctgattggtatggaaggagtgattaagcagtacgtcggaatctggaaagggaaaccgatttcagctaatcttccttacaaggtggagtttcttaaggaaattgaaggccgaggacctgtcaagttcttcgtccatcttaaagaggaggaattggaattccttgattagaaatgtcggttcttctccgtacgccaggcaaaattactcttttttaagcgtctttttgctttctttcttataaccaaaagccaataattgctcattgttgtatatattttacctttaccgttcagttctacctgggaatctgatttctttgtttttgttttctgttcgttactttgtagaatcgaagttcctataccttaaatagatttgaacttcttatatctagagttaccttaaatggaattgaagttctt

SEQ ID NO: 10692 - DNA, 956 bp, Gossypium hirsutum
  Clone ID: GOSHI-09MAY01-C7124_1
cccacgcgtccgcccacgcgtccgcccacgcgcccggttggctcgtaagctttcttcgtgctctccaagcaagtttgagaaattttattttttagcaatcaacagtgatggcttcatctctagctctcaagaggctcctctcatgcaacatcctccctagctccttgcgggtggtccgcccaatggccatcgctccatcctcctccaggctctttaacaccaatgccatgcgtgagttcgacgacgatggtgatgagcgtgacctcagtgatgaacgccagcgttcactttctcgccgcggtgacggtttcttcacagataggtgctcgatccttttgctccaacaaggagcctgagccaagtcctgaacatgatggatcagttcatggagagcccatttctctccgcttcccgtggcatggggggtggtctccgccgaagctgggacgctaaggaaacggatgactccatgaaccttaggattgatatgccagggcttggaaaagaggaagtcaaagtgtctgtggaacagaacactctggtgatcaaaggcgaggccaaagaatccaaagaggaggaaaatggcgggaggtacaccagcaggatccatttgcctgaaaaagtttacaagactgaccagattaaggctgagatgaaaaacggtgtgctcaaagtggttgttccaaagatgaaggaggaggagaggaatgatgtgattcaggttcaaattgactgagttaactggttgcgtccggatgaggctaagtgggttttcgttggtttggggctgtgggtcttgtacgtatttagttttgataataagggcttggaatataatacgagtaaatgttaatgtagaactttcattttgtgttaacagaaaaccttgttaattttggatctatataacaaaatttgataataaattttttgttaaaaaaaaaaaccttcaaaaa

SEQ ID NO: 10693 - DNA, 671 bp, Gossypium hirsutum
  Clone ID: GOSHI-09MAY01-C7394_1
ccaaattctagtcatttcaaatttcacgtttgttttaatttccttttatttattggttgtttgttttctggtgctttctttctctatcctgaaaccacagccgtaaccatgtcttccttcctagccaacggcatttccagcttctcaccacagcctacttccgattcaaccaagttccttaaaggcttcttcccaaagctcgattccgtcaaacccataaccccaaaactccaaagttcaaggcttttgaaggtcagagcagatgttggtttcgatcctcaaaccctcacgtcagatcccagctcttcatcaggtaaatcctacgatgacaaaatccaggaaattcttcgaaaccgtgattatgataagaagtttggctttacgatggatatcgattcttttgcgatacccaaagggctttctacagaaacaattcgtttaatttcttctttaaaggaagaacctgattggatggtggagcttaagttgtattcttattattatattatttgaaattgattaatcctctcattgtttttctttattctttactcactctatatgaattaccatactctgttcttttcacatttcatatctctaatattatttcacttcttttatttattcttattatttctcttatactctttttttttacttttctcttt

SEQ ID NO: 10694 - DNA, 321 bp, Gossypium hirsutum
  Clone ID: LIB3189-033-P1-K1-C4
gtttgtttgttttctggtgctttctttctctatcctgaaaccacagccgtaaccatgtctttctgtggtagccaactgcatttccagcttttcaccacagcctactttctattcaaccaagttccttaaaggcttctttccaaagctcgattccgtcaaatccataaccccaaaactccaaagttcaaggctttttaaggtcatagcatatgtttgtttctattcttaaacttttatctcttattccatctctttatcatgttatattcctacttttacctaattttaaagtatatttctttttaactttgctattattat

SEQ ID NO: 10695 - DNA, 786 bp, Gossypium hirsutum
  Clone ID: GOSHI-09MAY01-C7324_1
cccacgcgtccgctaaactgccactgaatttgtcctcctctctcatccaaccaatctggagatcctttcccatactttttttttgtcttttttatttcctttttcaatttggttctacttgactcaagttcttcctccacttgaaggccacaattcattcttttttttttcctgtgcttgtacacaatggctatgactgtaaatgcagcagtatctcttccatcttccaagtcatctaccctgtcatttaaaaactcagtcactgtccctgaaagaatcaacttcaacaagagtgttttgtacccaaaaaatgtcagccttggtggaaatgtggtttccattagagctcaggtcactacagaagctcctgcaaaagcaccaaaaatttccaagaaagatgacgagggtattgttgtgaacaagttcaaaccaaaggaaccctacattggaaagtgcctcctcaacaccaaaattaccggagatgatgctccaggagagacttggcacatggtttttagtaccgaaggggaagtaccatacagagaaggacaatccattggtgtcatcccagatggtattgacaagaacggaaaaccccacaaacttagattgtactctattgctagcagtgctttgggagattttggcaattctcaaactgtttccttgtgtgtgaaaaggcttgtctacaccaacgaacaaggagagatagtgaaaggagtttgctccaatttcctgtgtgacttgaagcctggtgctgaagtgaagatcacagggcctgttggg

SEQ ID NO: 10696 - DNA, 493 bp, Gossypium hirsutum
  Clone ID: GOSHI-09MAY01-C7284_1
cggacgcgtggggctggcttctcattttctctctttcctcacttccttactttgattaccctttttatatatcacaaaaattttgcagtctttctttcagacgcaagcagcaggcacctgtcctagaaacagagatcttctcaagttagttaaataacggtttttgctatccccattttgccctttcattcttcttcttctccttcatcggaagatgattagttggaacgatctttacaccgttttaacggcggtgatcccactgtacgttgctatgatcttggcttacggctccgtccgttggtggaaaatattcacccccgaccagtgctcgggtatcaaccgctttgtcgccatatttgccgttcctctcttgtctttccacttcatttccaccaatgacccttatgccatgaacttcaggttcgtagcagccgacacccttcagaagctcatcatgctctttgctcttggattggggactaatttaaca

SEQ ID NO: 10697 - DNA, 470 bp, Gossypium hirsutum
  Clone ID: GOSHI-09MAY01-C7244_5
cgaagctttagaggcacatcctagggtgaggcgcgtctattatccaggctgcccaagtcatcctgaacatgaaattgccaagcagcaaatgactggctttggtggtgtggtcagttttgaggtggatggagatttgatgaccaccatcaagtttgttgatgcattaaagataccatacattgctccatcatttggtggctgtgagagcatggtggatcagcctgctataatgtcctattgggatcttagccaagctgagaggcgcaagtatgggattgaggataacttggttcgtttcagcttcggagtggaagacttcgaagatttgaaggctgatgttctgcaggcactggagaccatataatggcgctaatccccgtcgtttgggtttgggtttaaatgaccaacctagttattttggtgtttcaattggtatttgagctgttttaagtctgtgtcgtgttttgttt

SEQ ID NO: 10698 - DNA, 824 bp, Gossypium hirsutum
  Clone ID: GOSHI-09MAY01-C7244_2
agagcctcttcgcatctcggagtatagtcgcagaaaagtgagagagctgaaacgctgtcgtcaaacaaatggctgtctcctcgtgttcctttcctcctagggttttcaatgcttattcttcattcgagtgccgttccgatcccgacttctccggtacgccgaccggggagaagcctcgcatcgggtctaaccgacgagtaacggcatcgttgttttgtacaggcggtgggggtttgtcgtctttgatctttcgtttccccccgaacttcgtccgccagctcagcgtcaaggctcgccgcaactgtagcaacatcggtgtcgcgcaagttgtcgcggcttcgtggtcgaacggtcccacttccggttacccctcatcggcggcggctgctgcttctcaggcagccgcagcctccgttcccgtctctgatgacgtggcggttgtagaaggttgtattgacaacgatagtgtacagattggggattcatatgattccaagacatcgtttttgatctccgatgggagcatcactgttcatgctggtgaaagattaggtcgcggtatagttactgatgcaattactactccagtggttaatacttctgcatatttctttaagaaaactcaggagcttattgacttcaaggaaaaacgccatacaagttttgaatatgggcggtatggaaatccaacaaaatttattggtggacacaatgatgtccttgctggttgtataagtggttctgagaagttggttacagaaattcgtactttgcatcatattttgggtggtactctcaacccaaatgctgcgtatctaatcatc

SEQ ID NO: 10699 - DNA, 2028 bp, Gossypium hirsutum
  Clone ID: GOSHI-09MAY01-C7244_1
aaaaccggggcggcccacgcgtccgcccccgcgcctcttcgcatttcggagaagtcgcagagggagagagagagttgaaacgatttcgtttttggtgatagaaaacaaatggcggtttcatcatgttcatttactcttagccctagggtttgtaatccatattcttcatttgagtgccgtccagatcccgatttctccagtgcgccgatcggggacaagcctcgtcttgcctccagccgaagggtgacggcttcgtcgctttacgccggaggtatcagtagccgaggtttgtcttctctgatctttcgtttcccgccgaatttcgtgcgccagcttagcatcaaggctcgccgcaactttagcaatatcggtgttgcgcaaatagtcgctgcttcgtggtcgaatggtcctgctccagattccccctccttggcggctgctgcttctgctcaggcagcggcagcggcagccgccgtcaccgtcactgtcactaatgacggggcggctgtagaaagttgtattgacaacggtagtgtacagattggaggttcagataattcgacgacaacgtttttgagctccgatgggagcatcactgttcatgctggtgaaagattaggtcgcggtattgttactgatgcaataaccaccccagtggttaatacttctgcttacttctttaagaaaactcaggagcttattgacttcaaggagaaacgtcatcacagttttgaatatgggcgttatggaaatccaaccacagtcgttgcagaggaaaagataagcgcacttgagggggctgaatcgaccctgattatggcatctggtatgtgtgctagcacagtcatgctgatggcattggttcctgctggcggacatattgtgacaacaacagattgctacagaaaaactaggatattcattgagaccatcctacctaaaatgggaattttggctactggttattgaccctgcagatgtggatggcctgggggtctgcacttcaacaaaaacaaagtttctcttttctttactgagtctccaacaaatcctttcctgagatgtgttgacatagaaagagtttcaaagctgtgtcacagcaaaggagcacttgtctgcattgatggtaccttcgctacacctcttaaccagaaggccctcgcccttggtgctgatctagttttgcactctgcaacaaaattcattggggggcacaatgatgttcttgctggttgcataagtggtccagagaagttgattactgaaattcgtactttgcatcatattttgggtggtactctcaacccgaatgccgcttacctaatcatcagaggcatgaagacactgcatcttcgtgtacagcaacagaattcaacagcattaaggatggccgaagctttagaggcacatcctagggtgaggcgcgtctattatccaggcttgccaagtcatcctgaacatgaaattgccaagcggcaaatgactggctttggtggtgtggtcagttttgaggtggatggagatctgatgaccaccatcaagtttgttgatgcattgaagataccatacattgctccatcatttggtggctgtgaaagcattgttgatcagccagctataatgtcctactgggatcttagccaagctgagaggagcaagtacgggattttggataacttgattcgattcagcttcggggttgaagacttcgaagatttgaaggccgatatactgcaggccctggagaccatagcttaaatagcgttttgatgtgtttagtatttttcctagtctaaatggagcatgttgatctccaaaagtattttctgttgtgtttgattttggtagatccacattggttgaatgaagtcatgattttggttaataatttggaactttggggtgcttgtttttagaaaattgatctaccgaaaatgttttttgtattttcttaatcttattttatgaaaataacttatcaagtggaaagtgatttattggttaaaataaataagtccattttattgg

SEQ ID NO: 10700 - DNA, 671 bp, Gossypium hirsutum
  unsure (1)..(671): unsure at all n locations
  Clone ID: AI055231.1
ccgccgtcaacgccaccgccactaatgacggggcggctgtagaaggttgtattgacaacggtagtgtacagattggaggttcagataattcgacgacaacatttttgagctccgatgggagcatcactgttcatgctggtgaaagattaggtcgcggtattgttgctgatgcaataaccaccccagtggttaatactgctacatacttctttaagttatagagaaacgccgtcaaagttttaaatatgggcgttatggaaatccaaccacagtcgttgcagaggagaagataagcgcacttgagggggctgaatcgaccctgatcatggcatctggtatgtgtgctagcatagtcatgctgatgacattagttcctgctgggggacatatgtgtgtcaacaacagattgctaccggaaaacttgatgttcattgagaacttntctgcctaaatgggaaatctcgttactggtattgaccctgcanatgtggatggcctgnaggctgcactcaacanaaacaaagtttctcttttctttaccgagtctncaacaaatccttncttgaatgtgtgacntaaaagagtttcaaagctggtacagcaaggagccttgcttgaatgatgaccttggtcactttttacagaggccttgnccctggngctactgttca

SEQ ID NO: 10701 - DNA, 433 bp, Gossypium hirsutum
  Clone ID: LIB3543-007-Q1-K6-B4
ccccgcgtccgccccgcgtccgcccagcgtccgcggacgcgtgggcggacgcgtgggaacaaacatagacgtatgtgttgtttaatgagggtataacggaccgtttcctgcagtcgttccagatataaatattgtgagagctgtttcacatcaaaggagcacttgtctgcattgatggtaccttcgctacaactattaaccagaaggccctcacccttggtgctgatctagttttgcactctgcaacaaaattcattggggggcacaatgatgtttttgctggttgcataagtggtccagagaagtttattactgaaattagtactttggatcatatttttggtgatactgtcaacctgaatgctgtttacctaatcattataggcatcaagacaatgtatattcgtgtacaataacaaaattctacaggatt

SEQ ID NO: 10702 - DNA, 415 bp, Gossypium hirsutum
  Clone ID: GOSHI-09MAY01-C7274_1
attcaatcaacattcatagcccaaaaatcaaatggcctgggctcctttcagcagctaccgagttaccattcgcagtttggtggccagtaacgcatgggcagtgaccagatctcgccatcggaggctccacacgaagaaatctgatttggccgtacagaggaggcgtgcgaaggaggctgcgcgaggagccactcgtgggagtcccaatttctggcctattctggcacgttccagaagctcccagtgctgctgagataattttggatgtattgggcctcgggttttagggcttattgggtcctgggttattaaaaatgggttaaaattattggattttatgtaattgggttaagggttttttgggggggttttggttaattggattaaaaatgtttttgggctgctttaatttagt

SEQ ID NO: 10703 - DNA, 452 bp, Gossypium hirsutum
  Clone ID: LIB3146-011-Q1-K1-A8
attcccttaggctttcatctagcatgctgccgccgacaataggagtatttgagtcatgaaatcaatttgcagccccaagatccctcctctgacttcgatttcaacgaagcaaagaagaatccatggcgaatttgcaaagctcggttgtacggagaagcgaggagacgtgcgaaggaggccgtgcgaagagccactcgtgtgagccctaactctctggcctattctggcacgttcctgaagcttctagtgctgctgagataattttaggtgtattgggcctcgggttttagggcttattgggtcatggtttattttagtaattgggctaaggtattggacttttattgtattggtttttttcattttagctttgggttttggaattggactttggccctattaacaatttatttttggttgggtttattaatatatatatttttatttttttt

SEQ ID NO: 10704 - DNA, 380 bp, Gossypium hirsutum
  Clone ID: LIB3196-006-P1-M1-E5
attttaacaaaaaaacagcagccctgggattaaatttgcttgggttcttagtgtttgccgaatcccccattttgcttggtaaacggcgatggaccaacatcgatcaaattcaatgcgcgcccatataaaatcgaggaggcgtgtgaaggaggccgcgcgaggagccactcgtgggagtcccaattctctggcctattctggcacgttccagaagcttctagtgctgctgagataattttgggtgtattgggcctcgggttttaaggcttattgggattgattctagggttgtgggtttattttagtattttgaaaattgtaaatggactttttgaactaattagtcttggaccttatttatttatttgggtttatttatt

SEQ ID NO: 10705 - DNA, 380 bp, Gossypium hirsutum
  Clone ID: LIB3272-057-P1-N1-H8
aagcgcttctcgagaggcaactcgagcactaacatattttgattcctttatttttattttctcacatttcgagtcaattaactctgtaaggcccaatttttgtccgggcttataccaaaaaaatcaaaaaaacaataaacacaaaataaactaaattaaaacagccaaaatccaataattttttaaacccatttttaataacccatgacccaaaaaaccctaaaacccgaggcccaatacatccaaaattatctcagcagcactagcagcttctggaacgtgccaaaataggccagaaattgggactcctacgagtggctcctcgcgcagcctccttcgcacgtctcctccgtacggccgtttctccataccttgtaatt

SEQ ID NO: 10706 - DNA, 568 bp, Gossypium hirsutum
  Clone ID: GOSHI-09MAY01-C7214_1
gctggggttaatcctttggcaggttgcttccctactttagctactattccagtctggattggcctgtatcaagctctctcaaatgtggcaaatgaggggctgttgacagaaggtttcttttggatcccatctttgggtgggccaactacaattgctgctcggcaaagtgggtctggaatttcttggcttattccatttgtggatggccatccaccattgggtgggcgtgacactgctgcataccttggtttacctgtgcttcttgttgtcagtcaatatgtttcaatggagctgatgaagccaccccagacggatgatccagcccaaaagaacacacttcttgttttcaagtttcttccgcttatgattggttacttttcattatccgttccgtcaggattttttatttactggttcactaacaacgatcttagttctgtacaacaagtgtggcttttcaaattttgtggtgcttaacctgttgtttatttttattgctaatttaattttttttgcttgtcattattattttcatttattattctttttttctttatatatttttttt

SEQ ID NO: 10707 - DNA, 845 bp, Gossypium hirsutum
  Clone ID: GOSHI-09MAY01-C1984_1
cggacgcgtggggtttcaccggcgcatgatacgcctccaccaccgtcgtggtttcagccagacccacaaggatctgtcaaccttcagatcggaggagccaacgtcgactaaaccgaaaccaaaaacagtaaataaactccttttttagattcgtcaagtagattcaaaataaagtaagaaaaaagaataagaacatagaaaaaaatgcgaatcaccttcggtaaactgtttttttaattgattttttttcaatccgtccccctatttacaatccgtttccccctttttgaattaggaaaacccccccttacaatcggttctcccctaaagctttagagccgatagtcctctttacatttcgttattgtttctctgctatatcctttgttgtttgcacatggtttttgtctttttgtgtcttcttttcttgcttgtttgcaggctttgaggggtgtcagacgcgtggaggagaggggcatgcgtggggaggccagtggtggaagcgcgtgcttgtgggaggagcggcagctgaagaggaggctagggtttgggtggctactgaaaaagttaagatagtgggctgatttgggctttagggttttaggttattgggtttattttgtatttatttatttggtttattgggcttattaggcttgcaactgggtaatgggttttgtaattattttatttggtttttgggccccgggcaaaatttgggccttacagtatgttcatccatttgtactgttaaaaactagcatggttgacaaaataaccaaacagttatacgtgacagatcatgtgtacatcatgttaatgtataatgatatgttttcaataat

SEQ ID NO: 10708 - DNA, 415 bp, Gossypium hirsutum
  Clone ID: uC-gsflnu33B114b06b1
ctttttgtgtcttcttttattgcttgtttgcaggctttgaggggtgtcaaacgcgtggaggagaggggtatgcgtggggaggccagtggtggaagcgcgtgctcgtgggaggagcggcaactgaataggaggctagggtttgggtggctactgaaaaagttaatatagtgggctgatttgggctttagggtttcaggttattgggcttattctgtatttatttatttggcttattgggcttgcaactcggtaatgggtttacgaatcggtctatttggtttttgggccccggtcaatatttgggccttacacttgaatctagacaaaataattacaagagagaaagttgtaaaaacctttaaaagcttaaaccatagaagtgattgatcctgtatcaatagagaaagacatcaac

SEQ ID NO: 10709 - DNA, 788 bp, Gossypium hirsutum
  Clone ID: GOSHI-09MAY01-C1944_1
aagagatctgccggagaaatattacttcggttaacgtataaagcttatgttgaggatgaagaagatgacacaactgtggctggatctgttgatacggatgcttcagatgatgaattatctgattctgatgaactaaatgtgacaaatgtgcagggtgtaaagcaatttacagatgaaacagacaaggagtcctttatggatgttctagcagctttgattgttagtgaggaatttcaaggcatagtatcgtccgaacctgggagcaaatcttttgatgacatatcaagaacagggtctctaaaaacaagatttagtggtgttaatggggaatctttgccatcggattctgataagggttctgaatcatctggaggatcaatcttattatggtttgctgggattacaagtggatcagtgttaattgccctcaggatcggtggctcgagtttcttcaacccttgatatcacgtgatgggctagctaagagttagtccttctgcttgatcaagtttaaagccagccatccttttgcaaatccaataatggcttggaaggagacctggagttctcattcctgtactatacccttaccagcatgcataatcgtgtttgttagcagagtgttcgattggcggcaggcaaaattttgggttttatgatgtagaaaggaccagccctaacagataagctatggatacatgtcatgatttgggtcatgagatttgggaagagagtgaaaatttttgacccctttctctttcgtaagcaaggaaggataaagggcggtt

SEQ ID NO: 10710 - DNA, 387 bp, Gossypium hirsutum
  Clone ID: LIB3166-046-P1-K1-H3
cccacgcgtccgaatttatcttctgcaggatcaatcttattatggtttgctgagatgacaagtatatcagtgttaattgcactcggtatcggtggctcgagtttcttcaacccttgatatcacgtgatgggctagctaagagttagtccttctgcttgatcaagtaattattctctttcgaatatgattacagttgcccgcagttgcattttcatatatttttacatctcatttgagttgccactggctgctaattcatttaactgtatattggcaggtttaaagccagccatcattttgcaaatccgataatggcttggaaggagacctggagttcacattccggtactatacacttaccagcatgcataatcgtgtttgttagca

SEQ ID NO: 10711 - DNA, 466 bp, Gossypium hirsutum
  Clone ID: GOSHI-09MAY01-C1904_2
cagatcagacagggcatctgaccacatcaaaaacaggcttaagacaggcaaagtccagaggcagaaagaagcaaggaagcaattggagcagggcattcacttggtcaaagctccgctcgcaccgccccacgtcccgtctctttgtcttccaaaaatcaaagtcaatgtgtcccaagcacagacagaagagaatcagcccatggaagagtgaaattggttctgctgttcctcggcttggtatttttgtccaccaaaatcttatgcatgcaactcgtggcttaagttatcaagaggttttttatgttgtgtctagcggtccagaattttgattagcatgttcaaatgttattgttttgagtagcatattttgtagtcactaattatggaaaagtcattaaaatatggattatctttggttttcccttttaaatgtggtgttgaatatctagactgatcgtcttcctcc

SEQ ID NO: 10712 - DNA, 973 bp, Gossypium hirsutum
  Clone ID: GOSHI-09MAY01-C1904_1
cccacgcgtccgcggacgccccggccccccgccgcctccttcttcagtccctggttcaagctctctcttgacgcgaccaggaaatcgagtgacgaaattgtgttttgttagttaatttaagaagaatgagattagagaagtgctggttttgttcctccactgtatacccggggcatggtattcaatttgttcgcaacgatgccaagattttccgtttctgtagatcgaaatgccacaagaacttcaagatgaagaggaatccccgtaaagtaaaatggaccaaggcctataggcgtttgcatggaaaggacatgacacaggattcaacatttgagtttgagagaaaacgtaataggccggagagatatgatagaaaccttgcagagaatactctgaaggccattaaaaagattgataaaatcagatcagacagggcatctgaccacatcaaaaacaggcttaagacaggcaaagtccagaggcagaaagaagcaaggaagcaattggagcagggcattcacttggtcaaagctccgctcgcacttgcacaagattcatctcttcgtcttccaaaaatcaaagtcaatgtatcccaagcacagacagaagagaatcagcccatggaagagtgaaattggttctgctgttcctcggtttggtggtcttgtatatgattgctgcttccgttgtttatgttcatacgttttttagttgtcctatgtacttacttatgatttctttcattagttaattattattctcatttatctgtcgctttatcttatctctactctttgttctatcgataattatctattctcttactgaataatatgctatcttctcgatgtggttttaacctgctatttactcttcgatattcgcatcatgtattttagtctactacttattcttctgttgtcatctgtgtctgttctcggactatctttattatatatctatatcagtactt

SEQ ID NO: 10713 - DNA, 915 bp, Gossypium hirsutum
  Clone ID: GOSHI-09MAY01-C1934_1
cccacgtgatcgcagagtttcagtgagagagctaaagaggaggaaaatcacacacaacactttgtctgctattaagacacaaacaagatagaagagagagaaactgtaaagaaagaaaacccaagaagaagaagaagagggtttcaagatctggtcagatcaagtcaagctacataaacatcggaatggggagggaactcacggatgtggacatggacggtaagccaaatggtgtggtgaattcaaatggcaacctaacagtttcagaaggctccgagtctaataattatgaggtcaaggaatgcactgcaaaaaactcggtcgtggacaatggtcatgagaagcaagaagcgctgggtgttaaaagcataaattttggtactgacatccctgaagatcagaagtgcatggacaatgacgagcttagcgcgactgcatcgaaacccattggtgctggacaagctcaccatgctacctctaaaactggtgcaaatggcaccgcaaatgtcaactctgcactctcccctgctaccacaaagggatcagagccaaactctccaataactcctttgatcttgaggaagccattgcaaccttatgaccggaagcatcctgatgacgaagataactggtccctcacttcctcagctgcgtctgttcgaactgctagatcgagggtaactattggaagtgctcctacttttagaagtgctgaacgtgctgagaaacggagggagttttaccaaaagttggaggaaaaacaccgagctttggaggcggagagaagccagtttgaggcccggaccaaggaagagcaagaagcagcacttaagcagcttagaaagaacatggttgtcaaagcaaatccagtaccagatttctactatgaaggacctccacgaaaggttgaactga

SEQ ID NO: 10714 - DNA, 730 bp, Gossypium hirsutum
  Clone ID: GOSHI-09MAY01-C1844_2
ctaggcgtcgtcgcctccgacggaagcaaagcaggcgagggagaaacaatgagtcggagttggggtataccggtgaagctactgcgcgaggcggcgggtcacatcggaactgtggagctcaagagtggagagctttacagaggaagcatggttgagtgcgaggataactggaattgccagctcgagaacatcaccttcactgctaaagatgggaaggtttcacagcttgagcatgttttcattcgaggcagtaaagtcaggtttatggtcataccagatatgttgaagaatgctcctatgttcaaacgtctagatgctaaaatcaagggcaagagttcatctcttggagttggcagaggtagagctgttgcaatgcgagccaaagctcaagctgctggccgtggcacaacagctgggagaggtgttgtgccatctattcgtaggtaacttggtattgtgaagttctttgtaatctcttctgtcagaagcaaaaggatgcaaaaggattgactcttttcatattgtactcttcatatttgatgtaaaaggattgactcgtttcattacgttgaggaaaaagaaattagatagaggtgaagtcactttgcctggatccaaaaaaaaaaaaaaaaaaaaaaaaaaaaaaaaaaaaaaaaaaaaaaaaaaaaaaaaaaaaaaaaataaaagaaaaaaaaaaaccgggcggccgttttaaaggatccaagtttac

SEQ ID NO: 10715 - DNA, 602 bp, Gossypium hirsutum
  Clone ID: GOSHI-09MAY01-C1844_1
gcgtccgttttgctattcctgcaggagcagagcggacgagcgagaaagaaagaaaaaaagaaacaaacaggagagggaaacaatgagccggagcttgggcataccagtgaagctactgcacgaggcatccggccacgtggtaacggtggagcttaagagcggagagctttacagaggaagcatggtcgaatgcgaggataactggaattgccagctcgagaacatcacctacaccgctaaagatggaaagatatcacagcttgagcatgttttcattcgaggcagtaaagtcaggtttatggtcataccggacatgttgaagaatgctcctatgttcaaacgcctcgatgctaaaatcaagggtaagagctcatctctaggagttggcagaggtagagctgttgcaatgagagccaaagctcaagctgctcgggcgtggcacaacaggtggtagaggcgttgtgccatcggttcgtaggtaactttgtcttgtcaaatggtttctagtctctattgtcaaagcatcgttcatcattatatgccaccggataaattcttgggtttagtgatcaagcttggactcatatttgatgtaaaaagat

SEQ ID NO: 10716 - DNA, 356 bp, Gossypium hirsutum
  Clone ID: uC-gsflnu33B140f10b1
ttcttctttccacgcgtccggctggccgtggcacaacagtcgggagaggtgttgtgccatctattcgtaggtaacttggtattgtgaagtgctttgtaatctcttctgtcagaagcatcagtcatcattgcagaccacttgagatgcaaaaaaggattgactcttttcgtattgtactcttcataattgatgtaaaaggattgactcgtttcatttcgttgaggaaaaagaaattagataaaggtgaagtcactttgcctgaatcaaaaatgactgctcaatttcagtgtgaatgtttaaaatgctttaatgacttggcagtacttttcggaaaatgatagatattggagattttt

SEQ ID NO: 10717 - DNA, 946 bp, Gossypium hirsutum
  Clone ID: GOSHI-09MAY01-C1824_1
gggtcggtcggcccctcgagtcaggggtcaaagttgatatcgattcggcagagggtgaaaaaaaatttaaaggggtctctctttctcatcttccagaattatcttccaacaaagctttcctacttcaatctaatcgattcaatcccacgacaagtccgtccatcttcgatcttcatccaacactccctccactccagtattgatcatgttcagcagataagtcgtttctctcttctgtaagccatctttcgtgataagatgagccactttatttgcttctctagggataaaatgaaaaacgcaagattcgtagcctagactcagatactttgagtctttttttaaaaactctaatttctgatctatcttcagatctctcttgcagtttttggatcaccgtttgagagtcgccttcaatctctaccttcttcagtcctagatgtaaccgaagactgatcgcttggagacacgccatcgcttcagcagaaaaagccttagcgtcaaagttgatttttaaccacagttccgtcggagcaacccatcgacacatatgaaaccgattcactagtaaggcactcccggaacacgtgttccttggattccattcgaggaatgacacctatggcaatctgcggatcccatgagtctcttggtgtgtaagttaatagaaagttggcgaaaagtttacaaaaaagcctccaattggttatttttaattttaggaaggtagatctaggcggccatagtcgcttggtaaaatgggtggtaatttgggtggggttggactctggccctcttggtgaaagtaatttggttggccgcggggaaccggggtcccccccggtggcgtcccctccccagatagattgaatccccctgagaattccgggttggagggagtgctaattcttccggcgtcctttccaagagggttgttaatccgtcc

SEQ ID NO: 10718 - DNA, 604 bp, Gossypium hirsutum
  Clone ID: GOSHI-09MAY01-C1594_2
cccacgcgtccgggtccagcagctggggggtgcacgggaccaaattctgacacatgatgctttaaatgaaaatggccgctggaaaaagaaacttaccgaacgatctctgaagctttttgagttcttacctcaagcaattcaagaacagtcgatgcttgaaagggatccccatggaaatgttcaggttgccaaaatagaaacagagaaaatgctcactcaaatggttgaaaccgaattggaaaagaggaagcaggaaggttcttataaagccatttttaaaggacagtcacacttcttcggatatgaaggtcggtgtggtttgcctactaactttgatgcgtcatactgctatgctttgggctatggtgctggtgctctccttccacagtggaaaaaccggattgatctcatcagtcggaacatctgtgtgccccacttgaagaatggactgttgcacgcactgcccttaccatcaatgatggatgtggagaaacaaattttggtatcgaaattaaattttatacttttataattttaaaaaattaaattaaattattattattttataaattaaaaaaaaaaaaaaaaaaaaaaaaaaataaaa

SEQ ID NO: 10719 - DNA, 1239 bp, Gossypium hirsutum
  Clone ID: GOSHI-09MAY01-C1594_1
gtaaaaacttgaaaactcgagtggttggatgcccaaaaacgatcgacggtgatttgaaatgcaaagaggttcctactagtttcgggttcgatactgcctgcaaaatatatgctgaaatgattggcaatgtcatgattgatgcacgatcaactggaaaatattatcattttgtacggctcatgggacgtgcagcttcacacattactttggagtgtgctttgcagactcatcctaacattactattattggagaagaggttgctgccaagaagctgacccttaaaaacgtaacagactacatggttgatgtcatttgcaaacgtgctgaacttggttataactatggagttattctcattcctgaaggtcttattgacttcattcctgaggtccagcagcttattgctgaacttaatgaaattctggcacatgatgttgttgatgaaaatggcctatggaaaaagaaacttaccgatcaatctctgaagctttttgagttcttacctcaagcaattcaagaacaattgatgcttgaaagggatccccatggaaatgttcaggtcgccaaaatagaaacagagaaaatgctcattcaaatggttgaaaccgaattggaaaagaggaagcaggaaggttcttataaagccaattttaaaggacagtcacacttcttcggatatgaaggtaggtgtggtttgcctactaactttgatgcatcatactgctatgctttgggctatggtgctggtgctctcctccacagtggaaaaaccggattgatatcatcagtaggaaatttgtgtgccccagttgaagaatggactgttggagggactgcccttacatcaatgatggatgtggagaggaggcatggtaaattcaagcctgttatcaagaaggcaatggtagaattggatggtgcaccattcaagaaatttgcttccttgcgggaggagtgggccattaaaaactgctacattagtcctggtcctattcaatttgttggaccatcttccaatgctgttagccacactctgctccttgaacttggggctcaagcttagaaggatcgatttaaaatttctgctttcacattagctgagcatgaaagagagacattttacattttctaaacataatttgccgaaccttattattattattttgaggttttttaaggattaaattaataatacatggatactgatggtctaagaacaacagaaaaaaaaaataaac

SEQ ID NO: 10720 - DNA, 224 bp, Gossypium hirsutum
  Clone ID: uC-gsronu33B076c02b1
gattattatatatatgcagatatgaaggaagatgtggtttgccaactaactttgatgcctcctattgctatgctttgggctacggcgccgcagctctcctccacagtggaaaaactgggttgatatcatcggttcgtttccgcttcttaactattgtccttctgcgttgatatcgttattcaattgtgtttttaaacttgggaaccaagtatttggattttcta

SEQ ID NO: 10721 - DNA, 564 bp, Gossypium hirsutum
  Clone ID: GOSHI-09MAY01-C1584_1
attccggtcggacccacgcgtccgcccacgcgtccgcccacgcgtccgcccacgcgtccgcccacgcgacccgcgtttctcaattcagagagaagagcaagtgcaaacgaagtctctctctttcttttgcgcttcagacaaaacccatctaagcgctttagttgacaacatatagtagttcaacggttggttctacttgtttgacaccttgaagcttggtgggtttcttgcgaaaagtacttttcagttttaatctaagtttcttgtgtgagggaggtgcatgccatgtgcttgtaaattattattgcaatctctatggaacaatttcatgaaagagggcaccaacgcaaaacatcgtcttatatggaggatgttcagttgaatacaaattgggacgatgtgatttgtcctatatgtttggatttcccccacaatggggtactccttcaatgctcttcttatgagaaaggctgccgcccttttgtttgtgacacggatcacatgcattcaaattgtttggaccgattcaaaaatgcacatggaatgtcgtcccttttgacgtct

SEQ ID NO: 10722 - DNA, 411 bp, Gossypium hirsutum
  Clone ID: LIB3272-026-P1-K1-C12
gtcaatttctgttttatatataatagcagaaagagggctacccattatcaattctagcactcaaacaaattgcctttctcaattcagagagaagagcaagtgcaaacgaagtctctctttcttttgcgcttcaaaacaaaatccatctaagcgctttagttgacaacatatagtagttcaacggttggttctacttgtttgacaccttgaagcttggtgggtttcttgcgaaaagtacttttcaattttaatctaagtttgttgtatgagggaggtgcatgccatgtgcttgtaaattattattgcaatctctatggaacaatttcatgaaagagggcaccaatgcaaaacatcgtcttatatggaggatgttcagttgaatacaaattgggacgatgtgatttgtcctat

SEQ ID NO: 10723 - DNA, 540 bp, Gossypium hirsutum
  Clone ID: GOSHI-09MAY01-C1554_1
cccacgcgtccgaaaacctaagaaatccctgatccctcccgtcccgcacctgtcgcgagaccgggtaatggccgcggagaattcaagttcgaaatcggcttcaacggctgattcctacatagggagcttaataagcttgacttccaagagtgagatcagatacgagggcgttctttacaacatcaacccggacgagtccagtattggattaagaaacgtacgatcatttggaactgaaggaaggaaaaaggatggtccgcaagtacccccgagtgacaaagtttatgaatacatattgttccgtgggagtgacattaaggatttacaggttaaatcttcaccacctacacagcctaccccacccataaacaatgatcctgcaattatccagtctcactttccacactcagtttcaacaactacaagcatgccatctgctgctagtggacctttgactgatcttacttcacacaacactcaaatgggatagcggggtttaattttcaagcagcactacctctatatcaacctggtgggaac

SEQ ID NO: 10724 - DNA, 713 bp, Gossypium hirsutum
  Clone ID: GOSHI-09MAY01-C1564_2
cccacgcgtccgggaatccataattaatggctctcccatttcggatgacctgaaaatccctgaatcgagtgggaaacggaaatatttaatggtcgttggtattaatactgcttttagcagcagaaaacgaagagattcagttcgtgctacttggatgcctcaaggtgaagaacgaaagaagctcgaagaagagaaaggagttgtaatgcgatttgtaattggtcacagtgctaccttagggggtatccttgatagggctattgaagctgaagatcgaaagcatggtgacattctgaggctggagcatgttgagggttccctcgaattatcagcaaagacaaagacatactttgccacggccgctgctctgtgggacgctgatttctatgtaaaagttgatgatgatgtgcatgtaaatatagcgacactcggagcaactttggctagacatcggtccaagccaagggtccacattggttgcatgaaatctgagccacatcttgctcacaatggaggaagataccatgaacctgaatatgggaaataccgtgatgagggaaacaagtattcccgtcatgctactgagcacctatatgccatctctaaagatatggcatcatacatatccattaaccagtctgctcctgcatgctccgaaaaacagtatcatactatctgagcaagaaattcatccgtgggtacgtgggtcggct

SEQ ID NO: 10725 - DNA, 651 bp, Gossypium hirsutum
  Clone ID: LIB3582-036-P1-K1-B10
cccacgcgtccgcccacgcgtccgcccacgcgtccgtgaaaaaccaggagaagaacgaaagaagcttgaagaagagaagggagttgtaatgcgatttgtaattggtcacagtgctacctcagggggtatccttgatagggctattgaagctgaagatcggaagcatggtgacattctgaggctggagcatgttgagggttacctcgaattatcagcaaagacaaagacatactttgccactgccgctgctttgtgggatgctgatttctatgtaaaagttgatgatgatgtgcatgtaaatatagcgacacttggagcaactttggctagacatcggtccaagccaagggtttacattggttgcatgaaatctggtccagttcttgctcaaaagggagtaagataccatgaacctgaatattggaaattcggtgaggagggaaacaagtatttccgtcatgctacggggcagctatatgccatctctaaagatttggcatcatacatatccattaaccagcatgtgctgcataagtatgccaacgaagacgtttcactgggatcatggtttatcgggttggatgtcgatcatatagatgaccgcagactgtgctgtggtaccacagattgtgaatggaagctcaagcgggc

SEQ ID NO: 10726 - DNA, 661 bp, Gossypium hirsutum
  Clone ID: GOSHI-09MAY01-C1514_4
cttaaacctacttcttctaaacctctcatcacaagatcaacggtgtgatttagctctcagtaccatccttattatacattcatccgattcagattaaaccctcaaatttcttgctcgataagaaaaaaagttcaacaaatttaaaaatatcatctcaactaacaggactctacgtgtacggatacgatccagcaagaatcccgctaatctaataaaaattgaaatcataaacaaaaacacttgcagttttctgaatggggacgatagttcaaactaccgttgtcactgtttttctttgtcttctttttcctattgtcttttccacatccaatgacggattgttcagaattggactgaagaagagaaagtttgatcgcaacaatctgttagctgcccaacttgattccaaggaaggagaagcgttgagaggttcttttagaaagtatcttcatggcaacttacaggagtcaaaggatattgatatagtggcactaaagaactacatggatgctcagtactttggtgaaattggtattggcacgcctccacagaacttcactgtaatttttgacactgggagttctaatttgtgggtgccttcatctaagtgttatttctcaatagcttgctatttccattcaagatataaatcaagccactc

SEQ ID NO: 10727 - DNA, 980 bp, Gossypium hirsutum
  Clone ID: GOSHI-09MAY01-C1514_2
ctttcaaatcaatcatgctattggacatctgggggtgtgagtcaagaatgcaaggctgtagtttctgaatcggagagaagatacttgatatgctattagcgaaggatgaaccgaagaaaatctgctcacaaattggtctatgcttatttgatggaactcaaggtgtaagtatggggattgaaagcattgtgaatgagaatgctggaaaagcctctggcagtttacgcgatgctatgtgttctacatgtgagatggcagttatatggatgcaaaaccagcttaagcagaaccagacacaggaccatataattgactatgtcaatgagctctgtgatcggctgcctagtccaatgggagaatcaagtattgactgtaaaagtctatcttctatgcccagcgtctctttcacaattgctggaaagttatttgagctccgtcctgagcagtatgtcatgaaagtgggcgagggagatggggctcaatgcattagtggattcactgctctggatgtaccacctcctcgcggacctctctggatcctgggtgatgtatttatgggccagttccatacagtatttgactatgggaacatgcaaattggatttgctgaggctgcataagcgaaccttttctaaatcttttaacacccgagtgccatgctgttcaagtagtacactcctaaacatatgggattaagtatcaaagatgattgtatgtaaatacttgtgtaaaacatgatctgtgatttaatccggattgtattgtattatggcattttgactaagaaaggtttcccggcatccgttcctctctttacctataatagcataatgatgcaattggttttattagcagttgttagagagctaaagatgatttcgggggctatgaaaactaggaatgccggacattatttttttaaggggaggagttaaatctcaaagcgtgatattgcttgaaaaaaaaaaaaataaaataaa

SEQ ID NO: 10728 - DNA, 1925 bp, Gossypium hirsutum
  Clone ID: GOSHI-09MAY01-C1514_1
cccacgccccacgggatagttgagagacacacctcaaaaaggatctagaaaagagaatatctcatccttttattttcatttcgtcttcttttcagctcaaatccatcatcgaaattacttgtagttatcaaaatggggacaataggcaaaactactacggccgctctttttctttgtcttcttctgtttcctattgtcttttccacgcctaatgacagattggttagaattggactcaaaaagagaaagattgaccgaaacaatcggatggctgcacaccttgaatccaaggagggaaaggcatctgaagcttttcttagaaagtatcgtcttcatgggaacttgggggaatcagaggacattgatattgtggcactaaagaactacatggatgctcagtactttggtgagattggtattggcactcctacacagaacttcactgtgatatttgacactgggagttctaatttgtgggttccttcatctaaatgttatttctcgatagcatgctatttccatccaaaatataaatcaagccgttcacgtacctacaaggctaatggtaaaccagcggatatccaatatggcactggggctatttcaggattctttagtgaggaccatgtaacagttggtgatcttgtagttaaacatcaggaatttattgaggcaacaaaggagtccagcttaacatttttgattgccaagtttgatggtatacttggacttggatttaaagagatttcagttggaaatgctgtgcctgtatggtacaacatggtcaatcaaggtcttgttaatgaaccagttttttcattttggcttaaccgcaatcctgaggatgatgttggcggagaagtggtttttggcgggatggatccaaaacattacaagggggaacacacttatgttcctgtaacacagaaaggatactggcagttcgatatgggtgatgttctgattggtgaccaaacaactggactttgtgccagtggctgcagtgctattgttgattccggaacttccttgttgactggacctacggctattattgctcaagtcaatcatgctattggtgcaacaggggttgtaagtcaagaatgcaagactgtagtttcagaatacggagaaatgataattgacttgctattatcgaaggaccaaccactgaaagtttgctcacaaataggtttgtgttcatttgatggaactcgagatgtaagtatgggaattgaaagtgttgtgaatgagaatgctggaaaagcctctggtaatgtccatgatgcaatgtgttctgtttgtgagatggcagtcatatgggtgcaaagccaacttaaacagaaccagactcaggagcgtatacttgattacgtcaatgagctctgtgaccggttgcctagtccaatgggagaatcagttgttgattgtaacagcctatctgctatgcctagtgtcgccttcacaattggtggaaagatacttgagcttacccctgagcagtacattctaaaagttggtgacggagagctagctcaatgcattagcggattcggtgctctcgatgtaccgcctcctcgcggaccactctggatcttgggcgacgtgtttatgggtaagttccatacggttttcgactatggaaacatgcaaattggatttgcagaggctacataaagtaatcacttcaacagttacacccctttggtatgtataatatgcagtgctaagtattactcttataaaaataagagagtgggatttagtatgtaatgataatttgcatgtaaatatattgttgcttgtggtaggagcttttattaggaaagaattttacttactctatacttataattaatgatgcaactgaattttagcttttatgagagctaaggttacatattttttggccccccagggggact

SEQ ID NO: 10729 - DNA, 614 bp, Gossypium hirsutum
  unsure (1)..(614): unsure at all n locations
  Clone ID: LIB3543-066-Q6-K6-G12
gcccagcgtcccgaaacactggggggggtggggggggtgcaaaatattgttgattccggaacttccttgttgactggacctacggctgttattgctcaagtcaatcatgctattggtgcaacaggggttgtaagtcaagaatgcaagactgtggtttcagaatacttagaggggggggggggggggctattatccnaagaccaaccactgaaagtttgctcacaaataggtttgtgttcatttgatggaactcgagatgtaagtatgggaatcgaaagtgttgtgaatgagaatgctggaaaggcctctggtaatgtccatgatgcaatgtgttctgtttgtgagatggcagtcatatgggtgcaaagccaacttaaacagaaccagactcaggagcgtatacttgattacgtcaatgagctctgtgaccggttgcctagtccaatgggagaatcagttgttgattgtaacagcctatctgctatgcctagtgtcgccttcacaattggtggaaagatacttgagcttacccctgagcagtacattctaaaagttggtgacggagagctagctcaatgcattagcggattcggtgctctcgatgtaccgcctcc

SEQ ID NO: 10730 - DNA, 492 bp, Gossypium hirsutum
  unsure (1)..(492): unsure at all n locations
  Clone ID: LIB3584-006-P1-K1-H12
cccgcgtccgacggattccggggggcacggggggtgtnacaggattctttagtgaggaccatgtaacagttggtgatcttgtagttaaacatcaggaatttattgaggcaacaaaggagtccagcttaacatttttgattgctaagtttgatggtatacttggacttggggggggggggatttctctcgttttttgctgngcctgtatggtacaacatggtcaatcaaggtcttgttaatgaaccagttttttcattttggctcaaccgcaatcctgaggatgatgttggcggagaagtggtttttggtgggatggatccaaaacattacaagggggaacacacttatgttcctgtnaaacagaaaggatactggcagtttgatatgggtgatgttctgattggtgtccaaacaactggactttgtgccagtggctgcngtgctattgttgattccggatctttcttgttgcctgggcctacggctgttttt

SEQ ID NO: 10731 - DNA, 416 bp, Gossypium hirsutum
  Clone ID: LIB3165-038-Q1-K1-E9
ctttactctatctcctttggattactcttttttcttctacttgtagttatcagaatggggacaataggcaaaactactacggccactatttttctttgtcttcttctgtttcctattgtcttttccacgcctaatgacagatttgttagaattggactcaaaaagagaaagattgaccgaaacaatcggatggctgcacaccttgaatccaaggaggaaaaggcatctgaagcttttcttagaaagtatcgtcttcatgggaacttgggggaatcagaggacattgatattgtggcactaaaagaactacatggatgctcagtactttggtgagattggtattggcactcctacacaaaaacttactgtgatatttgacactgggagttctaatttgtgggttccttcatctaaat

SEQ ID NO: 10732 - DNA, 396 bp, Gossypium hirsutum
  Clone ID: LIB3083-002-Q1-L1-A3
gacgaaatgaaaataaaaggagatattctcttttctagatcctttttgaggtgtgtcttcatttcatctcaaatccatcatcgaaattacttgtagttatcagaatggggacaataggcaaaactactacggccactatttttctttgtcttcttctgtttcctattgtcttttccacgcctaatgacagatttgttagaattggactcaaaaagagaaagattgaccgaaacaatcggatggctgcacaccttgaatccaaggaggaaaaggcatctgaagcttttcttagaaagtatcgtcttcatgggaacttgggggaatcagaggacattgatattgtggcactaaagaactacatggatgctcagtactttggtgaagatggtattggca

SEQ ID NO: 10733 - DNA, 874 bp, Gossypium hirsutum
  Clone ID: GOSHI-09MAY01-C1504_1
gttcaggaaaaacttaacatcagcaactcaactctcgagtctgagcatcaaagtgacgcaactggtgcatcagtagaagaactgcaagttcatgatgattctctggctgcatctgataataaagtgaaagataaggaagaaaatgtcctgattaaaaaccttcaatctggacttacatcactgcagaacttgctgacaacatatcctaatttggcatccatattttccactaaagagaggctattaccactttttgaatgcttttccgtgcctgtggccgcagaaagcaacattcctcagctttgcctgaatgttctctctcttttgactacatatgcaccttgcttggaggccatggttgcagatggatctagtcttcttctgctgttgcaaatgctccactttgccccagcttgccgtgaaggggcacttcatgtcctctatgctttggcaagcacacctgaacttgcttgggcagcagccaagcatggtggtgttgtgtacattctcgaacttctcttgcctttaccagaagaaattccccttgcagcaaagaccggcagcagcctctttattgggtaaacttgttgcgcagccaaggcatgggcctagagttgctataacattagctaggtttcttccagatggcctagtatcagtcataagggatgggcctggtgaagctgttgtgtctgcccttgaacagaacacagaaacaccagaacttgtatggactccagccatggcagcatcactgtctgcacaaatgctactatggtatcagacctgtaccgtgaacaggtgaagggccgtatcgttgactgggatgtacctgagcaagcttctgcacaagaggaaatgagagatgagcccc

SEQ ID NO: 10734 - DNA, 636 bp, Gossypium hirsutum
  Clone ID: GOSHI-09MAY01-C1494_1
ccccgcgtccgccccgcgtccggccacgcgcgcgccctcccgcccgcccaaacagaatgctagagaactttattttttaacccagaaagttctcccataaaaatcttatgaatctaagatctaaattttaatccttgcttagtcctttctcctcctcctcacgccagcataaaaaatggggaaacaaaacaaagatcaagaaagactcaagtgaaaataggtcgaatggtgatggattgctcactgacattcagattccgatagcgatgatataaaagagatttggttgaaggagcccaactgtgcgacaacaccaatggctgctgcaatgtgttaatctttttgtgagaacgtaaattattttgatttaattttatgctaatgggtgaagctgtgaggggagtgatagtagaccatgcgttgcttcaatatgggaccatacagcccgagaatttcaagagcaacggaactctttcctttgctccgcaagctccgattttccaatattcaaaccgccatttcctatgtgttgcctgtttcagctgagcaagttaatctcctgcagacaatggctaagctacactcttttgaatgccttcctttgacggcatcttccctggacattgcatcacgtga

SEQ ID NO: 10735 - DNA, 1540 bp, Gossypium hirsutum
  Clone ID: GOSHI-09MAY01-C1484_1
cggacgcgtgcattctcgactcactcttcccacttcttcgaagtctttctactgctgcaaatccctgtcttcccctacttcaccttctcccctcagatcccgatctagggtttcgccgccaattcttttttcgcatttcgatcgctcttttttcttaccttaaatggcgattgcagcccaagctccagatattctcggcgagcgtcaatctggtcaggatgttcgcactcaaaacgtgatggcgtgtcaagcagttgccaacattgttaaatcctcactcggcccggttggactcgacaagatgcttgttgatgacattggtgatgtaacgattactaatgatggtgctacgatcctgaagatgttggaagtagagcatccagctgccaaggtacttgtagagttggctgagcttcaagatcgggaagttggtgatggaacaacctctgttgttattgtggcggcagaatttctcaagagagcaaacgatctggttaggaataaaattcacccaacatctataattagcggcttcagactagcaatgagggaagcatgcaaatatgttgaagaaaagttggccgtgaaagttgagaagcttgggaaagattctctagtaaactgtgctaagacgagtatgtcctcaaagctcatagctggtgacagtgacttcttcgctaatttggttgtagaagcagttttggcagtaaagatgaccaatgcacgaggagaagtcagatacccaatcaagggaattaatgttttaaaagcacacggaaaaagtgccagagatagctacctgctgaatgggtatgctttgaacactggccgtgctgcacaaggaatgcccttaaaagtttcccctgccaagattgcttgtctggattttaatctgcagaagacaaaaatgcagttaggagtccaagtcttggtcaccgatcctagggagctggagaaaattcgtcaaagagaagctgatatgacaaaagaacgtattgagaaacttctgaaagctggagcaaatgttgttctgactacaaaagggatagatgacatggcactcaagtattttgtggaggcaggagctattgctgtgagacgtgtccgaaaggtggatatgcgccatgttgctaaggcaactggtgcaaccatggtttcgacatttgctgatatggagggtgaagaaacttttgattcatcacttcttggatttgctgatgaagttgtagaggaacgcattgctgatgatgatgtggttatgattaaagggaccaagagcacaagtgcggtttccatgatcctcaggggagcaaatgactatatgcttgatgaaatggaaagagctctacatgatgctttatctattgtgaaaaggactcttgaatccaacacggtagtagcaggtggaggtgcagttgaagctgctttatcagtgtatttggagtatcttgccacgactttaggatcacgtgagcagttggcaattgcagagtttgcagaagctcttttaattataccgaaggtgcttgcagtcaatgct

SEQ ID NO: 10736 - DNA, 387 bp, Gossypium hirsutum
  Clone ID: GOSHI-09MAY01-C1454_2
tcgagtacatgctgagggccatatcatagactctggaggcagagatattatattaaagtttcaaggttgttgatacacgtctaatatttctgctgtagcaagaataacaattttgggtcaagccaaatggtaaagttgaacaactttaagtcttgttatcatgagttaaggctgaacctggggcttttgttcgggtctggtttcacttggttaatattctagaaattgctgctatttattgctgtcacgaaatcgctggacatacaaatgtactagcatggtgttctgtaaatttagagaactctttgttctcttcttgttcttataactttggttaaatattgatttttaagataaaacataattacataagaaagtcgtgctgtt

SEQ ID NO: 10737 - DNA, 1025 bp, Gossypium hirsutum
  Clone ID: GOSHI-09MAY01-C1454_1
ttttttttttttttttggcggacgcgtggggagaaattaaagcctaaacatgagaattccatttctctctctctttcccgccctttttctgactttctttctcactgcacactcacccccttcttcaatatacgaccacttgaaacacaacggcctccctataggtctcctccctaaggggatttctgatttctcaattgaccccaacaccaaccgtttccacgtcaacctaacccaaccctgcaactccgaattcgagatccagctccattacgatttcaacatctccggtgtcttgtctttcggcaagatcgctaatttgtctggtgtctcccaacaggaactcttcttatggtttcctgtcattaacattcgcgtcgatgatccaacctccggtttgatcaacttcgatgtcggcgttgttgataagcagttctccttgtccttgttcgagatcccccgtgattgcaccgcttttgatcctaagggttccctctccatttctcagaaaccatctgagttacttggtactgaaattgttgaggagcacatgctgagggccatatcatagactctggaggcagagatattatattaaagtttcaaggttgttgatacacgtcttttttggaatgatgagcgacatccctctagcaacagcagtcccatcctaataattaagtcacaatcatttggactccatcctcaactctctattttcacttctctcaactgggtgctacttctaacttcaagcttgctatgtgtaggcgaggagctactaattcatcaaaatttgcttcaatttatcttggaatgaaattaatattatttaagtttttatatccgtatgattgggatattttggttgagcaaagaggaaataggtgaatttatatttttgtaagattatctttccctttaatttaaactgatccaaataattggaattggttaatcaatgaaatgaagattgtaatttataaatgttcattctatctaattaatattggtttagttcctct

SEQ ID NO: 10738 - DNA, 838 bp, Gossypium hirsutum
  Clone ID: GOSHI-09MAY01-C1444_1
atagtataaatccatcattatatttattattcaatcaaattacttgagaacgttattccaaataccactaatacagtattgtcttgtctttgatgccattataatcacttctcttgagctgattttggtggagttacatcatcaacatcaacgtccttgatcacatcattcagatccttcatggcaactgaaatatcatcttgtttgatctttcctttttcttttagcttatataagatcatatcagcagccccataaaccttgccatccttaatatcatcagctgcctccaggtctgtcttggctataatgttgttgctaattacctgtttcgccagtttctttgtttcgatatcggtgtatatctccgcaatgtagagaaagagctggcctacacaggaagttccggtcgaaatccaaaatacagcaaacatacgaccgaatggttcttggaaggtctcgtctccgaagcctgtggttgtcatggttgtaaatgcacagtagatggcatcggtgaagtccattccttcgacggtgagtagaacaaagatcccaatgacataatgccccgccatagcgatcaaggagatcttgagcttattgtagtctattttgacgctttcaatctctttaagggcttccaccggacccatttttcgtgacatgcgaagggcattgaccatcaccatttgttgtttcacaaccaagtactttgcagcgattttcactgctattccgaacagacacatccctacggttatgaaaaaaatgcatactagttgtgcattgtaagagtgagggacaaggtccccgtaaccaactgtggtcattgtcacga

SEQ ID NO: 10739 - DNA, 513 bp, Gossypium hirsutum
  Clone ID: LIB3585-024-P1-K1-B2
ttccctatcgttgggccaaatatggaaggtttgtttatggggttaactggggagcaatatggtcccctccccggttgttgagaccaccagaaaattcaaagttattgggacccactgtatagatatatgtgtcccttttcttttaactcattcaatcattcaacttttggcttggctgtattggattatagtataaatccatcattatatttattattcaatcaaattacttgagaacgttattccaaataccactaatacagtattgtcttgtctttgatgccattataatcacttctcttgagctgattttggtggagttacatcatcaacatcaacgtccttgatcacatcattcagatccttcatggcaactgaaatatcatcttgtttgatctttcctttttcttttagcttatataagatcatatcagcagccctgtcaaaaataaattaataagcaaatgttacttgtgttattgaagtgattttatggggaattctttcagcaat

SEQ ID NO: 10740 - DNA, 1135 bp, Gossypium hirsutum
  Clone ID: GOSHI-09MAY01-C1424_3
cccagcgtccggtttttctctcatgctggcttgaagaagggaaaaccctcttaaatacccagggggggtgtgttgaagccagtttctttcaatcgaagaagaaagctagcaattaagacggtggcgtagaggaaaatgttcaggaaccagtacgatacagacgttaccacatggagtcctgcggggcggttgttccaagtggaatacgcgatggaagctgtgaagcaaggttcagccgcgatcgggcttcgatctaagacccatgtagttttgggttgcgtcaacaaggctaactccgagttgtcttctcaccagaaaaagattttcaaagtcgacgaccacatcggcgttgccatcgccggtctcaccgctgacggccgcgtcctttctcggtatatgagaaacgagtgtattaactacaacttcacgtatgaatcgccacttcctgttggcagacttgtcgtccaacttgccgataaagcgcaggtctgcacccaacgctcttggaaacgaccttatggggttggcctgttggtggctggcttggatgaatctggggctcatctctactacaactgtccgagtggaaattactttgagtaccaggcttttgccattgggtcccgctcacaagctgcaaagacgtacttggagcggaggtttgagaactttacaggctcctcgagggatgatctggtgaaagatgctattatggcaataagggagaccctgcaaggagaaactctgaaaagctcaatatgtacaattgctgtggtaggggctggagaaccgttccacgtattagatcagggaactgtacagcaaatcattgataccttcgagactgcagcggagcaagaagaccccgctaccgaacctgatgctgctacaggtcaggaggctgccgctgagcagggcactgctgctgatcacggtggttctacagatgaaggtgcagccccaatggatatttgaggatgcaagaaccggggttccatccatgttcggcagttgaaaacattattgggttggatagttccttcttttattctcttacgcaaattgtctttttacccttggtgcaaacaatcaaatgctaggcctgaaactttcacattcacgctcagagatcctg

SEQ ID NO: 10741 - DNA, 1255 bp, Gossypium hirsutum
  Clone ID: GOSHI-09MAY01-C1424_1
gtttctctctctctctctctctctctctcaagccttgaagaagaagtaaagaagaaaatccctcttaaaacagcctcagtgaaacgtagtgagagaggaaaagcaaagattttcagtggaagaaagctagcaatttgaatcggtgtcgtacggaaaatgttcaggaaccagtacgataccgacgtcactacatggagcccagctgggcggttgttccaagtggagtacgcgatggaggccgtgaagcaaggttcggcggcgatcggtctccgatccaagacccatgtggtgttgggttgcgtcaacaaggctaattccgagttgtcttctcaccagaagaagatcttcaaagtcgacgaccacatcggggtcgccatcgccggtctcaccgccgacggccgcgtcctttctcggtatatgcgaaacgagtgtatcaactacagcttcacgtacgaatcgccgcttcctgttggcagactcgtcgtccaactcgccgataaagcacaggtctgcacccaacgctcttggaaacgaccttatggtgttggcctgttggtggctggcttggatgaatctggggctcatctctactataactgtccaagtggaaattactttgagtaccaggcttttgccattggatcacgctcgcaagctgcaaagacgtacttggaacggaggtttgagaactttacagactcctctcgggatgatctggtcaaagatgctcttatggcaataagggagaccctgcaaggagaaactctaaaaagctcgatatgtacagttgctgtggtaggggttggagagccattccatatcttggatcagggaaccgtacaacaaatgatcgatgccttcgaaattgtggcagagcaagaaggtcctgctgctgaacctgatgctgatgcaggacaggaggcttcagccgagcccgaacctgaacagggtgctgctgctggcgaaggcgtggcccctatggatatttgagaatgaaaaaacctgcttcccgatccttctagatgagtttttttcaacaatttgcttggaaattcgggttagtcactatatagacattattgtgttggatatttccttgctagcctgagctgaaacttgaaactacatttacatttatactcaagatactggtcatcgatgttgttgacttacttaagtgttactgcctcttgaactctcaaatttggtgcaatcctcctggaaaaaaaaaagtgcaaaaaaaactcgctcgtgc

SEQ ID NO: 10742 - DNA, 603 bp, Gossypium hirsutum
  Clone ID: LIB3825-016-Q1-K6-F10
ggttggaaatgcggaggatgagaatgggtatgtgcctgtcatttgtggactctctaggtgtaatgagaacgatattaaggccgcttgggaggcggttaagtacgccaaacggcccaggattcatacgtttatcgctaccagtggtatccatttggagtataagttaaggaagagtaaagaggaggttttggatatcgctagaagtatggttcggtttgcaaggagtttgggttgtaatgatgtcgagtttagccccgaagacgccggcagatctgacagagagtttttatatgagattttgggtgaagtgatcaaggctggagcgacaactctcaacatacctgatactgttggcataactatgcctagcgagtttggccaattaattgctgatataaaggccaatacccctggaattgagaatgttattatttcaacacactgccaaaacgatcttgggctttctactgccaacacgctagcgggagcttgtgcaggtgcaaggcaggtggaagtaacaatcaatggcattggagagagagctggaaatgcttcattggaggaggttgtgatggcaataaaatgtcgtggtgagcatgtatt

SEQ ID NO: 10743 - DNA, 358 bp, Gossypium hirsutum
  Clone ID: LIB3196-010-P1-M1-E11
gattcatacgtttatcgctaccagtggtatccatttggagtataagttaaggaagagtaaagaggaggttttggatatcatgcgtgtgaagcaaggatcacccgcgatcgggcttcgatctaagacccatgtagttttaggttgcgtcaacaaggctaactccgagttatctttttattacaaaaagattttctaagtttgacgaccacatctgcgttgccattcgccggtttcaccgcttacggccgcgtactttctcggtatatgagaaatgagtgtattaactacaacttcacgtatgaatcgccactttctgttggcagacttgtcgtccaacttgccgataaaaagcaggtct

SEQ ID NO: 10744 - DNA, 223 bp, Gossypium hirsutum
  Clone ID: uC-gsflnu33B081g10b1
ttgtttaaatagagcaagagcacacagctagagaactagaagaggcagtctttaacaattaggtcggaaattcatgatagacactatatacacattattgtgttggatatttacttgctagcctgagctgaaacttgaaactacatttacatttatactcaagatagtggtcattgatgtttttgacttataaaaaaaaaagtaacaagactaagaaatagag

SEQ ID NO: 10745 - DNA, 659 bp, Gossypium hirsutum
  Clone ID: GOSHI-09MAY01-C1794_1
ggtaaaatcactcccttagttttgaaaaacgtcttaccgattttccttgcgtaagacattttccattccctactctacactctcatcgtcttagcttcaaaaatttcttcgcagactttctttagaaagatctgttcttaactgtcttccatggatcttctgagatttgcttcttgttgaatagttccagatccttggttatgagcggcggagatatacacgcagcggcgaggtccggtgacctttcaaaacttcaatcaattctggcgtctaaccctttggccgttaattcccgagataagcactccagaactccactacatttagcagtatgggccagacaagcgcaggtagtgagttatctttgcaagcaaaaggctgatgttggtgctgctgccatggatggcatgggtgcgattcattttgtagcgcagaaaggacatctagaggttgtctgaactctgctttcatcaggagtttcagtgagagccactaatcgtaagggattcactccacttcactatgctgttcaagggtcccatctagaaggaatcaaagtcttattaaaagaaaggtgcaagtggctagcaatttgatgggagagggtgagctgtttttgcttcgcttgcctagtcttgggttttgtgtgtcttgattta

SEQ ID NO: 10746 - DNA, 752 bp, Gossypium hirsutum
  Clone ID: GOSHI-09MAY01-C1694_2
acaaatctgccctcacaggcctcaggtctcaccttcaccttctgctgcttcttcatttctatttttaatcagaaaatatatattaatactaaaattaaaatgggaagaggaaaattcaagggcaagcccaccggtcaccgccatttctccactcctgaagagctccgtgctggtacctctgctcgtccccgtacttttaagaaggaagaagctgaagtggaggaggaagaagaagagtctgaagaggaagtagaagaagaacccgagaaacgaaagggtactcaagggcttattgagattgagaatccaaatttggccaaacaaaagaatgtcaaagctaaagatgttgatatgggaagaacaactgaactatcaaggcgtgaaagagaggaaatagaaaagcaaaaagcacatgaacgatatatgaagctgcaggaacaagggaaaactgaacaagcaagaaaagatttagagcgcttagccctgatacgacaacaaagggcagaagctgctaagaagagagaggaagagaagaccgcgagagaacagaagaaaactgaagctcgcaaataatccaggttgagaaaaatctgtgatcagtttctctctttatcttctatattgacttctgcatttgtatacttgagctcttatcccataaaaaaaaaagagtttggaatctgattgttggatattctaaaacataaatgtatacttttggatcatctcaagttagttgcatgcttgtcctc

SEQ ID NO: 10747 - DNA, 701 bp, Gossypium hirsutum
  Clone ID: GOSHI-09MAY01-C1694_1
ctcttccgccgcctcctcccttctttgctggtggtaatcagaaaaaagggaaaaaaaaatgggaagaggaaaattcaagggcaagcccactggccaccgccacttctctactccagaagagctccgtgctggtacctcagctcggccccgtacatttaggaaggaagaagctgaagtagaggaagaagaagaacgagaagagtctgaagaggaaatagaagaagagcccgagaaacgaaaagggacccaagggcttattgagattgagaatccaaatttggctaaacaaaagaatgtcaaagccaaagatgttgatatggggaaaacaactgaactatcaaggcgtgaaagagaggagatagaaaagcaaaaagcacatgaacgatatatgaagctccaggagcaagggaaaactgagcaatcaagaaaagatttagagcgcttagccatgattaggcaacaaagggcagaggctgctaagaagagagaagaggagaaggctgcaaaagaacagaagaaagttgaagctcgcaaataaaaataggttgaggaacgattatgatcggttaaccatttggttcttttcgctgttttatatatactgaagtttctattcatcccattaaaagaagggttttcaaattgatagctactatgaaattttctgaacttaattgtacttatgatctgcttttggatct

SEQ ID NO: 10748 - DNA, 497 bp, Gossypium hirsutum
  Clone ID: LIB3582-044-P1-K1-B7
gttgatgtaagttcaacaaatgctcctatgctgtacgaagaccgtacttaatcatagataaatatatgaatttataacttgattgataacttgaaaatttatgttccagatgggaagaacaactgaactatcaaggcgtgaaagagaggaaatagaaaagcaaaaagcacatgaacgatatatgaagctgcaggaacaagggaaaactgaacaagcaagaaaagatttaggtaactaatggatatgattctcgaattgtttttgtctctaggatcaagcttaaactgtagtgtaaccctaattgaatgtttattaagttgccaaggggttgcaatagccctggaaaatatcattgtacttaaacaaggctttttatgtcctttcagtgggactggcttgcttctttgtggttaactgaatttgaaaatgtatagcttaggttgaaattatgttcattcataagctcttgagatgaaaataatgattacaattaccca

SEQ ID NO: 10749 - DNA, 433 bp, Gossypium hirsutum
  Clone ID: uC-gsflnu33B070g01b1
aagggagagaaaaatatgggaagaggaaaattcaagggcaagcccaccggccaccgccacttctctactcccgaagagctccgtgctggtacctcagctcgaccccgtacatttaggaaggaagaagctgaagtagaggaagaagaagaacgagaagagtctgaagaggaaatagaagaagagcccgagaaacgaaaagggacccaagggcttattgagattgagaatccaaatttggctaaacaaaagaatgtcaaagccaaagatgttgatatggggaaaacaactgtaactctctaggcgtgaaagagtgccacattgaatatgtttattcctattatccatatttttatgctccatgaacattttttcttcttctatttaggtttctttttataatctattcttttccttattttctatctttcctttt

SEQ ID NO: 10750 - DNA, 1060 bp, Gossypium hirsutum
  Clone ID: GOSHI-09MAY01-C1664_1
acctttctcaactctccatcatggaatggtcatccagtttatagtagtaacagggtcgcccagcgccccaccattattgctcctatcacatctccaaacacagatggtatcaatccagattcttgcacgaatgttagaattgaggacagttacatagtttcgggagatgactgtatcgcagtgaagagcggttgggatgaatatgggatctcatttgggatgcccaccaaacaattagtcattaggaggctgacatgcatttctccttacagcgcagccattgcgctggggagcgagatgtcgggcggaatcgaggacgtgagggccgaagacatcacggccatccatacggaatccggggtcaggatcaagactgctagaggaagagggggattcgtgaaagacatatacgtcaaaggaatgactttgcataccccgaaatgggtgttttggatgacagggaactataaagcacatgctgataatcactatgatcccaatgcattgccggtgattcaggggattaattacagagacatcatggcggataatgtgtcgatggctgccaggttggaagggattgaaggtgatcctttcactcaaatctgcatatccaatgtcacgattggaatggcagctaaggctaagaaggtgccatggacttgcacagacgtcgaggggatctcgagtggagtaagtcctcggccatgtgaccaactaccagatcaagggccggagaaaatcacggcttgtgacttccctgcagagcctttgtccattgatagagtggtgctcaaaagttgtacctataggatgaaatacacgtgactgatggtagcaaagtaaaactaagtttggtagctagatgtagcaagagctctcatagttgggatcttatgggtttctgtttcttaattatcttatcaagtgttacattatatataaatatataaagccaatgcactctcaagtctcatccatgctgcttctaaaatacataaaaaaaaaaaaaaaaaaaaacaaaataaaaaaaaaaagaataacataaaataaaatccag

SEQ ID NO: 10751 - DNA, 669 bp, Gossypium hirsutum
  Clone ID: GOSHI-09MAY01-C1614_1
ttgcattctaaatcagacgaggaagagaagaatttggtctccaaactaactgtcgttaaaggcgttcttttccagcaacttcttcaggctgctgtcgccatccttttattcacggtcacagggggtcatgctggggcttcttctcagcagccatcttcgtttattgttctggctagccagttcgttacagcaatgttggttatggacacttggcaatactttttgcatagatacttccacgagaacaagttcttatatcggcacctccactctcggcatcactgtcttgttgttccctacgcatttggagctttgtacaatcatccattagaggggcttctccttgacacagtaggtggagccttatcgtttatgctctctggcatgtctcctcggacctccatctttttcttctcttttgccaccatcaaaacagtcgacgaccattgcgggctgatgcttcctggaaacccccttcatattttctttagaaacaattctgcatatcatgatgtccaccatcagctttatgggaccaaatacaatttctcgcaaccgttcttcgtcatgtgggatagaattctgggaacgtacatgccttattcactcgagaagagagcagaagggggcttttaagcacggccaacgaaagagttcaaagacgattaa

SEQ ID NO: 10752 - DNA, 666 bp, Gossypium hirsutum
  Clone ID: GOSHI-09MAY01-C1194_1
gttgatgatactgatgttaaggaatcatgggaggatgaggatgaagatgaacctcctcagcaacctgtagcaaaagctcctgaagagaaggcccctaagaagcctgcatcaaaagctactgaaaagaaagggaaatctattgaagtagctaaacaggagccccttgatcctgtggctgagaaacttcgccaacaaaggcttgtggaggaagctgattacaagtccactgcagaactttttgccaagaaaggcgatgaaaagactcttgataattttattcccaaatctgaaagtgactttttagaatatgccgaacttatttctcataagctttgcccatatgagaaaagtttccattatattgcactcctcaaggcagtgattagattatcagtgacttctttgaaagcagctgatacgaaagatatagcatcttcaatcacagcaattgccaatgaaaagctaaaggcggagaaagaaaccacaagtaaaaagaagacaggtggcaagaaaaagcagctccatgttgataaaccagatgatgatttggttgttaatgcatatgatgatatagacgagtatgactttatgtgattcattttggggcatataccaccttgttctagtgtttgcataggggtcctgtgtttattgcagcagcgatgt

SEQ ID NO: 10753 - DNA, 755 bp, Gossypium hirsutum
  Clone ID: GOSHI-09MAY01-C1184_6
ggacagatcatgttttgaatcccgttgaaattcagagacagttacaggaagcccacgcgccccaaattcgggatcaagaacagctcgctatgtatcgaaagaagactgaagacgctgcttccatggcttatactggggaatactacgcacagaagatgcctgaaaaagcaccgccggtgaacataccggtaactttccaacaacatgtgccagctacagctggattctggtcggataaaccaatttccgccggaggtttccctgcaaccataactacaaaccccggcccacctccgcactctgaacatccagtctacatgatcccagcacaaggacatgctccggccaccgtctaccacgcgcctccacaagttccagctccagcttctgcaccagcaacgcaacaaatggttcgaccggtaaccggacaagccggtcaaggctactacaccaacgtacagagaattccatccgaagtctaccgggagcaacccgtttacaacatggtggcacaaccttcaccgacacaacaaccttcaccatcgactgtgcgaagccggttgaggataagatcatggacatcgcttctttggagaagtttcttcaggaaaggatcaaggttggtggcaaagccggtgctctaggtgactccgtcactgtcacccgcgacaagacccgtatcaccgttacctctgactccaacttctctaagcggtaccttaaatacttgactaagaagtacttgaagaagcaca

SEQ ID NO: 10754 - DNA, 568 bp, Gossypium hirsutum
  Clone ID: GOSHI-09MAY01-C1184_5
gaatgaaggaccggccgcgcgtcccgctatttgttacttggccggtctatatcttctacttcacagaggcagctaagtgagttggggcggggatgagtcgtggggcggcggccggaccccacgggaagaagaagggggcctccttcaccatccactgtgcgaagccggttgaggataagatcatggacatcgcctctctggagaagttccttcaggaaaggatcaaggttcggtggcaaagctcggtgctctcggcgactccgtcacttgtcacccgcgacaagacccctattacggttccctttgcctcaacctttttaaggggccctaaaacctccttaaaaagcccttaaagaacacaaccccggccgtggttgggggattggcttcgggtgactgcttccaacaaggaccgtattgtttatgaactccgctacttcaatattgctgagaatgaaggggaagaggaagaatgagcaatcagttcagttacttttctctgttacctaatctggttattagttctgaggaacttgtttgtgtcaaatcgtcgacttgttgggttgct

SEQ ID NO: 10755 - DNA, 1455 bp, Gossypium hirsutum
  Clone ID: GOSHI-09MAY01-C1184_4
cagctatcttacatcggtggagagactaagatactggccgctgatcgaaaccgcggattctccgccatgatctctaagctctccgctctctgcggcggcggcgacggtgatttttcgttcaagtaccagctccctggtgaggacctcgacgcacttatttcggtaactaacgatgatgatctcgaacatatgatgttagaatatgatcggctttatcgagcctcggccaagccagctaggatgcggcttttcgtgtttccagcgaccggttccgtgaattacgggagcgaaggggccaaattggaccgtgagcggttcgtggaggctttaaattccggtacgactccgggaggcgagaaaaccgctgcgatcccgcaaagcaatgtggatttcttgtttggacttgaaaaggggatggctccacctccgctggttaaaatccgtgatcccgtggcggaaccggtgatccaaccaccgccacctccggtaccggaagtcgttgggacggatcatgctttgagtccaggtgaaattcaaagacagatacaagaattgcagaggcttcaaattcgggatcaagaacatctactagaattacagaggcttcaaattcgggatcaagaacagctcgctatgtataggaagaagactgaagaagctgcttctttcccttatacaggggaatactacgcccagaagttacctgaaaaaccacaaccggtgaccgtacaacagcatgtgccagcgacagccggaatctggccggataaacaaatttcatccgggggtttcccagcaaccgtaacggcagccccaggaccaccaccgccggcggatcaccctgtttacatgatcccagctccagttccaggatcggctccggccaacctctatcacgcacctccaccagttccagctccagcacctgcacctgcatcagcatcagcagcaccacaaatggttcgaccagtaaccggacaagccggtcaaggctactacaccaacgtgcagagaatgcctcatgaagtttaccgggagcaacccgtttacaacatggtggcccaacctcaacctccgcccactcaacaccagccgatatcaacgatggcacaacaggtggtaaggccgccgagcagcggtgtaacagatgctggatatggacacgtggcagcgtacgacagacaggcttactatactgcacaggggggtgtcgtgccttctcagtatcaaggcgttggtgtggcagttagtggtgacaaaagaggcaacgtcgatggcaaagtggtatataaagtttcacaaggttcagtttaatttctaaaattatgaaagattttacgatatatctgttagttttaattggtattattacgtattactatatatatcaagtataaatcaaaatcttagcacttaattttattttaagctatatgaaattatgagtttgtgttg

SEQ ID NO: 10756 - DNA, 738 bp, Gossypium hirsutum
  Clone ID: GOSHI-09MAY01-C1184_3
atcactctctggcttccgctttgtttttcctacttcctttctttcttgtccctcgggcccatagagcccacgcctccgtgagttggtgcgaagatgagtcgtggggcagcaccgggaccccaggggaagaagaaaggggcctcctttaccatcgactgttctaagccggttgaagataagatcatggacatagcctctctagaaaagttcctccaggaaaggatcaaggtcggtggcaaagccggtgctctcggcgattccgtcactgtcacccgcgacaagagcaaaatcactgtctcctccgactccaacttctctaagcggtatcttaagtacttgactaagaagtacttgaagaagcacaatgttcgggattggcttccagtgatttcttccaacaaggatcggaccgtttacgagctccgatacttcaacattgcggagaatgagggtgaggaggaagagtgaagaccggttcagctttttctctattcatcacccctttgtttggtttatttgttatgaggaacctagtttatcaatctcaggtgtcgaatctttggacttgatttggcttgttttttgaaccctagtctgttttcaatgaatttttggttgctcatagtcttaaataatgttgaagggcttcctttagtcttttaaattgaaagaaatatacaaaaaaggttcttcactatacgggttcaagtcttacttttatcagactgcaagacaata

SEQ ID NO: 10757 - DNA, 786 bp, Gossypium hirsutum
  Clone ID: GOSHI-09MAY01-C1184_2
gtaacttggccgttctatatcttccacaacacagaggcagctaaggtaacccatctctctctgcgttcctcgttgtctttcctccttcttttctttcttgttgatttggctcacgaagatacagagctaagtgagttggtgtgaggatgagtcgtggtgcagcagctggagctaagggaaagaagaagggagcctccttcaccatcgactgtgcgaagccggttgaggataagatcatggacatcgcttctttggagaagttccttcaggaaaggatcaaggttggtggcaaagccggtgctctaggtgactccgtcactgtcacccgcgacaagacccgtatcacggttacctctgactccaacttctctaagcggtaccttaaatacttgactaagaagtacttgaagaagcacaatgtccgggattggcttcgggtgattgcttccaacaaggaccgtaatgtttatgaactccgctacttcaatattgctgagaatgaaggggaagaggaagaatgagcaatcagttcagttacttttctctgttacctatctggtttattagttctgaggaaacttgtttgtgtcaaatcgttggacttgtttgggtttgctttttgacccttggctttattttcaatgaagttttggttgctgatagttatttttttgtttatgtattaatatattagattctataaaagaagtatgcacattcttttccatgagttgattgtttagagctctcaattcactgatgctcatggctgtcagtgccttttct

SEQ ID NO: 10758 - DNA, 757 bp, Gossypium hirsutum
  Clone ID: GOSHI-09MAY01-C1184_1
gacctttttatcgatatatagactccgccataagcattcgtaacttcgccgccgttgattattatcttcaaaaatacgctgcggcaactaagtgagttggtgcgaagatgagtcgtggtgcagcagcgggacccaaggggaagaagaaaggagcgacctttaccatcgactgtgctaagccggttgaagataagatcatggacattgcctcactcgaaaagttcctccaggaacggatcaaggtaggcggcaaagccggtgctcttggcgactccgtcaccgtcacccgcgacaagaccaaaatcaccgtcacgtctgactccaacttctccaagcgttatcttaagtacttgaccaagaagtacttgaagaagcacaatgtccgggattggcttcgagtgattgcttccaacaaggacagatctgtttacgaactccgctacttcaatattgccgagaatgaaggggaggaggaagaatgaagaatcagttccacattttttttctagtttactgctttattatttcttaggaacgtcttttatctatttaaggtgtcatgttctgcttttttccttcagaccttactctaatttgcaatgaaattttgattgctgatagtaattttcgctatacccagcatgcactttcctgtactgaaaggtcagcggatctaaactatcctacctgaccatccaacgcctgagacgtcatagcttttcaccagaattaccttaactgaccacactggtccacc

SEQ ID NO: 10759 - DNA, 367 bp, Gossypium hirsutum
  Clone ID: LIB3166-036-P1-K1-B12
gaccggtaaccggacaagccggtcaaggctactacaccaacgtagagagaatgggatccgaagtctaccgggagcaacccgtttacaacatggtggcacaacctccaccaacccaacacccgccaatatccggcatgacacagcaaatggtgaggccgcaaagcggaggagtaccagattcttcatacgcacacatggcagcgtacgacaggcgagtttattatactgccccaggaggtgttatggtgccgcctcagtatcaaggcgttggcgtggcggttagcggtgaaatgagaggcagtgccggcgccggcggcgagattaaagtgggaaatataggttcataaggttcatttttttttttttt

SEQ ID NO: 10760 - DNA, 2828 bp, Gossypium hirsutum
  Clone ID: GOSHI-09MAY01-C1154_1
ttatttcttatatagggtcgggcactgttgaacgcaattggaaatttagggcttactggagcttatgcagaggccttgagcaagcttggacacaacctagaaaatatagcttcccaggagcctgatgctgccctagggaatggaggccttggtcgacttgcctcctgttttctggattctttggcaacattgaattatccagcatggggttatgggcttagatataggtatggcttatttaaacagcgtattacaaaggatgggcaagaagaagttgctgaaaattggcttgagatgagcaatccttgggaaattgtgagaaatgatgttgtatatcctatcaagttttatggcaaagttcttacagattcagatggaaagaaacactggactggaggagaggatatacaggctgttgcttatgatgtcccaataccaggatatgaaactaaaaccacgattaacctaagactctggtcaacaaaagctccatcaggagactttgatctatctgtatttaattctggaaaacatacccaagcagctgaggccctatatactgctgagaagatttgctatgtactgtatcctggggatgaatcacttgaaggaaaaatccttcgtttaaagcaacaatacaccctgtgctcagcctctctacaagatatcattgcacgtttcgagagaagatcaggagcaaaggtcaaatgggacgaatttcctgacaaggttgctgtgcaaatgaatgatactcacccaactctttgcattccagagctgatgagaattttgattgatgtgaaaggtttaagctggaaggaggcctggaatatcacccaaagaaccgtggcatacacaaaccacactgtcctacctgaggctttggagaaatggagtttagaacttatgcagaaactgttgcctcgaccatggagattatagaaatgattgatgaggagctaattcgtaccatagccccgcgtccgggtaatgcagattctaacttactggagaaaaaactgaagcagatgagaattttagaaaatgttgagctgccggctgcattttctgatttactagttaaacccaagaaaagtcctgttgctgttcccagtgatgaatttggagaatccgaagaggaagaggaagaggaagaagaagcagaagcagaagcagaagcagaagaagaaaaggaagaagaaaaacttaagcctgctggtggaaaaattaaatctgtaaaggaaggtactcaggggaagaaaaagaagatcccagaaccagtaccggagcccccaaagctggttcgtatggctaacctatgtgttgtaggtggtcatgcagtgaatggagtcgctgccatacatagtgagatagtaaaagacgaagtgtttaatgatttttttcagttgtggcctgagaaatttcgaaataaaacaaatggggtcacaccaagaagatggatccgtttctgcaatccagagttgagtaaaattataacgagctggacaggctcagaagactgggttttaaatactgaaaagttgtctgaacttagaaagtttgcagataacgaggatcttcagatccaatggagggccgcaaaaaggagcaacaagttaaaagttgcatccctcattaaagaaaggacaggctatatagtaagccctgattcaatgttcgacatccaggtgaagcgcatccatgaatacaagcgtcagctgctgaatattttgggtattgtttaccgttacaagaagatgaaagaaatgagtgcttcagaaagaaagaaaaagttcgttccacgtgtttgtatattcgggggaaaagcatttgccacttatgttcaagccaagagaattgtgaaattcattaccgatgttggagctacagttaatcatgatcctgatataggtgatttactgaaggttatttttgttcctgactacaatgtgaatgtggctgaattgcttatccctgcaagtgaattatcacaacatatcagtactgctggaatggaggcaagtggaaccagcaatatgaagttcgcgatgaatggttgcattttaatcgggaccttggatggtgccaatgttgaaatacgagaagaggttggagaagaaaactttttcctcttcggggctaaagctcacgaaattgctgggcttcggaaagaaagagctgaggggaagttcgttccggatcctcggttcgaagaagttaagaagtttatcaaaagtggcgtattcggatcttccaactataatgaactcctgggatcattagagggaaatgaaggtttcggtcgtgcagactatttccttgttggcaaagacttccctagttacatagaatgccaagaaaaggtcgacgaaacatataaagaccaaaaggtatggacaagaatgtcgatcatgaatacagcaggttcttacaatttcagcagtgacagaacaattcatgaatatgctcgagaaatatggaacataaagcctgttgaattaccataattttggtcagactttttcaaccatggggactgcccttttgcctgttaataactgccctctttgttataatgcaaggaaaacatccatattgtaacaagtcaagcctctataaatgcaataaaattttgaattagaatcgcttttagaataaaaaaaaaaaaaaaaaaaaaaaaaaatataaataataataataaaaataaattttctgactttcccatcaaatgtaatttaaattttatttctatttctttcattttttttaatatttacttttccttgtctttttaaattctaattttaattggacataaactttaaaaa

SEQ ID NO: 10761 - DNA, 208 bp, Gossypium hirsutum
  Clone ID: uC-gsflmaxxa015f04b1
gatagtcttaagctggaaggaggcctggaatatcacccaaagaaccgtggcatacacaaaccacactgttctacctgaggctttggagaaatggagtttagaacttatgcagaaactgttgcctcgacacatggagatcatagaactgcttgacgaggtgtctatttgtctcatttttccagaatcatgttacattattttctttttt

SEQ ID NO: 10762 - DNA, 568 bp, Gossypium hirsutum
  Clone ID: GOSHI-09MAY01-C1144_1
ccactccagttatttacctgaacctgaccttgagaagcaaggaaacaaccaggtgttgcctcaggatgaaggactgccaggctcagttaggggttcagcctgtgagtccagtcccacattgttaaccatcgtagtaacgaagggtgagtctcatgtaactcagcagccgatagctcaattaaaagttatggaatgcgttttggaggaattgcctcgtgtggctcctcaaaagggctattttttgaggaacagttgttctgatgaggaatgcagagtttgtcaacaggagaaggaagaaggtcttatagatcttgggtgccaatgtaaaggtggtcttgcaaaagctcatcgatcttgcattgacacttggtttcgtacaaaaggatccaacaaatgcaaaatatgccaagcagtaactgtaaatgtgtcagctccagagtcccagcccagtacaaattactgggttttgagagctgatccaagctttacaccacatgaacgtcaaaggggttgttttagtcctctgtgggtggcattttcgatccttattggtggtttattggtggat

SEQ ID NO: 10763 - DNA, 1138 bp, Gossypium hirsutum
  Clone ID: GOSHI-09MAY01-C1174_1
gggcccttttgcatgccgctatcttgagggggggggggggggcaaaagttcaagaactcaagggctgtgtccatttcttctctggaaagctgcatatgcctacaactacccgactgcttttaaagaaaaatggctgaaatagaggaggggcttctccttaagctgcaaagtggatacagcaatttcccgccggcccgcggggcattgttgtatttcgaagggacacgttatgggcacctctcatcaaacattgaggaatttaatcggtggattctagatgctcgagagttacccataatacaggtggttgagcaaattcacaacaaattgatgtctgagtttgaggaccgtcgaactagaagtcattcttggttttctgtactagcccctagtgctgagacacgcatgcgagaagttatcagccgtgcatcaacatatcaagttctgcggtcagatgaagtagaatttgaggttatatcagctgaacgatcagacattgtgaatattgggaaacacgcttgttcatgtcgtgattggcaactttatggaataccttgtgcacatgctgcggcagcaatcatgtcatgccgaaaagatgtatatgctttcgcagagaaatgctttacagttgccagttattgtgaggcatattcagaagagatataccccattcctcagaagattgactggaacaagttcggtgaggcgcctagtactttgaatgaggatgcccaagttgtgcgaccgcccaagtttcgccggccaccaggacgccctgaaaagaaacggatatgcgtagaggagcttaatcgtgagaaacacacggtgcattgtagcagatgtaaccagactggtcactataaaacaacttgcaaagcagatattatgaagggtattgagcagttcgagccttgtaggatctaattttatgcttaagtagattgtagattatgaacatggtactagggtggccatatttaatcctacacccaatgtgaaataggaaatctccattttatctccctcagaatgtatgtatgtatgtatgtataactggattcaagttcctatggctctggctttagttttgcaacttttgctcttgatgagaaattcagtcgggccttttattgcactc

SEQ ID NO: 10764 - DNA, 801 bp, Gossypium hirsutum
  Clone ID: GOSHI-09MAY01-C1164_2
ccaaggcacccatggttgaacccacgcgcccgcccgcgcgtccgggacacttatcattgaaacaagtgcagggaatcttgcaaatgccatccaactacgacgagttgagtaagctaacatatcttcatgcagcgttgtgcgataccctaacgctatatccaccgattccgttcgaattcagaacatgtacaaagcacgactttcttccgagcggtcatcgggtggatcagaacacccgaatcataatcggaatacatgcaatgggaacgatggaaagctcatggggagaagattgctatgagttcaagccagaaagatggattagtggagatgggaagattaaacgagagtcgccaactaaatgtagcgcattccttgtggggccaaggatttgtccagggaaagaggtgtcgtttctcttgatggaggctaccgcaccagcaatcattcataactacaacgttcatgtggtggaagggcagactattggtcccaaatacagtgcattttatcagatgaagaaggggttaatggttagggttaagaagagatggagttaaggaatttgcagggctaaagtggtaattaagaagtgttaccatatattttaagttaacgggggttaatggttttatcaattaaaaattaccctggattggggtaatttttatattatcatttatttgggtatggtggtttggcttattttctagatatttccctctattttaatttttatggttttatattttatccaaccccagtttatattattttttcttaaaaaaaaaaaaacgaatg

SEQ ID NO: 10765 - DNA, 1791 bp, Gossypium hirsutum
  Clone ID: GOSHI-09MAY01-C1164_1
cccacgcgtccgctcaaactctttctaagaacatgatggcagtactgtttgtatatcttggatttatggtttttggaataattgctcttcgttttctctatcgtttcatagacaacaatggcctccctcgaaactggctatttgttgggatgattcccacgttacttctcaacatccgtcgccctcatgataaagttgcccaaatcctcagacgaagcaatggtaccttcttttatagaggactttggtttactaacaccagcttcttagccacctccgatcctgagaatgtgcgttatatattgagttccaacagttctgtttatttgaaaggtcctgaatggctgaaacagtttgatatcttcggcgaagcacttttcaattccgacggtgaggcatggaaatgtcaccgcagagttttccatgctttcttgaatcaccctcagtaccggcaatcactttcaaaggttctccatcaacgtatagaggaagcgcttgttaaagttcttgaatatgtttctggacgagagatggtggtgaacttgcaagatttgttggtagggcatgcgtttgacattggatgcataacgggcgtgggcttcaaccctggcctactctccattgaattccctgagaatcggttccaaaaagccatgagtgatactctggaggcagctttttacagatatgtagtgcctgacagtctttggaagttgcagagttggcttcagattgggaaagagaagaaacggagtgatgcttggaaggctcttgatgatcttttaacacaatttatatcgacccaacgccacaaatccaccaaatcagtggcatcctcaggctcaaatgaagagcatgatttcaatttcttgaactgttacctgacaggacatgagataacaggcccaacaccgaaagaaagtcttataagagacaaccttatacattttctgtttgccagtgatggtacttacagtttaactcttacttggttcttctatctcatctccaaggcacccgtggttgaaaacaagatcagagaagaaataaagagacacttatcaatgaaacaagtggagggaagcttgcaaataccatccaactacgacgagttgagtaagctaacatatcttcatgcagcgttgtgcgaaaccctaaggctatatccaccgattccgttcgatttcagaacatgtacaaagcaggaatatcttccgagcggtcatcgagtcgatcaaaacacccgaatcataattggaatacatgcaatgggaaggatggaaagcttatggggagaagattgctatgcgttcaagccagaaagatggattggtgaagatgggaagattaaacgagagtcgccaactaaatttagcgcattccttgcggggccaaggatttgtccagggaaagaggtgtcgtttctcttgatgaaggctaccgcaacagccatcattcataactacaacgttcatgtggtggaagggcagaatattggtcccaaaaacagtgtggtttatcagatgaagaaggggttaatggttaggattaagaagagatggagttaaggaatttgcagggttaaagtggtaattaagaagtgttaccatatttatacttatataatcttaagtgttatattgtattaaatactctaagttgaatccaatatatactttttacaatgttgtgtaagttgttgtaattgttctaatttttgtctaataaatctggtttgaatgaacaaaaccaaaaataaaaataataaaaaaaaaataaaaataaaaaaat

SEQ ID NO: 10766 - DNA, 1420 bp, Gossypium hirsutum
  Clone ID: GOSHI-09MAY01-C1114_2
agagcatttagggtttcgatagtcccaaatttgacttgatttcctctttccctcgcgtccgcggacgcgtttagagggattcagaaaatgcagggaggcagaggtggaagagatcctttctgtaattttggtggtgaccccttcggtggttttggggactttggaggatttggtggtcctagaaatttattctccaacttctttggaggaaggaacccatttgatgacccttttttcacacgcccttttggaagcatgtttgattcaagcttctttggccccggtcaaagtccttttatggatatgcatccgactgggtttattgagcatcaggctccagagccaaagagaccaaggggtccaattattgaagaactaaattctgatgatgaaaaggaagaagcagataccgggatgaaagggaatcctaggaagcatggtaggtctaatgctgagccttatgttgaggttccggatgatgaagctggacaatctgagagaaggaacaggcatttgcagtatatgaatggttataatggttcgtatcaaaatcagcagcagcagcagcaacagcctcaaactagtagttttgtgtttcagagctccactgtcacttatggtggtgccgatggagcttactatacttcatcaaaaacaaggaggactggaagtgatggaattacttttgttgaaggcaaagaagcggacaccactgcgggccaagcaagccaccgggtttctaggggacttcacaacaagggtcattcagttatgagaaagctgaactcggatggtagggtggatacgatgcagaccttacataatttgaatgaagatgaacttcctggttttgaagaatcttggaaaggaaaagcccaaaagcgtctgcctggctggtccgggagttttattggccatgataacatagggactggcagcagtggacagaacgggcaggcaggtcggggaggatgggcacttccctctactgagtcttctcaaccaaaagggaggatgatggtagatgcaagagacaggtcagggcctttgcgtagccaacacactaggatgaaaggatcagcagattttaaagataagagttctcactctcaagggaaacgtagggactaagttggagtgagttaacacggagatgatcttgtggtgcagaaggcattgcctttcctcttatatatatgtatgtagtattgtatgcttggctgttgccatgttttcctagtttagagcttttatgattcatgcgtctgttgtggcagtccttttaccaaggggggttgctaatgcagagagagctttagacaattactgcaaatacatagtgattatataatatctactttctagtatattaacattgcaatctgaaataatccaacgctttgcttctctttttatgagg

SEQ ID NO: 10767 - DNA, 893 bp, Gossypium hirsutum
  Clone ID: GOSHI-09MAY01-C1114_1
cccacgcgtccgtttcgatcgtcccaaatttgacttgatttcctctttccatcgaagagtttagagggattcagaaaatgcagggaggcagaggtggaagagatcctttcttcaattttggtggtgaccccttcggtggtgacctcttcggtggtgaccccttcggtggttctgggggctttggaggatttggtggtcctagaaatttattctccaacttctttggaggaaggaacccatttgatgacccttttatcacacgcccttttggaagcatgtttgattcaagcttctttggccccggtcaaagtccttttatggatatgcatccgactgggtttattgagcgtcaggctccagagccaaagagaccaaggggtctgattattgaagaactaaattctgatgatgagaaggaagaagcagataccgggatgaaagggaatcctaggaagcatggtaggtctaatgccgaaccttatgttgaggttccagatgatgaagctggacaatctgagagaaggaacaggcatttgcagtatatgaatggttacaatggtttgtatcaaaatcagcagcagcaacagcctcaaactagtagttttgtgtttcaggcccccacggtccctgatgagctaccctacttattataacatgagggatgagtgaggaattctctgaaaagcaacaaccgtccactttgggctgcagtcccggttttaggacttcataggtgctcttttagaaactctctttgtgttgtcatctaccctctattatatgaaatcttttgaattctgcatatattatgctttttgcctgtcttgtaatgtctcttatgcatttctcttctgttcttatgtctatctacttcttcggatttgatctatccg

SEQ ID NO: 10768 - DNA, 713 bp, Gossypium hirsutum
  Clone ID: GOSHI-09MAY01-C1094_1
gctgaggctcggaaacctgcagcagaaaggggatctcctggtgaatccaaaaaagcggtggcatctgtggagacagtttcttctgtaactgatgttgcagattcaaaggcatcaaaactagatggtcgtatgttggttggaggtgatggtatcattggtgacaaattgagtaaaacttccaagtcgccgagcatacacaatattttgaatcagctctctcggtttgcaaaagacgtgaaagtgcttttggtggataaagtttatgttgtaaatgtttttggttacattgcatacaactttgtcattggagcatactcttattggggaccaaaggctggttataatatttatcatatgaagagtgcagatatgttgtttggaggggttacaattgtatgtgggattttaggaacaatatctggtggcttcatcctagatcgcatgggtgctacaatatctaatgcttttattcttctttcaggtgcaacatttctgggtgcaatatcttgcttctctgctttctgtctcaggagcttgtatggttttatagttctttttgctgtgggtgaattacttgtttttgcaactcaggctccagtcaattatgtatgtctccattgtgtaagaccgagtttgagaccattatctatggcaatctctactgtatcgattcacatatttggcgatgtaccttcctcaccacttgttgggat

SEQ ID NO: 10769 - DNA, 739 bp, Gossypium hirsutum
  Clone ID: GOSHI-09MAY01-C1054_1
gcgggtttatatattacttaaggatcagggatacatgcatgtagtaaagccttccccttcgctcatagcttggaagcgctcgccaagttgtacttctttccaacccgaccatgaaaatggaggcttctgctccgtccttgactccccaccagaactctctcctcctcctctccattgcccgctttcttcaacgcaattccttctctaagaccctcaagaagtttctctccgaagcccaaatccagaaagatgttttggcaggttcttctctagatttggaagaaatgtgctgcaagtatctggcgaagagtgatggacaagactgcattgcttctacagttgaagttgctcccaagaaaaagaagaaaagaggcaatgagagtagtatggacattataggtggtcaatctgaagttgacgataaatctgtcaactctaagaaatttgaggagcaagttttcaaggatgccgctaaggaatctgctactgataaaacgaaggataagaaaaaaaagaaaagcaagtcaacttctgattctttaattgaaagtgttggacagcatggttcagaggacacgcaacatgctgcagttactttgaatgctagtgacatatcagtggaagacaagacttccaaatctaaaaagaagaaaaagaaggatgattctgaagatgtagagaaagaaaaatccacagaggaaaataagatctcgaaggtggattcaacgatcacagatga

SEQ ID NO: 10770 - DNA, 1744 bp, Gossypium hirsutum
  Clone ID: GOSHI-09MAY01-C1044_1
gcgcttacgcgtgcgcccacgcgtgcgcccacgcgtgcaaaaattttcaaaattaaatcaaataaaaatgagtcttcctctaatactcaccgtctccatcatcgccttcttcttaacgtacaagctttaccaatggctaaggttcaagctcccaccaggtccacgcccatggccggtggtcggcaacctttacgacataaagcctattaggttccggtgttttgcggaatgggcgcaggtgtacggccccattatatctgtttggtttggttccactctcaacgtgatcgtgtcgaattcggaactggctagggaagttttgaaagagcatgatcaacagttagctgataggcatcggagtagatcggcagccaagtttagcagagatggacaggaccttatatgggccgattatggacctcattatgttaaggtaaggaaagtatgcacgctggagcttttctctccgaagaggctggaggctctgagacctataagagaagatgaggtttccgccatggttgaatccatctttctctactgcaccagtcctgaaagcctgggtaaaactttacaagtaaggaaatacttaggagcagtggcattcaacaacatcccacgcctcccatttgggaagcgttttgtgaactccgatggcataatggatgagcaaggccatgaattcaaggccggggtggctaatgggcttaagctaggtgcatcactcgccatggctgaacacattccatggcttcgttggatgtttccattggaggaggaggctttcgccaagcatggggcacgaagggatcgtctcacccgagctatcatggaggagcacaccctagcccgccaaaagagcggcggtgccaaggagcattttgttgatgccttgcttacgttgcaagacaagtatgatcttagcgaggacactattattggacttctttgggacatgatcactgcaggcatggacacaacagcaatctcagtcgagtgggcaatggctgagctcattaggaatccaagagtgcagaaaaaggcacaagaggagctagatcgtgtgataggattcgaaagggtgatgtctgaacctgatttctctaatctgccttaccttcaaagcgtagccaaggaagcactacgactgcaccccccaactcctctaatgttaccccaccgtgccaatgcaaatgtgaaaatcggtggctacgacatccccaagggatcaaacgtgcatgttaacgtatgggcagtagcccgagatccagctgtgtggaaggaccctgaagagttccggccagaacggttcctagaggaggacgtggatatgaagggtcatgatttccgattgcttccatttggtgcagggaggagggtgtgccctggtgcacagctcgggatcaacctggtgacatccatgttgggtcacttgttgcaccacttttgttggacaactgcggagggagtgaaggctgaggaaattgacttgcttgaaaaccctggactggttgctcatatgcggactccattgcaagctattgccactcctaggctgccttctcatctctacaaacgtgtggccgcggatatctaagttttttccctaaacttctaattcttattgctcttagcattagattttgaattctaaacttttttcttttgacaagttctggtgtattatcaattatgtctcatgtgatttgtgatcggtcgcgtgaaagaagaccaaataaaaacg

SEQ ID NO: 10771 - DNA, 1886 bp, Gossypium hirsutum
  Clone ID: GOSHI-09MAY01-C1074_1
gatcccggtcgaccacgcgtccgcgcacgcggggccccttctttgcagtaaacaaaggttcgagtttttccctcccgactcagtcacttgctcggtcggtcacttacctcgtgctttcaacggtgttattcggaaatcctagccgacgatgtcgcttcgagtgttgaaccctaatgccgaagttctcaacaaatcggcggcactgcacatgaacatcaacgccgccaaaggtttacaagatgttctcaaaacaaatctgggacctaaaggcactatcaaaatgcttgttggtggcgccggtgatattaagctcactaaagatggaaacactctcttgaaagaaatgcaaattcaaaatccgacggctattatgatagcaaggacagctgttgcacaagatgacattagcggtgacggaactacatctactgtactcttcattggcgagctaatgaagcaatctgagcgctacattgacgaaggtatgcatccccgtgttctattgatggttttgaaattgccaaaagagctacccttcagttccttgagaagtttaagacccctgtggtaatgggttctgaacctgataaggagatcctgaaaatggtagcaagaactacactaaggaccaacttgtatgaaggattggcagatccactgacagacatagttggtaatgccgttctgtgtgtccgaaaacctgatgagcctattgatctctttatggttgaaataatgcacatgcgacataagtttgatgtagacacacggctggtggagggactagttttggaccatggttctaggcatcccgatatgaagcgacgagcagaaaattgttacatcttgacatgtaatgtatccttggagtatgagaaaagtgaaataaatgcaggctttttctactcaaatgctgagcagagggaggcaatggttgcagctgaaaggcgttcagttgatgaacgagtcaaaaaaattattgagctaaaaaataaggtttgtgctggcaatgatagcaactttgttgttatcaatcaaaagggtattgatcccccttccttgcatctacttcaacaagcagggattgttgccctcagaagagcaaagagaagaaatatggaaaggcttgttttggcttgcggaggagaagctgtaaattctgttgatgatttaaccccagcttgtcttggctgggcgggacttgtctacgagcatgtccttggggaagataagtatacatttgtggaaaatgtgaggcatccccattcatgtacaattttgatcaaagggcctaatgaccacacaattgcccaaattaaggatgctgttcgtgatgggctgcgggctgttaagaatactattgaagatgaggcagttatattaggtgcgggagctttcgaagttgcagctagacaacacctaattaacgaagtaaagaaaactgttcaagggcgtgcccaattaggtgttgaagcttttgccgatgcccttctcgtggtgcccaagacacttgctgaaaattctggacttgacactcaggatgtcataattggtctaacgggggagcatgacagaggaaatattgttggtctaaaccaacaaacaggagaacctatggacccccaaatggagggtatatttgataactactctgttaaacgacaaattataaactctgggcctgtaattgcttcgcaattgctgttggtggatgaagtgattcgtgctggcagaaacatgcgaaagccaacttaagcccggagtggaccttccttttactctgtatgcgtgtggcttttggtattctatttcatggaagatttgtggtgcatccttgttctaaatgggttatgtactgcatcttggtgatctgtttttacaggaaa

SEQ ID NO: 10772 - DNA, 788 bp, Gossypium hirsutum
  Clone ID: GOSHI-09MAY01-C1354_1
ctttgttagaggaagaaaagcgtcttttggcagtcgccaaaggatcatcgttcgaatcatttcattgctcactctcatcgatcaaaaatttatttttaaaaccccactcccatcctttaaatcctaacactagagaagacaactgaaacgcaaagcagagatccccctaaatttgctttcttctcaaagttttttctttcatctctgcttcatggctcagtctactgtatcccaggtttctgtagctgttcccgttggaaacgacatttctctgaggagatctgtagctaacaggaacattataagctttggtaacaagtcatgggcttccaccttggcttttgatttgaaatcacgaaatgcacagaagaacaaaccgtacatagtatgcctgtcagtgcaacaagccagcaaatccaagattgcagtttcacctttggagttggaaattgcaaaagagcccccactaaatacattcaagcccaaggagccttacacagctaccatcgtttctgttgagagacttgtcggtccaaaagctccaggcgagacttgtcatattgtcattgatcatggcggtaatgttccatactgggaagggcagagctatggtgttatccctcctggtgaaaatccaaagaaaccaggttctccccacaatgttcgtctgtattccatagcatcatccacgtatggagattctttttgatggcaagacaaccaagttgtgtgtccgtcgtgctgtctattatgacactgagactggaaaggaggatccgtcgaaaagt

SEQ ID NO: 10773 - DNA, 998 bp, Gossypium hirsutum
  Clone ID: GOSHI-09MAY01-C1344_3
ggatcaatagtttgctgagccctgaactaagggattctgggtctttgtttgggaagctcttcaggatatgactcttatgatccttggggcatgtgctattgtgtcgttggtcgttgggatagcaatggaaggttggccagccggagctcatgatggacttgggattgttgcaagtatcttattagtcgtgttcgtcacggcaaccagcgattatcgccaatctttgcagtttaaggatttggacaaggagaaaaagaaaatcaccattcaggtaacaagaaatgattgtaggcagaaattatccatatatgatttgcttcctggtgatattgtacaccttaatattggtgaccaaagtccctgctgatgggcctttttgtgtcgggattttcccgtgctaatcgatgaatcaagtttaacaggggagagtgagccagtagtggtgaatgataaaaacccttttatgctttctggtactaagcttcaagatggatcatgcaagatgttggttaccactgttgggatgagaactcaatggggcaaattgatggcaaccctcagtgaagggggagatgatgagaccccactgcaggtgaaattgaatggagtagcaactatcattgggaaggtaggcctgttttttgctgtagtgacttttgccgtaatggtgcaaggactgttaaggagtaaactgcaagaagggactatctggagttggtctggcgatgaggcactgaaattgctggagttctttgctcaagttaattcctaagattcaggtgatagctcgatcttctcctatggacaagcatactctggtggctaaggagagtgctgatgtcatcattcttgatgacaatttctcaacaattctgacagtggccacatggcgccgttcagtgtacataaatattcagaaatttgtacagtttcaactgactgtcaacattgttgccttaattgttaacttctcctcagcatgtttgacagggagtgct

SEQ ID NO: 10774 - DNA, 635 bp, Gossypium hirsutum
  Clone ID: GOSHI-09MAY01-C1344_2
cgattatcgccaatctttgcagtttaaggatttggacaaggagaaaaagaaaatcaccattcagcccacgcgtccggatggatcatgcaagatgttggttaccactgttgggatgagaactcaatggggcaaattgatggcaaccctcagtgaagggggagatgatgagaccccactgcaggtgaaattgaatggagtagcaactatcattgggaaggtaggcctgttttttgctgtagtgacttttgccgtaatggtgcaaggactgttaaggagtaaactgcaagaagggactatctggagttggtctggcgatgaggcactgaaattgctggagttctttgctcaagttaattcctaagattcaggtgatagctcgatcttctcctatggacaagcatactctggtggctaaggagagtgctgatgtcatcattcttgatgacaatttctcaacaattctgacagtggccaaatggggccgttcagtgtacataaatattcagaaatttgtacagtttcaactgactgtcaacattgttgccttaattgttaacttctcctcagcatgtttgacagggagtgctcctctgacagctgttcagctattgtgggtgaatatgatcatggatact

SEQ ID NO: 10775 - DNA, 1177 bp, Gossypium hirsutum
  Clone ID: GOSHI-09MAY01-C1344_1
cccacgcgtccgaaaaggataaatcctgtaattcatacctcaattctcgttttgcccgtgcggccctccgtccgctcccttgctcaagctcactccggtggctaaggagagtgctgatgtcatcattcttgatgacaatttctcaacaattctgacagtggccaaatggggccgttcagtgtacataaatattcagaaatttgtacagtttcaactgactgtcaacattgttgccttaattgttaacttctcctcagcatgtttgacagggagtgctcctctgacagctgttcagctattgtgggtgaatatgatcatggatactttaggagcacttgcacttgcaaccgagccgccaaccgatcgggttcttcagcatgccgatcgctgctgctttgaagctggtcccagtatgaagcctatatgcctggattttgtgaagaacatcaaggaagccttaatgtcactcttcgtgatgtatagggaagaattcttaccagcacctggaatttacatgagcttagcctctacactattcatagtgtgaaccattaccattgtgcacccctaaatattgtctaacttaattattataacagttaacatcatctgagaaataagcaaaaagttgtctctaccttcaaggagttatcatcattaggagaaaaaaagaccaagattccatccattattaacactaaggtagatctagacaccaaataaaagtgatgctgtagaaacctataatccatcctttctataattccaatgatagagcaacaatcatacccttctattttcttccaccattttgataaatagtcaagatgaatggaaatgctaaaatacatgagcaagagaagatttgcaggctacaatccaacaatatagggagatgcaagcctagaatgaattactttgggctcaactccgggaatgcgcctgataaggttcttaagagagaaaatttaaccgacgatcagcggtatgatgctttgagtaaaattcccgatcatccaactcaaatgatcgttttcttcagtttaccttctgttgcccgattggaatgggtcagaagatttctttctcaccattaaatatcaatgttcaaactttttgatgttgtaaaacttttgaacatattgattatgatgtacaatttcattttcatctaact

SEQ ID NO: 10776 - DNA, 634 bp, Gossypium hirsutum
  Clone ID: GOSHI-09MAY01-C1304_1
cccattgtacgctgacataaacttcccaaatctgttttctatttccttttccaagcgttgtttgatctcaaaaccttttactgcatggaagccggtaataaaatcggtgcatcagctcatcccacttccttacatcctccggtccgcggacatgcctcgactggcaccctgggacgccacctggcaaggcggctcgtggagatcggtgtcaaggacgtcttctcagttcctggtgacttcaacttgaccctcttggatcatctaatagcagaacctgagctgaacttagtcggttgctgcaacgagcttaacgccggatatgcggctgatggctatgcacgcgctaagggcgtgggagcctgcgtcgtgactttcactgttggaggcctgagtgtgcttaacgctattgccggtgcttacagtgagaatttgcctgtgatttgcatagttggagggcctaattcgaatgattacgggaccaaccggatcttgcatcatactattggcttgccagattctagtctagaattaggtgtttcagacgatcacctgtgcccaagcagtggtgaacaaccttgatgatgcgcatgagcttcttgatactgccatatccacagctttgaaggaaagcaag

SEQ ID NO: 10777 - DNA, 538 bp, Gossypium hirsutum
  Clone ID: GOSHI-09MAY01-C1334_1
agaaaaggtgacgtaagacatcatcattatcaacgccggcagagtccaatcaattcaaaatcctcattttgatggcttgttctcggcggctccttttaagattcatagttggagcgtaatttgattgattatttggacgataatgacgagcgaagtcgagaacaagccgggattttgtacggagtcggcgacggacttggctgaaggagttgagagctagcttcgcagccggaaagactaaaagctacgaatggagattgactcagttgaatgccatggtgaagatgatggaagagaaggagccgcaaatcgttgccgctcttcacgaggatctttccaagccggaactcgaatcctccatctatgagaatagcgatgcttaagaactcatgtggattggcagtcaagaacatgaagcattggatgatgccagaaaaggcaaaaacttcattggttacatttccttcctttgctgaaattgtttctgaaccattgggtgtggtgttaggaaatcttaacttggaaatatccttttttg

SEQ ID NO: 10778 - DNA, 597 bp, Gossypium hirsutum
  Clone ID: GOSHI-09MAY01-C1294_3
attttgtggctgcccacaatgatgagaagaagacggttttctctaagatcgaacaggaagttgagaaactcaaggggtccagcgagaggtatggaaagatatacttgaaagctgctaaaagctgtttggagaaaggtgctgattatcccaagaaggaaatcgagcggctgcagcgcattcttgacaagtctataagcccagcaaaagcagatgaattcactctcaagaagaatatcctatcaacatttatgtgaacttagctcactgaatttcactagtctagtacactggcatggagctcgagttttcagcgacgatttcgaggattggttttgcctcccagtgctgggatccactcatgtttcattttgattttaatctttgagagcaatggctaggccttttttataacagtagtaaagtcttttttgagatcatctagagcaaatgatctaattagacagtttcgtatttgtgcccttttcttcaatgattagaaatttttactctgttcaccccagcagaatttatattatgctttcaggactctttgaacttttggaaatgagacatttttgcttttaattcccgagatct

SEQ ID NO: 10779 - DNA, 591 bp, Gossypium hirsutum
  Clone ID: GOSHI-09MAY01-C1294_2
cgataagaagcagtcttctccaaattgaagaggaagttgagaagctcaagggttctaccgcgaggcatggaaagatatacttgaaagctgctaaaagctgtttagagaaaggtgctgactaccccaacaaggaaattgagcggctgcagcgcatgcttgacaagtcactaagcccagcaaaagctgatgaattcacgatcaagaagaacatcctatcaacatttgcatcttcttagatcaatgtatttcacctcgtctagtgctgcggtgggttcaagtttcatcgacgttttcaaggactgggaacatcttagcgttttatgttttgggtatctttcagcagcaaatcgctaggccttgattaggacttgagcaccatttgcgtgccgcagcaccagtaactagtaaaagttcttatgatggaattctctcctaaaactagttttgaccagtgatttcactcggcatttattcgaatttttgctcctgtttttactattatagatttcctggaaacttattttgaattaaaccaatatatagatgtgaaataacacgtttaaacagtaaaaaaaaaaaaaaaaaggcggc

SEQ ID NO: 10780 - DNA, 1351 bp, Gossypium hirsutum
  Clone ID: GOSHI-09MAY01-C1294_1
agacaaagcaagcccacggggcgacacaatcagaggaagaggaagaacaaaaaaaaaaaatgaagtctcagatctgtttagcctttggaactctggccttgttattagcttcagctttggccgatgacgtcgtcgtactgaccgaagcgaacttcgataaggaagttggtcaagatagaggagctctcatcgagttctatgctccttggtgtggacactgtaagaagctagctcctgagtacgagaagctcggggcaagttttaagaaggctaaatccgtcttgattggaaaggtggattgtgatgaacataagagtttatgcagcaaatatggtgttcaaggctacccaactgttcagtggtttcctaaaggctctttggaacctaaaaagtatgaaggaccacgcaccgctgaggcccttgctgagtttgtcaacactgaaggagggaccaatgtgaagatagccacattaccatccagtgttgtagtgctaaatgctgataattttgatgaggttgtccttgatgagaccaaagatgtgttggttgagttttatgcaccttggtgtgggcattgcaaaaaccttgctcctacctatgaaaaggtagcattggcattcaaaatggaagaagacgtagttatagctaatctagatgctgacaagcacaaggatctagctgaaaagtatggaattagtgggtttccaacattgaaattcttccctaaaggtaacaaagctggcgaagactacgacggtggcagggatttagatgactttgtttctttcatcaacgagaaatgtgggaccagtcgtgatgcaaaagggcagttaacttcaacggctggtattttgtcaagtttggatgcattagtgaaggagtttgtggctgcttctgccgacgagaagaaagcagtcttctccaagattgaagaggaagttgagaagctcaagggttctactgcgaggcatggaaagatatacttgaaagctgctaaaagctgtttagagaaaggtgctgactaccccaagaaggaaattgagcggctgcagcgcatgcttgacaagtcaataagcccagcaaaagctgatgaattcacgctcaagaagaacatcctatcaacatttgcatcttcttagatcaatgtatttcacctcgtctagtgctgcggcgggttcaagttttcagcgacgatttcgaggattggttttgcctcccagtgctgggatccactcacgtttcattttgattttaatctttgagagcaatggcttaggcttttaatataataataataaaagaacttttttttgagatcatctagagcaaatgatctaattagacagttccg

SEQ ID NO: 10781 - DNA, 389 bp, Gossypium hirsutum
  Clone ID: LIB3196-014-P1-M1-E6
atactgcaagaatgtagaccattctcagcaatcagactgtcgacattccagaaattgtcgacattaccctgaagggacgctcagttattgtgtagggtccgagaggaaccctgttgaggctctccaatcacatctatgtttaggttattgttcatgaaaagggagcttttagcgagttctatgctccttggggtggacactgtaagaagctagctcctgagtacgagaagctcggggcaagtttttaattggcaaaatccttcttgattgtaagggtggtttgtgttgaacataataattttatgcagcaaatatggtgttcaaggctacccaactgttcaatggtttcctaaaggctctttggatcctaaaaagtttgaaggaccacg

SEQ ID NO: 10782 - DNA, 337 bp, Gossypium hirsutum
  Clone ID: LIB3135-008-Q1-K1-G3
tggatggttatgaacatacgactttatgcattaaatatgatatttaaagctacacaaatgtgcagtaattgtggtaaagctctctgaaacctactaagtatgaaggaccacgcacagattatgcacttgctgaatttgttaacactgaaagagggactaatgtgaagatagccactttggcatacaatgttgaaaagctaaatgcggataattatgatgagattgagcttgattaaaccaaagatatgtgggttgagttatatacaccttggcgtggccattgcaaaaaccttgctcctacctattaaaaagtagcaacggcatttaaatttgaaaa

SEQ ID NO: 10783 - DNA, 668 bp, Gossypium hirsutum
  Clone ID: GOSHI-09MAY01-C1284_1
gataattcttttggataaattttcccctaaaaaattcgtcccaattttttttttctgagcaatttgatatcacgatctgattggaaggggagaaaatggagaaggtgatgaatatgataaagccaaaaccgaatccacaacagctattaagagattggcagcgtcgccttcgccaggaatgccgaaacatcgagcgccaaatcagagatattcaaagagaagagaaaaatgtacaaaaagctattaaagatgctgccaagagaaatgacatggtttctgctaagtcactcgccatggaaattgtgagatccagaagaacagtcaatcgtctctatgaaaataaggcacaattgaattcaatatcaatgcaccttggggaaagtgtagcaattgcccgtacagttgggcatttgtccaagagtgctgaggttatgaagcttgtcaataaccttatgaaggctccagaagtggctgtcacaatgcaagagttcagcaaagagatgaccaaggcaggtgttatcgaggagtttgtcaatgatgctcttgacaatgcgctggattctgaggatatagaggaggagactgaagaagaagttgacaaggtcttgacggcaattgctggtgagacagctgcacagctttccgaggcagtcccggaagagaagatg

SEQ ID NO: 10784 - DNA, 733 bp, Gossypium hirsutum
  Clone ID: GOSHI-09MAY01-C1244_1
gattcttccaccgtcgttaagttgcaaagcgccatcaagttcaacggcggaggtcatatcaaccactcaattttttggaagaatcttgcccctattcgtgaaggaggaggtgagcctccacatggttctttgggttgggccattgataccaactttggttcattggaatcattgattcagaagatgaatgctgagggtgctgctttgcaaggctctggttgggtgtggcttggactggacaaggagttgaagaagcttgtggtcgaaaccactgcaaatcaggatccacttgtgaccaacgggccaaatttagttcccttgcttgggatagatgtttgggagcatgcatattatctacagtacaagaacgttagaccagattacttgaagaacgtatggaaggtcataaattggaaatatgcaagtgaagtgtacgagaaagaaagtgcttgaggtttgatgtagagaattaagaggcaacttgtcggatgttgtatggcaaagagaataacaagaagaatagtgtatgtgttgtatgaaagttaataaatattaagcttaatgcttaaaaattagatggcgtcttgtaccactggtgaattacatttacatttacccttgagtgacccttgcttttgggtttttctttattctcctttccgaggctgatcaagggcattgaatgaatggttattttggtttcttggtattttaaaaaaaaaaaataccaaaa

SEQ ID NO: 10785 - DNA, 504 bp, Gossypium hirsutum
  Clone ID: LIB3583-010-P1-K1-H11
cccacgcgtccgcccacgcgtccgcccacgcgtccgcggacgcgtgggcggcggaggtcatatcaaccactcaattttttggaagaatcttgcccctattagtgaaggaggaggtgagcctccacatggttctttgggttgggccattgataccaactttggttcattggaatcattgattcagaagatgaatgccgagggtgctgctttgcaaggctctggttgggtgtggcttggactggacaaggagttgaagaagcttgtggtcgaaaccactacaaatcaggatccacttgtgaccaacgggccaaatttagttcccttgcttgggatagatgtttgggagcatgcatattatctacagtacaagaacgttagaccagattacttgaagaacgtatggaaggtcataaattggaaatatgcaagtgaagtgtacgagaaagaaagtgcttgaggtttgatgtagagaattaagaggcaacttgtcggatgctgtatggc

SEQ ID NO: 10786 - DNA, 502 bp, Gossypium hirsutum
  Clone ID: GOSHI-09MAY01-C1204_1
cccacgcgtccgttctaaccatttctggcattgtccaagaagctgctcaagataggaatagcattgtggcaaacttgacaacaaaaattgatttgacgaatgaaaatttagatgaattacagtacaaatacaatgagactactatgtccttaagcagaatgctcgaagagaaagacaggctgcaccttgcctttattgaagagacaaggaagatgcaaaggcttgctcgagacaatgttcgaaggattttggaagaacaggaaaagctgaatcatgaactggaaacaaagaaaaggaagatcgacaactggaccagggaactgaataaacgtgagacgctaactgagcgcgaaaggcaaaaacttgatgaagagaagaaaaagaacaatgaaagaaataattcacttcagctagcttccatggagcagaaaaaggctgatgagaatgtgttaagattggttgaagagcaaaaagagggagaaagaagaggccctgaaaaaga

SEQ ID NO: 10787 - DNA, 624 bp, Gossypium hirsutum
  Clone ID: GOSHI-09MAY01-C1224_1
cccacgcgtccgatttcccctattcatatatcctcctcactcgtcccttcgctcacccccgtttctaactcaactcagtgctcacacacaaaactgataaatcactatttggagtcagagagatagtgaagcattgtatttcttgcttatcgtcaccattaatgctaattggtgaccgaaaggaaaactaatttgttctaaaatggagcaaagtaaggcaactttcgagatcttcacgaaactggagcagaaatggctatctcactgtgaacctactaagaagattcgaatccttagtatcgatggtggtggaacgactggcattgtcgctgctgctgctcttatccaccttgaagaccagatccgactcaaaaccggtgatccgtatgctcaaattgctgatttcttcgatatgatctccggcactggcgtcggtgctatccttgctgctatgctttctgccgacgatggaactggccatccacttttcactgctagagaagctgttaagtttatcacgctgaacaactctcggctctttagagtcaataagctcgccggattcttcaccgtcggaaaaaattctccggtaagagcatggataaggtgctgaaggaaatgttt

SEQ ID NO: 10788 - DNA, 681 bp, Gossypium hirsutum
  Clone ID: GOSHI-09MAY01-C2954_1
atactttgttccagatgctgaaaccagcaatctggcttttgctggagaagggtgtcaaaattcttgttttgactattggttcagatggtgtacttttatgcactaaaggggaatcaatctcctggagaatttgtctggaaaagacgcagcaacatggatttagtcgacagttatttgaaaatatgacatcaagctgtccttcaaatttgtattctgattctaaggttcttgagagaagcccaaatttcttagctgtgcattttcctgcactccctgcatctgttgtaaggcttacaggagctggtgattgtctagtcggtggaatgattgcatccctttctacaggtttagatgtgatgcagagcgtagcaattggtatagctgcagccaaagcttcggttgaggtggacagcaatgtaccttctcaatttagtttgccaacaattacaggtgatgccaggattgtatattcaactgccaaacttttgcaacatcaatctaagctgtaatgtccaaagaaggggcatggagttttggtaaacacccaaagttagagccatatgtgctttgcctcttttattgttatacaaaaaaaaccctggaaattgcgacttgagattttatacaccatatttgcagaataaatagcaatgcagccttatattttggtggcatgactta

SEQ ID NO: 10789 - DNA, 593 bp, Gossypium hirsutum
  Clone ID: GOSHI-09MAY01-C2944_1
caaaataaaaaaaaaaaatactatttccagtcccatttcttctgcttccacttcacttacctcttctcatcccatatcattcttatttcatctttcttggaagtcacaaaaacaagccttggtaaatatcaattttttttgaaaaccaaaaaccctaatcccaaaccctagggtttaccttaaccggacccaaacccagatccaggaaccactctgtgctctgctcagcaagtgtgtttctgttttttagcatagttaaggcagcaatggaggtggatagtttcagtccagttgaaaagagcatctgggtatgttctgtaatggaagctttgttggctgagactttggttcttgctggaaaatctcttgcttgccttctcatgctgacaggatcgatgctgaatgataagaatgcatctcttaatttgactgcagtggatgagaggtttccatttgatgaacttctaaaaatggaacgtcctggtccagaaaacaaagatgctagtgatacagaggatgatgatgatgatgaagatgaagacgaggacaatgcagatgatcaagatgatgatggaggtgatgaagatttttca

SEQ ID NO: 10790 - DNA, 466 bp, Gossypium hirsutum
  Clone ID: uC-gsronu33B143e04b1
cccatgcttccgcttttttttttggggggggggtatggatttgttataaaattcttgggctgcttctacttcgtctcgtatgtatcaacatggatttttcagtgccaaaatccaaattaccatcagactatactgctggaatagtcgttgccttctatgtaagttttttattttttttcttttcccgttttggtcttgaattttgattcatcgtcacaataaaaacttaaaattccagattaacaaatcctttctaaaagctattcatacaaagaacggggaattgaatatgaatcatggcggcggctaacggaattgaattgttttatttgtgtctggtgctatggtcaaatcagacatcaaacggtgacgtattcgagaaaaaccacgatgaattagacatcgagtttttaggaaatattgaaggtaaaccatggagattcagacatatgtgtatgggaatggc

SEQ ID NO: 10791 - DNA, 405 bp, Gossypium hirsutum
  Clone ID: LIB3584-014-P1-K1-D8
cggacgcgtgggcggcttcggtactgctactttcaacgtcaccaccctcgcctttgatgaaggttacaaccctctctttggcgatggcaatcttgttcgttccccggatggtcatagcgtccgcctcctcctcgacgtttatactggtaattacatgtgcttgattattatagaatatttattataagattcaccatgcaaatctccttttttttttggggggggggtattgatttgatatgaaattcagggtcgggtattatttcgtctcgtatgtatcaacatggatttttcagtgccaaaatcaaattaccatcagactatactgctggaataggcgttgccttctatacatcaaacggcgacgtattcgagaaaaaccacgatgaattcacatcgagtttt

SEQ ID NO: 10792 - DNA, 478 bp, Gossypium hirsutum
  Clone ID: GOSHI-09MAY01-C2914_3
cccacgcgtccgattttcagtaagagtgcaaagtacagtttatttgatccttgcaaagaaatggcctgtgttccattggacgaggacaccaaggttaaagggaaggctgccattgatgttgtctgcaacccgttggggaagtccgggggtgctctgatccagcagttcatgatcttgacctttggatcacttgcaaattctaccccataccttggagggatacttatggtgattgtttttgcatggctgtcggcagccaggtctttggatgtccaattcactgcattgcgtagggaagaagaacttgagaaggagatggaaagagcagctgttaagataccaatcgtgtccgaaagtggaagtgtctctccaagtggttcatcagtagactcagtagcgggtgactcgcccggaagttcatctgaaacatcaactccgagcaatatctaggaagtaattcttccatttgttatggaac

SEQ ID NO: 10793 - DNA, 711 bp, Gossypium hirsutum
  Clone ID: GOSHI-09MAY01-C2914_2
acctacacttgcaaagttcggtatgactccacttcttgcagccgtttatgtcggtgccatgcaagacagtttcagcaaaagcgcaaagtacagtttgtttgatccgtgcaaagaaatggcctatattccgctggacgaggataccaaggttaaagggaaggctgccattgatgttgtctgcaatccgttggggaagtctgggggtgctcttattcagcagtttatgatcttgaccttcggatcgcttgcgagttcaaccccataccttggagggattctactggtgattgttcttgcatggctagcagcggcaaagtccctggatacacaattcaccgcattgcgtcaggaagaagagctcgagaaagagatggaaagagcagccattaagatcccagttgtgtctgaaaccagaaacggtacttttgccggtggctcattgctaaaccagtcagcaggtgactcgactggaagcacatccaaaacatcaactccaagcaatatctagaaaacaagcagcaggaataagcagcagttctaggttactgctggctctaaaatttaagtttttgttattatagaaagaatatgagtatctaaaactgtactctgtagaattgcatttggatgaacatcaagcaaaagtgcaaacacccttctatctgagttcttcaaatgctgcttatgtcaactgattttacattttactga

SEQ ID NO: 10794 - DNA, 837 bp, Gossypium hirsutum
  Clone ID: GOSHI-09MAY01-C2914_1
cttgatattatttggtgatccacttggacctacacttgcaaagttcggtatgactgcacgtcttgcagccggttatggcggggccatgcaaaacattttcagcaaaagcgcaaagtacagtttgtttgatccgtgcaaagaaatggcctatattccgctggacgaggataccaaggttaaagggaaggctgccttgtgttgttgtctgcaatccgctggggaagtctgggggtgctctgattcagcagtttatgatcttgaccttcggatcgcttgcgagttcaaccccataccttggagggattcttctggtgattgttcttgcatggctatccgcagccaagtctttggatacacaattcacagaattgcgtagggaagaagaactcgagaaggagatggaaagagcaactgttaagatccctgtcatgtctgaaagcggaaacggctctcttgcaagcggttctgcagaaacagcagaaacatcagaaacatcaacttcaagcaatatctaagaaaaaaaaaacattcttccatttgttgccaacaggaagaataagaagctgataagaaaccagtgctaggcgactgttggctctagaatttacgtttgttcatacaaaggatattagctaaaaacgtaaatgctcgactttattataagtcttccatttctttagatgttgagcttagtgtttgtttagttattgtgctctttagaattgcatttggatacacaccaattgaaacccttttttgatcaaaattctttttatatatacattagatgacgcgggaattaagcccaaaaaaaaaaaaagaataaagaaaaagttt

SEQ ID NO: 10795 - DNA, 660 bp, Gossypium hirsutum
  Clone ID: GOSHI-09MAY01-C2924_1
ccgggttcgacccacgccgttcgcgggacgcgtgggcggacgcgtgggcggacgcgtgggattccctcttgcattcgcggtggttgacgaggaaaatgatgacaattggatgtggttcctagctgagttgcactatctgcttgagatcaatgcagagaacatgcccaggcttaccatcttgtctgatagacaaaagggtgttgtagatgctgtggaagcaaacttcccaacagcttttcatgggttctgcatgcatcatcttgttgactgtttccagaaggagttcaatagttctgtgcttaccaaccttttctgggaggctgcttatgcggtcaccagaactgaatttgaaaaaaaactcattgacattcaagcaatctcaccagaagctactacctggattcaaaatattcctcctcatttatgggccacatcacatttcgaagggacaaggatgggactcctggcggcccacattggggaatggttaagtgcttggatagcagaggcctctagccttccaataatccaaatgatggagtgcatccgtcggcaactgatgacttgtttcaatgaacgtcgtgagacaagcatgcagtggacaggcaatcttgttccttctgcagaaaggattgtattggaagcctatgatcgtgcatg

SEQ ID NO: 10796 - DNA, 403 bp, Gossypium hirsutum
  Clone ID: GOSHI-09MAY01-C2844_13
ccaaaaccctggttaataaataccattcgtcggatcattttaaacccttttttggttttttttggccgccgcctgcgtttttttcttaatctttttgaaccaaaaagtctttagcttttcgcttcgagagagaccatgtgggtttaccaggatctcatctccggtgacgagcttctttctgactcattcccctacaaggaaatcgagaatgggatgctgtgggaagttgagggaaagtgggttgtgcaaggagctattgatgttgacattggtgccaatccttcagccgaagatgctgatgaggatgaaggtgttgctgaccaatctgtggaggggtgcccacatttgttgactctttcaagctttttgagcaggctttttgttgacacgaatacaatttttt

SEQ ID NO: 10797 - DNA, 580 bp, Gossypium hirsutum
  Clone ID: GOSHI-09MAY01-C2844_11
cccacgcgtccgggaggtcaagtgctgaggtttgaagtacaaaaatgttgggtcaacagcaccatccttgtagtaagcaaacaccaagcatccatcatcatgcatgctctctcctacgaaaaattgaaggtccttcaattttgaaagcaaaaacttggatgctccctcaatgtttttcttgcaaaaaggactcttgcttttcgcttcgagagagaccatgttggtttaccaggatctcatctctcggtgacgagcttctttctgactcattcccctacaaggacaatcgagactgggttgctgtgggaagttgagggaatgtgggttgtgctaggagactgtcgatcttgacattggtgccaatccttcagccgaaggtgctgatgaggatgaaggtgttgatgaccaagctgtgtacgttgctgttatttatgacatattaaggcttgatgtgtatcttttgtttttcatttttctatttttctgtttatttttattttttgtatttctttttttcttaataatgttttctttttgtttatatttctctcttgttatttaattttttttcctattttag

SEQ ID NO: 10798 - DNA, 477 bp, Gossypium hirsutum
  Clone ID: GOSHI-09MAY01-C2844_9
gcgcccacgcgtccgcggacgcgtgggttgtaataccactactgctaacgtcttttcatttatttggagctaaaagtgtttagctcttcgcttcgagagagaccatgttggtttaccaggatctcatctccggtgacgagcttctttctgactcattcccctacaaggaaatcgagaatgggatgctgtgggaagttgagggaaagtgggttgtgcaaggagctattgatgttggcattggtgccaatccttcattcgcagataacgatgaggtttacagggccttgtgattcttgttggtagaggctattactgcttatgttaatgttcacatatttatgaatatctagttctttttttttgattgtcattgcttttcggattcgtgtgagggtctaaacaattttatttattcttgtaatatagttactttctagaattgatttttacttgttaaattattacattatttttttt

SEQ ID NO: 10799 - DNA, 551 bp, Gossypium hirsutum
  Clone ID: GOSHI-09MAY01-C2844_5
tcgccccgcgtccgcggccgcgtgggggggggcgggggcgctctctgtagccgccgccggcgtctctctcttcatctctcggagccaaaagtctgtagcctgtcgcttcgagagagaccgtgggggtttaccaggagcgcagctccggtgacgagcttctttctgactcattcccctgacgggggagaatgcgagaatgggatgctgtgggaagttgagggaaagtgggttgcgcaaggagctgtcgatggtgacattggtgccaatccttcagccgaaggtgctgatgaggatgaaggtgttgatgaccaagctgggaagggtgttgacattggtgacactttcaggcttcaggagcaaccccctttcgacaagaagcagtttgtcgtggtcatcaagaagttcatcaagaacttgacaccgaaactggatgcggaaaagcaagagtccttcaagaaaaacattgagggagcaaccaagtttttgctttcaaaattgaaggaccttcaatttttcgtaggagagagcatgcctgatgatggatgcttggt

SEQ ID NO: 10800 - DNA, 1087 bp, Gossypium hirsutum
  Clone ID: GOSHI-09MAY01-C2844_2
gccctcgcgcccggtttatttacctccaaaaatggcatccttttactcgctaactttgattttgatttctattttcgctttctcaatctccattgctaactccaaaactctcaagagagatgtaaaagccttaaatgagattaaagcatcacttggatggagagtggtatatgcatggattggagatgatccctgtggagatggtgatttaccaccttggtctggtgtaacatgttcgactcaaggagactatagagttgttactgaactggaagtctatgcagtatccatcattggtccttttcctattgctgtaactaatttattggatttaacaagattggatctccataacaacaagctgactggcccaattcctccacaaattggccggctaagacgacttagaatgttaaatttgaggtggaataagctccaagatgtccttcctccggagattggggagcttaaaaaactagcccatctgtcattgagctttaataattttaagggcgagatcccgaaagagcttgcaaatctacccgagctccgttatctctatcttcaagaaaaccgtttcactgggcgaattccacccgaattgggcactttacaaaaccttaggcacttggatgttggtaataaccatttggttggtaccattcgggagcttattcgtattgaaggctgcttcccagttctacgaaatctatatttgaataacaattatttgaccggaggagttccggctcagctcgcaaatgtgacaaatttggagatattatacctttcatacaacaagatgtctggagtgataccaacggcactcgccgatattccgaagctaacatatttgtacttggatcataaccaattctcaggccgaattcccgatgcattctacaagcatcctttcttgaaggaactgtatattgaggaaacgcattccgctggcgtaacccatttgtgcaccaggtcttgactttcgaccagattcttgttaagtaaaaactgtcagacacaagcctgtactatcaatctatgccctgattctagtatcaactatatattgactgagattgactat

SEQ ID NO: 10801 - DNA, 907 bp, Gossypium hirsutum
  Clone ID: GOSHI-09MAY01-C2844_1
ccccgcgtcccccccgcgtccgcccacgcgtccgcccacgcgtccgctcgctctctgtagccgccgcctgcgtctctctcttcatctctctgaaccaaaaagtctttagcttttcgcttcgagagagaccatgttggtttaccaggatctcatctccggtgacgagcttctttctgactcattcccctacaaggaaatcgagaatgggatgctgtgggaagttgagggaaagtgggttgtgcaaggagctgtcgatgttgacattggtgccaatccttcagccgaaggtgctgatgaggatgaaggtgttgatgaccaagctgtgaaggttgttgacattgttgacactttcaggcttcaggagcaaccccctttcgacaagaagcagtttgtcgtgttcatcaagaagttcatcaagaacttgacaccaaaactggatgcggaaaagcaagagtccttcaagaaaaacattgagggagcaaccaagtttttgctttcaaaattgaaggaccttcaatttttcgtaggagagagcatgcatgatgatggatgcttggtgtttgcttactacaaggatggtgctgttgacccgacatttttgtactttgcatatgcattgaaggaggtcaagtgctgaggtttgaagcaaagaaaaaaaaagtggttgctgaagaatttagtcctttttattattgcttttgtctcttattttcagtactctgctaaagacataaattatttatggtttttgatgtttttgatttaattgtttgttgttttatcatggaatggtttctatttttatgggttgactaaacaagaatttaactctttgttctattactacttaattttattggaaggaggtttttgggaccgattatataaaaaatttattatttaatat

SEQ ID NO: 10802 - DNA, 447 bp, Gossypium hirsutum
  Clone ID: uC-gsronu33B121b08b1
ttcccggttcgtccctcagcagttttgctgatagaccaatctgtagaaggttagttagacattgttttcactttcaggcttcaggagcaaccccctttcgacaagaagcagtttgtcgtgttcatgttgaagttcatcatgaatcttgtctccttattctgtttgcctgttatgttagtactccttttaagaaattacattgtttgtagcttccatttttttttgttttatttcttatctcgccctatatctctctttcttatctttgcgcttgtttttatgtttttatttttgtttttatccttcttttaactatttttatatttttttactcttccacttttcttctcactcttttaattttctctattttattttacctattcattatattatttctttttttatattctcactttcttattcattttttctcatttttaactc

SEQ ID NO: 10803 - DNA, 552 bp, Gossypium hirsutum
  Clone ID: LIB3584-012-P1-K1-G8
cccacgcgtccggtccgatcttttcaaacccctctctagctctctctcgctctctgtagccgccgcctgcgtctctctcttcatctctctgaaccaaaaagtctttagcttttcgcttcgagagagaccatgttggtttaccaggatctcatctccggtgacgagcttctttctgactcattcccctacaaggaaatcgagaatgggatgctgtgggaagttgagggaaagtgggttgtgcaaggagctgtcgatgttgacattggtgccaatccttcagccgaaggtgctgatgaggatgaaggtgttgatgaccaagctgtgaaggttgttgacattgttgacactttcaggcttcaggagcaaccccctttcgacaagaagcagtttgtcgtgttcatcaagaagttcatcaagaacttgacaccaaaactggatgcggaaaagcaagagtccttcaagaaaaacattgagggagcaaccaagtttttgctttcaaaattgaaggaccttcaatttttcgtaggagagagcatgcatgatgatggatgc

SEQ ID NO: 10804 - DNA, 385 bp, Gossypium hirsutum
  Clone ID: LIB3272-043-P1-K1-D2
acgcaaaccttaccttatatagggttagggttttgctccttctgtgttcatctgtctggaccaaaaaggttttagcttttaacttggagcgagaccatgttggtttaccaggatctcatctacggtgacgagcttcttttttgctcattcccctacaaggaaatcaacaatgggatgctgagggaacgcctggggatgcgggtccttagacacaacccccttacatgatgatgaacatgatgcatccgcctgagaggcatgctacgactatggtgccgccacaacaagggtggggtgtggtaccatctcaacaacattcagcgggtcaacctggtaacgcatatgagggtcggactttgtggatcggagatttgcagtattatat

SEQ ID NO: 10805 - DNA, 330 bp, Gossypium hirsutum
  Clone ID: uC-gsflnu33B064d01b1
tccacgcgtacgctctctcttcatctctctgagcctaatagtctttagctttgcgcttcgagagagaccatgctggtttaccaggatctcatctgcggtgacgagcttttgtctgactcattcccctacaaggaaatcgagaatgggatgctgtgggaagttgagggaaagcgggctaccttctgaggtggtgcctttgagaccactatcccgaccttgcactactagtcagctctggtgttcgaacggtatgcccttgcactgtaaagatggcaaacccagcttacaaagtctacttatcgaaccacatgacaaggacagagcagtctg

SEQ ID NO: 10806 - DNA, 602 bp, Gossypium hirsutum
  unsure (1)..(602): unsure at all n locations
  Clone ID: LIB3825-027-Q6-K6-E6
caaacctccaccgnaaaccctcgcttataaataccattcgtccgatctttttaaacccctctctcgctctctctcgccgccgcctgcgtctctctcttcatctctctgaacctaaaagtctttagcttttcgcttcgagagagaccatgttggtttaccaggatctcatctccggtgacgagcttctttctgactcattcccctacaaggaaatcgagaatgggatgctgtgggaagttgagggaaagtgggttgtgcaaggagctattgatgttgacattggtgccaatccttcagccgaagatgctgatgaggatgaaggtgttgatgaccaatctgtgaaggttgttgacattgttgacactttcaggcttcaggagcaaccccctttcgacaagaagcagtttgtcgtgttcatgaagaagttcatcaagaacttgacaccgaaactggatgcggaaaagcaagagtccttcaagaaaaacattgagggagcaaccaagtttttgctttcaaaattgaaggaccttcaatttttcatcggagagagcatgcacgatgatnggatgtttggtatttgcttactacaagnatgggtgctg

SEQ ID NO: 10807 - DNA, 415 bp, Gossypium hirsutum
  unsure (1)..(415): unsure at all n locations
  Clone ID: LIB3197-034-Q1-M1-F9
cttttgctcactaactttgattttgatgtctattttcgctttctcaatcgccattgctaactccaaaactctcaagagagatgtnaaagccttaaatgagataaaggcatcacttggatggagagtggtatatgcatggattggcgaatatcccttgctgagaggagatgaagcaaagtgggttgtgcaaggagctgtcgatgttgacattggtgccaatccttcagccgaaagtgctgatgaggatgaaggtgttgatgaccaagctgtgaaggttgttgacattgttgacactttcaggcttcaggagcaaccccctttcgacaagaagcagtttgtcgtgttcatcaagaagttcatcaagaacttgacaccaaaactggatgcggaaaagcaagagtccctcaagaaaaac

SEQ ID NO: 10808 - DNA, 458 bp, Gossypium hirsutum
  Clone ID: uC-gsflnu33B012f06b1
tccacgcgtgcgtctcgctctctgtagccgccgcctgcgtctctctcttcatctatctgaaccaaaaagtctttagcttttcgcttcgagagagaccatgttggtttaccaggatctcatctacagagacgagcttctttctgactcattcccctacacggaaatcgagaatgggatgctgtgggaagttgagggatagtgggttgtgcaaggagctgtcgatgctgacattggtggcaattctgattccgaaggtgctgatgaggatgaacgtgtagaggacgaacttgagaaccttgataccttcgtagtttgtagctaggacgtaggagcaaccccctttcgacatgaaccagtttgtcgcgttcatcaggaagtatatcaagaacttgacaccaaaactgtatgcggaaaagcaagagtgcttcacgaaaaacattgagggagcaaccaagttt

SEQ ID NO: 10809 - DNA, 500 bp, Gossypium hirsutum
  Clone ID: uC-gsflmaxxa045h10b1
ttgtttcacgcgtccgcccacgcgtccgcccacgcgtccggttggtttaccaggatctcatctccggtgacgagcttctttctgactcattcccctacaaggaaatcgagaatgggatgctgtgggaagttgagggaaagtgggttgtgcaaggagctgtcgatgttgacattggtgccaatccttcagccgaaggtgctgatgaggatgaaggtgttgatgaccaagctgtgaaggttgttgacattgttgacactttcaggcttcaggagcaaccccctttcgacaagaagcagtttgtcgtgttcatcaagaagttcatcaagaacttgacaccaaaactggatgcggaaaagcaagagtccttcaagaaaacattgagggagcaaccaagtttttgctttaaaattgaggaccttcaatttttcgaggagagagcatgcatgatgatggatgctgggtgtttgttactacaggatggtgctgttgacccacatttt

SEQ ID NO: 10810 - DNA, 320 bp, Gossypium hirsutum
  Clone ID: LIB3148-051-Q1-K1-F2
gaagaatttagtcctttttattattgcttttgtctcttgttttcagtactctgctaaagacataaattatttgtggtttttgatgtttttgttttaattgtttgttgttttatcatggaatggtttctatttttatgggttggctaaacaataatttaactctttgttctattactacttgattttattggaaaaaaaaaagatataaaagcaatgtacagaatgaaaaacaattcacaaatattactacctaccttacttgttatgcacgtttcttccatctatcatggttattttatttttgacaattgtacgatatt

SEQ ID NO: 10811 - DNA, 309 bp, Gossypium hirsutum
  Clone ID: uC-gsflnu33B143f10b1
gtcctctgtagccgccgcctgcgtctctctcttcatctctctgaaccaaaaagtctttagcttttcgcttcgagagagaccatgttggtttaccaggatctcatctccggtgacgagcttctttctgactcattcccctacaaggaaatcgagaatgggatgctgtgggaagttgagggaaagtgggttgtgctcggtgctgtcgatggttaccttctggcgaatgattgaaaggaaggggctcatgatgatattggtcttacaagcgcgctcgtttggtgtattgaatgtcttcaggcttattttctt

SEQ ID NO: 10812 - DNA, 271 bp, Gossypium hirsutum
  Clone ID: LIB3272-047-P1-K1-H12
caggtgttcaaggtgaacagccgctggccaatgtatcattgtatgtttgagcaaaaaggactttggcttctcgcttcgagagaaaccatgttgttttaccaggatctcatgtggcggggacgagcttctttttgactctttcccctacaaggaaactgagaatgggatgctgggggaagttgagggaaagtgtgttgtgcaaggagctgtcgatgttgacattggtgccaatcctttacccgaaggtgctgatgaggatgaaggtgttgat

SEQ ID NO: 10813 - DNA, 193 bp, Gossypium hirsutum
  unsure (1)..(193): unsure at all n locations
  Clone ID: uC-gsflnu33B037b12b1
actancataaatatttgtggtttttgatgcttgggttttaattgtttgttgttttatcatggaatggtctctatttttatgggttggctaaacaataattgaactctttgttctattactacttgattttattggatggactcctttgggacagaaaatgtctctgagcgctgccacggatgttccatttcag

SEQ ID NO: 10814 - DNA, 1048 bp, Gossypium hirsutum
  Clone ID: GOSHI-09MAY01-C2874_1
ccgattttgggcggcttcggccagatcaagggtcattggtgaagatgtcgtaatgccttattcgcatcgggtcagtacttacacaggagattttggggtgaaggataggacgaccttgctctttttcatggggaatcggtatagaaaagagggaggcaaaatccgtgattggcttttccaaatactcgaaaatgaagaggatgttgtgataaaacacggaacacaatccagggagaatcgaagagctgcttcacgggggatgcacacatcaaagttctgtttgaatcctgctggggatactccatcagcttgcagactctttgattctatagttagcttgtgtgtccctgtgatagtcagtgatagcattgagttgccttttgaagatatcatagactacaaaaagttttcagtatttgtggaaactacaactgcactaaaaccaggatatcttgcttcattgctgagaaaagtacctgaacagaaaataattgaatatcagaaagcaatgaaggaggtgatgaggtactatgactatactcatccaaatggaactgttaatgaaatatggcggcaagtatcgcaaaagctacctctgatcaaacttatgattaatagagacaagcggcttgttaaaagggagttgagtgaacccaattgctcatgtctttgttctaaccagacaggaatcatcgactccttaggataaacataaacttttgctgaccctttgaagttcatttcatatgtcaaatgtctgtccaagttggaagattcgctggtggagcgtggcaggcaggcttttgaggaataatttattatgttattacacccatttcccttcgcctttaggatgtttgtcttcagctggcagagctattgaaatttgcctttgcatgaagactttcttgcatacattgttgtggagtatatttggaattttagttatagttttatttgcaatttgatttgtacatgttagaaatacagtacgtctatatatacaacagcgatgctcaattcttttcctacaaataaaaatttaaat

SEQ ID NO: 10815 - DNA, 1131 bp, Gossypium hirsutum
  Clone ID: GOSHI-09MAY01-C2864_1
gaagtacgctatctcatgcaaacacatcagaagaatcaggtaaaggacacaattgatgtggatgaacctgaagggggagatccattaaccgctgaagagttggaagaaaaggagagactactagaagagggattttcttcatggagcagaagagatttcaatacttccattagagcttgtgagaagtatggacggaatgatataaaaagtattgcttcagaaatggaaggcaaaacggagcaggaagttcaacgatatgctaaagtttttaaagaacgatacaaggagttaaatgattatgataggataataaagaacattgaaagaggggaagccagaatctctagaaaagatgagatcaagaaagcaattggcaagaaattggatcgctacaagaatccatggctggaaatgaagatccagtatggtcaaaacaaagggaagctgtacaatgaagaatgtgatcggttcatggtttgcatggttcacaagcttggttatgggaactgggaggaattgaaggcagcattcagaatgtctcctttgtttcgatttgattggttcgttaagtcacggacaactcaagagctggctcggagatgcgataccctcatccggttggttgagaaggaaaatccaaaaatgtgacgagagggagcgacaagcccgcaaggaagaaagaaacttgccaagaacatgacaccatctaaccgcggtgggaggcacccaactgagagtcctactcaacaaaagaaacgcaagcagctatcaatggatgattatgcgaattcgcgtaaaaagaggaagtgagcgagcaatgtgaactacaaattttgggtctaaaatctctgatatttatttgggtttaaaagcagaaatatcagaacgaggaattgggctgtagtttgcatttggtatttcatggaactcttgaggctgggtgggaattaaccaccattaatggaaattagttcagggtataaaaggtgcataactgagtatagtgaggttaatcacaagggatctttaagaacaatctatctgttcttatccatctggatgtggaaccatatgtattatgctgaccattattattgaaattatattggagccggatacgattatgacaaa

SEQ ID NO: 10816 - DNA, 691 bp, Gossypium hirsutum
  Clone ID: GOSHI-09MAY01-C2804_1
atcaggttcccttaaattcacataaacagcatcggatccatccacccttacatccccagagacatacccgaaaagcttaagtggttacccctaaaaaattcccctaaaattttctccctaaccctaaattttcagcaaatccaaagccaaccgatctatccatcgccggacccgaccatctattgcatcgccgtcaactcgaccatatgctacgacaccgtggcactcctatgttgcaactaatcgggaattgaaacctgcgttagagaaattattggcggaggaattcacaatcttctgcagcagcttcacctgctacttcatcatcatatttactttcggatactgaatagaagagaaaggggaagaagggaaagataaagattttggttcgtcagctatcggactcgagagtgtcaaagtcgaagtcgcccacactatcaaagcccttttggtacactcttggttgaactctgaaaatggcatgtataggactaccctttttgttgttggtcatgtactctttggttttgtataaatttggatagccatgcgaaaatggcttatatacactttgagcatagcattataatcgttttgtatgttgttcaaaaaaaaaaaaaaaaaagaaaaatataaagcatttaaaattaataaataataaaacataaactaaaatggggggggggct

SEQ ID NO: 10817 - DNA, 772 bp, Gossypium hirsutum
  Clone ID: GOSHI-09MAY01-C2824_1
cggacgcgtgggcggacgcgtggggaaagcctgagtgcgcagacactaatctgaagcatcatctcgtgtttttgtgctcttagattctttgatagtgttcaaagtccacacaaggtttgagtgatggggaaggactcaaaatcaaaggaagcaaagggaaagggcaaacaagctggaggtggaagcgatgaaagtgcttcaaagggtaaagggaaagctgggaagggagatggccttggcacctgcacttacgttaaagcaaggcacatcttgtgcgagaagcaagggaagatcaatgaagcgtacaagaaactgcaagatggttggcttagcaacggcgataaggtcccaccagctgaatttgcaaaggtagctcaagaatattctgaatgcccttcagggaagaaaggtggagatttaggatggtttccgcggggtaagatggctggtccgtttcaggaagttgcctttaacacagtcattggagctaccagtgcccctttcaaatctacacatggataccatatcatcctctgtgaagggaggaagaattgaagcgagccaagatacagtcaggcagtgaagatgagttttatgttctatattaatgcagacatgaagtatgttcagtttgaaatattatccaatgattattcttcggatttgcaactgggataatgcttcttcttgttgaaaaatggcctgtaagttgatcttggatgtttgatgccaagatattttacatgttttcacatttcaaggtcttagttat

SEQ ID NO: 10818 - DNA, 742 bp, Gossypium hirsutum
  Clone ID: GOSHI-09MAY01-C2594_1
cacacacctactctgggggggggcgggtggggtatatatatatataggcgtgtgcaaaccccaaacacatccataagtatatcgcagcagccaagcaaacagaaagagaaaaacatgagaagccaaaatctaatggcaaccttcagaagatcaaagggtggaagacgatccaaggctattgaaggatgcaaaaaacacccaaaacacaagcaatcaccaggcgtttgttcactgtgtttacaacaaaaactctctcagctatcgtttgaatattccgtcccacgatgtcgtatccccgttacagttgactcttccatttgttcttcatcgtcatcatcatcttcatcttcttcgttgtcatcttattattcttcagcttcaacttctgcttcttcttctcctacgcatagctaccatttggttagagaaggaaagggtaattcgtttcccttgttactgttcagtggcatgaaaaggaattgtgggttcttctcaaagttgcttcatcatcacagcaacactaccaccatggttcattaatggtggtgtttttttatgggttttcagtcttcttcttcttctttttcccatatatatacatcagctgtgatcagttttctttgggtcattttttgactgatcatagcaaatccagttccaacaaaaagatatatatttgatcttgattgatcttgcttctatcagtcattgttattctcgtcccaacgatatatattaatgt

SEQ ID NO: 10819 - DNA, 404 bp, Gossypium hirsutum
  Clone ID: LIB3135-026-Q1-K1-F1
ggaaagggtaattcgtttcccttgttactgttcagtggaatgaaaaggaattgtgggtgctgctcaaagttgcttcatcatcacagcaacactaccaccatggttcattaatggtggtgtttttttatgggttttcagtcttcttcttcttctttttcccatatatatacatcagctgtgatcagttttctttgatcattttttgactgatcatagcaaatccagttccaacaaaaatatatatattttggatcttgattgatcttggcttttattaattaattggtttattttctccttaccaaacatgatattttatttaaatgcaatgttattgtgattttaagaagttatttttttggttctttttttttctcttttttttttattctgaatattctttt

SEQ ID NO: 10820 - DNA, 607 bp, Gossypium hirsutum
  Clone ID: GOSHI-09MAY01-C2584_1
cacacgagcaggctgcgggagggtgagattgccgatgttcatacgtctttttcactactatgctggttgggcggataagatccatgggctaacggttccggctgatggacctcatcatgttcagttattgcacgagccgataggtgttgcaggacggataattccatgggacgggcgggttcttatgtttgcttggaaggttgggcctgcattggcttgtggaaataccatagttttgaagactgctgagcaaactcctttgactgctctctatgtggctaagctgttccatgaggctggtctccctccacgtgttctgaatgtagtttcgggctatggtccgacagctggtgctgctcttgccagccacatggatggtgacaaggttgcattcaccggatcaaccgataccggtaagattgtacttgaattagccgcaaaatgcatatcttaagccggtgacgttagaacttggagggaaatcgcctttcataatatgcgaagatgctgatgttgacaaagccgtggagcttgctcattttgctttgttcctttaatccggggccatgttgctgtgccgggtctcgcactttttgttcacgaacgt

SEQ ID NO: 10821 - DNA, 520 bp, Gossypium hirsutum
  Clone ID: GOSHI-09MAY01-C2554_1
ctcaacattaaatgcttcgataaaaagaccaggcagcagtatacagaagggccacgagtcgagaaatacaagaacatgcttaagaggaaggcagaggagcaaggagctgagtttctctcctatgatcccatcaaaggagaatggaggttcaaggtcaatgggttcagcacatacaagttggaagatggagatgacgatggtgaagataaagagcactagtaaatgtaggcttttccggattaagaagatggggtcacttgtattcgaaggaagagcttcacagaaagccatggccaccgtgaagggttgatttgaattgtacaggaattgccaaatcgttcagagtaatacctgaaccgtgttgtgtttcgagtattggtttttgtatgcgtgtttgtatttgtattgttgtaattttctttctcgtttttaactttcaatgtgttacttctggattggcattttatcattttgtaatggggaagtgttggtcaggagggagatcggatttttgtgtctt

SEQ ID NO: 10822 - DNA, 781 bp, Gossypium hirsutum
  Clone ID: GOSHI-09MAY01-C2564_1
gttcttgtgttttgaagaattggcctgaaaggatattcaagttattgttgtaactgatggtgagcgtattttgggacttggggatcttggctgtcaggggatgggaattcctgttgggaaattgtctttgtacacagcactcggaggggttcgtccttcagcgtgtttaccggtgaccatcgatgtgggcacaaataatgagcagttgttgaaagatgagttctacattggacttagacaaaggagggcaaccggacaggaatatgctgacttgctacacgagttcatgagtgctgtcaagcagaactatggggaaaaagttcttatacagtttgaagattttgcaaatcataatgcttttacattgcttgcgaaatacggcacaacccaccttgtcttcaatgatgatatacaggggacggcatccgttgttcttgctggggttgtcgctgcattgaagttgattggtggtaccctagctgaccacaaattcttgttccttggtgccggggaagctgggactggtatagcagagcttatagctctcgagatgtcaaagcagacaaaaattcctgtggaagagacccgtaagaaaatctggcttgtggactcaaagggactgattgttaactctcgtagagaatcacttcaacacttcaagaaaccatgggctcatgaccatgaacctgttaaggatctattaggtgctgtctaggctatcaagccaactgttttggatgggtcatctggaggtggaagaacttctacgacggaaattttc

SEQ ID NO: 10823 - DNA, 942 bp, Gossypium hirsutum
  Clone ID: GOSHI-09MAY01-C2514_1
ccccgcgtccgccccgcgtccggccttttggtagaatgtttcatgggccttcacagcgatgtttttcagaaatacgtgaagaattggattgcaattgctgcaccattccggggtgcacctggatatattgcttctacctttttaaacggaatgtcatttgttgatgggtgggaacagaactttttcatttcgaaatggagcatgcatcaattgcttattgagtgcccatcgatatacgagttaatggcttgtccacatttccattggcaacatattccacttcttgagatatggagggagaaagaaggttgtgatggatatcctcgaactattctagaatcttatcgtccgggaaattgcattgatattttcaaggaagctctttctggcaacacggtcgattataacggagagatgattccattaccttttaatttggaaatcttgaaatgggttaaagagactcaaaaggtgttgtctcacgctaaggttccttccggagttaaattctacaatatatacgggatcaatcttgagacaccacacagcgtttgctacggaagtgaggaggcaccggtcacgaatatacaggacttacggttttttcagccccaatatatatgcgttgatggtgatggaacaattcccgctgaaatcacctaaaggcagattgaactccatgccgaaacccaggggtcaggccttccccggtgaagcacccggggaattcctttgttaaccttcacgttcttccgaaattcttcaaggaatggttttaaggctgggttaaaccgaacccttttctccctcccaattaaacaattgttgtttattttacccgacagcctttccaaaatggaaagtccccattaaaaaaggcttaacaagtaccttcacttccaagaaggaatgggaaaattttccccccaatcaggaacaatc

SEQ ID NO: 10824 - DNA, 776 bp, Gossypium hirsutum
  Clone ID: GOSHI-09MAY01-C2494_2
accaaatataattattaagaaaccgttttagttttaccgccggaaagagaaaggtttcgataattttatagagttacgatttaggaaaatcctgggagaggagaaagatggtatcgtcacctgtcgtgaacacgtatccactgtccagctacaccttcggcaccaaagagccgaagatggagaaggacacgtccgttgccgatcgccttgctcgcatgaaagtcaattatatgaaagagggcatgagaacaagtgttgaagcgattttactggtccaagaacataatcatcctcacattcttcttctgcaaattgggaacacattctgcaaacttcctggtggacgcctgaagcctggagaaaatgagattgagggtctgaagaggaagctgaccagcaagcttggagctaattcacctgctcttgtgccagactggcagattggtgagtctgtggccatctggtggaggcccaattttgagacaatgatgtatccatattgccctccccacattacaaaacccaaggagtgcacgaagccccccctcgccacttgtctgagaaagagtattttgcagaaccgaagaatctgaaacttcttgctgtaccattgcttgagctctacgataatgtgcagagatatgggccagtcatatcaaccattcctcagcagctttctagattccagttcaacatgatcagtatatgactttggcacgggatgccaagattgtgaatctttctgctcgctttctgacagctacatcatgagagta

SEQ ID NO: 10825 - DNA, 686 bp, Gossypium hirsutum
  Clone ID: GOSHI-09MAY01-C2494_1
cccacgcgtccgcacaatcgattttgccgccggggaaacaaacgtttcgactcgggggggggagagatggtaatgtcaccggtggttaacacgtaccctttgtccagctacacctttggtaccaaagagccgaagatggagaaggacacgtccgtcgccgatcgccttgctcgcatgaaagtcaattacatgaaagagggcatgagaactagcgtggaagcaattttattggtccaagaacataatcatcctcacattcttcttctgcaaattgggaacacattctgcaaacttcctggtggacgcctgaagcctggagagaatgagattgagggtctgaaaaggaagctgaccagcaagcttggagctaattcacctgctcttgtgccagactggcagattggtgagtccgtggccatctggtggaggcccaactttgagacaatgatgtatccatattgccctccccacatcacaaaacccaaggagtgcaagaagcttttcctcgtccacttgtctgagaaagagtactttgcagtaccgaaaaatctgaaacttcttgctgtaccattgtttgagctctacgacaatgtgcagggatatgggccagtcataggcagcaacctaattttagtccattcttcaacggatttaagtttttaatgttgtattaatgaaaatgcgtc

SEQ ID NO: 10826 - DNA, 328 bp, Gossypium hirsutum
  Clone ID: LIB3272-044-P1-K1-G4
tccttttttctgtaccaaatataattattaagaaaccggtttaattttacccgcggataaaaaaaggtttcgataattttatagaattaccatttaggaaaatcctgggagaggagaaagatggtatcctcacctgtcgtgaacacgtatccacttgtcaactacaccttctactccaaagtagcccgatatggataaagacacctcctttgccaatctccttgctctcttgaaagtcaatttttttaaataaggcatgaataccaattattaaaccatttttctggttctattacattatccttcctacattccttcttcttctaat

SEQ ID NO: 10827 - DNA, 578 bp, Gossypium hirsutum
  Clone ID: GOSHI-09MAY01-C2484_1
ctcaccagagactgatgctaagcttgctaagagatacgtcgaccatccatttgtgttgaaactgttggatttgtttgattcagatgatcaaagagaaagggagtatctaaagacgattttacatcggatttatgggaagttcatggtccatcggcccttcattagaaaagccatcaacaatatcttctacaggtttatttttgagacagaaaagcacaatggtattgctgaattgcttgaaatcttgggcagcataataaatgggtttgctttgccgttgaaggaagagcacaagctcttcttggtccgagcgctcattcctcttcacaagcccaagtgtgtgtctatgtaccatcagcaactttcttattgcattactcagtttgttgagaaagacttcaagttggctgataccgtcatcagaggccttctaaagtattggcctgtaactaatagttcaaaggaggtaatgttccttggagagttggaagaagttcttgaagctactcagacagcagaattccaacgctgcatggttcctcttttccgacagattggccgatgcctcaacagcttgc

SEQ ID NO: 10828 - DNA, 582 bp, Gossypium hirsutum
  Clone ID: GOSHI-09MAY01-C2454_1
gaaaaactttgaaacccaatttacccaatttttgagacgatgcggccctccaatttatgtaacctgtggtggttggtatgacaagcttgaagcattggagccttctataaagcaagtctcagactccatcaaacgtttggcagccgatacatctggctttttaccgcaccaagaaaagaatgaggggaagaatgccaagcgaccacatgaagcatcgggggacgattccaacgttgattctgcaatcaatatgtcaagagacgaggctatgaaagagaggacatcagcatccaacgaaattagtgattctgcgtataacatgttcagaaatgatgctttgaaggattctttcgagacaagcctagttttctttattggtcaattgaagagttttgcagaagcatctgtgaagatgtacacagaacttgacagggatattcgacaagccaaacataattatgaaatctctgtcaaaggagtcgaggttgccaatgaagaaaataacgctgagagcaacaaccaaagtggcagcgatcaacaaccgaagccgcaagtgtaaaaccatgtggagaagatgttggt

SEQ ID NO: 10829 - DNA, 1198 bp, Gossypium hirsutum
  Clone ID: GOSHI-09MAY01-C2444_1
ccccgcgtccgctctcactttctctctgtagtagaaaataaactgcttggctgtttgctcggcttcgcgtgggaaaaaaatgagggaatcctatctccttttcacactactagttttacttccttccaccctgcatttccaagctcatgctgcccctgctggaccattggtgaagcacttgtcttctttacttaaatggaccaggtctaccactaaagcaccccaatcagatggcaatgttcttcaatttgagaatgggtacttagttgagactgtagttgaaggcaatgagataggagttgttccttacaaaattcgggtctccgaggatggagaattatttgctgttgatgaagttaatagtaacattgttaagattactccaccattgtctcaatatagctgtggaagattggttgccgggtcatttcaaggttacacggggcatgtggatggaaagccaagtgacgctcgtttcaatcatcccaaaggtgtaaccatggatgataaagggaatgtatatgttgctgataccatgaatcttgccattcgaaagataggagatgcaggtgtcacaacgattgctggaggcaaatcaaatattgcaggatatagggatgggcctagcgaggatgcaaagttctcgaatgattttgatgtgatatatgttcaaccgacctgttcgctgttagttattgatagaggaaatgctgctcttcgacaaatctcacttaaccaagacgattgtgattatcagtatagttcagtttctcccacaggcactggccttttagcagatatcctaatggttcttggtgctatcttggccggctatgccacatgcttacttcagcaaggattcggaccttctttcttcccaagaatgcaaccttccgatagagaattcaaagaacaaccaagcaaggagaagttgactcctattgtcgatagcacgaaagaagtacctgggtggccatcttttggccaacttgtcgcagatctttctaagcttgcacttgaagcaatgggaagcatattcctctactttgtcccctcccgttttcaaccaaatagctcaaagaaaggtcttacaccaatgaaggattctcttataatgcctgaagatgaagtcccccctccgttagttcaaaggcaggccactccagcacccatttctgaaacccggcagacgcatacg

SEQ ID NO: 10830 - DNA, 567 bp, Gossypium hirsutum
  unsure (1)..(567): unsure at all n locations
  Clone ID: LIB3543-033-Q1-K1-G1
gtgattatcagtatagttcagtttctcccacanatatcctaatggttcttggtgctatcttggccggctatgccacatgcttacttcagcaaggattcggaccttctttcttcccaanaatgcaaccttccgatagagaattcaaagaacaaccaagcaaggagaagttgactcctattgtcgatagcacgaaagaagtacctgggtggccatcttttggccaacttgtcgcagatctttctaagcttgcacttgaagcaatgggaagcatattcctctactttgtcccctctcgttttcaaccaaatagctcaaagaaaggtcttacaccaatgaaggattctcttataatgcctgaagatgaagtcccccctccgttagttcaaaggcaggccactccagcacccatttctgaaacccggcagattcatacgactaatacagctgataagtattcggaaatgaagcctccgaagataaagtcaagcagttttagggatccttctttgtctagcaagcaccgttcctccaaaaaacaagaatatgccgagttctatgggcctggcg

SEQ ID NO: 10831 - DNA, 644 bp, Gossypium hirsutum
  Clone ID: GOSHI-09MAY01-C2464_1
cccacgcggcccttgagattgaagagtgtagaccccataataactggcctgaagttggaactatttgctttggaaacttggagatccgttatgctgagcatcttccatctgtcctaaaaaatattagctgcacatttccaggaagaaaaaaaattggtgttgtgggaaggacaggaagtgggaaatcaacacttatacaggctatttttaggattgttgagcctagagaagggagcattataattgacaatgtggacatttgtaagataggccttcatgacttaagatcaagacttagtattataccacaggaccctacaatgtttgagggaaccgttcgagggaaccttgatcctctcgtgcaatattcggataatgaagtatgggaggctctggataaatgccaacttggtgagatagtgcgtgcaaaggaagaaaagttggatgctacagtgattgaaaatggggaaaactggagtgtaggccaaaggcaattattctgtcttggaagggcattgttaaagaaaagcagcattcttgtactggatgaagcaacagcatcagttgattctgcaactgatggagtgatacagaagattattgatcaagagatcaaagatcggacagttgtgacaatagcacac

SEQ ID NO: 10832 - DNA, 503 bp, Gossypium hirsutum
  Clone ID: GOSHI-09MAY01-C2744_3
cccacgcgtccgcccacgcgtccggttttaagctgcaattcgaaaccccccagggaaaaaggaagggaaaaacacatccaaagaacccaagtcctgccctattgcatgcctttaaatttgatttcatggatgtaacaagcacaccggatagaaaagaaatggatcggatcaaaggtccatggagccccgaagaagatgagttgctccagcagctggtacagaaacatggccccagaaactggtcttcgatcagcaaatcaatccccggccgatccgggaaatcctgtcggctccgatggtgcaatcaactgtcaccgcaagttgagcaccgtgccttcaccccggaagaagacgagaccatcatccgagcacatgccagggttcggtaacaagtgggccaccatagcccgactcctcaacggccgtaccgacaacgccattaaaaaccactggaactccacgctaaaacgtaagtgcttgccggttggggaagagtgtaattt

SEQ ID NO: 10833 - DNA, 541 bp, Gossypium hirsutum
  Clone ID: GOSHI-09MAY01-C2744_2
ggggtggagtcatgcaaggtggtgtcaacccagccaataaccgagtcaactcagaatcggagtgaaaaaaggggaggtggggtgatggggttcagtgtggagtttatggcggtgatgcaaaagattataagccctcgcgtccggaattacatgacccagatgcagcaacagcagcagcagcaaaacggcgcagttccgggaggagcgggaatggggatgtgtttggatggggggttcaggaatcttatggctgtgaaccgagtcggggtgagtaagatcgagtgaaaggttaaaaatgagagtaaaagatgagaaaaaactgggctgtgttttttcttggtatgggaattaggcggtgaataattttgttcattttacggagagagagatgggtgaaaaagctgaaaaatggcgagtaaaagaaaaaaacggcgacttttctaatgaaaatttacctgtctcttagccttgtttttagtagatattagtgaaggaagccaacggaaaaaaagaaaggaaaaaatttccctttgaaatttcc

SEQ ID NO: 10834 - DNA, 1110 bp, Gossypium hirsutum
  Clone ID: GOSHI-09MAY01-C2744_1
gtgaaaaaccggccggaccaacccgtccgggaagcccccaggggaaaaaaaaattctctcacacacgcacacacacttccaatgagcccatgtccttccctattgcatgcctttcaatttgatttcatggatgtaacaagcacaccaaatagaaaagaaatggatcggatcaaaggtccatggagccccgaagaagatgacttgctccagcagctggtacagaaacatggccccagaaactggtcttcgatcagcaaatcaatccccggccgatccggtaaatcctgtcggctccgatggtgcaatcaactgtcaccgcaagttgagcaccgtgccttcaccccggaagaagacgagaccatcatccgagcacatgccaggttcggtaacaagtgggccaccatagcccgactcctcaacggccgtaccgacaacgccattaaaaaccactggaactccacgctaaaacgtaagtgcttgccggttggggaagagtgtaatttcgttgctaatggagggtatgatggtaatctgggtggagaggaacggcaaccgttgaaaagatcggtgagtgctggtctatacatgagtccagggagcccatcgggggcggatgtgagcgattctagtgttcccgtcttatcatcttctcacgtgtacaagccgatcccaaggaccggcggtgttaacgttgatgtaaatgttacgccaccggcgcggggggcggcatcatcttccaacgatccaccgacctcactgagtctgtctttaccgggggtggagtcatgcgaggtggtgtcaacccagccaataaccgagtcaactcagaatcggagtgaagaaaggggaggtggggtgatggggttcagtgcggagtttatggcggtgatgcaagagatgataagggttgaggggaggaattacatgacccagatgcagcaacagcagcagcagcaaaacggcgcagttccgggaggagcgggaatggggatgtgtttggatggggggttcaggaatcttatggctgggaaccgagtcgcggtgagtaagatccagtgatagggcctaaatgtgtctcgttgtaggaaaaaaaggccaatttttttaatt

SEQ ID NO: 10835 - DNA, 426 bp, Gossypium hirsutum
  Clone ID: LIB3145-021-Q1-K1-H3
cgtaagcggcatcatcttccaacgatccaccgacctcactgtgtctgtctttacctggggtggagtcatgtgaggtggtgtcaacccacccaatatcggagtcaacttaaaatcgcattgaagaaaggggaagtggggtgatggttttcactagcgtgttttatggcggtgatgcaagagatgataatggtggaggtgaggaattacatgacgcatatgctacaacaggctcagcagccaaactactcatttccgggagagatctgaaatggggatgtgtttaaatggggggttcaagaatgtcatggctgttaaccgagtcgggatgactatgatcgagtgaaaggctaaaaatgagagtaaaagatgagaaaaaactgggctgtgttctttcttgctatgggaattatgcggcgaatatttttg

SEQ ID NO: 10836 - DNA, 466 bp, Gossypium hirsutum
  Clone ID: GOSHI-09MAY01-C2764_1
taccttcctgccatttaccctgtctgctcaaaattaacatcactgaacctgagctatgctactatacccaaagtcctgacttatcaagcttgtaagccactgtccgaatttgcagcgcctattggtaagcttattatggggggtggctggtttattttatttgcatctggtttttcgttcttaacgtaggttatggttcacaggtaccttgattacattgaagatagtgggctttgaggtgcttgcatctagttgcaaggacttgcaggaattacgcgtgtttccatctgatccatttggtgcagagccaaatgtgtccttgtcagaacagggccttgttgccgtttctttgggttgtcccaagcttcattcagttttgttcttctgccgcccgctgtcttttgcggctttagttccccttgctcggagccgtccaaacttcacaaggtttctcctttgcttattt

SEQ ID NO: 10837 - DNA, 500 bp, Gossypium hirsutum
  Clone ID: GOSHI-09MAY01-C2714_2
gggaaccctaaagcagagcagaagcgaaagattaagataaaaggatgaaatacctgaagcagcaggagaagctgaagaagatcatcagtgcatcaggatatcaagaaaagttccatctcacattcaagaagagaatgcaacaaagctggcaaaacttctccaagaattcgagtttttcaagaaagaaagtgatcgtttagaatctgaatcccagcatcaaaagtaaggttaacccctcccttttgagtttcttgattcgaatgataatttggatggcattattaacccctcccttttgagtttcttgattcgatgacaatttggatggcattacacttttctttttgatgattgttttgttactgtctaaacctcaccaatacttttgtttatttttaacatttgatgcttgccatgtttgttatacaagagtttacccagttagttaatagtatgacaatttcccactttgctcaaaaaaaaaaaaaaattaaataatt

SEQ ID NO: 10838 - DNA, 1352 bp, Gossypium hirsutum
  Clone ID: GOSHI-09MAY01-C2714_1
ggggtaacttggatcctaatgagctggccactgccaaagaagggcagccgtccgccctcccgtccggtattgctggatgtggtgctgatgctctccggtttgctcttgtttcctacaccgctcagtcagataaaatcaatttggatatcctaagagtggttggctatcgtcaatggtgcaacaaattatggaatgctgttcgttttgccatgagcaaacttccggatgactatactcctccatcaaccataaatcctgagacaatgcctttcagttgtcgctggatactctcagtgttaaacaaggctatatcgaagaccgtattgtcattaaattcatatgaattttctgatgctacgacctgtgtgtattcttggtggcagtatcagttctgtgatattttcatcgaagcaatcaaaccttactttgctggtgataatccagctttttcctctgaaaggaaatttgcacaagatgctctttgggcttgtttggaaataggcctgcgtttgcttcatccatttatgccattcgttacagaagaactgtggcagcgccttccaggagtaaagagccacacaaagaaagaatctataatgatgtgcgattacccgtcaccaattgagagctggacaaatgaaagggtggaatatgaaatggaccttgtagagtccactgtaaggtctcttaggtcacttcgggccgagctgcttgctaagcagaagaatgaaaggttacctgcttttgcattatgtcaaaatgatgaagtggcgaaaataataagatcttgtgaattagagatcttaacccttgccacgttatcgtctttcaaggttctactaagtggtgtggatgatgctccagctggatgtgcatttgaaaatgttaatgaaaaccttaaagtttatcttaaggttcatggaaccctaaatgcagaagcagaacgcgcaaagattaagaataaaatggatgaaatactgaagcagcaggagaagctgaagaagatcatcagtgcatcaggatatcaagaaaaagttccatctcacattcaagaagagaatgcaacaaagctggcaaaacttctccaagaatttgagtttttcaagaaagaaagcgatcgtttagaatctgaatcgcagcatcaaaagtaaggttaacccctcccttttgagtttctcgattcgaatgataatttgaatggcattacactatctcttcttttttatgattgttttgttactgtctaaacctcaccaatacttttgtttatttttaacatttgatgcttgccatgtttggcatacaagaggttacccagctagttaatcgtatgaaaatttcccactttgctt

SEQ ID NO: 10839 - DNA, 626 bp, Gossypium hirsutum
  Clone ID: GOSHI-09MAY01-C2704_3
cccacgcgtccgcccacgcgtccgcaacggtccaaacgctttggccttctttggaatttgtaattttccgaaagctgaagtggccggaactgtggcctaacctcaggaatatataaaagggtgaagatgggaagaggaaagatagagataaagaggatcgagaacaccacgaatcgtcaggttacgttttgcaagcgcaggaatgggctgctgaagaaagcatacgagctgtcagtcctttgtgatgcagaagttgctcttatcgtcttctccacccgtggccgcctctacgagtactccaacaacaacataagatcaacaatagagaggtacaagaaggcatgttccggtacctcaaacacaaataccgtcacggaaatcaatgctcagtattatcaacaagaatcagccaagttgaggcagcagattcaaatgctacagaattctagcaggcatctaatgggagattcgttgagttccttgacagtgaaggagttaaagcagctagagaatagacttgaacgagggattactagaatcagatcaaagaagcacgaaatgctgctagctgaaattgaatattttcagaaaagggaagttgagctggaaaatgaaagtgtatgtct

SEQ ID NO: 10840 - DNA, 944 bp, Gossypium hirsutum
  Clone ID: GOSHI-09MAY01-C2704_2
aatgggaagaggtattttggtaagagttccggccaattctctttgatcacttgtacctgaggtattttggtaagagtgatcaaagagaatgggaagaggaaaaatagagataaagaggatcgaaaacacaacaaatcgtcaggttaccttttgcaaacgcaggaatggcctgctgaagaaagcttacgaactgtcagtcctctgtgatgctgaagttgctctcattgtcttctccagtcgaggccgtctgtatgagtactccaacaacaacataagatcaacaatagacaggtacgacaaggcttgctccggtacctctaacacaaacaccgtcacggaaatcaatgctcagtattatcaacaagaatcagccaagttgaggcagcagattcaaatgctacagaattctagcaggcacctaatgggagattcgttgagttccttgacagtgaaggagttaaagcagctagagaatagacttgaacgagggattactagaatcagatcaaagaagcacgaaatgctgctagctgaaattgaatattttcagaaaagggaagttgagctggaaaatgaaagtgtatgtctccgagctaagattgcagagatagagagggttgaggaagcaaacatggtaacaggagcagagctgaatgctattcaagccttggcatctcgcaatttctttactccaaatgtgattgagagaggaactcccactccctactcccaccatgacaagaagattctccatcttgggtagagagagttggagagaacaaatctgaaaagggtgttgtgatattatgagattaaataaggatgcatttcaaccatatgtactctacatatattatgaagctgtcatgtaatttggtacttgttttggtctgttatattgtctgaaaacctatactagtgtaacgtgtttaattttgtgtgtt

SEQ ID NO: 10841 - DNA, 857 bp, Gossypium hirsutum
  Clone ID: GOSHI-09MAY01-C2704_1
gctccctccctataatatcacctataagcttaggcctaccctccccgcggccgccctattaaatatatactctcaaaacactttgctttctttgggattcgtgattttccgaaagctgaattggccggaactcttaccaaaatacctcaggtacaagtgatcaaagagaatgggaagaggaaaaatagagataaagaggatcgaaaacacaacaaatcgtcaggttaccttttgcaaacgcaggaatggcctgctgaagaaagcttacgaactgtcagtcctctgtgatgctgaagttgctctcattgtcttctccagtcgaggccgtctgtatgagtactccaacaacaacataagatcaacaatagacaggtacaagaaggcttgctcagatacttctaacacaaacactgttactgaaatcaatgctcagtattatcaacaagaatcagccaagttgagacagcagattcaaatgttacagaattctaacaggcacctaatgggagattccttgagttccttaactgtgaaagagttaaagcaggtagaaaacaggcttgaaagaggaattactaggatcaggtccaagaagcacgaaatgctgctagctgaaatagagtttttgcagaaaagggaaatcgaattggaaaatgaaagtgtttgtctccgaaccaagattgcagaaattgagaggcttcagcaggcaaacatggtgactggacctgagcttaatgctattcaagctttagcttctcgcaatttctttagccccaatgtcattgagcatccatctgcttactcccatctctctgactagaagattctccatcttgggtagaagagttggagaaaac

SEQ ID NO: 10842 - DNA, 447 bp, Gossypium hirsutum
  Clone ID: GOSHI-09MAY01-C2654_1
cgctctggtttcgtgtgtcattacgggggggggagggggggagctatgaatcacgcgtttatgcagtattgttgttgaaatcaatggtggagatggctggtccaatgcagctcgtcaatttgagacctgaattattcgttgaattagtcaaagttttgtgtgatcaaatttctcagcgggccccgtaggctgctctaaaattgttggtctatacctgtccattgggaagaaacaagattaaagcagctgcagcaggcgtggtaccggtcttgatcaacatgcttcttgattcatcagagaaaagggcttgtgagatgatcctaacagtgttggacgctgtttgctgatgtgccgaaggccgattggaacttataagccatggaacatggcttgcaattgttcaaagaagatacttaagatctttcatgtttcaagtgaaatggcatt

SEQ ID NO: 10843 - DNA, 1693 bp, Gossypium hirsutum
  Clone ID: GOSHI-09MAY01-C2674_1
gcgcctttttcgtgcgcatggagctcaggggctgcacctgatgatccacgtggacctactcctgccactagaaatagaacgcacatatagggcagcgatggttcagcataatggcctgggtctgacggcgggaggagcagctaaagaatggcaggacgagacatagctggaatggagaacacaatccttattatcggtgctatagtagcgaacaggttggcgcactcgtccgccaggaggtcatcctcggacttcgaaaagctcggcaatcaaccccttgctcctcttgcttctaatgaagtgcaagaaataaaatcagtcaagtcctcctcttcacttgatagccaggcacttgatacacccatttcaataagccttcgaccccctcctattgaccgtcacaaatcattcgatgatgaagagttttctaaaaagcctgttgttgttaagaaagctgtaccggctcctacaaatgttacatcatattcgatagcagacctccagatagctactggcagtttcagtgttgaaaatcttcttggtgaagggtcatttggacgtgtttatcgagctcaatttgctgatggcaaggttcttgcggtgaagaaaatagactcatcggctcttcccagtaacatgtctgacaatttcatggagatggtttcaaatatatcccagttgcatcacacaaatgtaaccgagctggttggctattgttcagagcatggacagcacctgcttgtctacgagttccacaaaaatggctcacttcacgatttcctgcatatatcagatgagtacagcaagccattgatttggaactcccgtgtcaaaattgctctggggactgcacgtgcattagagtacctccatgaagtttgctcgccatctgttgttcataaaaatatcaagtcagctaacatcttacttgatgctgaactcaaccctcacctttcagactcgggcttggcgacctttattccaaatgcagatcaggtactaaatcgtgatgatgtggggtctggatactgtgcacctgaggttactatgtctggtcagtactctcttaagagtgatgtttacagttttggagtggttatgttggaacttctcactggacgtaagccatttgacagcacaaggcctagactggagcaatctttggttcgatgggcaacacctcaactccatgatatcgatgctctatccaagatggttgacccggcacttaaagggctttaccccgttaaatctctctcacgttttgccgatgtgatcgctctttgtgtccagccggagcctgagtttcggccacccatgtcagaagtggttgaagcattggttcgactagtgcagcgagctaacatgagtaagagaacaacagggacagaccaaggtgcatctccacgaatcggaaaccccgatgatacacacgactacatgtcttaaatggttgcacaattcttgcttgattgttttggtgaccaggactctgagattggtatcatgtttgaatggcttttttttttttgtaaaataattatacatccctttagttacaatttcaattaagttctgcactttgtaatatgttagtatatagtccatttggtgagacccatccaatgaaattatttcacccttctgtacatgtttaacttgtaaagcatcctttttttctcaacacaataat

SEQ ID NO: 10844 - DNA, 651 bp, Gossypium hirsutum
  unsure (1)..(651): unsure at all n locations
  Clone ID: AI727535.1
ttgtaagccatttgatagcacaaggccaagactagagcagtttttggttcgatgggcaacacttcagctgcatgatattgatgctttatttaagatggttgaccctgcacttgaagggctttacccggttaagtctctctctcggtttgccgacgttattgcactttgcgtccagccggagcccgaattccggcttcntatgtcggaagtggttcaagcattggttcgactagtgcaacgagctaacatgagtaagagaacaatagggacagaccaaggtgcatctcagagaaccgataacgttgtcgctgatgatgcacatgactacgtgtcttgaatggatatgaagtagacgctttgactgttatggtgacgaggactttagattgtaatcatgtcgagtattattgttttatggtaatattattgtaactaataaaaacatacaccccctaactttagcctaagtttcaaatcagcccttcacttggtaatatgttgcatgtagtccaaccccatcaattgaaattctttcaccgttgtgtgcatgttaaacactacattttccattttattcccttcgataaatatcacaggaagctgcagatgtaataatgccctaaaaaagtaaaattctacaaatatttttcc

SEQ ID NO: 10845 - DNA, 447 bp, Gossypium hirsutum
  Clone ID: LIB3585-051-P1-K1-C6
gcgtccgaattgactcacccaattcattacgtcgcttgcccgctattattgaccggcactaatcataggttgatgtacagtccattatacagcctgttgttgttaagaaagctgtaccggctcctacaaatgttacatcatattcgatagcaggcctccagatatatactgtcaattttatcgttcgaaatattctacgtgatagctcatttatacgtgtatataaagctacaatatgttgacggcatggacatcgcggtgactaaaataaacttatcgtctcttaccataaacatgtctgacaatatcatggttatggctgctaatatattccagatgcatcacacacatgtcaccctttcgaacagctattgatcatagcatggacatcacctgctcgtttacgagttccacaaaaatcgctcactttacgatttactacatata

SEQ ID NO: 10846 - DNA, 628 bp, Gossypium hirsutum
  unsure (1)..(628): unsure at all n locations
  Clone ID: AI055521.1
cacagttgccggcaatctccaccactgagtaaatgccaggcccaggtccccacctcatgtatgctatgagctcgggcctagctctgacccatctcaccaggggacgtttctcccctcaccacacccttacctatactctcaacgccttcttcggccctgacataggctccttctcggagtggctaacctctgttctcttccttgattcttccgttctcgcttttttagctgattcaatccatcaccctgtttatgatgtcttgattctggggcttcctttatgccttttctactcctgggcatcaggtgttttggtgaaaagaagccttcttgattctgtttcaggggtgccactttcaaggaagcaatgcttattgttgatatcagctggttctttttcccactttttccttgaccatttatttgagaccttatacaaagatnaacatacaggaaaatggtaagtcatccatgtatacttggatattgagcacttgctggtggataaaccgtgcacctgttaaccagatgctgtggtgtagttggattctgtgcacttgttaattggtggcttattacatcacagagtgggttgccaaattacagaaacatcatccatcatgaactt

SEQ ID NO: 10847 - DNA, 561 bp, Gossypium hirsutum
  Clone ID: LIB3584-006-P1-K1-B5
cacgccttcttcggccctggcacaggctccttctcggagtggctaacctctgttctcttccttgattcttccgttctcgcttttttagctgattcaatccatcaccctgtttattatgtcttgattctggggcttcctttatgccttttctactcctgggcatcaggtgttttggtgaaaagaagccttcttgattctgtttcaggggtgccactttcaaggaagcaatgcttattgttgatatcagctggttctttttcccactttttccttgaccatttatttgaggaaaatggtaagtcatccatgtatacttggatattgagcactggctggtggataaaccgtgcacctgttaacccagatgctgtggttgtagttggattcctgtgcacttgtttaattggtggcttcatttacatcaacagagtggggttgccaaaatctaccagaaaacaatcataccattcaatgaaacttattatgatcatagcaagcctgtattctttctggtgggcaagccaattatactgggctaatcctcgacggccagcagtttgg

SEQ ID NO: 10848 - DNA, 466 bp, Gossypium hirsutum
  Clone ID: GOSHI-09MAY01-C2604_3
cggacgcgtgggcggacgcgtgggcggacgcgtgggtttttctgggacgcgagagtataaattattggctgacattgcttctgctattgacgaggaagatgtctcaaagtttacggaagttgtcaaggaatttgatagcatgaccccattggattcttggaagacaacccttttacttcgggtgttaagtaaagctgtatgtctaatgagctggaagaagatgatcttacctaaaagagctttgcgtcgtgagagttgcctgtgtttctcagtttttcattttaatggtgattgctttgttttatgtgtctgtgtgcaattatactccgtatactctcccttataacaattatttccggaaatgtttcacttgtttggccttaaattttatgatttacgctgatgatgattatactgctggttctgttccttgtgttactggatttcaaaaaacaaaaggagcaag

SEQ ID NO: 10849 - DNA, 684 bp, Gossypium hirsutum
  Clone ID: GOSHI-09MAY01-C2604_2
aacttttcaaatatttgcccaaagacagcctaaccgggcacaaaaggaaagttaggcgggtggggctcgtttggctccaaacacgaagacgcccccgagctatttgataaagcggccaattgcttcaagctcgccaaatcatgggacaaagctggatcaacttatgtaaagttggcgaattgccacttgaaaccagacagcaagcatgaagctgctcaagcttatgttgatgctgctcattgctataagaagacaaatgtaaaggaggctatatcctgcctgaaagaggcagtgaacatgttttgtgatattggaaggctcagcatggctgccaagtattataaggtgttttttatccattaatatgcgagtctttcaagggaaaaaggagtttgtcattcattgtaattgtttatgtatatgtggttgcctttcattttggttgggttcataattttttcctaattgttcattagcaatgttgccactagagttaaagctcccaagcatctgtgcttctcataagtctcgtttagcattcttgttggtacaacttataatgccagaagttatgtttcactgcaaatttgatgctaaatggtaaaaagtttaggcttctgtgttttaaatcttggtttgacaatgcaaactaacatgctaagaaaaatgaagcttttttggttt

SEQ ID NO: 10850 - DNA, 1214 bp, Gossypium hirsutum
  Clone ID: GOSHI-09MAY01-C2604_1
tttttccccaataaatcataagggtgggtgagggtgttgtttttttttttttaaatgatctctgtcaacaaagtaaagaaaacatagggggggggggggtgcccacgcgtccgcccccgaaaaaaatgggagatcagttagcgaaaggagaagaattcgtgaagaaagcagagaaaaagctaaatggttggggcttgtttagttctaaatatgaagacgccgccgatttatttgataaagctgctaattgcttcaagcttgccaaatcatgggacaaagctggatcaacttatgtaaagttggcgaattgccatttgaaatcagacagcaagcatgaaacagctcaagcttatgttgatgctgctcattgttataagaaaacagctacaaaggaggctatatcttgcttgcagcaagcagtgaacttgttttgtgatattggaaggctaagcatggctgcaaggtattataaggaaattgctgaattatacgagtctgaacagaacattgagcaggccatggattattttgaaaaggctgctgatttcttccaaaatgaagatgtgtcttcttctgccaatcaatgcaagcagaaagttgcacaatttgctgctcagatagaacaataccagaaagccattgagatatatgaagagatagcgcggcaatcacttaccaataacttgctgaagtatggagttaaaggtcatcttcttaatgctggcatttgtcaactctgcaaaggtgatgttgtagcaatcaccaatgcgttagagcgatatcaggatctggatccaactttttctggaacgcgagagtataaattattggctgacattgcttctgctctggacgaggaagatgtctcgaagtttacggaagttgtcaaggaatttgatagcatgaccccattggattcttggaagacaacccttttacttcgagtgaaagaaaagctgaaagctaaagagctggaagaagatgatcttacctaaaagagctttgcgtcgtgagagttgcctttgtttctcagttttccggtattttaacagtgattgcttcatattaagagtcggggtccggttatactgttatacttgcttacaagtattggtttaggagattttactttagaactgcgctggttattgggtacaaatgagtttgtaattggaatactcatgtttttaaatgaagttaaaataattgaatac

SEQ ID NO: 10851 - DNA, 370 bp, Gossypium hirsutum
  Clone ID: LIB3189-006-P1-K1-A3
cgcgtccgtattatctgctcctcttagtttccctttttgtcccttgattatttgatactcccacctcatggctgccgctgatgatcgagttacgaagccaaatgtaaaggatgctatatcctacctgatagaggcagcgaacatgttttgtgatattggaaggctcaacatggctgccaagtattataaggaaatagctgaattatatgagtctgaacagaacacttgacattccattgattattatgaaaaagcagctgatttcttccaaaatgaagaaatatcaacctctgtcaaccaatttgtagcaataagttgcacaattagttgttcagatatgaacaataccagaaagctgttgagatctatg

SEQ ID NO: 10852 - DNA, 386 bp, Gossypium hirsutum
  Clone ID: uC-gsflmaxxa040c02b1
gtggttcagttagcgaaaggagaagaattcgtgaagatagcagagaaaaagctaaatggttggggcttgtttagttctaaatactaagacgccgtcgatttattttgattaagctgctttttgctttaagcttgccatatcatgtgacaaagctgtttctcctttttttatgttgcttttatgttttttgattttttatcttacttatttttttattttatgtttttttatcttttcattttttttttttctatcctttctatcttctgtttattttttttccattcttatttttttcttttattctttttttctttcgttcttttatttctttatcttcttatatttttcctctcaattttttctcctattttttcttttatttt

SEQ ID NO: 10853 - DNA, 296 bp, Gossypium hirsutum
  unsure (1)..(296): unsure at all n locations
  Clone ID: LIB3135-005-Q1-K1-A12
gaanaaaaggaacgacccacgcgtgcgcccacgcgtccgtttagttctaaatatgaatacgccgccgaaggaaaagataaaaatgtttgttgtgtttattctttccaaatcatgggacaaagcnggatcaacttatgtaaagatggcgaattgccatttgaaatcagacagcaagcatgaaacagctcaagcttatgttgatgctgctcattgttataagaaaacagctacaaaggaggctatatcttgcttgcatcaagcaatgaacttgttttgtgatattggaaagctaaaca

SEQ ID NO: 10854 - DNA, 516 bp, Gossypium hirsutum
  Clone ID: GOSHI-09MAY01-C2184_5
ccctcgcgtccgaaatctttcatttctcgagtctttttcggggttttctcttttttttttcgtcggatcttcaacacttttttcaaaaatggctgagcacgaagagaagaagcacgaggaatcgttgatggaaaggatagccgagaagatccaaggtcatgattcgtcgtcatcggattccgataatgacaagccatcggaatcatcgatcaaggccaaggtcttccgtctttttggaagagaaaagcccgttcaccacgttctcggtggaggcaaaccggctgacattttcctttggaggaacaaaaagatatcggcaggagcgctcggtgtcgcaaccgtgatatggattttgtttgaaatgctcgaataccaccttctaacactagtgtgtcatttgttgatacttgctcttgcattactcttcttgtggtcaaatgctgctacctttattaacatgtctgcaccaagcattccttaatgtttaaattcctaaagacccatttatagtttttt

SEQ ID NO: 10855 - DNA, 554 bp, Gossypium hirsutum
  Clone ID: GOSHI-09MAY01-C2184_3
gtttgagattaacaggggtttcgccgtcctgcgggatattgcatcaagaagagatcttaagaagttcctctctgtgatcaggggcttgggggtctcgtctattgtgggaagttggcgcaacttcttgacgctggtctacatagtcttcgtactactgcacaccgtgcctgtgctgtacgagaagtatgaggacaaggtggaccccttggccgagaaagcatggcatgagatcaagaagcaggatgcagtgtttgatgcaaaagttctgagtcagattcccaggggaccgttgtagcagaagaagaaggattcgtttaccggtcaggatgttggtgctgctaggtcctgacgtccgtatgccagctgggtgttgagttttatccagtatcagttagaatcctgcttttatccttttcttttgtagtaactgggttcaaaatgatgatgaatatggaaactttttttttcttaacatctttggttctgctgtcatacatgggagctgtccatggatttatatgctatgtgagacatatgttattgtatgcatgttg

SEQ ID NO: 10856 - DNA, 1229 bp, Gossypium hirsutum
  Clone ID: GOSHI-09MAY01-C2184_2
cccagcgtccgcccagcgtgcgggaagggaacagatacccccgcggccgcccacccctccgatttccgtttctcgagtttccttttcgatcttcaaactcgtagttgggcttatagaaatcctgtgggaaaataatgttctgcatcacgcaaggacatagcacgcaggcacatcgtgtgtgggggaggagagagtatcatgagaaggtaaccaaaggaccatgcatattattctgtcctacctacctcggcattcctgatgatctacaatgccatcagcaatcctccatgaaggccaaagtcttccgtctgtttggaagagaaaggcccgtccacgacgttttcggtggaggcaaacaggctgatattttcctgtggaggaacaaaaagatttcggcaggagcactaggtgttgcaactgtgatatgggttttgtttgaattgctcgaataccaccttctcacactagtctgtcacttgttgatacttgctcttgcattgctcttcttgtggtcaaatgctgctccgttcatccacaagtctccaccgcgcatcccggaagttcaaatccccaaggacccggttttagagtttgccctggcgcttaggtttgagattaaccgggctttcgccgtcctgcgggatattgcatcaggaagagatcttaagatgttcctctctgttattgctggattatgggtcttgtctattgtgggaagttggtgcaacttcttgactctgttctacatagtcttcgtactacttcacactgtacctgtgctgtacgagaagtatgaggacaaggtggatccctttgccgagaaagcaatgcatgagattaagaagcagtatgcagtgtttgatgcaaaagttctaagtaagattcctaggggaccgttaaagcaaaagaaagattacttcccgcgcgtgcggttgatgctgctaggttcagaggttagaaatacatctggtagctgtatggcatgaagttgttgagttttatccagtatcagttagaaccctgcttttatccttttcttttgtagtaactgggttcacaatgatgatgaatatgggaaactttttttttcttaacatctttggttctgctgtcatacatgggagctgtcccatggatttatatgctatgtgagacaatatgttattttattgcatgttgattaatggattgtacaccgaattgcaagttctttggaaatttttctggtt

SEQ ID NO: 10857 - DNA, 1210 bp, Gossypium hirsutum
  Clone ID: GOSHI-09MAY01-C2184_1
ccccgcgtccgctcaaatcttacatttctctgtgtttccttttctttcaatattcaaaaacgtttcaaagcgagtagttggttttttttttcttttaagaatttgtgtggaaaaaaaaaagaaaaaaaatggctgagcacgaagagaagaagcacgaggaatctttgatggaaaagatagcggagaagatccatggtcatgattcatcgtcatcgtcgtcggattccgatgacgacaagcaatcggaatcttcgatcaaggacaaggtgtttcgtctctttggaagagaaaagcccgtccaccatgttttcggtggaggcaaaccggccgacattttactgtggaggaacaaaaagatctcagcaggagcgcttggtgttgcaactgtgatatgggttttgtttgaattgcttgaatatcacctgctcactctagtgtgtcacttgttgatacttgctcttgcattgctcttcttgtggtcaaatgctactcagttcatcaacaagtctacaccgcacatcccggaagttcaaatccctaaggacccagttttagagtttgcccaggcacttaggtttgagatcaaccgggcttttgctgtcctacgggatattgcatcaggaagagatctcaagaagttcctatctgtgatcgccggcttatgggtcttgtctattgtcggaagttggtgcaacttcttaacactgttttacatagtcttcgtacttcttcacacggtacccgtgctttacgagaaatacgaggacaaggtggacccatttgctgagaaagcaatgcatgagattaagaagcagtatgcagtgtttgatgcaaaggttctaagtaagattccaaggggaccattaaaggagaaaaagaaggattagatttaccggccaagagggtttctgacatacatttggtagctgccttccgtgaaaatgtgttatttactatatatcctgtatcagttagaaccctgtttgaatattttttcggttttagtacacaatgggttcaaaaagtttgatgaatttggcatctttttttctaaatcttgtttagttgttttttgatatggatccatatgctatgtgacgatatgttatcatattgcatgttggttggaatacattgagttgaaagttttttcaacttgcgttgtatatcttttcagaatgatcgagtcccccttgtgattgtgacttct

SEQ ID NO: 10858 - DNA, 480 bp, Gossypium hirsutum
  Clone ID: uC-gsronu33B167a05b1
cccatgcgttcgcccacgcgtccgggttctaagtaagattccaaggggaccattaaaggagaaaaagaaggattagatttaccggccaagatgtgcttttgctaggtttctgacatacatttggtagctgccttccgtgaaaatgtgttatttactatatatcctgtatcagttagaaccctgttttaatctttttccggttttagtacacaatgggttcaaaaagtttgatgaatttggcatctttttttctaaatcttgcttagttggtttttgatatggattcatattctatgtgacgatatgtttttataattgatggtggttggaatacattgagttgaaaggttttcaaaaaaaaaaaaaatataaaaatgcttttaataaaatttttttataaatattatcaatattttctaaaaagggccttctggacgaaataagggcctttgttattcttgatacaattttttttatatt

SEQ ID NO: 10859 - DNA, 1164 bp, Gossypium hirsutum
  Clone ID: GOSHI-09MAY01-C2154_1
caagaaacagcaccccccccgtccgaccgaggaagaggccctcgcgtccccttgggctgtcccttggtgggtgtttctttaggttttcttggtcgcgacgattttcagtggcttgtaaatggcagcgtataggctcctgattttctccctctttttggccctagttttcaccaagattggagccgatgcctcaactgaaccgctgattgaatcggacgccgccgattcttctgctcttaagatggagttggatcaactgaagtctaagatccgtcttcttgaatcaaatgttgaggagaaaattcgagaattgaaaaccaaggatgagatgataaagcagaaagataaaattatagaagaaaaatctgacaccatggcatcgttgcactctgaattatcatctcttcagaaaaaaggaaccccagatgctgaggaacgggtgggaaaagctcatgcgaaagctcttgaattgcagaaacaggttgatagacttaaaactgaactagaagcaaaattgaaggaaaaagattatttagaatcccgtgcaactaaagctgagaacaagttgaatgaattgaatttgcagctagagaatcttcaaaagatcaataaggaacaggagaacaaactagcaaaaactgagcgagctctaaatattgcagaggaagaactggtaaaggcaaagtttgatgccacttcaaaggcaaatgagttgatggaggttcacagcgcatggcttccaccttggcttgctacacagttaattcgtggtcaggccttcattcagacacattggaatcagcatggaaaaccaaacatggatatggtgatccagaaggctctagagaaaaaggccttagctaaaaagtgggctgaaccccacatggaagcaattaaaaccaaatgggttccagctgctaaggatcagtgggtggcggtaactacatatgctgaaccacatgtgcaatcgctcactgcaaaaactgttgaaatttatgaggtatcgaaggctacaataactcctcatattatcaaagttcaagaaacagttgatccttacttccaggatgccaagaagttcactaagccatatattgatcaggttgctacttaagcaaagcctcatgtagataaaatttctgtggagatgaagccctatacaaa

SEQ ID NO: 10860 - DNA, 676 bp, Gossypium hirsutum
  unsure (1)..(676): unsure at all n locations
  Clone ID: AI055154.1
aaaacacacatccccattaataccgaggaagaggaagttgaaaacccttgggctgtcccttggtgggtgtttctttaggttttcttgttcgcgacgattttcggtggcttgtaaatggcagcgtataggctcctgattttctccctctttttggccctagttttcaccaagattggagccgatgcctcaactgaaccgctgcttgaaccggacgccgccgattcttctgctcttaagatggagttggatcaactgaagtctaagatccgtcttcttgaatcaaatgttgaggagaaaattcgagaattgaaaaccaaggatgagatgataaagcagaaagaataaattatagaagaaaaatctgacagcatggcatcgttgcgctctgaatatcatctcttcagaaanaggaacctcagatgctgangacggntgggaaagctcatgctaagctcttgatngcaaaacagttgataaactaanactaactgaagccaatgaagataagatattggatccgtgcactagctggacaattgatgatgattgcactgagatctcaagatataggacaggacaactacaaactgacacttanatgcaggaacgtnaggagtgagccctaaggcagatnatggttcaactgtcacttgtgtacataattgagctatcacat

SEQ ID NO: 10861 - DNA, 518 bp, Gossypium hirsutum
  unsure (1)..(518): unsure at all n locations
  Clone ID: LIB3828-017-Q1-K6-C12
tgaaaccaagatgagatgataaagcagaaagataaaattattagaagaaaaatctgacaccatggcatcgttgcactctgaattatcatctcttcagaaaaaaggaaccccagatgctgaggaacgggtggngaaaagctcatgcgaaagctcttgaattgcagaaacaggttgatagacttaaaactgaactagaagcaaaattgaaggaaaaagattatttagaatcccgtgcaactaaagctgagaacaagttgaatgaattgaatttgcagctagagaatgtaagtttcttcatctctttttcctctttgttttgagtataagcgtgagaaactccaattgttttgttgttttgctctgccatcattttacagcttcaaaagatcaataaggaacaggagaacaaactagcaaaaactgagcgagctctaaatattgcagaggaagaactggtaaaggcaaagtttgatgccacttcaaagggcaaatgagttgatggaggttcacagcgcatg

SEQ ID NO: 10862 - DNA, 616 bp, Gossypium hirsutum
  Clone ID: LIB3583-022-P1-K1-D4
ctgtgacatggtaatcgttgctcgacttttaaatctcactttggttgttccaaaacttgataagacatcattctgggcggaccctagtgatttaggtgacatttttgatgtgagccatttcattgattctctaatggatgaagttcggattatcaaaaggctgccaaagaagtttaataggaaatatgggtttcaagcttttcagatgtctcctgttagctggtcaaatgaaaagtactacttagaacaggtatgcatacccttggtggagagagaaagagataatgtctgaagagaggagacaacaagggttgtgtcctctgacacccgaagaagcgacgctagttttgcaagcattaggtttcgataaggaaactcagatttacatagcttctggtgagatttgtggcagtgaacggagattggcatcgctaagagctgcatttccacacactgtaagattttgaccctgtaaatgtttcgctctgggcatttgtaaggttgtttaaagcctggtgagagcactgggtttctatattgacaacttttttggatatcttgatgataatatcttatattttacatggctatgatttaagtccttatttcattgatt

SEQ ID NO: 10863 - DNA, 373 bp, Gossypium hirsutum
  Clone ID: LIB3083-054-Q1-L1-G1
ggcaaataatgggattcaacttgatcttcagaaacttaggtgccgtgtgaatttccaaggactgaaatttactcctgagattgagacattggggtacaaattggttcgcatactccaagataagggaccctttgtggcattgcatctaagatatgagatggacatgttggctttctcaggttgcacgcatggctgcaccgttgaagaagctgaggagctaaaacgattgaggtatgcatacccttggtggagagagaaagagataatgtctgaagagaggagacaacaagggttgtgtcctctgacacccgaagaagcgacgctagttttgcaagcattaggtttcgataaggaaactcagatttacatcgct

SEQ ID NO: 10864 - DNA, 996 bp, Gossypium hirsutum
  Clone ID: GOSHI-09MAY01-C2074_1
cccacgcgtccgctggcctgcctgaattttcgcgcctaggctggggtcattggttcactctcagggacctacgcctgcaactaaaccggttttcaaaggataatataatgggtgatggtggatatggagttgttaatagaggcaatctgattaacgggactcctgtagccgtcaaaaagcttcttaacaatcccggacaagctgacaaggatttcagggtggaagttgaagccattggtcacgtgcggcataaaaaccgggcgcgtcggcttgggtactgtatcgagggcacacaaaggttgttggtttatgaatacgtcaataacggcaatttggagcaatggctccgtggagatatgtctgacaagggatatcttacctgggaggctcgcataaagattcttcttggcaccgccaaggcgctggcatatttgcacgaggccattgaaccaaaagtcgtgcatagggacataaaatcaagtaatatactgattgatgacaacttttgatgcaaagatatccgattttggtctggccaaattgctaggtgatgggaaaagttttatcacaactcgagttatgggtacctttggttatgttgctccagagtatgcaaactctgggatcctgaatgagaagagtgatgtttatagctttggcgttgtgctcttagaagcaattactggaagatacccaattgattatggtcgccctcagcctgaggtaaatatggtcgagtggttaaagatgatggttcaactcagacgctcagaagaagtagttgacccaaacattgagactagaccatcagctagtgctcttaaacgggctcttttaactgctttgagatgtgttgatcccgatgctgataaaagacctaagatgagtcaggttgctcgcatgcttgaagcagaagagtatcctcttcctcgagaggatagaagacgcagaaggaatcaatcagttaattcagatgccgatacacagaggaaaaac

SEQ ID NO: 10865 - DNA, 916 bp, Gossypium hirsutum
  Clone ID: GOSHI-09MAY01-C2064_3
cccacgcgtccgcccacgcgtccgtaaaaatccgtactgaccaaaaaaaaacagagcatatagttctttctttcaattaagagctcaagctggcgatctcttatgtatcatcatggttgcagctatgcaccatgtggaccgtattcacctgcagcttccccagttccgactctggggaatgatggtcaattgtatggtccacaacactaccagtgtcctccctgcttccagccgatgactctaaccagtggtccgttcacgccaaaccctgcggctccatcccatggtgagcttctgacctctgctgctgctgatcagaagcccttacctgttgaaaccccgaactcaaattccaatggaggtgccaatggtggcagtgtgaaggggaataatggtccaggcgcaataaaaccatcataccccagcacatttaataccaataattcgtatggaaggggacccccaccaggaagtggatatcaggatccaagatacggttttgatgggtttcgatcccctatcccatggcttgatggctctatgttttcagatgggcagcacaggcctgtctcaagccctgcaatgaactctttggtttcaaaagcaaatggttttccatcttcaaggaatcaaaacttcagatcgaattctaattacatgggactgcaccaccctgggccaatgtccggcatgggcacaactcatggttatgtcaatagaatgtacccaaacaaaccatatggtcagtatgggaccacattcagatctgggatgggctttggatctaatggttatgatttgcgaacaaatgaaaggggttggttggcagacaacacgtatagaccaaggtgacggggcaatggttattttggttcaggcaatgatatcatggacggttttaatgaattgaacaggg

SEQ ID NO: 10866 - DNA, 1059 bp, Gossypium hirsutum
  Clone ID: GOSHI-09MAY01-C2064_2
gcgttcgcggcgcgtgggcggacgcgtgggcggacgcgtgggcggacgcgtgggggcggacgcgcgggaaagcattaagtacaatgtttgggcgagcacaccaaatggtaacaaaaagcttgatgcagcttaccaggaagctcagcagaaatctggtcactgccctatatttctcttcttctcggtcaatacaagtgggcaatttgtcggcattgccgagatggtaggggcagttgattttcaaaagaatgtggagttctggcaacaagacaaatggactggctgtttcccagtaagatggctcattattaaggatgtacctaataattccttgaagcacattaccttagagaacaatgagaataagcccgtcacaaatagcagggatacgcaagagatcaagcttgatcaaggccttaagttgctcaaaatcttcaaggaccattccagcaaaacttgcattttagacgatttcgaattttacgagattcgccagaaagcaattcaggagaaaaaggctaaacatcagttgcaaaagcaggtatgggaagaaaagcctggagatgaaaagaaagatatagcaacaacaaatggtgatttgatcaaagaagccaatccaattcctcactcgaacggccttctttcagaagatggttcaggataccctaaacagtgaagaactttttatcaaacggttgctaacattttctatggatccccttggggatgtgtttgtggtcttgtaaaatataatgaatgcttggtggttttttactggctttagaattttattatagattttacagtaccatgggaccatcttcaaggggatataaatgaataatccaaggcggggttgggttgggggggtgggttgtaggcaagcggtgtagggttttctaagaattcgtaagtcattttatgatgtctatgtttttctttttaccgtttttcttctcagggaggatgggttttaggttttttattattattattattatatgcatgttgatttctcaaaaaagaaaaataaaaaaatttggattacagacttgctac

SEQ ID NO: 10867 - DNA, 1670 bp, Gossypium hirsutum
  Clone ID: GOSHI-09MAY01-C2064_1
ggacctccacctggaagtgtcccaacctccggatatcaggatccaagatacagttttgcgggcgcgcgggctcctatcccatggcttgatggctctatgttttcagatgggcagcacaggcccgtctcaagccctgcaatgaactctttggtttcaaaagcaaatggttttccatcttcaaggaatcaaaacttcagatcgaattctaattacatgggactgcaccaccctgggacaatgtccggcatgggcacagctcatggttatgtcaatagaatgtacccaaacaaaccatatggccagtatgggaccacattcagatctggaatgggctttggatctaatggttatgatttgcgaacaaatgaaaggggttggttggcagacaacaagtacagaccaaggggacggggcaatggttattttggttcaggcaatgatatcatggacggttttaatgaattgaacaggggacctagggctaaggggcctaagaaccaaaagggtgcaacacctatcacagcatctactaaggggcaaaatattccctcagatggaaccaagcatgaggaaaaggcatatgttgttccagaccgtgaacagtataacctagaagaattccttgtggattatgacgatgccaagttctttgttattaaatcatacagcgaggatgatgttcataaaagcatcaagtacaatgtttgggcgagcacaccaaatggtaacaaaaagcttgatgcagcttaccaggaagctcagcagaaatctggtcactgccctatatttcttttcttctcggtcaatacaagtgggcaatttgtcggcattgccgagatggtaggggcggttgattttcaaaagaatgtggagttctggcaacaagacaaatggactggctgtttcccagtaagatggctcattattaaggatgtacctaataattccttgaagcacattaccctagagaacaatgagaataagcccgtcacaaatagcagggatacgcaagagatcaagcttgatcaagggcttaagttgctcaaaatcttcaaggagcattccagcaaaacttgcattttagacgatttcgaattttacgagattcgccagaaagcaattcaggagaaaaaggctaaacatcagttgcaaaagcaggtatgggaagaaaagcctggagatgaaaagaaagatataacaacaacaaatggtgatttgatcaaagaagccaatccaattcctcactcgaacggccttctttcagaagatggttcaggatacccaaaacagtgaagaactttttgtcaaacggttgctgacattttctatgaatccccttggggatgtgtttgtggtcttgtaaaatataatgaatgcttggtggttttttactggctttagaattttattatagattttacggtaccatgggaccatcttcaaggggatataaagtgaataatccaaggcggggttgggggggggggttgcaggcaagcggtgtagggttttctaagaatccataagtcattttatgatggatatgtttttcttttgaccgtttttcttcttagggaggatgggttttaggtttttatttatttatttcaagtggtggtttctttattattattattattattattattatataagcatgttgatttctc

SEQ ID NO: 10868 - DNA, 597 bp, Gossypium hirsutum
  unsure (1)..(597): unsure at all n locations
  Clone ID: LIB3825-016-Q1-K6-G1
gngatttttaagtgttgttaatggcgcctacgttgctcctcctgcagatcaaacagcagagctgttgcagaaattgactatagattcgcaggcaaagcccttcgatattcctgagcctactaagaagtcttctgtttatcagtatggttctgttgattcaggcaacactgggaatacccaaattccgacgtttgacagatccacaacacctttgttacaggattttatggatccgactatgtgctatattcctagtggttatccatctgcgtattactatggaggctttgatggcaccggtaacgagtgggatgaatattcacaatatttaaatccagatggagttgacatgacttcaggggtttacggggacaatggatctcttatgtatcatcatggttacagctatgcaccatatggaccgtattcacctgcagcttccccagttccgactctggggaatgatggtcaattgtatggtccacaacactaccagtatcctcccttcttccagccgatgactctaaacagtggtccattcacgccaaaccctgcggctccatcccatggtgagcttctgacctctgctgctgctga

SEQ ID NO: 10869 - DNA, 485 bp, Gossypium hirsutum
  unsure (1)..(485): unsure at all n locations
  Clone ID: uC-gsflnu33B025c12b1
tttagaaaaaggctaaacatcagttgcaaaagcaggtatgggaagaaaagcctggagatgaaaagaaagatatagcaacaacaaatggtgatttgatcaaagaagccaatccaattcctcactcgaacggccttctttcagaagatggttcaggataccctaaacagtgaagaactttttatcaaacggttgctaacattttctatggatccccttagggatgtgtttgtggtcttgtaaatatatatactgaattggctctgggctgggttttttctttttatcctttgagggcctttttttaagggaaanaaaattttcttttaaattttttaaattttaaggggaaaattcttttttttttttataccccaaatggtttttttatccccccccaatttttgggggggggggggataaaacccccccccaatttatttccccttttttttttcccaaaaaaaaaggggggggggggggggggg

SEQ ID NO: 10870 - DNA, 391 bp, Gossypium hirsutum
  Clone ID: LIB3120-048-P1-K1-G2
cccacgcgtccgcaaatggtgatttgatcaaagaagccaatccaattcctcactcgaacggccttctttcagaagatggttcaggataccctaaacagtgaagaactttttatcaaacggttgctaacattttctatggatccccttagggatgtgtttgtggtcttgtaaaatataatgaatgcttggtggttttttactggctttagaattttattatagattttacagtaccatgggaccatcttcaaggggatataaatgaataatccaaggcggggttgggttgggggggttggtgtttatttaagtaattcttggttttcttttgagtttttttacttatttacttgatgtttttagtttctttttttttgtggtagcttttttt

SEQ ID NO: 10871 - DNA, 356 bp, Gossypium hirsutum
  Clone ID: uC-gsflnu33B111e07b1
tttggtgatttgatcaaagaagccaatccaattcctcactcgaacggccttctttcagaagatggttcaggatacccaaaacagtgaagaactttttgtcaaacggttgctgacattttctatgaatccccttggggatgtgtttgtggtcttgtaaaatataatgaatgcttggtggttttttactggctttagaattttattatagattttacggtaccatgggaccatcttcaaggggatataaagtgaataatccaaggcggggttgggggggggggctgcaggctagaggtgatcggatttataagtgttcatgctcccttctttacccggtattggttacgcttattttc

SEQ ID NO: 10872 - DNA, 711 bp, Gossypium hirsutum
  Clone ID: GOSHI-09MAY01-C2004_1
gggagtcactggaggagtctcaatctaaaattgagaaaagtcaagtggcattggcggacttgcagatagaattagagaaggaaaggtttagcaagaaaagaattgaggaggaattggaagtggcgagaaggaaggtgtcacggcttcaaactgagatggaaggatcatcaactgtggaaaggcttcaacaagaacttagagagtacaaggaaatactgaagtgtggtatctgtcttgacagaccgaaagaggttgttattacaaaatgctaccacctcttttgcaacccttgtgttcaaaaaaatattactgaaagtcgtcagcgcaagtgtccagtgtgtgctgctagctttggtgctaatgatgttaaacctatttatatctgagattggaactctcatcaatgcaatttggcaacacaaggacactcacaggttcccatgtattcttcttctattagagctttgttagaaaagaatcttgacttgaactagagggttcctgctcattttggttagtgcaaatcccaacaggttttcttgtttggctccaagttgttgattttacttggtaattttattgtatttgcgttgtttgcctgttcatttaagtgcttggagccaatatttgcagactagtcactcagaatcgatcaaattcaataatccaaggaattcttttccccgctgaaataatatggagtttttattt

SEQ ID NO: 10873 - DNA, 604 bp, Gossypium hirsutum
  Clone ID: GOSHI-09MAY01-C2034_3
cttactcgtccgatcgaaacctcataaattagagtccgttgattccttgacggagaaagtagattcggatctatctttgagtgctccgaaagaagttcaaaatcatgttggttctggattaagtcagattggtgaacaagagaagaaagcattggaacatggaagtaattcagcttcggctaaatccagtgatggggccactggcgttgtcaaggttagtggtggtgccaaagtcggtgatcgcccggatttttttgagagcggtaagagctgtgtgtgcagaggtagcacaagcagtggtgtgagcgatgaaagtacgtgtagcagcttaagtagcagtatcaacaaacctcataaggcaaatgatataaggtgggaagccatacaggccgtccgagcgaaagacggtgtgttgggtttgaaccatttcagattactgaagagattaggctgcggggatatcggaggtgtctatcttgccgaattaagtggcacaaagtgttattttgcaatgaaggtgatggacaaagcttctttagctagttgtaagaaacttcttcgagctcaaacagagagagaaatactacaatccttggaccatcct

SEQ ID NO: 10874 - DNA, 707 bp, Gossypium hirsutum
  Clone ID: GOSHI-09MAY01-C2034_2
cggggcggaccaaggcgtccgggttagtccaccactaataaagtcccctctgccggccgcggacccctggcgaaggaggtcggcttatggtgtccaaccagcttgcattgagccctcctgcatccagccatcttgtctcgcccctacgacatgtttttcaccccgcttcttttcatcaaaatccaaaaaagaccgcaagcccaagaatgatatggggaaccaagtcagtccattgcccgagcttattgccgagccaaccaatgctcgctccatgtcattcgtgggaacccacgagtccttggcgcccgaaattatcaaaggtcagggacatggaagtgctgttgattggtggactttcgggatcttcttgtacgagctattgtttggtaaaacgcctttcaaaggatctgggaaccgagcgacactcttcaatgtcgtagggcaacccttgagatttccagaatcaccagtagtaagttttgccgcaagagatttgataggggtttgttggtaaagaaccacacataggttagcctatagcgaggtgaactgagattagcacaccctttcttgaaggtgtaaatggcttaatcgttggcagcccccgagatccaaacagtgaatgagcgattcggtcccatataagtgcgaaaccgtgtctggacagacaaaacatcgattgattttatattagacatttccgtgtc

SEQ ID NO: 10875 - DNA, 1158 bp, Gossypium hirsutum
  Clone ID: GOSHI-09MAY01-C2034_1
agactgataaattttcatgtttagtgatggagttctgccccggcggtgatttgcatacactaagacagagacaaccaggaaagcatttttctgcgcgtccgcccacgcgcccggtagcagaggttctccttgctttggaatatctccacatgcttggtattgtatatcgtgatctcaagccagaaaatgttcttgttcgagaagatggacacataatgctttcagactttgatctttccctccgttgtgctttcaatccaacactagtcaagttgtccacacccgagtctgaacccttgcgaaagaattcagcttattgtgtacaaccagcttgcattgagccctcctgcattcagccatcatgtgtggctcctacaacatgtttttcacctcgtttcttttcatcaaaatccaaaaaggaccgaaaacccaagaatgaaatggggaaccaagtcagtccattgcctgagcttattgccgagccaaccaatgcgcgctccatgtcgtttgtgggaacccacgagtacttggcacctgaaattatcaaaggtgagggacatggcagtgcagttgattggtggacctttgggatcttcttgtacgaactattgtttggtaaaactcctttcaaagggtctgggaaccgggcaacactcttcaacgttgtagggcagcccctgagatttcctgaatcacccgtcgtaagcttttcagccagagatttgataaggggcttgctagtcaaagagccacagcagagattggcgtacaagcgaggtgcaacggagattaagcaacatcctttctttgaaggtgtaaactgggctttaatccgttgtgcgagtccaccagaggttccaaaaccagttgaggttgagcggattccagctcccacatcatcagctggtaataaacctgctgttcctgcaaccaaagatcaaaataactatctggaattcgatttcttttaaattattctctgaaccattttcccgttgcttttttcgtgggaatgtaagagttcatgatgatgtgcaaattagagtttctagaaatgataatgatcatatatgcttgattgtcttaattttcaaatttgtattttgcataagtgaaaacatcatttgattttgcatattgaaaggctatgggcttggt

SEQ ID NO: 10876 - DNA, 459 bp, Gossypium hirsutum
  Clone ID: LIB3148-002-P1-K1-A5
cggggcggacccacgccgtccgcccacgccgtccggattgggatggtggggatattgggaggtgtatacccttcaaaaattaaggggaccagggtgttactttgcaatgaaggtgatggacaaagcatctttagcaagtcgtaagaaactacttcgagctcaaaccgagcgagaaatactacaatccctggaccatcctttccttccaacattgtatacccatttcgagactgataaattttcatgtttagttatggagttcttgccctggcggtgatttgcatacgctacgacagagacaaccaggaaagcattttactgaacaagcagtaaagttctatgtagcggaagttcttcttgctttggaatatctccacatgcttggtattggttatcgtgatctcaagccggaaaatgtccttgttcgagaagatggacacataatgctttcggactttg

SEQ ID NO: 10877 - DNA, 456 bp, Gossypium hirsutum
  Clone ID: GOSHI-09MAY01-C2024_5
gaccggaccgactgcccggcccccgcggcaaaggaccaaaagggtttaatctgctgtgcacgttgtagctcaccacccaaactttaacaatggccgtcggtaagaacaagaggatttccaagggaaagaagggaggaaagaagaaagcagctgatccatttgcgaagaaggattggtatgatatcaaggctccatcagtttttacgagcagaaatgttgggaagactcttgttacccgtactcagggtaccaagattgcttcagaaggactcaaacacagagtgtttgaggtttcactgggtgatcttcaaggaggtgatgaggatcatgcttacagaaagattcgtttgagagctgaagatgttcaaggaaaaaatgttttgaccaacttctggggaatgaattttacgactgacaagctgaggtctttggttcgtaaatggcaaactctgatcg

SEQ ID NO: 10878 - DNA, 1160 bp, Gossypium hirsutum
  Clone ID: GOSHI-09MAY01-C2024_4
cggacgcgtgggcggacgcgtgggtttggattcataaaagcaatccatcaaaatgagttatataagctgagataacgaaaaatagggttttgaaatctttcccaggtttaccagcagtctgctctctttctcttttgtagctaaccagcagagagcttcaaccatggccgtcgggaagaacaagaggatttccaagggaaagaagggaggaaagaagaaggcagctgatccatttgctaagaaagattggtatgatatcaaggctccatcagtttttacttccagaaatgtggggaagactctcgttacccgtactcagggtaccaagattgcttcagaaggactcaaacaccgtgtgtttgaggtttcattggctgatcttcaaggcggtgatgaggatcatgcttacagaaagattcgtttgagagctgaagatgttcaaggaaagaatgttttgaccaacttctggggaatgaattttacaactgacaaactgaggtcattggttcggaaatggcaaacattaatcgaagctcacgtggatgtgaagacaactgataattacactctgagaatgttctgcattggtttcaccaagaggcgcccataccaggttaagaggacttgttacgcacaatccagccagattagacagattcgtaggaagatgagggagataatgaccgcgcaagcaacatcttgcgatttgaaggaattagttcaaaaattcattcccgccctcgcggccgaagaaattgagaaagcaacatcgagcatctatcctttacaaaatgtgttcattcgtaaaggcaaaattttgaaggctccgaagtttgatcttggaaagttgatggaggttcatggtgattactcggaagatgttggtgtgaaaatagagaggcctgctgatgaaacaatggctgaggctgccccggaggtcattggagcttgaatgaaacaccccttgaatttgtgtgttcttttctttctgatttcaacagatttgatgattttgtttaaaactaggagaaattttccatggttttgatttgatctctaggatatggttttgcaaattgatattgaattagacaatctggtgtattagaaagtcatactctctctatatatgaaaattattatatatttaacgacaaaaa

SEQ ID NO: 10879 - DNA, 1047 bp, Gossypium hirsutum
  Clone ID: GOSHI-09MAY01-C2024_2
ggccctcgcggctccagcggccgtttgcatatcgtagctaacctgcaaagtttcgacaatggctgtcgggaagaacaagaggatttccaagggaaagaagggaggaaagaagaaggcggctgatccatttgctaagaaggattggtatgatatcaaggctccatcagtttttactaccagaaatgttgggaagactcttgttacccgtactcagggtaccaagattgcttcagaaggactcaagcaccgtgtgtttgaggtctcactggctgatcttcaaggaggtgatgaggatcatgcttacagaaaagattcgtttgagagctgaagatgttcaaaggaaaaaatgttttgaccaacttttggggaatgaattttacaactgacaaactgaggtcattggtgcgtaaatggcaaactttgattgaagctcatgtggacgtaaagacaactgacagttacactttgagaatgttctgccccgcgcgccctaagagacgcccaaaccaggttaaaaggacttgttacgctcagtccagccagattagacagatacgccgaaagatgagggaaataatgactgcccaggcaacatcttgtgatttgaaggaactggttcaaaagttcatccctgagatgattggaaaagaaatcgagaaggcaacatctagcatctatcctttgcagaatgtgtttattcgtaaggtcaaaatcttgaaggctcccaagtttgatctcgggaagttgatggaggttcatggtgactactcagaggatgttggtgtgaaactagagaggcctgctgatgagacaatggctgaggctcctgcagaggttgttggagcttgaacgaagaacaatagtccatgaatttgtcttgtttttttatgcttctaggagtttttgctgatcattttaattttgtcgaaaaactttgtagagaatttctcccatggttttgatgttaaaaggatatgtttttgtctacttattatttgagtaaacaatttgttaccctttggttaaaaataaatatgtctttacctt

SEQ ID NO: 10880 - DNA, 881 bp, Gossypium hirsutum
  Clone ID: GOSHI-09MAY01-C2024_1
cggcccacgcgtccgctcaaaattaagtaggtgccgactgctccgttctttgtagcaaagcaaagtttgtgaagcatggccgtcgggaagaacaagaggatttccaagggaaagaagggaggaaagaagaaggcagcggatccttttgctaagaaggattggtacgatatcaaggctccttcagttttcactaccagaaatgtggggaaaactctcgtcacccgtactcagggtaccaagattgcttctgaaggactcaaacaccgtgtgtttgaggtttccctggctgatcttcaaggtggtgatgaggatcatgcttacagaaagattcgtttgagagctgaagatgttcaaggaaaaaatgttttgaccaacttctggggaatgaattttacaactgacaaactgaggtctttggtccgtaaatggcaaaccctgattgaagctcatgttgacgtgaagacaactgacaattacactttgagaatgttctgcattggattcactaagagacgcccaaaccaggttaaaaggacttgttatgctcagtccagccagattagacagatacgccgaaagatgagggaaataatgactgcccaggcaacatcttgtgatttgaaggaactggttcaaaagttcatccctgagatgattggaaaagaaatcgagaaggcaacatctagcatctatcctttgcagaatgtgttcattcgcaaagtcaaaatcttgaaggctcccaagtttgatcttgggaagttgatggaggttcatggtgattactcttgaagatgttggtgtgaaattagagaggccagctgatgagacaatggctgagtctactccagaagttgttggagcttgaacttattaatgctttt

SEQ ID NO: 10881 - DNA, 537 bp, Gossypium hirsutum
  Clone ID: LIB3583-004-P1-K1-H9
cagggagcttcaaccatggccgtcgggaagaacaagaggatttccaaaggaaagaagggaggaaagaagaaggcagcttatccatttgctaagaaagactggtatgatatcaaggctccatcagtttttacttcaagaaatgtggggaagactcttgttacccgtactcagggtaccaaggttggattttttaaaaaaaatttctttacccttttgaaattgcttttgtatgtaaggtttttttggatgtttgaacctatggggaaactgggtttcatttagattacattgagaatctagcttagtacaagcatgatgattcaatgttgtttgttttgttctgtatgaaaagtggggatttcatttttgtttgagctagctattgttatattgagttttcttttgctgaatcttgatgatatatttgttagctgatatgctgaatattctttttcttttaaaagcataatatgctatagcgagaacttttgattttgaatgattagaattctctattgagtggtgaaatcttgtgtc

SEQ ID NO: 10882 - DNA, 355 bp, Gossypium hirsutum
  Clone ID: LIB3048-005-Q1-L1-G3
caaggaaccttgggccgttggaaaaaccaggagaattttcggggatgggacgggatgaacggagaaagcagtggatccttttgctaagaaggatcggtacgatatcaaggctccttcaattttcactaccagaaatgtgggaaaaactctcgtcaaccgtactcaaggtaccaagaatgcttctgaaagactcaaacaccgggtggttgaaggttttcctggctgatctttaaggcggagaatgaggatcattgcttacagaaagatttcgttgaaaagctgaataaggttcaagggaaaaaatgttttgacccaatttctggggaatgaattttacaactgacaaactgaggtc

SEQ ID NO: 10883 - DNA, 348 bp, Gossypium hirsutum
  Clone ID: LIB3147-033-Q1-K1-C2
cccacgcgtccggggttttctattccctccccactccaacactttaaaaactaattaggtgccgactgctccgttctttgtagcaaagcaaagtttgcgaagcatggccgtcgggaagaacaagaggatttccaagggaaagaagggaggaaagaagaaggcagcggatccttttgctaagaaggattggtacgatatcaaggctccttcagttttcactaccagaaatgtgggaaaaactctcgtcacccgtactcagggtaccaagattgcttctgaaagactcaaacaccgtgtgtttgaggtttccctggctgatcttcaagggggtgatgaggatcatgctta

SEQ ID NO: 10884 - DNA, 374 bp, Gossypium hirsutum
  unsure (1)..(374): unsure at all n locations
  Clone ID: LIB3147-024-Q1-K1-B1
gaaagcaacatcgagcatctatcctttacaaaatgtgttcattcgtaaagtcaaaattttgaaggctccgaagtttgatcttggaaagttgatggaggttcatggtgattactcggaagatgttggtgtgaaaatagagaggcctgctgatgaaacaatggctgaggctgccccggaggtcattggagcttgaatgaaacaccccttgaatttgtgtgttcttttctttctgatttcaacagatttgatgattttgtttaaaactaggagaaattttccatggttttgatttgatctctaggatatggttttgcnnannaaaaaaaaaaaaaaaaaaaaaaaaaaaaaaaaaaaaaaaaaaaaaaaaacccccc

SEQ ID NO: 10885 - DNA, 380 bp, Gossypium hirsutum
  Clone ID: LIB3197-053-Q1-M1-F6
gtttgatcttggaaagttgatggaggttcatggtgatgactccgaagatgttggtgtgaaaatatagaggcctgctgatgaaacaatggctgaggctgccccggaggtcattggagcttgaatgaaacactctttgaatttgcgtgtgtggttctctttctgattccaactgatttgatgattttgtttaaaactacgagaaatttttcatggttttgatttgatctctaggatatggttttgcagattgatattgagctagacaatctgatgtattataaagcccctactctatatatgaaatttattatatattggatgctttatagcaataaggacattttcctccgagagttgatctccaatgcttctgatgcgtt

SEQ ID NO: 10886 - DNA, 320 bp, Gossypium hirsutum
  Clone ID: LIB3083-057-Q1-L1-A12
ccggagatgattggaaaagaaatcgagaaggcaacatctagcatctagccattgcagaatgtgttcatccgcaaagtcaaaattttgaaggctccaaagtttgatcttgtgaagttaatggaggttcatggtgattactctgaagatgttggtgtgaaaatagagaggcctgcagatgaaaccatggctgaacctacccctgaggttattggagcttaaatcaagatttcttgaattttatctctttgttttttcgtactaaaaatttctgttggtcattttcattttgttggaagcttgagttgaatttgttcttggtt

SEQ ID NO: 10887 - DNA, 287 bp, Gossypium hirsutum
  Clone ID: LIB3147-032-Q1-K1-H5
cgacccacgcgtacgcccggaggtcattggagcttgtatgaatcactctttgaatttgcgtgtgttgttttctttctgattccaactgatttgatgattttgtttaaaactaggagaaattttccatggttttgatttgatctctaggatatggttttgcaaattgatattgagttagacaatctgttgtattagaaagtccctactctatatatgaaatttattataaaaaaaaaaaaaaaaaaaagacagaatggaaaaaaaaaaaaaaaaaaaaaagggcgccc

SEQ ID NO: 10888 - DNA, 230 bp, Gossypium hirsutum
  Clone ID: uC-gsronu33B090c07b1
gttgatgaaaccatggctgaacctacccctgaggggtattggtgcttaaatcaagatttcttgaattttatctttgttttttcgtactaaaaatttctgtcggtcgttttcattttgttggaagcttgagttgaacttgttcttggttaccctttttcttatttaatcaaattttaaatttaaaaaaaaaaaaaaaaaaaaaaacactaaaatatatataaaatataaat

SEQ ID NO: 10889 - DNA, 618 bp, Gossypium hirsutum
  Clone ID: GOSHI-09MAY01-C2394_2
cggacgcgtgggcggtcgcgtgggtttatcagacataatcagaggttagttgattcttacagagctcaatttctggatgttatgaaaaagtagcaaagcatttctctttcactcgatttcgtctgaaccagaaccagaagagccaacacttcatacgtcaactattcaccgatcgatcccaaactttctgagtggagaatggtgaatgttccctctctggtagtctctgagcattgacgcacttaaaaaagaactcattcacggggatgatcttttgccgcatgtctatgaacttcctctggaattgttcaattcattagtagaatgtctacctcctttggccttgcagaagctgcaaagtgaaatgccattcaagaactatgatgactatggtccttctagtgatgacttaaaaatggggagaatacgtggtagatatggtaatttcgatacagcatggaaggcattgtttaagtttcgttggcctgatcttggggagtgtgtcaaaccagttgattggcagcagatttactgggaaactcatgtgcagaattgcctagatgaagcagcagagatagctttgcttccatcatttataggatgccttgagaatatact

SEQ ID NO: 10890 - DNA, 647 bp, Gossypium hirsutum
  unsure (1)..(647): unsure at all n locations
  Clone ID: LIB3543-060-Q6-K6-E5
tttctttttccttgtngaatttcacggaaaacagaactcgtctctttcctttccaagccattgtagtcgagggtaaaatctcataaaacttcatagctatagtacaactcaaagtgcccagatttaagtcttgacgttgataatgttattcaccaacaagtgattgaaacaagcttggatcttggaacattagctatacaacttcactcttactatatttcaactatatcagttagttagggtataagagggtaattaattaagaatttggggaatttgggatgttagagcttataaatgtttaaggttttagcccaatgatcgtcaactcaaaaacatacaagaagaaagccctatcgattcgttttatcgacaaatcagggttagttgattcgtacagagctcaatttctgaatgttatgaaaaagtagcaaagcatttctctttcactcgatttcgtctgaaccagaaccagaagccaactcttcaaacgtcaactattcaccgatcgatcccaaactttctggggatgatcttttgccgcatgtctatgaacttcctctggagttgttcaattcattagtagaatgtctacctcctttggccttgcagaagctgcaaagtgaaatgccatttaagaactatga

SEQ ID NO: 10891 - DNA, 559 bp, Gossypium hirsutum
  Clone ID: GOSHI-09MAY01-C2384_1
tagaaaactaaaagaaactcaggcctggaaacccttcttctctgtcctttgaaaataaagcctatcatgtatcagtcatttaaaagactgatgctgctctaaaatcatgcatttcaatcctcattctctgtcaaaatcacgagttcttctgacagacccaatgtcacataatctggactctattttgccatttaaccatcgtcatcaccgcttcctttatcgcgattcaccagtctttccaccgcatgtggaaccttctccatccagtattgggaattttcatatcgtcgtccttctatcaccatcccgtgagccgttttgttggcttcccttggagtttactttacatattatggtcaacgcatctccttcaacacaaatgtcttggaaacccatttcctccgccatagtgattgcttgcaaacacgcccttgcctctgccataactagatctggaatattctcccattgaaaggtacaagcagccattactaacccttctttatttcgagctaaaattccttatacttatcttctcgtgtgttggtttaatgaggcg

SEQ ID NO: 10892 - DNA, 475 bp, Gossypium hirsutum
  Clone ID: GOSHI-09MAY01-C2354_1
cccacgcgtccgcgttggaagtgcttttcaacatcctgaatgatcatggacatacattctcacagacattctggcttggtgttgttagttctgttgttctccctatatttgatggtgtttgcgaaaagagagacacggctctacaaactgagcaggattcaccaactacagaatctcctcattgcgatgcaactacatgggacactgaaacttctgctgtggcattacattgtttagtagatttatttattagtttctatgatgtattgaggccccggctatcagatgtggcatgcatactgacaagatacttacgaagttcaatacacggtcctgcaagcactggggttgcagcatcgtctcatttgacaggcgagctaggaagcagactttcagaagatgaatggctagaaatattactagcattcatagatgcagccatgtctactttgccagggtttaagaagcttttgac

SEQ ID NO: 10893 - DNA, 775 bp, Gossypium hirsutum
  Clone ID: GOSHI-09MAY01-C2374_1
cccacgcgtccgggaatatcaaacgtggcaccaactgatgctccattgcgttcaatacccatcccgaagacggaaagcagccttcagctagagacagccaataacatcatagaagctagaattcatgattgtataagcaaccttcggttttcaatatctccaacagcattttttcaggtcaatactcttgctgctgagaaattatactcacttgctggtgagtgggctggtttgggtcctgataccttactgtttgatatatgctgtgggaccggcacgattggactcacgttagcgcatcgtgttggtatggttattggcattgaaatgaatgcttctgcagttcaagatgcgtatatcaatgctgtgtttcatgggataaaaaatcggagattcatgggttcaaaggctgaggacgtcatacggtctctgttgaaagagtacctcaatgtttctgaaaaacaaggtcaactttcaagtgccttagaaagtagtgagaaaggaacattaaccggtgaagagatagatacatgcgcaaccaatgcacataatgatggagagagctcgcgccaagagcctgaaaaatgttcttcagaaaatgatggaaaagagatccaaaatcaacttcaggaaagttccacatccaaagatggaaattcttcggtgccacaattcaaaaatgttgttgctattgttgatcctccacgtatgggacttcatcccactgtgatcaaagtgttaagaactcatgctccattacgcaggcttgtgtata

SEQ ID NO: 10894 - DNA, 800 bp, Gossypium hirsutum
  Clone ID: GOSHI-09MAY01-C2314_2
gcgtccggcactcttcctgtcttattgaatgtctatattcgactggctaagaaaaagcgagatggatgaaaaagtcagtgcggtggagagtaaaatcgaatctttacaggaggagctgaatgctgtaatccataagaagaacaaagcttatgaaaccatgcaacatctttttaaacaacgtgattaggcgaatgctcacttttaccagagcctgtctcttttaaacaaagccaaagagctagctgcaaagaaagatataaaggctcttgaggagctttcgactgtcgaggccgagaagtttatggctctgtggagtagcaagaaagctgtctgggacgtttatgagaaaagaattctgccatccctggatcagcggcaattaagtcgggatggtcggatcaggaatcctgatgagaaaccactggttgtacaagagacaccggtgccttctgaaactgtaacaattccaaaacctagcatccgacaaccaaaggaagaagccaaaccctctcccgaaccagatagtaaacctccaaaaaaggtccagaaagatgttgagagcaaagcaaaaatttcaaaatcgtctcccggggggggtattgtggaagagaaagagatctctggattgggcatgttgcaaaagaaaaaaactgcagtcaaggaagttgatgaagcaaaactgaaagaaatgaagagagaagaagaaagaaaagaagaagaaggataaggtagaagaagctgaagaattagaagagggaaagaaagaaaagaagaaagacaaagaggcgaaggagaagaag

SEQ ID NO: 10895 - DNA, 1647 bp, Gossypium hirsutum
  Clone ID: GOSHI-09MAY01-C2314_1
ctctccccgcgcgtaagcagaagagaaagggactaagatctgaccccatttctctttccttcgccaaaaaccctttttcctctaaaaagggtctccttatcctcccttattaatctccctaaagggtttttcattttctagtggtcgatgggtgttgaagttgtgggatcagaaatggctaaagtatctgttgacaaagcaactgaagttgagaaatcacttgttcatgataaggaaaatgggaaacttgacaaggatccggttcatagcgagcccattaaattcggttccaatgttgaggaatcaaataagggagaagagaaaaatgcatctgatgccaactttccgagcgatgcagttgttgagtggcctgcgcctaagcagatccactctttttattttgttaggtatcgcccttatgatgatccgaagataaaggccaaaattgatcaggctgataaggaggtgcaaaagtggaataaagccaggtttcagcttactgatgaaattaaagcgtacaagtcggatcgagcagagttgctttctcaagtgaaagccctaaatattgattttgagcaatttaagacgatgttaggtgagaaaaagaaggaactggaaccactgcagcaggctttaggcaagcttcgcaataataacaatgagggtggtcgtggtggtatatgttcgtctgaggaagagctcaatgattttatctatagcttgcaatatcgcatccagcatgaaagcatcccgttgtccgaggagaaacaacttcttagagaaattaaacaactagaggggacccgggaaaaagttattgctaatgctgcgatgagagcaaagattcaggaatcacttggtcagaaagaagccattcaagatcaagttaaacttatgggcgttgatttggatggcgtaaggaaggaacaaaatgcgatctggtctaagaaaaagcaaattaaagaaaaagtcaatgccatagagagtaaaatcgaatctttacaggaggagctgaatgccgtaatccagaagaagaacaaagcttatgaaaccatgcaacaactgtggaaacaacgtgatgaggcgaatgctcacttttaccagagccgttctcttttaaacaaagccaaagagctagctgcaaagaaagatataaaggctcttgaggagctttcgactgtcgaggtcgagaagtttatggctctgtggagtagcaagaaagctgtcagggacgattatgagaaaagaattctgccatccctggaccagcggcaattaagtcgggatggtcggatcaggaatcctgatgagaaaccactggttgtacaagagacaccagtgccttctgaaactgtaacgattccaaaacctagcgtccgacaaccaaaggaagaagccaaaccctctcccgaaccagatactaaacctccaaaaaaggtcctgaaagatgttgagagcaaagcaaaagtttcaaaatcgtctcccgagaatggtattgtggaagagaaagaggtctctggattgggcatgttgcaaaaggacactactgcagtcaaggaagttgatgaacaaaactgaaagaaatgaaaagagaagaggaatacagccaagcaagccatggaaaggaaaaagaaaaagctgaagacg

SEQ ID NO: 10896 - DNA, 830 bp, Gossypium hirsutum
  Clone ID: GOSHI-09MAY01-C2244_2
cccacgcgtccgcccacgcgtccgcccacgcgtccgcccacgcgtccctctttttgttgcctttttacctgaaaatatactccaattttaccataatcagtttctttatactctgaagaagcctatctcccgggattgtttctataatttacaaaagaaaaataataatatctggttaatttcgtcaggggctaagcttatttgcttccataaattgttctatttagttcttctttcaatttattggttctgggtattcttggttcttgttcgatcgtttattttcaatttgtttgaggatggtttgcatggtttctcgcactggaaggcacttgcagcgatacgataacctaggccgccgccaagttgtcgggtgcattccctatagatacaaatctagcagtgatggaaccatgactgatgacttggaggtacttgtgatctcctcccagaaatgtcaaaaaatgatgtttcccaagggtggctgggagcttgatgaatctagagaagaagctgcattaagagagtcacttgaagaagctggtgttctaggcaatgttgagtgtgaactggggaagtgggacttcataagcaaaagccatggcacattttatgaaggttatatgttccctttgcttgtgaaagaagaacttgatttctggcctgagcaaaatctgagacaaaggacgtggatgaatgttaaagaagccagggatgtgtgccagcattggtggatgaaggaagctttagacatattggttgaaagactcaactcattgaagcagcaaaatgaacaaaattatccaaacatctgctctgatttagtggca

SEQ ID NO: 10897 - DNA, 747 bp, Gossypium hirsutum
  Clone ID: GOSHI-09MAY01-C2244_1
gcctttttacctgaaaatatagtccaagtttacgataatcaggttctttatactctgaagaagcctatctcccgggattgtttctataatttacaaaagaaaaaataataatatctggttaatttcgtcaggggctaagcttgtttgcttccataaattggtctatttagttcttctttcaatttattggttctgggtattcttggttcttggtcgatcgtttattttcaatttggttgaggatggtttgcatggtttctcgcactggaaggcacttgcagcgatacgataacctatgccgccgccaagttgtcgggtgagtattttcatgatgaagagagtttgatttgcttcatccttttttttgtatttattctcatctagagaaattttatttgttccattatctttaatttttctgggttcctgttgaaaattttggtcttttctgaattggggcctgacatttttggtcaaaaatttcatgctaggaaccttgaactgttgtcattttaggggttaaagagtaaaaaagacaaatctttttcttgggatgaatgaatgggaaactcatttgcttcaattcgacatatggagttgcatgcctattattcaatataacatagttggacctttacggtgacttgaggtcctgtgacgtctgcctaatgtaaaaatgtggtttccatgttaaagactagtaggtgcaaaagtaattaaaatttggtacttttaaatgccgtatag

SEQ ID NO: 10898 - DNA, 670 bp, Gossypium hirsutum
  Clone ID: GOSHI-09MAY01-C2224_2
ctacattcagcaaaggggggctctgagatcacataccaaaatggtgaaagccgttgccgtccttagcagcaatgaaggtgttagcggaactgttttcttctcccaagaaggagatggtccaactaccgtgactgggaacctttctggtcttaaggccggactccatggcttccatgttcatgcccttggggacataactaacgggtgcatgtcaactggaccccattttaatcctgctggcaaagagcatggtgctcccgaagatgagaaccgccatgctggtgatctaggaaatgtcactgttggtgatgatggctgtgctagcttctccatcgccgacaaacagattcctctcacaggcccaaactccattatcggaagagctgtagttgtccatgcagatcccgatgaccttggcaagggcggccatgagctcatcaaaagcacaggaaatgctggcggcagagtagcttgcggtattattggtctgcaaggctaaaatccgagccaaatgcgtttgaaggatgcaatgggctttgtgaagtagaaagaacttggttataataataaaaaggttaaaagaatccttaatttgtgtacttttgttgtgtgttggttgtcatgtgtaactcagtgtcctttgaatcttaaaatacctttttgttgaatg

SEQ ID NO: 10899 - DNA, 907 bp, Gossypium hirsutum
  Clone ID: GOSHI-09MAY01-C2224_1
gtgaagtggtgaaggtttgtacgttactagaagctcccccccgtccgcagcgattccacgatttccaccccttattctataagtttgatttaactgctaaacacaccacactcattcctcacttctgttttccttgttctcttctacattcagcgaaggggtgctctgagatcacataccaaaatggtgaaggccgttgccgtccttggcagcaatgaaggtgttagcggaactgttttcttctcccaagaaggagatggtccaactaccgtgactgggaacctttctggtcttaagccgggactccatggcttccatgttcatgcccttggggacacaactaacgggtgcatgtcaactggaccccattttaatcctgctggcaaagagcatggtgctccagaagatgagaaccgccatgctggtgatctagggaatgtcactgttggtgatgatggctgtgcaagcttctccatcaccgacaaacagattcctctcacaggcccaaactccattatcggaagagctgtagttgtccatgcagatcccgatgaccttggcaagggcggccatgagctcagcaaaagcacaggaaatgctggcggcagagtagcttgcggtattattggtctgcaaggctaaaatctgagccaagatgcggttgaaggatgcaatgggctttgagaactctttatgtgaagtagaaagaacttggttataataataaaaaggttaaaagaatcctttgtttgtgtacttctgttgtgtgtcggttgtcgtttgtaactctaaggaagagtgtcctctgaatcttaaaataccttttgttgaatgctttatgtttgcccctactttcttcattttctgcacttttcaatatatatccctatctccgtattcagtattc

SEQ ID NO: 10900 - DNA, 488 bp, Gossypium hirsutum
  Clone ID: uC-gsflmaxxa048h08b1
ttgtgcaaaggggggctctgagattttgcttgcttgttcgattttttttcccaatttttcctgcttaagttaagcttgatcttgatgactatcaattcattttctcttatgatgattgactaaagctaaaaggaaaaaaaagatcacataccaaaatggtgaaagccgttgccgtccttagcagcaatgaaggtgttagcggaactgttttcttctcccaagaaggagatggtccaactaccgtgactgggaacctttctggtcttaaggccggactccatggcttccatgttcatgcccttggtgacataactaacaggtgcatgtcaactggaccccactgtaatactgattgaaaatataatggtacattgccaaattataactggcacactggtgatctatgaaatgtcacttttggtgactgatgctgtgctacatgatacatgcttacaagcactttccactcacatgccccaactccatta

SEQ ID NO: 10901 - DNA, 441 bp, Gossypium hirsutum
  Clone ID: LIB3584-050-P1-K2-A8
agaactgtgaagataccttaacacacttctacatctggtaaactcctcatgagaaccggactacactactggggttcgccatgtctgacatgagcagcaactaatacttcactgacactatccaattctccaaagaaagcaacaacacaactaccattactactaacattagttacattaacactggactccatgactctcatgttcatacccttggcgacataactaacggttgcatgtcaacttgaccacattgtaatcctgctcacaaagagcatgtacctcccgaagatgagaaccatcatgcttatgatctacgaaatgacactgttggtgatgattgctgtgctagcttctccatcaccgacaaacagattccactcacaggcccaaactccattatctgaagagctgtagttgtccatacagatcccaatgacc

SEQ ID NO: 10902 - DNA, 765 bp, Gossypium hirsutum
  Clone ID: GOSHI-09MAY01-C3974_1
agaggaggtcgatatcgtgataggagaaggtccactcctcgttactctcgttcgcctcgatattcacggtctccacctcgtcatgggagatataggtctcgcagtcgggattattcaccttctaacgataggcattactcgagatcggttacaccccacgagggacactacagtcgagataggtattcacgttctccagcatacaatgtctcaaggagctgtagccggagtctacaaaggggccaaggcccaagccagggaagaagccgaagcccgagacggagcagaagccacagcccaggagaagctgcaagcccaatcagaagcagaagccgtagccggagtccataccatgaggaatacaagagggaactcaatggagaaaggtctcccagtcaatgatattgtgctgccatcttttgtattgtttggtgtatttgatgatcgatgctggtgtttgaacttaaaatttggatattttcaagggtttagagtccaactggttatgtcgtaaaaagagttattgcagcttgagattctttcttaaggccgtctgttaactagtaatcaagtactgaaattgaggaaccgttttgcccacaattagttggtgacttatttataaaaaaaaaaaaaaaaaaaaaaaaaaaaaaaaaaaaaaaaaaaaaaaaaaaggacgatctaaaaagatagaagctagctatacacatgcatgcatacgaaatagactatttttttatagtgagcctaaataaatttaattga

SEQ ID NO: 10903 - DNA, 482 bp, Gossypium hirsutum
  Clone ID: GOSHI-09MAY01-C3964_4
cccacgcgtccgcacagatctaccatatcgtgagcaagaaagctatggagaccagcgaggaagggaatgcttcagctgtcccatcaaagggagagaaaatcgatgtgggtaaagacgtgtcagctatgaagaagggaggttcctgctcaagctaggatgatcacactaatctgaagtcagattgtttaaatgatgcggccggggtttcgatttcatcataaaccttggttttgtaaaattttcttaaaagggtgcctaaagtagatctgagcagagattgatttaatttttcattcatttttttccctgatgactgttattgttagtagacaagaggattacgaagaacagggtcttacactattgcatttaaatatgtgcttagaacgtctgtttacttagaacaaattgtgcccaactcttttgttggaaataccatatcccatctgtttcttcaaaaaaaaaaaaaaaaaactcaagac

SEQ ID NO: 10904 - DNA, 1169 bp, Gossypium hirsutum
  Clone ID: GOSHI-09MAY01-C3964_1
atcccacttcctctaattttcactctcgagtccctcttctcagagacagcagtcttttacattggaaaatatttaaaaagaaatttacttttttttctttttcttttttttttgtagtgagagatcttaaagttgaaacgaaaccctcttttgcacgctctttctctctcgtattcttcactcgaagcaaaagtaagagggaaagtaaaaggagggttttgaggagggtgaaagatggctggttacagggcagaggatgactacgacttccttttcaaggtggtgctgatcggtgattcgggagtaggcaagtctaaccttctctcaaggttcaccaggaacgagtttagcctcgagtccaagtccactattggcgttgagttcgctactcgtagcttgaatgttgatggtaaggtcatcaaggctcagatttgggacactgctggtcaagaaaggtaccgtgccatcacaagtgcctattaccgaggagctgttggtgcgctacttgtgtatgatgtgacccgacactccacgtttgaaaatgtggagaggtggttaagagagttgagggatcacacggatcccaacatcgtggtcatgctcataggcaacaaatcagatctccgacaccttgtggctgtcccaactgaggatgcaaaatcctttgcggagaaagaatccctctacttcatggaaacttcagccctggaagcaacaaacgtggaaaacgcattcgcagaagtgctgacacagatctatcacatagtaagcaagaaggcaatggagacaagtgatgaaggggctgcttcagctgttccatccaagggggagaaaattgatgtcagtaaagacgtgtctgcaatgaagaaagggggttgctgctcgagctaagggatgaagaagatgttaaaacctgcagtctctgattgttttaagggatgcaggcatggatggggatttcattgtaaaccttgggttctgtaaaatttttctcaaaaaggtaccctatagtaggatatgggtggactggagattgatttaatttacataaaaaaaaattcataatggctgttaatttgagtagacaaaaggcatgtgaggaacagggttttacattatttgtgatctggttggtcttagttggtaacacccccacgtgtttttaattt

SEQ ID NO: 10905 - DNA, 654 bp, Gossypium hirsutum
  unsure (1)..(654): unsure at all n locations
  Clone ID: AI054474.1
ctctttctctctcatattcatcactcgaagcaaaagtaaaagggaaagtaaaaggagggttttgaggagggtgaaagatggctggttacagggcagaggatgactacgacttccttttcaaggtggtgctgatcggtgattcgggagtaggcaagtctaaccttctctcaaggttcaccaggaacgagtttagcctcgagtccaagtccactattggcgttgagttcgctactcgtagcttgaatgttgatggtaaggtcatcaaggctcagatttgggacactgctggtcaagaaaggaaagaaaggggaaggaggatgcgataataaacccagaggaacaataaaaccatcgatttagcaacattttgtgctgtgatatgtaatgtctctatatagtttttggattcagataaagattgaaggaaatgcttctacatcattgatgagctgcaccaccttagttntagaatcatggtcaacggatgcatgatntgacccttgnnttcgnggatgatggtatagagtgtaatanggttgatagtntgttaatggctgatagtttcgttaaacctgctntttgactcaaagactgacttcttggaaagtttgttgttttgactcgcttcaaactgaagtccggcctacaatgctn

SEQ ID NO: 10906 - DNA, 466 bp, Gossypium hirsutum
  Clone ID: uC-gsronu33B144a06b1
tgttgttgaacacctaaatattataatttgggtggaggtgctttgctgaacaacatcgatttgtcaattgttttgttgatttttatcttacgaatatgaaatgttttcaatacaaaaagtcccttggatcctacagctagagcatgctcctcattgtcggtatatcttgttctattatggtataaggctactaagttgtcatatgttttgtaatgtgattcattcattttggatatgaaaatgcaagttattgacatcatccttggattagcaggaagaaaggggaaggaggatgcgataataaacccagaggaacaataaaaccatcgatttagcaacattttgggctgtgatatgtaatgtctctatatagtttttggattcagataaagattgaaggaatcgcttctacatcattgatgagctgcaccaccttagttttagaatcatggtcaacggatgcatg

SEQ ID NO: 10907 - DNA, 440 bp, Gossypium hirsutum
  Clone ID: LIB3189-051-P1-K1-D4
cactcgaagcaaaagtaaaagggaaagtaaaaggagggttttgaggagggtgaaagatggctggttacagggcagaggatgactacgacttccttttcaaggtggtgctgatcggtgattcgggagtaggcaagtctaaccttctctcaaggttcaccaggaacgagtttagcctcgagtccaagtccactattggcgttgagttcgctactcgtagcttgaatgtcgatggtaaggtcatcaaggctcagattcgggacactgctgggcaagaaaggtaccgtgccatcacaagtgcctattaccgaggtgctgactgtgcgctactagtgcttgatggcacccgactctagacgtgtgaaaatggggagaggtggcttaattaaagtttctttcatgtgaccactatattaattgaatgtctgtttttttatcacacc

SEQ ID NO: 10908 - DNA, 405 bp, Gossypium hirsutum
  Clone ID: LIB3145-024-Q1-K1-H12
cgcttagaaagagggttttagctgtggtttttagaaacagtaaagatggctggggacagaggtgaggatgactatgactatgttttcaaggtggttttgatcggtgattccggtgtcggaaagtcaaatctgctctcgaggttcaccaggaacgagtttagcctcgagtccaagtccactattggtgttgagttcgctacacgtagcttgaatgttgatggaaaggtcatcaaggctcagatttgggacactgctggtcaagaaaggtatcgtgccataacaagtgcctattatcgaggagctgttggtgcacttcttgtgtatgatgttacacgacactccacattcgaaaatgtcgagaggtggttaaaaagttgaggatcacacagatcccacattgtagtc

SEQ ID NO: 10909 - DNA, 245 bp, Gossypium hirsutum
  Clone ID: LIB3148-014-Q1-K1-G4
cccacgcgtccgatttaatttttcattcatttttttccctgatgactgttattgttagtagacaagaggattacgaagaagagggtcttacactattgcatttaaatatgtgcttagaacatctgtttacttacaacaatttgtgcccaaatataaaaaaaaataataatataataaaaaataaataaaaaaattaaataatattttttttttttttttttattataaaaaaaaataaatatttg

SEQ ID NO: 10910 - DNA, 457 bp, Gossypium hirsutum
  Clone ID: GOSHI-09MAY01-C3914_2
cccacgcgtccgcccacgcgtccgcccacgcgtccgcccacgcgtccgcccacgcgtccgctcagttggagcagatccacggcgaaatccgggatcttttccgtgctctttcaaatggcttccagagactggataagatgaaagattccaataggcaaagcatacagctggaagagcttactggcaagatgagggaatgtaaaagattaatcaaggagtttgatcgtgaaattaaagatgaggaaagcaaaaatcctcccgaagtgaacaagcaactcaatgatgagaagcagtctatgatcaaagaactgaattcgtatgtagctatgaggaaaacatacatgaatacccttggtaacaagaaaattgaactctttgatatgggagctggagtcaagtgaacctacagctgatgaaaatgttaaaatggcttcatcaatgtcaaaccaagagcttg

SEQ ID NO: 10911 - DNA, 1036 bp, Gossypium hirsutum
  Clone ID: GOSHI-09MAY01-C3914_1
tcctcacgcgtccgcccacgcgtccctttctcctaacttttgttctctctctctctctctagaacccttcaattttcaatttcatttttccaaatttctcccctttttttttctaaaaatagagaaaattttgggaaaaaaagaaaaaaaattcccagcgtgggagtgagtgtttatgttttttttttttatgaattttgtactgtggggggttttgaatgagaactgaaatacttttgggaaattgaaaatcttcaatcggcggactagatggccaccacggagttgcagatgagtcctcagttggagcagatccatggcgaaatccgcgatcttttccgtgctctttcaaatggcttccagagactggataagatgaaagattccaataggcaaagcaaacagctggaagagcttactggcaagatgagggaatgtaaaagattaatcaaggagtttgatcgtgaaattaaagatgaggaaagcaaaaatcctcccgaagtgaacaagcaactcaatgatgagaagcagtctatgatcaaagaactgaattcgtatgtagctatgaggaaaacatacatgaatacccttggtaacaagaaaattgaactctttgatatgggagctggagtcagtgaacctacagctgatgaaaatgttaaaatggcatcatcaatgtcaaaccaagagcttgttgatcatgggatgaagacaatggatgagactgatcaggccattgaacgctcaaaaaaggttgttgaacaaacaattgaagtaggaactcaaactgctggtactctaaaaggacaaactgatcaaatgggccgtattgtaaatgagctggatacaattcagttttcaattaagaaggccttccaactggtgaaggagattggtaggcagggagccactgataaatgcatcatgctatttctttttcttatcgtatgcggggttatagccatcatagttgtgaagattgtgaatccgaacacaaagattttagagatattccagattggcacctccagcacct

SEQ ID NO: 10912 - DNA, 587 bp, Gossypium hirsutum
  Clone ID: GOSHI-09MAY01-C3854_1
gttattttttacattgacgactatgatgaactcttcatcgtcgatcgactgaaggaattgttcaaatacaaagggttgcaagttgcccctgccgagctcgaagcaatgctcattgctcaccctgaaatcatcgatgctgctgtcgtcgcaatgaaggatgaagcagctggggaagtacctgttgcatttgtggtgagatcagataaatctcagatcagtgaagatgaaatcaagcaatatattgcgaaacaggtggtgttctataagagaataagccgtgtgttcttcatggaagccattccaaaggcaccatcagggaagatcttgagaaaagaattggagagctaacctggctactgggaactattgatgattatactgtgctctctgaaagcttccccaacttttccatgaaaaagctgtgttgatgtaatatacacagagtgtatgggttaaatgtgggaacctggggtatatgctccggaaaaatcgggatatatttatatacacaaagtgagtttgggaagattgtaaagttatgagatgaaaagattaaattgctgaagaggatgtatgattatatcctt

SEQ ID NO: 10913 - DNA, 1070 bp, Gossypium hirsutum
  Clone ID: GOSHI-09MAY01-C3844_3
aacgaacaaaaggagtccctctctgcccaaatccctccctgctgggccttaatgatggctgcctgtttgctgatagcgcatcaatggaagcgtacatggagctcacatggagatcgattactatgctttgtctctaaaatggcccggcaccatctgccacaagactcgccatagctgctcctccaaagcctgctgcctaagctcaaactctccaactagaattgtaccattccattggtgtaagtaggcaccatattagtaaatgcactggaacactgttccactcacatgtatgcttatcctgtattctcatgttcaagaatgctcaaagatgagcatgttacaaacactatagctgtgtatcgtcaccttagtacaaatgtaactaatccaatcgttatattagagagcaaatcatcaacttgctcaagtggcaaaagggttatttagagctcatgagtcggataagcatggaactagctcatctacggttattacagatgaatacagctactttataacaaccctcaatgtttacttacaaatataatgtctcgaaaatactgaatgacgctggatatgtcccttctaatagtgaaaggtatcctcttgcgggcattgtctctgccattgagaattctttccgggcaacaccacaagtgatttgctcaaaacaagctgtggagaaaattcgtctatgcttctttaaggatttcaagcctcggaactgtttggcttcaaagacctcatgtcccaagtatgtgagcttgccagcatatgtgtagatgggaaggcaagcaccggaatctaaaatggcataggtatctgatgataaagctctgtaaggtcagcactcaagtttctgtctgtaaaagaatgtaatatatatttcagatcttacgctgcatttgacgtggctgtatcagggttcctaccatctaactcttcgccctgtttcatttaatcatacaaaactgttgtcttatatcatctgagccccttttaacataatccaagttgtaaactcgatatgctttatcttgtatggttaatggctgcaattttcttcc

SEQ ID NO: 10914 - DNA, 1004 bp, Gossypium hirsutum
  Clone ID: GOSHI-09MAY01-C3844_1
cgacaatggcaaatgacaacccggtccgacccccccgtgccaacacattccattgatttttacggcgaaaaaaagaggaaaaggaaaacgaagaaaatggcgtccctctctgcccaaatccctctctgcttggccttaatgatggctgcctgtttgatgataggcatcaatggaagcatagatggagctcagagggagttcgattactttgctttgtctcttcaatggcccggcaccatctgccacaagactcgccattgctgctcctccaatgcctgctgccgaggctcgaactctccaactgaatttaccattcatggattgtggccggattataatgatggaacctggccttcctgttgttaccgatctcagtttgatgtcaaagagatttcaacattgcttgatgcacttgagaagtactggccatcgttatattgtggcaaatcatcaacctgcttcagtggaaaagggttattttgggctcatgagtgggagaagcatggaacttgctcatctccggttattcgagatgaatacagctactttataacaaccctcaatgtttacttcaaatataatgtcacgaaaatactgaatgaagctggatatgttccttctaatagtgaaaggtatcctcttggaggcattgtctctgccattgagaattctttccgggccacacccgaaatgatttgctccaaagaagctgtggagggagattcctttatgcctccttaagggattttcaaccctcggacctgtttggcttccaaagacctcatgttcccacgtatgttgagccttgcccccctaatgtgttcaaggggaaagggaagcctctcgaattcttgaatatgggcctagtgtatccctgatgaatggaaacctctggtaaaggttccccacttgaaagttttctggttctgttgaaaagaatatgttactagttatgttttcagatatccttatggcccgcattttttacgctgggctcgtctccc

SEQ ID NO: 10915 - DNA, 1313 bp, Gossypium hirsutum
  unsure (1)..(1313): unsure at all n locations
  Clone ID: AI729648.1
agtgattttgtgtctgtttncttgttttcttctcctctctgctctgtctctcttctgtgttgggtgtcttgtctatttcatntctccttggttcttctcttacgcttcttcggattcttagatggagctctcagggagttcgattactttgctttgtctcttcaatggcccggcaccatctgccacaagactcgccattgctgctcctccaatgcctgctgccgaggctcaaactctccaactgaatttaccattcatggtttgtggccggattataatgttggtacctgtccctcctgttcttctcgagtctcgccgtgtcctgtctcgatttgtgttcgcctcgcttgcttctttcttccctatggtgcgatgtgtctctacctccctgtcgcggctcttctggcctcctgtctctcctctgtggttggcctctgtgtgctgcatttcgcggctcgcattgttcctgtctttcctctcggtcgtgtttgctgcgttgttccggcgtgcatttctggttagtgtctctgtcttcattctgactcgccagcgttctcctgcctcgcactctcttcgtccctgcttgctcgtcgcgctatatgctctacgtctattccgtgctcgtgtgtcttccctacttcgctcgctctctgtgtccgcgttcgccgtatctcgtcagtatgacgtctctgtcgtcagatcgtgctctcattcgctcgctcatgtcgcgcgatgttgcgtcgtgctctctcacgcgatgcatgttacagtgtctcgacttctgctctgacttcaggtcgtgcgtctatccttcgtgtctactctgtcgtaggttttcgctctctagtggcgtctctagtcgtctctggcggcgtctctcgcttatgtgtgcttcgctttctggtggtcatgattacgtcgatgtaatgtgtagttatgtgtctgcagtcgcttgcttgataccttctgtcgtggtgtctctagccgtgtgtcagggcgccgttctacactgtatagtctagcttagtctagcttgtatcggccgttctatcttcgtctctcttcagcttgcgagacttatgtgattctcaacgcctgttctttcttctacgctctcgacgtctgtcgttctctttctctcgcctcgcgtctatcgcctcgtctcgcggtgcgttgctatcgtctgtattcgcgttctcgcagtccagctgcttcctattcgctcgtctcattctcgtgcgttgcttaggtctcgctcacgtatacgttagtcatggtcgttgttcgcgttctatcttcgcttcttgttgctc

SEQ ID NO: 10916 - DNA, 1859 bp, Gossypium hirsutum
  Clone ID: GOSHI-09MAY01-C3874_1
gttttgacaacactcacctgtctcattaaaacagaaaaaaaaaaaaaaacccctcacctgcctcatttcagtatctaccaatgaccagaaactagaggcagcaaaaatgagatctacctaaccctctatccgtccttcaaaacatacaaacaaagggttgttttcttgattgcaagagaaaggaaatctttttggacacccaagtgtggttgaaggcttaaacatcagctgaagaactgataatttttctgttccaagctttgcttttgtactgtatttcctcaaaatttctagcgatgactccaattgggtttctgggtttactgtttttgctgctcgctctatactgtgggatagacccttttaagcacagtgcaatctctgaatttcctgactttgagtcttacaaggtggatttgcctccatgggaactggttccgacagacagggacaaggataatttgcttcagaagtcagagattaagttcttgaaccaggttcagggccctgaaagcatggcatttgaccctcttggtcgtggtccttacactggtgttgctgatggtcgagttctcttctgggatggtcaaaactggaaggattttgcttatgcttccagcaataggtctgaaatatgtaatcccaagccatcaccacagagttacctgccaaatgagcatatctgtggcaggcctttgggtctccggtttgataagaacactggtgatttgtacattgctgatgcatatttggggctgttcaaggtgggtccggaaggcggattagcaacaccacttgtaactgaggtagatggggtgcccctgaggtttaccaatgaccttgacattgatgatgaaggaaacatatattttactgatagcagcagcaaattccagagaaggaacttcatgcagctagttttttcttcggagaatagtgggaggcttctgaagtataatctttacacaaaggaaactgctgtccttgtcaggaatctccaatttccgaacggggtatccgtgagcaaggatgggtcttttctcgtatcttgcgaaggatgtccgggcagattactcaagtactggttgaaaggtgagaaagcagggagtactgaggtgtttgccatcttaccaggatttccggacaatgtccgaacaaataaagaaggtgaattttgggtagcaattcactgtcgcaggttcacgtatgctcatataatgggattatatccaaaactcaggaaattcattctcaagctccctatatctgcaaaaattcaatacctgcttcagattggcggtaagctgcacggaattgttgtgaaatacagtccagatggaaagctgttgcaggttttggaggatagtgaagggaaggttgtgaaagcggttagtgaagtcgaagagagggatggcaagctctggctagggagtgttcttatgccctttgtggcagtttacaacttggcttgagttgggaggcagaaggaaaaataaagagttagcaatggtgttttatgaatgtggcaaatcttctcttagccatcgttttcactatgaagaaaaacacaagaatgttttctaagtctatacatgttattggcagtggggctgtattacttggattgcaagtatttggataaaattctgctgaaaagaaagtatttgggtttttccatttaaaaaaaacagtaaaaaaaaaagggcagtttttacaagtagaacatattcttaaatttatcttggaaacgaagtatcaaatgtaagacacatagccaaagattttaagaaaaaactacttgaaatcaccaatatggacatttataactaccattcctaatcttagtggtagttataact

SEQ ID NO: 10917 - DNA, 660 bp, Gossypium hirsutum
  unsure (1)..(660): unsure at all n locations
  Clone ID: AI054687.1
gtggaacggagcaaattttctgtttacttcgatcatgtttcactctacatgaaagaccccatgatgtagaatgaagattattggtaattggcactgacaatgtagcattcaggaacttcatgcagctagttttttcttcggagaatagtgggaggcttctgaagtataatctttacacaaaggaaactgctgtccttgtcaggaatctccaatttccgaacggtgtatccttaagcaaggatggttctttactcgtattttgcgaaggatgtccgggcaggtttgcatgcttctacatgtactcaaattntgctgtgttagatctgcacgtgctatagcctttttaaacactttcattaggatttatattcaatgatgattattcacattgcttggacccattttgcttcatcacatgacatattgcttttcttgaatgtcaaaaatatcctgtattataataggatactcgtcatttgttgattgtcagattctaattttacttatcctttaatatattccttgtaaataatgcctagtattacctaaggctttctagtattaactctttatagatttagttcatcgtttaactgttgctttgtgaggatagatatgagtttaatgtccagttactctgcacttggtgatagtgtaaag

SEQ ID NO: 10918 - DNA, 482 bp, Gossypium hirsutum
  unsure (1)..(482): unsure at all n locations
  Clone ID: uC-gsflmaxxa069a06b1
cccacgcgtccggtggttgaaggcttaaacatcaggtgaagaactgatactttttctgtgtccaagctttgcttttgtgccgtatttcctcaaaatttctagcgatgattccaattgggtttctgggtttactgtttttgctgctcgctctatactgtgtccctttttctcttttcctttntcttctttcttcccttttttcttttcttttttctttttttttcttcctttttttcctctctctctttcttttcttttctttttttccttctccctcttttttctttctctttctttttccccttctcttttccttcttttttctttcttcctttttttccttctttcttttctctcccttccttcttccttcttttgttttcttttttcttctctcctttgtttccagtcaaaaatagtcttttttttttcggtttagtttgggaggggtaaactctcgttttttctgttcccccccctct

SEQ ID NO: 10919 - DNA, 545 bp, Gossypium hirsutum
  Clone ID: GOSHI-09MAY01-C3814_7
ccaacacgtccacacatgcacctagcttgagagtgtctatggggcatgtttgttgtgccgaggtggtggtgagaacacggtgtttccggtgaaggtggcttcacgataggaggcgttggtggcttcacaataggtggtgatggtggtggtagaatcggcggtgttggtgggttcactattggtggactggggtggactggtggctttggaggcagtattggtggtgatatgaccggcggtattggatagtaaggtggcttgggtgtatatggcggaggcttcacaaccggcggtttgggtgtatatggcggaggcttcacaaccggtggtttgggtatatatgggaggcttcacaaccgggggtttgggtgtatacggtggaggctttacaataggtggcttgggtatatatggaggcttcacaacaggtggcttgggatgatccggtggatgttttggtggtttagggtgatatgggggttacacccccggaggcttaggtggtttagggtgataaagtggcttcaccaccggtggcttcggtt

SEQ ID NO: 10920 - DNA, 1426 bp, Gossypium hirsutum
  Clone ID: GOSHI-09MAY01-C3814_5
cccctggatgggcaccaaggcgtcatatccattgggtaactgcctaataccctcaagaaagaggtgaattcttgaacctccgccaacgcgttttgagctctgacctccgccattgacgcttcgaaatccacgtaaaacatgtattcgaaatgcttcgccgttcctacattggcgtcgtcgactaaccggatcggccggttacggtgtggccgtgactcgatcttcgccaacctcatgttcctaaacgcgatcgccgacaacactttgaaaaagcacgctggttccttcttcgtgtgcgaagacgatgctcgttttgaacggccggtccgtgcgtggaatgatcggatcacgagctaacataacgaagcgcgtgacattgcttgaatcgtcttggatcccgtcagcgaggacgttgagtccgtagagttcggcggcgcgtgcgctcgctatggctgctgtgtcacggaggttgtttgtcgcgatatattcggcggctccggctgtatcatcgactgcttcgcgcgtgacgttgaggccgagtttggtgacagtgttttcacactgtgacagagcttgtggatgagaaatgacgcgcgtcaaatactctttcctaactcccgggagagctaaaagacagtgatggacaggtaattgaacttcaccgacgatatggagtcggtgacggagaagaagatcatagttccgatgaatcgaaccgccgagtgaattttccaccggtaaaacagctcgatcagcaatccaaagctcaaccgcttgaaacgcaacttcaaactggtcacaaggaatagcttcacaatttggataagctttccccgccgcagcttccgagtaagcaccgggaactccttgataagccacacgcaactgagaaccgtgcttcggagcaggagacaaatcggtaatagttaacggcttctgtggaggctgtttagcaggtggctgaggcttgttcttcttatctagcggaactaagttcagatccaaggaagttttatggccgttaactgccgccgccaggtgatcggaggcggaggaagtgttcgatttctcaccggaatcttgatcctgagagaagactttgctagacaaaatagcacacgagctttgccaatccacccggcttgaacggactccattggggaatggaactgaatcagagtgatacacacaacgtacaggtacagctaaccgaaccggcttatcaaaccgaggcttcgaccggcgaattataaggtacgaattaagattttgcacgtgagaaattgcctgcatttttccttctcgtttcccttttattaaaaatcacacagaggaaagcaaaggaaagacgaaggaaaggaaagcgttaaaattttagtattaagaaaagcttgttgttctcctgacgcgtgggcggacgcgtggg

SEQ ID NO: 10921 - DNA, 1298 bp, Gossypium hirsutum
  Clone ID: GOSHI-09MAY01-C3814_4
aagaaaaaaaaaacatggggtttatatgtttttcatcattgtgctggacattggaaccctggaggtgaagttttgccacagtcgatgaggacctgaagagctatggggattataatattgatattcaaaaggttggctttgatcgtagtacagagacaaatggcagcgtctaaatccaacagcccttgtagtacagggcagcaagtgtctttggcgctgctacctatgccgatgtgtactaagccacccaacacgtccacacatgcacctagcttgagagtgtctatggggcatgtttgttgtgccggaggtggtggtggaggacacggtgttcccggtgaaggtggcttcacgataggaggcgttggtgggttcacaataggtggtgatggtggtggtagaatcggcggtgttggtggattcacaataggaggtggcagaatcggcggtgttggtgggttcactattggtggactggggtagactggtggctttggaggcagtgttggtggtgatatgaccggcggtattggatagtaaggtggcttgggtgtatatggcggaggcttcacaaccggcggtttgggtgtatatggtggagggttcactattggtggactggggtagactggtggctttggaggcagtgttggtggtgagatgaccggcggtattggatagtaaggtggcttgggtgtatatggcggaggcttcacaaccggcagtttgggtgcatatggcggaggcttcacaaccggcggtttgggtgtatatggcggaggcttcacaaccggcggtttgggtgtatatggcggaggcttcacaaccggcggtttgggtgtatatggcggaggcttcacaaccggcggtttgggtgtatacggtggaggctttacaataggtggcttaggtacatagggaggctttacaacaggtggcttgggaggatgcggtggatgttttggtggtttagggtgatatgggggtttcaccatcggaggcttaggtggtttagggtgatacggtggcttcaccaccggtggcttcggtggtttagggtgatatggtgggtttaccacgggaggcttaggtggctttggaggatgatgttttggtggtttagggtgatagggtggcttaacaatgggaggatgatgatgtttaggcggatagtgtggcggaggacatttcggcggcggagatgggtggtggtaacatctcagggcagcctagtgaagtgagcaatgctcctaaattcaaaaacaacacaattagatagggtaaactatgcatccccc

SEQ ID NO: 10922 - DNA, 578 bp, Gossypium hirsutum
  Clone ID: GOSHI-09MAY01-C3814_3
ccctgaggtggagttttgccacagtcgatgaggacctgaagagctatggggattataatattgatattcaaagttttggccttgatcgtagtacagagacaaatggcggcgtctaaatccaacagcccttgtagtacagggcagcaagtgtctttggcgctgctacctatgccgatgtgtactaagccacccaacacgtccacacatgcacctagcttgagagtgtctatggggcatgtttgttgtgccggaggtggtttagggtgatacggtggcttcaccaccggtggcttcggtggtttagggtgatatggtgggtttaccaccggaggcttaggtggctttggaggatgatgttttggtggtttagggtgatagggtggctttacaatgggaggatgatgatgtttaggcggatagtctggcggaggacatttcggcggcggagatgggtggcggtaacattcagggcagcctagtgaagtgagcaatgctcctaaattcaaaaacaacacaattagatagggtaaactatgcatccccatattttagcttagggagcttgcggacgcgtgata

SEQ ID NO: 10923 - DNA, 1568 bp, Gossypium hirsutum
  Clone ID: GOSHI-09MAY01-C3814_2
catattttttattgtgttttattttcatatttttttctttaatttttttttttttttttttttttttttttagtacttattcaaaataaaaataaagcaatgttcactccaaaacaagcttagctttgaaataagaaaaataacacacacacgcacaattaatatgatcctatgaactaactaaaatcacaacatcgtactacattgattcgttcgtggattcatcgacatctattaaaataatctaacctcagacacgtctttatgatcttcatcaaccagcaaaacaccataaattattaaaagaaacatataataagacatgaaaatatttgttatttcgaaagaaaaaaaaacatggggtttttatgtttttcatcattgtgctggacattggaaccctggaggtggagttttgccacagtcgatgaggacctgaagagctatggggattataatattgatattcaaaaggttggctttgatcgtagtacagagacaaatggcagcgtctaaatccaacagcccttgtagtacagggcagcaagtgtctttggcgctgctacctatgccgatgtgtactaagccacccaacacgtccacacatgcacctagcttgagagtgtctatggggcatgtttgttgtgccggaggtggtggtggaggacacggtgttcccggtgaaggtggcttcacgataggaggcgttggtgggttcacaataggtggtgatggtggtggtagaatcggcggtgttggtgggttcactattggtggactggggtggactggtggctttggaggcagtattggtggtgatatgaccggcggtattggatagtaaggtggcttgggtgtatatggcggaggcttcacaaccggcggtgttggtggattcactattggtggactggggtagactggtggctttggaggcagtgttggtggtgatatgaccggcggtattggatagtaaggtggcttgggtgtatatggcggaggcttcacaaccggcggtttgggtgtatatggcggaggcttcacaaccggcggtttgggtgtatatggcggaggcttcacaaccggtggtttgggtatatatggaggcttcacaaccgggggtttgggtgtatacggtggaggctttacaataggtggcttgggtatatatggaggcttcacaacaggtggcttgggatgatgcggtggatgttttggtggtttagggtgatatgggggtttcaccaccggaggcttaggtggtttagggtgatacggtggcttcaccaccggtggcttcggtggtttagggtgatatggtgggtttaccacgggaggcttaggtggctttggaggatgatgttttggtggtttagggtgatagggtggctttacaatgggaggatgatgatgtttaggcggatagtctggcggaggacatttcggcggcggagatgggtggcggtaacattcagggcagcctagtgaagtgagcaatgctcctaaattcaaaaacaacacaattagatagggtaaactatgcatccccatattttagcttagggagc

SEQ ID NO: 10924 - DNA, 834 bp, Gossypium hirsutum
  Clone ID: GOSHI-09MAY01-C3814_1
acgatcgcgagcggccccttttgtctttgttgttttactacattgatcccccccgcgtcccatcgacatctattaaaacgatctaacctcagacacgtctttatgatcttcatcggcgcagcggaacaccataaattattaaaagaaacatataataagacatgaaaatatttgttacttcgaaagaaaaaaaaacatggggtttttatgtttttcatcattgtgctggacattggaaccctggaggtggagttttgccacagtcgatgaggacctgaagagctatggggattataatattgatattcaaaaggttggccttgatcgtagtacagagacaaatggcagcgtctaaatccaacagcccttgtagtacagggcagcaagtgtctttggcgctgctacctatgccgatgtgtactaagccacccaacacgtccacacatgcacctagcttgagagtgtctatggggcatgtttgttgtgccggaggtggtggtggaggacacggtgttcccggtgaaggtggcttcaccggacgcggcggtggcttcggtggtttagggtgatatggtgggtttaccaccggaggcttaggtggctttggaggatgatgttttggtggtttagggtgatagggtggctttacaatgggaggatgatgatgtttaggcggatagtctggcggaggacatttcggcggcggagatgggtggcggtaacattcagggcagcctagtgaagtgagcaatgctcctaaattcaaaaacaacacaattagatagggtaaactatgcacccccaaaaaataggacgcgtgggcggacgcgtggg

SEQ ID NO: 10925 - DNA, 449 bp, Gossypium hirsutum
  Clone ID: uC-gsronu33B029b10b1
tgcttacgcgtccgccgccatatacacccaaaccgccggttgtgaagcctccaccggttgtgaagcctccgccatatacacccaaaccgccggttgtcggcgttcgcgtttaggaacatcagtttgacgaagatcgagtcacggccacaccgtaaccggccgatccggttagtcgacgacgccaatgtaggaacggcgaagcatttcgaatacatgttttacgtggatttcgaagcgtcaatggtggaggtcagagttcaaatcgcgttggtggtggttcatgaattcacctcttttttgaggtgttttaggtcgtttctaatggatttgacatcttcttattatttattgtgttgtttccttatctttttttttttctttatcatcttctattatttttttttattacattttttatttttctatattatattttttttttttttttc

SEQ ID NO: 10926 - DNA, 442 bp, Gossypium hirsutum
  unsure (1)..(442): unsure at all n locations
  Clone ID: uC-gsronu33B108g09b1
cccactcgtccgcccacgcgtccgcccacgcgtgcgatttgtctctgtactacgatcaaggccaaacttttgaatatcaatattataatccccatagctcttcaggtcctcatcgactgtggcaaaactccacctccagggttccaatgtccagcacaatgatgaaaaacataaaaaccccctgttttttttctttcgaaataacaaatattttcatgtcttattatatgtttcttttaataatttatggtgttttgctggttgatgaagatcataaagacgtgtctgaggttagatcgttttaatagatgttgatgaatccacgaacggatcaatgtagtacgatgttgtgattttagttagttcataggatcatattaattgtgtgtgtgtgtgttatttttcttatttcaaagctaagcttgttttggagtgaaanaaa

SEQ ID NO: 10927 - DNA, 415 bp, Gossypium hirsutum
  Clone ID: uC-gsflnu33B079e08b1
tgcacgcgttcggaccgccatgagcggccattgagaacttacgaacacctgctattgtgacaccacacacaccgggaacagcgcattctgcaccgccacatcgggcacagcaaacatgcaccagagacactgcaaagctaggagcatgagcggacgtgtcgggtggctgatgacacatacggacgtagtagcatgcgccagatggcacttgatgccctgatctacaagaggctgttggatttagacgctgccatttgtctctgtactacgaacaaagccaacctgttgaatatcaataatataatccccatagcttttcaggtgcttatcgactgtggcaaaacttcacctgcagggttccaatgtccagcacaatgatgaaaaacataaaaaccccagggttttgttttttttg

SEQ ID NO: 10928 - DNA, 413 bp, Gossypium hirsutum
  Clone ID: uC-gsronu33B036b06b1
cctatgtgtccggtgaagtctccggcatatacaccgaaaccgtcggttgagaagcctgcgccatatacacccaaaccgtcggatgtgaagcctccgccatatacacccaagccaccttactatccaataccggcggtcatatgaccaccaacactgcctacaaagacaccagtctaccagagtccaccactagtgaatccaccaacaccgccggttgagaagcctccgccatatacacccaagccaccttactatacaataccggcggtcatatcaccaccaatactgcctccgaagccaccagtccaccccaggccaccaatagtgaacccaccaacagcggcgattctaccaccaccattaccacctattgggaagtcaccaacgcctactattgtgaagccaccttcacc

SEQ ID NO: 10929 - DNA, 393 bp, Gossypium hirsutum
  Clone ID: LIB3583-059-P1-K1-E1
gcgcctaagcctcccgtggtaaacccaccatatcaccctaaaccaccgataccaccggtggtgaagccaccggatgaggctaaactacctaagcctccgatggataaacccccatatcaccctaaaccaccaaaacatccaccgcatcctcccaagccacctgttgtaaagcctgcctatgtacctaagccacctattgtaaagccttcaacgtatacacccaaaccgcctgttgtgaaaccttctccatatacacccaaaccgtcggttgtgaagccatcctcatatacacccaaaccgcctgtttgtaatcctccctcatatacacccaaaccggcgttgtgaaaccttcaccatatgcacccaaactgtcttatttgaaaacttcttcat

SEQ ID NO: 10930 - DNA, 328 bp, Gossypium hirsutum
  Clone ID: uC-gsflnu33B126f05b1
ttccattcgtccgcccacgcgtccgcccacgcgtccgcccacgcgtccgaatattttcatgtcttattatatgtttcttttaataatttatggtgttttgctggttcatgaagatcataaagacgtgtctgaggttagattattttaatagatgtcgatgaatccacgaacgaatcaatgtagtacgatgttgtgattttagttagttcataggatcatattaattgtgcgtgtgtgttttatttttcttatttcaaagctaagcttgttttgtatgaactttgctttatttttaaaaaaaaaaaaataaaaaaatatataaataaat

SEQ ID NO: 10931 - DNA, 595 bp, Gossypium hirsutum
  unsure (1)..(595): unsure at all n locations
  Clone ID: LIB3583-052-P1-K6-C1
ccaatcgaactactcaaatcagagaaagggaagatgttaccaacggtgagcaaaacgcgttccacgccctccacatctcgacctaactccatgttccctcagtacctacgtcgaattgtcaagtggcaacaaatggatattgaatatactttctggcaaatgcttcacctatgtactgcaccaaaggttgtctatcagcacacaaaatatcacaaacgtaagttcgtttctgtttaatttacttttcttaaaaatatgtttatgttagctacttaagttctagctacaatgtttttaatcatggcatgctacttttgttcctagatataagtgactgcaaattagttgtgtttcaagtgacttgcacactatcccgctgttaacgcttatgctattgataattacctctcaattgtgtaaatcattttctacattgtactttttatgataagtgccatcatcctttggcctatacggttgtatgtgctacaataaattgcattctacatattcaagtgggttgtactctatcaagngggttactaagtggaattaggatatgctttcagcccttaggtgactttttctgtgcctt

SEQ ID NO: 10932 - DNA, 573 bp, Gossypium hirsutum
  Clone ID: AI730151.1
cgtttccgtcttctcattttcaagtaagcgagattcagaagagctgtgagcagatatatatatacatgatatatacagctaaaagagattcaaaacgatttacagatcaaacagcaaatcgaacagctataaaaattcaagcaatatgtcaccgacggttagcaaaacgcggtcgtcgatctccatatcacgtcctaacgccatgttccctcagtatctccgtcgaatcgtcaagtggcaacaaatggatattgaatatacattctggcaaatgcttcatctatgtactgcaccaaagattgcctatcagcacacaaagtatcacaaacaaaccaagaaccaatgggcacgtgacgaccccgcttttgttgtaatctgcagccttcttttggcacttgcaacagtagcttattgtgctgcgtatgatcacagtgctgcacatgctgtttctgtagttatttcagtattgcttttccattttttacttgctggaatactcctggcaacatgttgttggttcctgacaaatgcttatcttcgggaagaggctccaaatacttgcgtggttgaccc

SEQ ID NO: 10933 - DNA, 484 bp, Gossypium hirsutum
  Clone ID: LIB3189-042-P1-K1-D4
cgtccgtagttctaagatcgcgggcgttttttcgcgatttatttaggtgtaaaaagaaaacaaggaagacgtccctacagatctcggatcggggagccaaatcgaactaactcaaagtcagagaaaagggaagatgttaccaacggtgagcaaaacgcgttccacgccctccacatctcgacctaactccatgttcccccagtacctacgtcgaattgtcaagtggcaacaaatggatattgaatatactttctggcaaatgcttcacctatgtactgcaccaaaggttgtctatcagcacacaaaatatcacaaacaaaccaagaaccagtgggcacgtgacgaccctgcttttgttgtaatctgtagccttcttttggcagttgcaacaatagcttattgtgctgcgtatgatcacagtgctgcacatgctgtttttgtagtatttcagtattgcttttccatttttaacttactggagtat

SEQ ID NO: 10934 - DNA, 835 bp, Gossypium hirsutum
  Clone ID: GOSHI-09MAY01-C3564_1
gtgcagacgagcggtgcgggattatagtttgagtgcagatgtgagtgaatcggagagttgtagtagcttctcatatcggcggttcgatggagaaggttgctccagttccatgacctcatcgtctccaagttaccggctgctggaaggttcggttttcaggtgccgttgatgttgccggtgattggagggaaggatgtggtgatatgggatgatgagaagcctgagaaacgggacaccaatttgtctgaaattgagatgatgaaggagagatttgctaagcttcttttaggagaagacatgtctggaggtgggcatggagtgtgtagtgcacttgccatttcgaatgccatcaccaagctctctgcgaccgtctttggtcagctgtggaggttagagccattagcaccgcagaagaaggcaatgtggaggagagaaatggactggctcttgtgtgtgagtgattcgattgttgaccttgtgccatctatacagcaattccctggtggacgcacatacgaagtcatggtcacaaggccacgcttagatttgtatgtaaaccttcccgcccttaagaagcttgatgcaatgttgattaccatccttgatgggttttgtgagacagagttttggtatgctgatcgggggatagtcgtggatgatgatggtgattgtgaagcttgtgaagagaagtggtggttgccttgtccaaaagtgccaccaaacggcttgtcagaggatgcaaggaagaagttgcaacaatgcagggattgcacgaaccaagtacttaaggcagccatggcaattaatagcaatgtgcttgcagagatggagatac

SEQ ID NO: 10935 - DNA, 1168 bp, Gossypium hirsutum
  Clone ID: GOSHI-09MAY01-C3514_1
tgtcttctcctcttgttcgcgtcgggcggtggtcaagccggtccttgaagaagcgagcgatgctcgggcttggagttaaccgcgttccagcgcttggatttcacttgtgatgatgttttggattgtttgaaggaggataatattataggcaaaggaggtgctgggattgtgtacaagggatccatgcctagtggtgaccaggtcgccgttaaaaggttaccggcaatgagccgagggtcttcccatgatcatggattcaatgctgagatacaaactctggggaggattaggcacaggcatattgtgagactgttgggtttttgctcaaatcatgaaaccaatctcttggtttatgaatatatgcctaatgggagtttaggagaggttcttcatgggaagaaagggggtcatttgcactgggataccagatacaagatcgcggtcgaggcggctaagggactatgctaccttcatcatgattgttcccctttgatagtccaccgggatgtgaaatcgaacaatatcctcctcgactcagagtttgaagctcatgttgctgattttggccttgctaaattcttgcaagattctggcacttccgaatgcatgtccgccatagctggttcatacggttacatagctccagaatacgcctacacactgaaggtagacgagaagagtgacgtgtatagctttggtgtagtcctgttagaactcgtctgtggcagaaaaccggtaggggagttcggtgatggagtcgatattgttcaatgggttcgaaaaatgacagactcaaacaaagaaagtgtcctcaaagtccttgatcccagactcccatcagttcctctccaggaagtgatgcacgtattctacgtcgccatgctttgcgtcgaagaacaagctgtagagcgaccaacgatgagggaagtggttcaaatcctaaccgaactcccaaaaccaccaaactcaaaacagggagacaccacaatcaatgagtccccaacatcaccatcaccagacacaactctagactcacctacaacaacaatcacaaaggacccaaaagaccagcaacaacagcccccagcacctaaatcaacaccacctgatcttcttagcatttaagggtgtcaatgtttcaaagggggttgtagttttattactactc

SEQ ID NO: 10936 - DNA, 570 bp, Gossypium hirsutum
  unsure (1)..(570): unsure at all n locations
  Clone ID: LIB3582-051-P1-K1-G10
cccacgcttccgggtggttccaactgggcagtgggaatttcccttagaatttcatgtaattcctctgtacttttttttgcagaatacgcctacacactgaaggtagacgagaagagtgacgtgtatagctttggtgtagtcctgttagaactagtctgtggcagaaaaccagtagggtggtggggtgacngantctatatcnttcaatgggttcnaaaaatgacagactcaagcaaagaaagtgtcctcaaagtccttgatcccagattcccatcagttcctctccaggaagtgatgcacgtattctacgtcgccatgctttgtgtcgaagaacaagctgtagagcgaccgacgatgagggaagtggttcaaatcctaacccaactcccaaaaccaccaaactcgaaacagggagacaccacaatcaatgagcccncaacatcaccatcaccagacacaactctagactcacctacaacaacaatcacaaaggacccaaaagacaagcaacaaccacccccaacacctaaatcaacaccacctgatcttctaaacatttaaaggtgggtt

SEQ ID NO: 10937 - DNA, 363 bp, Gossypium hirsutum
  Clone ID: LIB3148-010-Q1-K1-B12
aactcccaaacccactaaactaagagtccccaacatcaccggcgcggtgcacaactctagacccacctacaacaacaattacaaaagaccagcaacagccaccagcacctaaatcaacaccacctgatcttcttagcatttaaggatgttaatgttccaaaggggttgtagttttattactacttagtgttctttttgctctaactttaaggtgtttaaacgtttgttttttttctttttttgtgtatagtaggattggtgggggtattttgttataaaaaaagaagaagcttgtctttcatcatgctgtactgctagttttctcccctttctgttttgagtttatgaaacagctgttttatc

SEQ ID NO: 10938 - DNA, 189 bp, Gossypium hirsutum
  Clone ID: LIB3543-043-Q6-K6-D7
cccagcgtccgcagtaataagatggcaggggaagctgctaaggggctttgctaccttcatcatgattgttcccctttgatagtccatcgagatgtgaaatcgaacaacatcctcctggactcggattttgaagcacatgttgctgattttggccttgcctaatttctgcgggggggggggggggctgtt

SEQ ID NO: 10939 - DNA, 676 bp, Gossypium hirsutum
  Clone ID: GOSHI-09MAY01-C3534_1
tccgcccacgccgtccgggagtaattgatgatccatatggatgaattttttattgctgaaaccaagtctcttcaaaaggtattattgtttgtatccacgtatatttttgtttcaaatttgtgctttctttacttataatttttaggtttgtaggagagccttactcaagattatgatgctaagtattggaggcggcgttatagtctcaagaaggacattcctagcttccttgcaaatattgctggtacaatattgactactgggaaatatctgaatgtcatgagagaatgtgggtacaatgttcaggtccctgtgtctgaaaattctaaattaatgacttttggatcaaaccatcaataccttgagtgtgtaaaagctgcttatgaatttgccagtggtgagctcttaagtctcattaaggaaaagtatgatttaataggaaagttgcggtctataaagcactatcttctacttgaccagggcgatttcttggttcattttatggatatagctcgagaggagctcttgaaaaagcatgatgagatatctgtagagaaactgcactctctgctggatctagctttgcgtaccacaggctgctgcagcagatccttgtcatgaggacttaacatgtcgtgtggagagggcttcatttctcaaaggatcgagcacactg

SEQ ID NO: 10940 - DNA, 1091 bp, Gossypium hirsutum
  Clone ID: GOSHI-09MAY01-C3524_1
gcgttcgcccagcgtccgattcccccaatttgttccccggaaaagttctcatttccacccaaatgcaaaaccccagatttctgttctcccttttgttttctatattgatctcaattctgttcttcaacaatataatcgctgaatcaaccttcggccctgaaacaatggcgacaaccactactttgggcggagtccacccttcccaaggctcccaaaacagcgtcgagctcgaaaacctagcacgctttgccgtcgacgagcacaacaagaaagaaaatgcaatggtggagtttgtgagggttgtgaaagcaagcgagcaagttgtggcggggacgcttcaccatttgacggtggaagctgtcgacgccggcaaaaagaagctttatgaagccaaagtttgggttaaaccttggatgaattttaaagaattgcaggagtttaaacatgctggtgatgctgatagttccgcttcttttaccgcttgtgatcttggtgccaagaaagatgtccatggaccaatgctgcaagcggtggccacaaatgatcccgtagttcaggatgctgcggatcatgctgtgaagaccatacaacagagatccaattcccttctgccctacgaacttaaagaaatagttcatgccaacgctgaggtattggaagattttgcaaaactcaacatggttcttaaagtgaagagaggagacaaggaagagaagttcaaggtggaggtacaccataagaacgaagggacttaccatgtgaaccacatggagcaagaccagtcttgaaagctaacggtatggtaaaactgttaaaaagagtttgaatcttaatatgatgatatgactataaaaaagtgtgaaccttgtatcatgtgttcatctttactcctgttgtaaaacctatgtttgtaagaatgttcggagaacatacacgaataacatgtctttgtattatgtgttaacctcttggaatacagtgcagacctttggaatttacagtgctatagatttatgtttgacggcgaataaaataataaataattttatatttaaatttataatattttaatttttttaaattttttttta

SEQ ID NO: 10941 - DNA, 411 bp, Gossypium hirsutum
  Clone ID: LIB3585-026-P1-K1-H5
atttacaccgaaatgcaaaacccctggtcggtgttcatgcgtgcgttaactatatcgagcccaacagtgttcttcaacaagataatcactgaatcaaccgtcggccctgaaacaatggcgacaaccactactttgggcggagtccacccttgccaaggctcccaaaacagaggcgagctcgataacctatcgcgctgtgacgtcgtcgagcacaacaagaaagaaaatgcaaaggtggagtcagtgaaggctgggaaagcaagcgagcaagttgtggcggggacacttgaccatttgacggtggaagctgtcgacgccggcaaaaagaagctttatgaagccaaagtgtgagtgaaaccttggatgaatgtcaaagaatggcaggagtctaaacatgctggtgatgctgat

SEQ ID NO: 10942 - DNA, 378 bp, Gossypium hirsutum
  Clone ID: LIB3272-002-P1-K1-B12
gttcttccttttggtttctatttggatctcaattttggtcctcaaacagggtaggggctgattaaactttgggcctgaacaaaggggaccaccacttctttgggcggggtgcaccctttccaaagcttccaaaacagagttgggctcgaaaacctaacacgctttggcgtcggcgagcacaacaagaaagaaaatgcgatggtggagtttgtgagggttgtgaaaacaagcgagcaagttgtggcggggacacttcaccatttgacggtggaagctgtcgacacccgcaaaaaaaagctttatgaagccaaagtttgggttaaaccttgtgtgaattttaaagaattgcaggagtgtaaacatgctggtgatgctgat

SEQ ID NO: 10943 - DNA, 1085 bp, Gossypium hirsutum
  Clone ID: GOSHI-09MAY01-C3494_1
cttcccggtttcgacccagcgtccgccgccgcgtccagaactcttaaggcgcgccggaagggggggagagagagagaatgctgggttctggcctccgtcgagccgaaacttagttctcggcctcacgcgtctacgcgccgtcaccaattccttcctgtacggtggtcgaaggtccaaaccccgattttcaacgcaaataaaggggcggccctgctccttttcattatttacagtttatacatgtatttaaaagtatcacctttgagtacttagtcgattgaaatgcttaatgcgtgtatatgtgcgaaaataaacttttttgctgattctttagtttttattgattctctgtgtatattccagtgcatgcccttttacaggtgaaaagaaaggctttattgtcctttacatattcagggaaagaaatctaagatttctttctattctatgtctcctgatgtgctgtgattttcttgccattctttgctctgtgtttttcgctatctgctgtctgcttcctttttgtgaaggcaatcgagcgagggatccggcagtgaccatgctggtgtagacgcgtgcactgatcacggcgctgatggagccttggtgacggtcatgacattcatgacgtaatttggggccagaccaagggacgaccgatgatcggggcgttgatgagcattgaaggcccttgggacaactcattaaacggtggcctcgatttggggattggcagacactccctgaagctttcagaaacgtttgcggcgtcacagtattcaggaaaccctagggtttccctgtttctcttaagtctgttaggccttttgggctgttttgttttgggccaaggtctgtaatgtaatgggttaggtctgacttaggctagcagggataatgagtctaacgggctgctggatgtaacgggtcttatttgggtttgggtttagctcaggggtattaggtattgttttggctattgggttatacccggatatgggtttttgtatttgggctttgggtagcaacagtaggcctggactttcaatggactatttaataaataaatgtttatttatttatct

SEQ ID NO: 10944 - DNA, 620 bp, Gossypium hirsutum
  unsure (1)..(620): unsure at all n locations
  Clone ID: LIB3543-040-Q1-K6-F11
ggggggggggggggggggggtctaaaaaaagagagaggaagggagctccggttctggccttcgtacgccacgcgccggtccacgcgccgccctaagggccactgtntatgaagatcggagggtttaaatttcctcgtctctcaagatccaaaacatgtgggggggggggttttcaaatcccttantattttgctaaacagttcatatgtgtgggcaaaaaaatagagaacaagtcactcgattatcacctttgaaactgtttgtattcattttttatttctgtgtctgtgtcctcgttataagggttacaaaggctttttttatagcctactgatttgttacataaggaaagaattctctgatttcctgtatctttgactgatgtgctgtgatttccttgccattttctactctgctttttcgcatatctgctgtttgtttccttttcttgcaggcatttgagcgagggatccggcagtgaccatgctggtgtagacgcgtgcactgatcacggtgcctgtggagcattggtgatggtcataacgtatttggggccctaccaatggaccaccgatgatcggggcgttgttgagctttgaagccccttgggacaacttatt

SEQ ID NO: 10945 - DNA, 794 bp, Gossypium hirsutum
  Clone ID: GOSHI-09MAY01-C3484_1
gaaccctacaaaaccctctgtaaaagcttgcaaaacaaatagaaaaataacaatctttatttgttggaaaagaaaatcaaaacccaatggcattgacaatctccaatgtttttcactgcccaaaacccagaatttcaccacttaattctatccccaactcttcaatctcaaagctatcatcttcctatctcgggtttcccaggagattttcttttccgaagaatagaatcgtgatttgtgccgcttcatctgcagcaggaagttctaatccggatagtgacttgaacccgtatgaggtccttggtgtgagccctgtcgagggatttgaaaaggccaagcaagtatatacaagaaaacgaaaggaggctgataagagaggcgatgaggctactgctgcacttctggagaaagcatatgacaaactcatgatggcacaattaatgaatcggaagaagggtgtgacatatgggtcgtttaagggttcaaaggacgtgaaatacgcagataagcagccgattgtatcatgggggccaaggtttcgtaactacttataagtagaatatttctgtattaaactgtcttgttccgctatttcattccttaatggtctatccatgtctgaaacctgtgtcggaagcatatctgaacataggtataggatgtgacccttcaaatagttggaaaaatttgaaaaaggatttaacatgcccgtgtaatatacatccatatcgaacactcataccaagtccaaataacatggttaacacccatggtttgttggtgacaactgctca

SEQ ID NO: 10946 - DNA, 880 bp, Gossypium hirsutum
  Clone ID: GOSHI-09MAY01-C3454_1
aattggatgcattatacaaatcgcttgcagaacagtacacttggtcatctgcagttaagaggataccgcttgattttctgcaaggagacaagttccgtgaagcaccaattagttatattaagcctcttctaacgaagggggttccatctttattctcagatctttctcctttgtatgatcaccctggcaaggcagacatgttggagcaacttattcttgagttggagcattcaattagtggggacgggagataccctgataggactgagaaggagcccccttcaacacttttatggattttgttctttttggctcagcattatgacagaagaggacagtatgacattgctctttcaaaaattgatgaggctatacagcacactccaaccgtaattgatttatactctgtcaagagccggatattgaaacatgctggtgatttggtagctgcggcttcattggcagatgaagctaggtgtatggatcttgcagaccgctacataaacagtgaatctgtcaagcgtatgttgcaggctgatcaggtggctttggcagaaaaaactgctgtgttgttcacaaaagatggggaccagcacaacaaccttcatgacatgcagtgcatgtggtatgaacttgcttctggtgaaagctactttcgacaaggtgatcttggacgggcccttaagaaatttttagctgtggagaagcactatgctgatattactgaagatcaatttgatttccattcttattgtttacggaaaatgacactgcgtgcatatgttgatatgctaagatttcaagatcggttgcattcccatgcttattttcacaagcagcagttggtgccatcagatgctacctaaagttgtacgattct

SEQ ID NO: 10947 - DNA, 339 bp, Gossypium hirsutum
  Clone ID: LIB3189-030-P1-K1-G6
attagcatgatcaccctggcaaggcacacatgttggagcaacttattcttgagttggagcatggggtgaggattaatgggagatatcctgataggacatagaaggagccccattgaacagtcttgtggctttatagcctattggatactcttaatgacataggatgacgagttgatgatgctctatcaaagagtgatgaggctatactgcacacaccaaccgtaattgatttgtactctgtcaagagccggatattgaaacatgctggagattcggtagctgcgtcttcattggcagatgaagctaggtgtatggacctagcataccgttatattatac

SEQ ID NO: 10948 - DNA, 675 bp, Gossypium hirsutum
  Clone ID: GOSHI-09MAY01-C3444_1
ccccgcgtccggggtttttgcgggtgtggtgatgggggggcaaatctttagggttttatatccggggaaagtagtatccatggctaccccaagccatcaccaaaaccccactccttcaaccaagaaaaagaaaacccacaaaaaccctgaagccaattttctttatgaactcaattcttgctccaaggccagagacctcaaagccgctatttccctttacgactctgctctttccagcaatactcgcctcaaccagtcccatttcaacaccctgctttacctttgctccacttttgccaccgaccctgactccaaagatcttgctttacgatacgggtttcgagtttttgaccacatgatggccttaaatatccaccctaatgaagcttctattacctccattgcccgtttatccgcggccaaaggtgatggtgattacgcttttgaaatggttaagaagttgggtgattatcaggtttcgccacggcttcgtacttacgagcctgcattgttttgtttttgccagaagttggaagcagagaaggcttatgaagttgaggaggatatagataagatggggttgagcttggaggaacctcaaattgctgctttattgaaactaatgcggatacttggagaggggagagagtttataattacttgcataagttgaga

SEQ ID NO: 10949 - DNA, 470 bp, Gossypium hirsutum
  Clone ID: LIB3583-051-P1-K6-D5
cggccgcgtgggcggacgcgtgggcggacgcgtgggcggacgcgtgggcttttttatcttggaaaatctctgagtgggggagaaaaagatgagtgaaagatgtttttgatggggttaagcatgcagtcgttgatggatttgatgctcgctgggatttctctgatgatcgggttggggatttttgctttcattgcttcaattctttgctctgctgctttcttgcaccatgctaaatatgtcgcttgattttaatatttcaatgcacaggtgccaaaagtggtaaaagaagttgccatttcgttggtcaaacgtttcattttgcagtagttgcagtactagatgggttgaattctgagtcgttttagatatctagtttgagaatgtatgaactctgctatattaaaaaataatagcttctgtaatgaaccgtactattgtttaaatattgagatcggaggcaattttctcat

SEQ ID NO: 10950 - DNA, 405 bp, Gossypium hirsutum
  Clone ID: LIB3146-039-Q1-K1-F2
cccacgcgtccggattattccatcctctctacgatttgcttacaatattagggaaataaaattaaaaggaaaaataaataaacacccagttctaaaatttcatctttttttttttatcttggaaaatctctgagtggaggagaaaaagagtgagggaaagatgtttttgatggggttaagcatgcagtcgttgatggatttgatgctcgctgggatttctctgatgattgggttggggatttttgctttcattgcttcaattctttgctctgctgctttcttgcaccatgctaaatatgtcgcttgattttaatatttcaatgcacaggtgccaaaagtggtaaaagaagttgccatttcgttggtcaaacgtttcatgttgcagtaattgcagtactagatggg

SEQ ID NO: 10951 - DNA, 868 bp, Gossypium hirsutum
  Clone ID: GOSHI-09MAY01-C3744_2
gcgttcgaaattcttggtcctgtgttgaagggtggtggtggtgcttgggtatgtgaccaggatgcctatgcatgcagtggtcagaaaatgctcagctcaatcaatactattcatgcatgagaattggtcaacgagttcactcatatctaaaacaaaagatcttgctgagagaaggaagttagggggggggggtgtgggtcctgtccttactgtcacaactgaagcaatgttggagcacaaaaagaaattacttcaaatttcaggttcgaagttactttttggcggtgaacccttagaaaatcactcaattccagccatttatggtgctataaagccaactgccatatacattcctcttgaagaaattttaaagccgactaactatgagcttgtaaccaaagaaattttcgggccatttcaggtataaccatttaaggtatcattcaaaggatagaatattttctaaataaagaaggcaaaaactactgaatactatgtttgcttgtagattataacggattataagaaggatcaattaccaatggtattggatgctttggaacgaatgcctgcacatctaaccgctgctgttgtctcaaatgatcccttcttcttgcaagtaagacttagcacttgggactttataaacctttatatcttcagcgcattatagtgttcatcaaatgtaaatccacaggatgtgatcggaaaaacggtgaatgggacaacctatgctggattgagagcaaggactactggagctccacaaaaccattggtaagtaaattgaaaattaaaatttgtttcatgtataatatatcatatttggtaggagatgaaaatggaagactgttcggtacaacgaacg

SEQ ID NO: 10952 - DNA, 972 bp, Gossypium hirsutum
  Clone ID: GOSHI-09MAY01-C3744_1
gcaggatttgattggaaaactcttggtcctgatgttgaagaggtcgattatgttgcttgggtatgtgaccaggatgcctatgcatgcagtggtcagaaatgctcagctcaatcaatactattcatgcatgagaattggtcaacgagttcactcatatctaaaacaaaagatcttgctgagagaaggaagttagcagatttaactgtcggtcctgtccttactgtcacaactgaagcaatgttggagcacaaaaagaaattacttcaaatttcaggttcgaagttactttttggcggtgaacccttagaaaatcactcaattccagccatttatggtgctataaagccaactgccatatacattcctctcgaagaaattttaaagccagctaactatgagcttgtaaccaaagaaattttcgggccatttcagattataaccgattataagaaggatcaattaccaatggtattggatgctttggaacgaatgcatgctcatctaaccgctgctgttgtctcaaatgatcccttcttcttgcaagatgtgatcggaaaaacggtgaatgggacaacctatgctggattgagagcaaggactactggagctccacaaaaccattggtttggaccggctggagatcctagaggagcagggatcggaacaccagaagccataaagcttgtttggtcatgtcacagggaaatcatatatgattttggtccggtgccaaggggttgggaaattccaccctcaacttgaggagtgtattcaaaatcatcccttggggtgtcattgatgcttttgacagggcagattgcagctttataaataaaaatgtgagggcaatttttgtggctttagtcctagtcttagggtaatgatacgaatctaagatatcagtatgtggcggagctttttcgtataaataaaagatcgtgcatgcacatagctgaatatgtgtaggacacg

SEQ ID NO: 10953 - DNA, 400 bp, Gossypium hirsutum
  unsure (1)..(400): unsure at all n locations
  Clone ID: LIB3145-010-Q1-K1-H5
gcgcccacgcgtncgtgcttgggtatgtgaccaggatgcctatgcatgcagtggtcagaaaggctgagctcaatcaatactattcatgcatgagaattggtcaacgagttcactcatatctaaaacaaaagatcttgctgagagaaggaagttagcagatttaactgtcggtcctgtccttactgtcacaactgaagcaatgttggagcacaaaaagaaattacttcaaatttcagaaattttcgggccatttcagattataacggattataagaaagatcaattaccaatggtattggatgctttggaacgaatgcatgcacatctaaccgctgcttgtgtctcaaatgatcccttcttcttgcaagatgtgatccgaaaaacggtgaatgggacaacc

SEQ ID NO: 10954 - DNA, 606 bp, Gossypium hirsutum
  Clone ID: GOSHI-09MAY01-C3714_1
gaaagggacaaaagttatttatgcaatctatgcaatggggagaatggaagccatatggggaaaagactgtagggaatataaaccggagagatggctacgagacggccggtacatgagcgaatcggcttacaaattcaccgccttcaacggcggtccacggctgtgtttagggaaagattttgcttattatcaaatgaagttcgtggcggcctcgatcttgtatcggtatcgggtggaggtggtaaaaggtcatgtggttgtaccaaagcttgccttgacaatgtacatgaagcatgggctcaaagtgaacttaatcaagcgccatgaatcagagcttcaagtttacctaaagaacaatgtttgatgagatgtcttggatttaaaccttatgttaatagttatgttttccttattttcattcacatggtattggaccatatattgatgaagtaagaacaaaagagagaaaagatttgtatcatttagagtggcatttggatatgtttaggatgatagaataatgggttttgctttctttttttaatttggatgttttatcatttggttattatcgatctatgttaataaagctattgtttgaatctt

SEQ ID NO: 10955 - DNA, 1219 bp, Gossypium hirsutum
  Clone ID: GOSHI-09MAY01-C3704_2
caatgtcgtatcagcatctccggcaacagcagcaactgcagttgttcttcaggtccaaattttgttcttcttgaaaacacagctttctttatcgctgctgacttgaactccctaccactattcataatctggatggtgtccaaacctgctgccataaatttccttattgtctagctgttttactttagtttctctatttgtttggtcacttttatggccttgttttcttgtcaggcggatagggaattgcagccatggattgccaaaaatgatgatcaaggtcagaagatgtggagaatcaaccagcggattgtaaagttgatagtggaactaatgagaaatcatgatatcccggaatcattggtaattgtagcaagtgcctctgatttgcttctacgtgccactgatggaatgctcgtagatggggaagcttgcactttaccacaactcgagctgttggaagcaacagctagagcagttcagccagtactagagtggggggaatcaggactggctgttgtggatggactttcaaacctgttaaagtgtcgtctgccagctacaactcgatgtctttctcatccaagtgcacacgttcgtgctctcagcatatcggtacttcgcaatattctgcaatcaaatcctaagctggaaataaatggtacccatggtccttatttcagtatcagtgtcattgactggcatactgatatcgagaagtgcttaacgtgggaagctcatagtcagcttgcaagaggaatgcctatacattttctcgacaccgccgccaaagaactaggctgtaaaatttcaatataacatgaattaacatttgaatcctttcgagggccggctacatagaggaatataatagaactttctcccaagtgggttgaacttgaaggacatggggatgaagccttgtaaggttgtgaaaagcatgctatacaaggactctgccacaccaaggttttatgtcactaatcttactttgactataaattagctttgttatattataggccaagattcccatttgtttgagggattacagtatgtaatttcagttaacttctatggtttcagtcagttgtatttggatagtttagttcatctcagcattatcagtacctaaagtttttagtggttgatatttggtgttaattttgttataatattaatatatgaatctaaaactcccaagtaattttttttttcc

SEQ ID NO: 10956 - DNA, 1616 bp, Gossypium hirsutum
  Clone ID: GOSHI-09MAY01-C3704_1
gctgcagctatggttgccgctcatgtttctgaactatttagacagtcaaaggcttgtatgcatgcgctctctgtcctaatgcgatgcaagtgggacaatgaaatttacactagggcatcatcgttatacaatctcatcgacattcacagcaaggcagttgcgtccatcgttgacaaggctgaacctttagaagcacaattgatatatgcacctgtttgttttgatagcagaacacgatgcaagcgtacaaataccgcttgctgggatcctccgcgagtatcttcttcagaatatgaagattcaattcattcagccaataatctcagatgtcagatggtgttaacatcagatgaacgcttaggaaatcccacgcgtccgagtgtagaaagtttcccattagatgcctcggatttggccaattttcttacaaaggataggcacttaggattccattgcagtgcacaaattcttctaagatccgtgcttgtggagaagcaagagttatgtttctctgttgtttcactattgtggcacaaactgatagcagcccctgaaacacaacccagtgccgaaagcacttctgcccaacagggatggagacaggtggttgatgcattgtgcaatgtcgtatcagcatctccggcaaaagcagcaactgcagttgttcttcaggcggatagggaattgcagccatggattgccaaaaatgatgatcaaggtcagaagatgtggagaatcaaccagcggattgtaaagttgatagtggaactaatgagaaatcatgatatcccggaatcattggtcattgtggcaagtgcttctgatctacttctacgtgccacagatggtatgcttgttgatggggaagcttgtactttaccacaactggagctgctggaagcaacagctagagcagttcagccggtactcgagtggggagaatcaggactggcagtagcagatggactttcaaacctgttaaagtgtcgtctaccagctacgactcgatgcctttctcatccaagcgcacatgttcgagctctcagcacatcagtccttcgcaatattttgcatataggttcaatcaattcccacgcgtccgtggaaatatatggtatccgtggtccctcttaccagttcttcaatataggtgccatcaactggcaaaatgatatcgaaaagtgcttaacatgggaagtttatagtcagcttgcaagaggaatgactatacagttcctcgacactgctgccaaagaattaggatgtaatatttccatataacatcgattaactttcggattatcagtataaataccctttttctttttttaaaactgagaatacaaagaagacttatgacttgcttcgatttgcttgaaccacatggttggggcagaaaatgcagctcatcgagtagtcctaggggatgaggatgaaggctttgaatgccatgaaactcttcaagcaaggttagtgtatgataaaaatgccacactgaggtttcatgtgtctaatcttactttgctttaagcttagctttgtacgatatttagactgagttttcgatttgtttgtcggattacgatatataatttcagtttaacttagtttatttc

SEQ ID NO: 10957 - DNA, 1159 bp, Gossypium hirsutum
  Clone ID: GOSHI-09MAY01-C3734_2
aacccctcacattttaagccataaccgacgcgcgggtttgaatcccatcagtttctcatcaaccaaacagaaaatttcagtctaaaattcgaattgtcgttttctaagttaaaatagaaggggagtgagggattgagactgatagcgataaggagatactgttttttatttgatttagcgaaggatgtctgcggcagtgtgcgggagcaagagatcgttcttcgaagatatcccgtcaccgccatcggcttcttcctctaagaagcttcggcgctgctcgccgtcgtctccttcttctgttcgtttatctccgtcgccatctgctctcaatcacctccagtctatcttccctcacatggacccccagcttctggagcaagcgctattagaatgtggcaatgatatagacactgccatcaagaagctggaggatctttgcttaggagcagcagaggctagagggggaaagacttgtaccgttgaggaactgggcacaactactgagcagggtatattgactaataatggagaagctgctgctgctgctgctgctgtgactattcagaatccatcagcctctgaaaatatgcctgctgatggtgctgaatgggtggacttgtttgtgagggagatgatgagtgccacaagtgtggatgatgccaaatcccatgtctctaaattgcttgcagttttggagaattccataagtaaatgtgttgcagaagagacggtacaaaattttcaaaaggaaaatctcatgttaaagggacaaattgaagcgatgattcaagaaaatacagtcctcaaacgtgcagtggcaatccaacatgaacgacaaaaggagtatcaagataaaaaccaagagttagaacatttaaagcaattggtgtctcaataccaggaacagatgcgaactttggaggtaaataactatgcattgatgatgcatttgagacaggcacaagaaagcaactcgatcccaggacggttcaacccagatgtcttctaaagaacaaaaagatgaagtggtttaagggagtaagttgtgactggtataattagcacaacaatgcttttttcataatctgttttttgctttgagttgatatatgcttagtaataaggtgtttgtttgatttagaaaaaaaaaaaaaaaaaa

SEQ ID NO: 10958 - DNA, 956 bp, Gossypium hirsutum
  Clone ID: GOSHI-09MAY01-C3734_1
aaaaaagaaccccacagataagaaaacctaatatcccaaagcccaaatcaaagccaacacctctcgagtagaatcccatcaaatttctcatcaaccaaacagaaatctcatccccctacaaccccacttctctttccaaattagatagaaagaaggtgagggattaacatagatagaggtagaaagagagttcttctttgatcttgcgaaggatgtctgcggcagcgtgcggtagcaagagatctttcttcgaggatatcccgtcatcgccatcggcttctgtctctaagaagctccggcgctgctcgccttcggctccttcttctgttcgtgttgctccgccgccttctctccttgatcacctccaagctctcttccctcatatggaccccgagcttctggagagagcactacttgaatgtggcaacaatatagacactactatcaagaggcttcaagaacttcacttaggagctgcagatgctacaggggaaaagatgggtcctgttgaggaactgggtacaactgctgagcagggtacagtaaccaacaatggagaagctgctgatactactgctcagattccatcggcccctgaaactctgcctgttgatggtgcagaatgggtggacttggttgtgggggaatgaggtgcttcagtggtgtgagccaaagccgtgcctctaattggctgggttctttgaaagtccatagtgacatgtgctaaggagcccacaagtttcataagaattgatgtgaaggacaatcagtgtgatcagaaaaccggtttaaactgctggtttccctgaaccccaggatccggcaaaccatggtgactttaacatggttattttgacctggaatctaggaacatctaaagtttggcgcgaaaattttcgcggttccattttataaacaccccattgacagggattatttatgcgttggattgtttt

SEQ ID NO: 10959 - DNA, 587 bp, Gossypium hirsutum
  Clone ID: GOSHI-09MAY01-C3724_3
cccgatttgaacatccatcctgaatcgtggttttcgattaacgctggctagattttgatgcggggacagtgtggtggcttagatatggagacagagaatccggtgaattacaagtatatggggaggagctttaatgatttgagtatcaacgacgattctacagctttcagtgattgtaacagcgatagatcgggggagttcccatcggcatcgtctcagaaccggcgattactactcgcctgtgctaattccgagaattcggatgatttgatacggcagctcgtatcggatctcgattcctgttcgattgacgagcaaaagcaagcggctttggagcttaggcttctggcgaagaacaagccggagaatcgaatcaagatcgctaaagctggcgcgattaggcctctgatttcggtaatttcatcctctgatccctatcttcaagaaaacggcgtgacagcgattttgaatctctctttatgcgatgagaacaaagaacttatagccttctccggagcaattatgccactggttagagctttgagaacaggaacttcaacggctaaagaaaacgcagcttgtgcttt

SEQ ID NO: 10960 - DNA, 1381 bp, Gossypium hirsutum
  Clone ID: GOSHI-09MAY01-C3724_1
cccacgcgtccgattcggatccgggtcacccgatttcaaaaatatccggtgagatttttgatgcagtgacggcgtgctggttttggatatggagacagagaatgcagtgaattacaagtttatggggaggagctttactgatttgagtatcaacgatgattcttctgcttttagtgattgtaacagcgacagatccggtgagttctccacggcgtcatcgcaaagccggaggttatttctcgcttgtactaattctgataactccgatgaatttatacggcaactcgtatcggatcttggctcctgttcgattgatgagcaaaagaacgcggcttttgagcttagattgttggcgaagaacaaaccggagaatcgaatcaagatcgctaaagccggtgcgatcaaaccgttgatttcgttaatcacatcaaccgatcctaaccttcaagaaaacggcgtgacggcgattttgaatctgtctttatgcgacgagaataaagaacttatagcctcatctggagcgattaagccactggttagagctttgagaacgggaacttcaacggcgaatgaaaacgcggcttgtgctttgcttcggttgtcacaagtggaagaaaacaaggttgcaatcggacggtcaggagcgattccactgctggttaaccttctcgaaaacggtggatttcgcggcaaaaaggacgcatcaacggcgctgtattctctatgcacggttaaagagaacaagatcagggccgttgaagctggaatcatgaaaccgctagtggaattaatggcagatttcggttccaacatggttgacaagtcggctttcgttttgagcgtgctggtacccgtaccggaagccaaaacggcattagtcgatgaaggagggattcccgttttggtggaaatcatcgaagttggatcgcaaaggcaaaaggaaatcgccgccgcaatcttgttacagatttgcgaagatagtgtgctgttaccgtactatggtggcccgcgaaggagccattcctcccttagtcgctttgtctcagtcaggcaccaatcgcgccaagcaaaaggcagagaaattgatagagctgctccggcaaccaaggtccgccaacgccgcagccagtccctcagatctgtaagcataaaaatctttccttacatcacataaatgattgtaattatttaaaaaaaaactgaaatagagattttacgagataaaaaaatgtgaataaaaaatgtaaatatctttatataaaatctatcttgctatgaaaatgatgtgagacttatgaggagcagattgatttctggattttggtttgtcctttttcgaatactttatgaagtatatattaatcgtgtgggttaaaaaaac

SEQ ID NO: 10961 - DNA, 493 bp, Gossypium hirsutum
  Clone ID: LIB3585-014-P1-K1-F8
cagggccgttgaagcggggatcatgagaccactagtggaattaatggccgacttcgggtcaaacatggttgacaagtcggctttcgttatgagcgtgttggtacccgtaccggaagctaaaacggcattagtcgaagaaggagggattcccgttttagtggaaatcatcgaagtcggatcgcaaaggcaaaaggaaatcgccgtagcaatcttattacagatttgcgaagatagtgtgctgttccgtactatggtggcccgcgaaggagccattcctcccttagtcgctttgtctcagtccggcaccaatcgcgccaagcaaaaggcggagacattgatagagcttctacggcaaccaagatccggcaacgccgctgccaggcactcagatgtgtcagtataaaactgtccctaccaccgcacatggagattgtaataaaaaatccaaaagagaaacaatgaaattagattttacacgggaaaagaaaaatga

SEQ ID NO: 10962 - DNA, 1016 bp, Gossypium hirsutum
  Clone ID: GOSHI-09MAY01-C3644_1
tggtgatgttgatgttgttggccatggagttatggatgagtctcatactggccatgctggtagatcaagtggaaacaagggtgataattcacttatggtgcagtacaatgtagctaaggatgatgaaatcttgcaaacgaggaacaaagatcaaaatcaatcaactatagcaacaaatacttctcataagatagttaacatctctgtcaatgtaaatacctggaaaccacctcattatcaagagccaagggaggtttcagaactggacagccgaaaacctcttccagagagtgaagcagttgctaacaaagctaatcataggttgatggagaatggcaacccagttaatgttggtaatggaaatgtaaaaggtgctgcttacaaccaagaactgtctcagaaagcagtgcagccttcttctgcttcttatgctgctgctcgtcctctagaggacgctgattctcgaaccatctttgtaagcaatgttcattttgctgctaccaaggacagtctttctcgacattggaataagtttggagacgtgctaaaagttattatagttacagatgcggcgacagggcaaccgaaagggtcagcttatgtggagttcatgcggaaggaagcagcagacaatgctttgtctctggatggtacctcattcatgtcacggattcttaaggtcgtgaagaaaagttcagctcctcaagaagccgctgctcctgtcatgacatggcctcgtgtagctcggggctctccatttgttgcagcaaggtttggtagagcttcatttgccagaggcatgccaggtgcttttaggcctcaccttccaattaaacccggtgccagaagctttcaatggaagcgtgatgctcagacgaccaccacccgaaccgacgccgtcactgggacaaacgtttcttctcccactttccgcagtctcacctatgtccgaacagaacctaagtcagcagggaatactagctagtcaagaggtttgctaccgcagtcacattcct

SEQ ID NO: 10963 - DNA, 826 bp, Gossypium hirsutum
  Clone ID: GOSHI-09MAY01-C3154_1
gatctcttccactcttccagtttcttcttctttcagttcttccaccactgtaaatgcaggatccccgccacctctctgggttttctcaatgattcacagctcaaaaatcagagtacaagtaaaagcaatgaataacattgaacttgggtttcttatatttcttctccttttcaaccttcttctgcccttttcctatggagaagccggtggtctttgtgtatctcaaggtggtcgctttccgcccttctcttctgaggggaaacctcctaaaagggtggggaagggacacaaggatttgacactctgtagggtgtttcggaaaaagacttgctgtgatgctgcccagacacatcctgctttgctttctattaggaggctggctttaacaggtgaagccagtgaagagtgtttgcatttgtgggaattgctggaatgttccatatgcgatccacgagtcggagttcagcctggacccccacttatatgcacattcttctgtgatagagtatttcaggcctgctctaatgcttacttctcaatggatgcaaagacacaggttctagcaccatgtggagcaaatgactttgtttgtggtagagcatctgaatgggcatccaatggaacagaattatgccttgctgcaggtttccgtgttgaacaatccgttggcatgcatggtggtattgaagaaatatcctgttatggtggcaaagcgagtcttgattcaattgctgattcatggggagcttcacgatctgagaaaccccacaaaactgggaactctgggctcttagaagatttccagcagtggctccaggatatgcca

SEQ ID NO: 10964 - DNA, 497 bp, Gossypium hirsutum
  Clone ID: GOSHI-09MAY01-C3164_2
cccacgcctccctttcttttcatctcaaaagttgaaatttcaccgtcaaagctttttcccctcaggttcgagctctgaaatggcaaccgagaataacagttccagggtcggatctggatccggatctcattctgtcaacggcgacgcggctcctgaccgcaagatcgcgttgatcactggcatcaccggtcaagatggttcctacctgaccgaattcctcctcaacaaaggctatgaagtccatggcttgatccgccgctcttccaacttcaatacgcagcgtatcaaccacatctacattgatccacataacgcccacaaggctcggatgaagctccattacgctgacctcaccgacgcttcctcgctttcgcgctggctcgatactattcgacccgatgaggtgtacaatctggcggctcaatctcacgtggccgtctctttgagatccctgatatacagctgacgtggtggttatcggagctcttcgcttgttg

SEQ ID NO: 10965 - DNA, 957 bp, Gossypium hirsutum
  Clone ID: GOSHI-09MAY01-C3164_1
ctgtcttcttccctttttatctattttgaactccaaaatggcgagcgaaaatgagagttccaggggcgacgcaatttctggccgcaggatcgcgttgatcactggcatcaccggtcaagatggctcatacctcaccgagttcctcctcaacaaaggttacgaagtccatggcttgatccgccgctcttccaacttcaacacgcagcggattaaccacatctacatcgacccccacaacgcccacaaggctcggatgaagctccattacgctgacctcaccgacgcttcctctcttcgtcgttggctcgacactatccgacccgatgaagtttacaatctggctgcccaatcccacgtagccgtctcttttgaaatccctgattacactgccgacgtggtggctacgggagccctccgtttgttggaagccgttcgatcccatattgccgacacgggtcggacccatatcaagtattaccaagctggatcgtcagaaatgttcggatccactcctccgcctcaatctgaagcttccccgtttcaccccagatctccatacgcggcttccaaatgcgctgcgcattggtacactgtcaattacagggaagcgtacgggcttttcgcctgcaatgggattctggttaaccacgagtccccgaggagaggagagaatttcgtgacccggaaaatcacccgggccgttgggaggatcaaaattgggttgcaacaagttgtttttggggaaacttcaagcttccaaggattggggttttgccggggattacttggaagctatgtggatgatgctgcacagagaaacccgacgattacgtggtggcgacggaagaatcgcatacggtggaagatttttgcattggcatttgggtatgttgggttgaactggaaagatcatgtcgtgattgataagacgtaatttaagcctgcccaagtggatag

SEQ ID NO: 10966 - DNA, 811 bp, Gossypium hirsutum
  Clone ID: GOSHI-09MAY01-C3104_2
aagagtcttagcctatgttggtttaatgactaaattatgttttaattgtgtttcatttgaaggcagaaggaatatttcggattgatgccgaaaatagtcaagaagagtatgttcgagacaagttaaacaaaggtatcttaccgcacggaatcgatgtccattgtttagctggtttgataaaggcatggtttagagaacttcctagtggagtgctcgattgccttacacccgagcaggtgatccattgcaacaacggaagacgatggcgttgacctggtgaagttgcttccttcaacagaagctgctttacttggttgggcttatcaatttgatggcagattgttgtggagtttgaccattccaccaaattgaatgcacgcaacatcgcgatggttttcgcaccgaatatgactcagatggccgatcccttgacagctttgattcacgccgtgcaagtgatgaactgcctcaaaacattgatcttaaagacaattcgagaaagggatgagtccgctaccaaggacaggttgcttccatcttgctcagattgtcctacaggcataaccgatacatgtgcatctaaggaacctgccactgctaagttcttgagggttgacacattgagtagactcgaaagtgaccccgaagagaaacaatggagcagtcaggatagtaacagagaagaggaagttgagtccatttcaggcaacaatatactaaatgaatgggaaatgggaaatgttgaaactgaatgtataagtggatatgataacggtgaccggctaagtttaagaaaaggtgttaggcgatt

SEQ ID NO: 10967 - DNA, 1364 bp, Gossypium hirsutum
  Clone ID: GOSHI-09MAY01-C3104_1
cccacgcgtccgtccaaatcttgtggactgctcggactcagtgagttctttcaccaaaccaagaccaatgacgaccatgaagaagaagaagattttgcagaagatgggatgaaccctattgctacgacgccattgataagctcgaaatcgaggtttggttgtagtcatggaggacgacgagacaacaaccaattcccgtttatggatatattagcagcgttgttaaggaagtcattagtcacttgcagtgtggacaccgacgacatatcttccctggatattagcttaccaactgatgtcaagcatgtctctcatgttactttcgactgctttaatggcttcctcggcttacctactgaactccaacctgatgttccctcaaaggttcctagtgccagtgcaagtgtttttggggtttctcctaagtcaatgcagtgttcttatgatggtaaagggaatagtttgccaacaattcttcttatgatgcagagtcgtttttatgatgaaggaggtcttaaggcagaaggaatatttcggattaatgccgaaaatgtcaagaagagtatgttcgagacaagttaaacaaaggtgtcgtaccgcacggaatcgatgtccattgtttagctggtttgataaaggcatggtttagagaacttcctagtggagtgctcgattgccttacaccggagcaggtgatgcattgcaacacggaagacgattgcgttgagcttgtgaagttgcttccttcaacagaagctgctttacttgattgggctatcaatttgatggcagatgttgtggagtatgaacaatacaacaaaatgaatgcacgcaacatcgcgatggttttcgcaccgaatatgactcagcattgattcacgccgtgcaagtgatgaacttcctcaaaacattgatcttaaagacaattcgagaaagggatgagtccgctaccaaggacaggttgcttccatcttgctcacattgtcctacaggcataaccgatacatgtgcatctaaggaacctgccactgctaagttcttgagggttgacacattgagtagactcgaaagtgaccctgaagagaaacaagggagcagccaggatagtaacagagaagaggaagttgagtccatttcaggcaacaatatactaaatgaatgggaaatgggaaatgttgaaactgaatgtagaggtggatatgataacggtgaccggctaagattacgaaaaggtgtaaggcgattatgcatgcactcgatattccagttgagtaagccgacgaagaaaacacggaatttcgagattgtaaatactagaggaagaggctgcgaagattgggtatgatcaacagtcagtggtgatt

SEQ ID NO: 10968 - DNA, 951 bp, Gossypium hirsutum
  Clone ID: GOSHI-09MAY01-C3054_1
cccacgcgtccaaaaaaagcagataggtagataggttgaactctcttttctccccttagaaccaaactttcaccgaccttcactttctgcctaccatgacggccaaggattgcggcaaccatggcaaaggccggcggcagctcatccgaaggctcttcggttgccttctagtcttcctccttatcgttctcatcacaatcctcatcatttgggcaatcctccgccccacaaaaccccgcttcatccttcaagacaccaccgtctatgctttcaacgcctccagtcccaatttcctcacttctaatttccaagtcaccgtatccacccgaaaccccaatgacagaatcgggatttactacgacaggctcgtcatctacgccacctaccggaaccaacaaaccacccttaggacagctctccctccaacataccagggtcataatgagatcaatgtttggtcccctttcatctacgggaacatggtccctatagctcccgatttctccgtcgctttgaagtccgaacaagctgccggaacgatcttcatggtgatcaagattgatggacgggtgagatggaaagttgggactttcgtttcaggcaggtatcatctcaacgttaggtgtccggcttatatcactttcgggagcaaaaacaacggcgtttctgtcggagaaaacgctgttaagtaccagctcgtcaccagatgcagcgtcagtgtgtgagagagcactcatcaatatcaacaaagaagaagaccaggcaactaacgccgtttaatctatattaaatctctctctcagtttcttacttcacgccgttagtatattttatttattttctttataaggggaggagggaattggacattttgctatttgaataagtgaaaaatggaaaattgaaagctaaagcaaaatctacaattaaagagaaaatgttttccatatc

SEQ ID NO: 10969 - DNA, 509 bp, Gossypium hirsutum
  unsure (1)..(509): unsure at all n locations
  Clone ID: LIB3584-010-P1-K1-D12
tcattatacaaaaaaacagcggggggggttgactggggtttaaaaccataagaaccaaactttcaccgaccttcactttctgcctaccatgacggccaaggattgcggcaaccatgggaaaaggccggcggcagcgcatccgaaggctctttctttgccttctagtacttcctcctgggtgggggggggattttttttttcatanggncaancctccnccccgcaaaaccccgcttcatcctccaagacaccaccgnctatgctttcaacgcctccactcccaatttcctcacttctaatttccaagtcaccgtatccacgcgaaaccccaatgacagaatcgggatttactacggcgggctcgtcatctacgccacctacaggaaccaacaaaccacccttaggacagctctccctccaacataccagggtcataatgagatcaatgtttggtcccctttcatctacggggacatggtccctatagctcccgatttctccgtcccttt

SEQ ID NO: 10970 - DNA, 467 bp, Gossypium hirsutum
  Clone ID: LIB3585-043-P1-K1-F7
cccacgcgtccggatgatacaaaaaaagacagatcttattataggacgaactggctttgctgcgttaagatacacagaactttcactgaccttcactttctgcctaccatcacactacaagaattgcatgacccatgtaaaaggacgactgaaagtgatgctaaagctcttggggagccgtatactgttcctccttatgcttttgatcacagtcataataatgagcgcaatgctgctcccgacaaaaccgggcttaatgctttaagagaccatcgactatgctttcaacgcctacagtcccaatttcctcacttctaatgacacaagtcaccgtatccactcaaaaccccaatgacagaatcggcatgcactacgacaggctatttatttacgccacctaccgaaaccaacataccactcttaggacagctctccatccaacataccacggtcataatgagatcaat

SEQ ID NO: 10971 - DNA, 799 bp, Gossypium hirsutum
  Clone ID: GOSHI-09MAY01-C3044_1
cggacgcgtgggcttctttcctacgccaaaatgccgccaaaatttgatccaagccaagtcgtcgacgtcttcgtccgcgtcaccggcggtgaagtcggagcagctagttcactcgctccgaagatcggtcctctcggtctctctcccaagaagatcggagaagatatcgctaaagagaccgccaaggaatggaagggtctccgcgtaaccgtcaagctcactgtccagaaccgccaggcgaaggtcatggtggtaccgtcggcggcagcgctggtaatcaaggcattgaaggaaccggagagggataggaagaagaccaagaacatcaagcataacgggaacatcggactcgatgacgtcatagagatcgctaaagtaatgaggccgaggtccatggctaaggatttgagagggacggtgaaggagattctgggcacctgtgtttccgttgggtgtaccgtcgatggtaaagaccctaaagatttgcagcaggagattgatgatggtgatgttgatgttcctctcgagtgagtaaacttcctttattacttttaagatcatatcttgtttaattttgtttatctgtatggttttggagaatttacggatattttctatcagagattgtttttgaggttaattttagatgatgttaacatttgtgggtcatctttatggctatatatgtgatgtttagttatatcctctgtttgtcctttatattgtattttttttcggtaatgccagtcttggtgttttgcttaaaaaaaaaaacccccaaacataaaaaatataacat

SEQ ID NO: 10972 - DNA, 398 bp, Gossypium hirsutum
  unsure (1)..(398): unsure at all n locations
  Clone ID: LIB3828-025-Q6-K6-E3
ccccccgtcgcggcgcgaatcggatccagtccagtcgtcgacgtctgggcccgcgtcaccggcggtgaagtcggagccagctagtttgactcgctccgaagaacggtcctctcggtctctctcgcaggaagatcggtataanatgtcgcttgagagaccgccaaggaatggaagggtctccgcgtaaccgacaagctcgctgttccagaaccgccgggcggaggtcatggtggtaccgtcggcggccgcgctggtgatcatggccttgaaggaaccggagagggatcggattgacaccgtcacctttctgcttgtcgggcccttcggtctcgatgtcgtgntggagatcgctggggttggggggcgaggtccctggctgtcgctttgcgagggacggt

SEQ ID NO: 10973 - DNA, 1076 bp, Gossypium hirsutum
  Clone ID: GOSHI-09MAY01-C3074_1
ttttttttttttttttttaagaaatattccaacttttataaattaagccaaaaaactttatacatttttagcaaataattaaacaaaagagagattatgattaattaaacactctctctttccttccctaaccattctaaaataccctacatgcaatttttcataaatttgcatgttccataatctaatttttttaaaaaaattattaatttttgccccgaatttcagggcccccacgcgtcccttcaaaacacccccctccctctttcatcgtgatctccgctctcttctctctttcatatcgaaccaaaaaaaacccgatcccaatggcttcttcaactggattttcactcaatttctcccctctttcaacttctttgaagcacaaccaggtacctcttcatgggatctctaatgtcaacttacttagtctcccatctcttagaatccgaccgggacctatgcgcctccgggtttcttgtgcggccaaacccgagacggtggacaaagtttgtagcatagtgaggaagcaactagcactacccgaagattcttctgttaccggagaatctaagtttgctgcactcggagctgattctcttgacacggtcgagattgtgatgggactcgaggaggagttcggaatcagtgtggaagaagaaagtgcccaaagcattgtcactgttcaagatgcagcggatctgatcgagaagctcgtggagaagaaagatgcttaaaacaccattgaaaacggctggctgtccggcaacgagtccttaaaaaatatatcccctgtttttttctttttggctactcctatgttgttttaatgttagttttgtttttgttgcttatggaacatgtaaaccaacatgaagtttggctgtttcttcattgtggttacagttttaagggtagaaaactcaaaagtgtctcatttccatgttgtcttgagccatttgttctatgaaatctcggatttaatttaacaggcttccacgagatctccctttcttaaggaagagatcatgtatttgaaaggtttgaaagtcattgctggagctgaacagccaggg

SEQ ID NO: 10974 - DNA, 1694 bp, Gossypium hirsutum
  Clone ID: GOSHI-09MAY01-C3014_1
gctgtttagggttttacgaaggcaatagtaagtaaccatgtctccagatgcttcagctgcccttgcagtgaggcagaaagttcaaacctttttgaatgctgcttgtacagggaaccttgatcttctcaagaagattgcctctcaacttgatgaggggaagggactggctaaaacggtggcagatattaaggatgcgaacaaacgaggggcaattcattttgcagcaagagagggcaagactgaggtgtgtaaatacttgttggaagaattgaagcttgatgtgaacacaaaagatgaagatggtgacactcctctccttcatgctgcccggaaaggtcatactctcactgcaaaataccttctagagcatggtgctgatcctgctatacccagcaacttagatgccactgctttacatcatgcagctggaattggggatgttgaattgctgaagtatatactggacaaaggcgtcaaggttgattcacaaagtgatgctggtacccctttagtttgggctgctggtcatggtcaacgtgaagctgtgaaagtattattagattatcatgctaatccaaatgctgaaaacgaggataatatcactccattgttgtcatccgtggcagcaggttcacttgcatgcacggatttgttgattcaggcaggtgctaaagtgaatattacagctggtggaacaactccgttgcatattgcagctgatcatggaagccctgaactaataaacagcttactgaaagctggagctgatcctaatgccactgatgaagatggcctgaagcccgtccaggttgcagctgccagaggtcatcgtggagcagttgagatactatttcctttgacgtcaagaatcgataccattccagagtggactgttgatggaattctcaaatatatgcagtctgaaactgacaaacaattggagcaaatgaaaaaactgacggaagccaagtcaacaagggacactgcattgccggcaaatgatctccctgaggtgacacccgaagcgaagaagaaagctgcagaagccaaatcaagaggagacgaggctttcaaaggaaaagattttcacatggctgtagatgcatatacacaagcaattgatttagatccaacggatgctgcactgcattcaaatagaagcctttgctggattcgtctcggacaagctgagcatgctttaacagatgcaagggcttgcagagcattaagaccagactggccaaaagcttgctatagagaaggtgctgcattgcgtttgttgcagaaatatgatgaagcagctaatgccttttacgagggtgtgcagcttgaccccgaaaataaagagctcgtaaatgcttttagggaagcagttgaagcggggaggaagtttcatggtaccgatcaagaaaaatctagttagttttccgagctgatacaccaaagatttgagaagatatgatgggtaacaaaccgtgcggattttgaagttgggaagggaatgtttatttgtagcatgctttatctgcgaaacaacacgactgaaagttaatgagcatgagaacgtaagattagcagaacaaattggtgttggtattcaccatgagaattgcatgcttaacatcaagaagacacttcaaattatcaaagtaaaaaaaaaaaaaaaaaaaaaaaaaaaaaaaaaggggcggccg

SEQ ID NO: 10975 - DNA, 558 bp, Gossypium hirsutum
  Clone ID: GOSHI-09MAY01-C3034_2
agcttttctgtcagctcaactacttatgttgattcatctcctggtgggaggttttgtttgcctccagttcattcgcaattgttacgacctgctggtgctgttccatccctttacccgaggccctatgttgttagccttcctgatggtagccatagtagtggtgctgagaacggcaggcattggggaaggcaaggtctagacttaaatgctgggcctggaggcccagacattgaaggaagagatgagtcggcacctcttccatcaaggcaactgtctgttgccggttcacatgcccaggcagaggagcaagcaagaatccatcaggttcctggtggcattttgaaaaggaaggaacccgagggaggatggaatggatacaagcaatcttcatggcagtaggaatcaagaatccttaaatgtcacattctgatgactcaactcaaggcatgtattcagggatgggaattggctaacaccccagaggtcatctaccctgtgtgcgcttaagaggatgggtggcaagtgagccatttgatgttcatagtctcgacccccaca

SEQ ID NO: 10976 - DNA, 1474 bp, Gossypium hirsutum
  Clone ID: GOSHI-09MAY01-C3034_1
gtgggttctccacccactctgtcctctgggggacttgatcttgatttgaatagagttgatgagcctgctgatttgggtaatcactcaactgggtatagtcgtagactggatgtccctatgcagcctataaaatcattgtctgggattcttaatagtgaagtaaccgtccatagggacttcgatttgaataatggtcctgctgttgatgaggtaagcactgaaccatcactatttagccataatgctagaagcagaaatgccccatctcaaccatcagcttccagcctccggatgaacagtactgaggtggcaaatttctcatcatggtttcctactgagaatacatactcatctattgcactacaatcgatcttacctgatagagagcagccttttccaattgttgcaactggtgggccacatagggtgttgggcccacctattggtgccaccccttttaatcctgatgtctatagggaacccatgttgtcatcttcaccagcagtgccatttccatcaactcctttccaatatcctgtgttcccctttggaacaacttttcctcttccttcaaccagcttttctgtcagctcaactacttatgctgattcatcttctggtgggaggttttgttttcccccagtccattcgcaattgttacgacctgctggcgctgttccatcccattacccaaggccctatgttgttagccttccggacggtagctatagtagtggtgctgagagcggtaggcagtggggaaggcaaggtctagacttaaatgctgggcctggaggtccagacattgaaggaagagatgagtcggcacctcttgcatcacggcatctgtctgttgccagttctcagtccctggcagaggaacaagcaagaatgtatcaggtgccaggtggggttttgaaaaggaaggaacctgagggaggatgggatggatacaagcaatcttcatggcagtagcatccttagatgtcactgtttagtggcccattaaagcttttcttcaaggatgggcattggctaacccccagaggtcttctgacctgtgtttgcttagaggatgggtggtaagtgagccatttgatgtttgttcatagtctccaaccccccaccttttcggcatatcgactgtaccgtaaaagaatctgttcggggtgtattcaagctttgttccttgaatttgttctggacacagatcattttccctttgtagatattataactgttggaaatcatgcccatatgttgcccagacattagaaattggtgcccatactgctttgtagtgcatatctttcttgactttttttgttctttcaccttttaattttctttttctttttcttttccaattaaagtggtcaccgaattttgatactgaagccttttttctgatgtggcatgacttggttgctgtggttgatgatgtattcatatatttatttaattgataaactct

SEQ ID NO: 10977 - DNA, 301 bp, Gossypium hirsutum
  Clone ID: LIB3166-004-P1-K1-H6
gcaatcttcatggcagtaggaatcaagaaaccttacatgttacatctgatgactcaactcaaggcatgtattcaaggatgggaattggctaacccccagaggtcatttaccctgtgtggtcttaagaggatgggtgttcatttgctacagttgtgatttctgccaactttgatgtcaatgtttttataacgcgttggcacataagtagcgttttatttttgatgttgcactctcacccttatttggcccttttggatgcaccagagaattgggcaacatatggttatatcaattttatttg

SEQ ID NO: 10978 - DNA, 548 bp, Gossypium hirsutum
  Clone ID: GOSHI-09MAY01-C3024_6
caccaagaaaggccaagcccctcctccttcatccaagcctgcaaagtctggaggtggcaagcagaagaagaagaagtggagcaagggaaagcaaaaggagaaggtgaataacatggtgctgtttgatcaggctacctatgacaagcttctctctgaagctcctaaatacaagctcatcactccctctatcctatctgatcgtatgaggataaatggatcacttgcaaggaaggctattagggaactgatggcaagaggatcgattaggttggtgtctgcccattcaagccagcagatttacactagggctacaaacacctagatggttcgttgtatttttgcttagttccatgcaatagtgccgttcgttgttgagttgacttctaagtgaatttatttacttgccgccgctttttttttttttttggtttagaatgtgtgagatactctctttttatcattctagtttaattgatacttttcagacttactattcagctctcttaaatttgtttctaatgtgagattcatatgttgatttagtgttt

SEQ ID NO: 10979 - DNA, 839 bp, Gossypium hirsutum
  Clone ID: GOSHI-09MAY01-C3024_5
cccaaacgctctgctcttctccgtacccatttttctttacttccaaaaatcccatggccccaaagaaggacaaagcccctcctccttcatctaagcctgccacgtctggaggtggaaagcacaacaggggcgtctttttattatatcttatgctatatatataatggggtcgatctctctgcttttcaaaagttaaatatgaagtgggggggtttttgttgttgtattaacagaagtggagtaagggaaagcaaaaggagaaggtgaacaacatggtactatttgaccaagctacctatgacaagcttctctcttgagctcctaaatacaagcttatcactccttcaatcctctctgatcgtatgaggattaacggatcacttgcaaggaaggcaatacgggagttgatggcaagagggttgattaggttggtctctgcgcattcaagccagcagatttacactagggcaacaaacacctagatctttagttatatttttgcaattagttctaagaagtattgccatggttgagttttgacttggataaatgatttttcccccctttaaatttggtttaaaacttctctttggctactttttgtagaatgatttaatggttgaatttcagcttctttggcccctcagctttcctaagtgaaattgataaggtgttttagtagtgtgtttaaacccttaaaatgtcctatttgaggaaattgaggccaagcaacccctctttttgtgttaacttgctggattttgaggaaacccgggggtagaagatcagaatcataatgtggaggaaatggttattcataaaaaaagaaatttgggtcc

SEQ ID NO: 10980 - DNA, 592 bp, Gossypium hirsutum
  Clone ID: GOSHI-09MAY01-C3024_4
cccacgcgttcgagctgcgcttcatctcttatcctttcttcttcactttcggcagatcccaatggcaccaaagaaagacaaagctcctcctccatcatcaatgcctgcaaagtctggaggtggcaagcaaaagaagaagaagtggagcaagggaaagcaaaaggagaaggtcaacaatatggtgctattcgaccaagctacttatgataagcttctctctgaagctcctaaatacaagctcatcactccctcgattctctctgatcgtatgaggatcaacggatcgcttgcgagaaaggctataagggaactgatggcaagagggtctattagggtggtttaccgcccattcgagccagcagaatttacactagggcaacaaacacctaggtctcatattgttacgttttttgcttaattagtcttaccatagtaatgctttttgctgagattgaacttgttcaaatggtttcgttttgttttattttaagacgtttcttcagctcaagaatgtttttgttatggtttaaagggatcagtttgggattttgttgacatgctctttagctttctcgtttttcgagatgagatc

SEQ ID NO: 10981 - DNA, 699 bp, Gossypium hirsutum
  Clone ID: GOSHI-09MAY01-C3024_3
cgccgctaatcttagggtttgccaaacctctcacagcccctcgccttttccattattcacttcggcagattccatggcaccaaagaaagacaaagcccctcctccttcatccaagcctgcaaagtctggaggtggcaagcagaagaagaaggtcattttttattattatatgtttcattttatgtatttattggggttcattttctgcttcttatgacttgatcaaaaaagggctttttctttttgggtatttgcagaagtggagcaagggaaagcaaaaggagaaggtgaataacatggtgctgtttgatcaggctacctatgacaagcttctctctgaagctcctaaatacaagctcatcactccctctatcctatctgatcgtatgaggataaatggatcacttgcaaggaaggctattagggaactgatggcaagaggattgattaggttggtgtctgcccattcaagccagcagatttacactagggctacaaacacctagatggttcgttatatttttgcttagttccatgcaatagtgccgttcattgttgagttgacttctaagtgaatttatttactgccgccgcttttttttttttttggtttagaatgtgtgagatactctctttttatcattctagtttaattgatacctttcagacttactattcagctctcttaaatttgtttct

SEQ ID NO: 10982 - DNA, 617 bp, Gossypium hirsutum
  Clone ID: GOSHI-09MAY01-C3024_2
caaaagctctgctcttctccgtacccatttttctttacttccaaaacatcccatggccccaaagaaggacaaagcccctcctccttcatctaagccagccaagtctggaggtggaaagcagaagaagaagaagtggagtaagggaaagcaaaaggagaaggtgaacaacatggtactatttgaccaagctacctatgacaagcttctctctgaagctcctaaatacaagcttatcactccttcaatactctctgatcgtatgaggattaacggatcacttgcaaggaaggcgatacgggacttgatggcaagagggttgattaggttggtctctgcgcattcaagccagcagatttacactagggcaacaaacaactagatctttagttatatttttgcaattagttctatgaagtattgccatggttgagttttgacttggataaatgatttttcccccttcaaatttggtttaaaacttctctttggctactttttctagaatgatttaatggttgaatttcagcttctttggccctcagctttcctagatgaaattgataaggttcttaacatgtgctatatgaggaaattgacgccaagcaacacctctttct

SEQ ID NO: 10983 - DNA, 560 bp, Gossypium hirsutum
  Clone ID: GOSHI-09MAY01-C3024_1
cccacgcgtccgcccacgcgtccggcgcctcctccttaaccagcagataccatggccccaaagaaagacaaagctcctcctccgtcctctaagcccgcaaaatctggaggtggcaaacaaaagaagaagaagtggagcaagggaaagcaaaaggagaaggtgaacaacatggtgctatttgatcaagctacctatgacaagcttctctctgaagctcctaaatacaagctcatcaccccctctattctttctgatcgtatgaggatcaatggatcacttgcaaggaaggctataagggaattgatggcaagggggtcgattagattggtgtctgctcattctagccagcagatttacactagggctaccaacacttaggatcatttttccccttaatttagttattatttagaattatatttgctgagtttatcatcattgaatgctttcttttgttatttatttaagacttccctgtagtcactttttttccctctacaatgtttaagcaacaggttcttgatattggtatggtttaaaggatgtacttttcagatttt

SEQ ID NO: 10984 - DNA, 393 bp, Gossypium hirsutum
  Clone ID: GOSHI-09MAY01-C3394_3
cagcttaaattcaaactttgaatgatccatttcacttctcattagctttcgtttttttgttctttttaccctgttttcgtttctcattttcctctttgctagctctttgaatctctgagggaagatatggcggccaatgggaacggagtttcgacgacgccgaagagttcgttggcgaggattcagacgcagaagaacggtggaatctgtcatgacgatagcgggaagcctgttaaggctcagacgatcgacgagcttcactctttgcagaagaagagatcggcgccgacgactcctcttgacggcgttcagggtacctttgccaccatttctgaagatgagcgccagaggcagcagctccagtccatcagtgcatcgttggcgtcactcact

SEQ ID NO: 10985 - DNA, 519 bp, Gossypium hirsutum
  Clone ID: GOSHI-09MAY01-C3394_2
caatttttgaactgggatccacagaacagaatcaaaggtcggttggcggctgcgcgtgcttaccattcagtgttcatgcataacaggtacgggtaagaccactttgtctaccgatcacaacaggtatctgatcggtgatgacgagcattgttggagtgacaatggtgtgtcgaacatcgaaggtggttgctatgccaagtgtattgatctttcaagggagaaggagcctgatatctggaatgccattaagtttggaactgtgttggaaaatgttgttttcgatgaacatacgagagaggtggtttatggtgacaaatcagttacagagaatactcgtgcggcctatccgatcgaatacattccaaatgctaagataccatgcgtcggtcctcatcctaagaatgtcattcttttggcatgtgatgcctttggtgtccttccacctgtgagcaagctgagcctggcttaaaccatgtaccatttcattaggggtaacacccgtctggtggctggcacgga

SEQ ID NO: 10986 - DNA, 2352 bp, Gossypium hirsutum
  Clone ID: GOSHI-09MAY01-C3394_1
cttaaattcaaactttgaatgatccatttcacttctcattagctttcgtttttttgttctttttaccctgttttcgtttctcattttcctctttgctagctctttgaatctcccacgcgtccgcccgcgcccccggggaacggagtttcgacgacgccgaagagtccgttggcgaggattcagacgcagaagaacggtggaatctgtcatgacgatagcgggaagcctgttaaggctcagacgatcgacgagcttcactctttgcagaagaagagatcggcgccgacgactcctcttgacggcgttcagggtacctttgccaccatttctgaagatgagcgccagaggcagcagctccagtccatcagtgcatcgttggcgtcactcactcgaggaacagggccgaaagtggtgagaggggacccggcagggaaggttcaatcggtgtcgcatgtggcgcaccaccaccatatcgaggcgccaaccattagcgtcagtgacagttccttgaaattcactcacgtcctatacaacctctctcctgcagagttgtatgagcaggcgataaagtatgagaagggttctttcattacttcaaccggtgcactcgccaccctatccggagccaaaaccggtcggtcaccgagagataagagagttgttatcgatgacactacccaagatgagctttggtggggaaagggctcacccaatattgaaatggacgagcataccttcatggtgaacagagaaagagctgttgattacttgaattctctggacaaggttttcgtgaatgatcaattcttgaactgggatccacagaacagaatcaaagttcggattgtgtctgctagagcttatcattcattgttcatgcataacatgtgtatccgacccactcctgaagagctggagaatttcggtacttccggacttcactatatacaatgctgggcagttcccgtgtaatcgttatacacactacatgacatcctctactagcatagatcttaatcttgctaggagggaaatggtcatcctcggcactcaatacgccggggaaatgaagaagggtcttttcagtgttatgcattatctccccccgcggccgcaaatcctctcgttacattctggatgcaatatgggaaaagatggagatgttgccctcttctttggattgtcaggtacgggtaagaccactttgtctaccgatcacaacaggtatctgatcggtgatgacgagcattgttggagtgacaatggtgtgtcgaacatcgaaggtggttgctatgccaagtgtattgatctttcaagggagaaggagcctgatatctggaatgccattaagtttggaactgtgttggaaaatgttgttttcgatgaacatacgagagaggtggtttatggtgacaaatcagttacagagaatactcgtgcggcctatccgatcgaatacattccaaatgctaagataccatgcgtcggtcctcatcctaagaatgtcattcttttggcatgtgatgcctttggtgtccttccacctgtgagcaagctgagcctggctcaaaccatgtaccatttcattagcggttacactgctctggtggctggcacggaagatggtattaaggagccaacagcaacgttctcggcttgcttcggtgcggcgttcatcatgttgcatcctaccaaatatgcagccatgcttgctgagaaaatgcagaagcatggtgcaacagggtggcttgtcaacaccgggtggtctggtggaagctacgggtctggaaaccgtatcaagttaccctacactaggaaaatcattgacgccatccactctggtagcctcttgaacgcgacttaccataaaacagaggtgttcgggctagacatccccaccgagatcgagggagtgccttccgaaatcttgcatccagagaacacctgggctgataagaaggcatacaaggaaaccctgttgaaattggctgggctattcaagaagaactttgagaccttcactaattacaagattgggaaagacaacaagttgacagaggaaatcctggcagctggtccaaacttctaatttttggagcaatgaaaaaacaaagggaagaagaagaaactattatggtttttcacagatttgcagaaaagtgaatgaatttgatagaataagagtgtgtttgttggtaaattataaaagaggaagtagtcctttaattgggttcctccaattcatatatgtaaactggcgtctttatgtcaaactccatattcattttttaaatgaagtagcctttgcttttccaaaaaaaaaaaaaaaaaaaaaaagaaaaaaaaaagaaa

SEQ ID NO: 10987 - DNA, 369 bp, Gossypium hirsutum
  Clone ID: LIB3166-050-P1-K1-A2
gttctcttaactatactcccgatatgtggatactcgactttgcattgtttctaatgagtttacatgcaaaacaggtacgggtaagaccactttgtctaccgatcacaacaggtatctgatcggtgatgacgagcattgttggagtgacaatggtgtgtcgaacatcgaaggtggttgctatgccaagtgtattgatctttcaagggagaaggagcctgatatctggaatgccattaagtttggaactgtgttggaaaatgttgttttcgatgaacatacgagagaggtggattatggtgacaaatcagttacagagaatactcgtgcggcctatccgatcgaatacattccaaatgctaagataccatg

SEQ ID NO: 10988 - DNA, 303 bp, Gossypium hirsutum
  Clone ID: LIB3146-016-Q1-K1-C2
atatatgtataaggggtagttttataatccatatggaatttccctaaggcaataagataaaattaaaaatggttaaaaggtaaagcttagtgtacaattggataattgggtgggtgacaggtgtatccgacccactcctgaagagctggagaattttggtactccggacttcactatatacaatgctgggcagtttccgtgtaatcgttatacacaactacatgacatcctttactagcatagatcttaatcttgctaggagggaaatggtcatcctctgtactcaatacgcccgggaaaatg

SEQ ID NO: 10989 - DNA, 601 bp, Gossypium hirsutum
  unsure (1)..(601): unsure at all n locations
  Clone ID: AI054653.1
gaaggttcaatcggtgtcgcatgtggcgcaccaccaccatatcgaggcgccaaccattagcgtcagtgacagttccttgaaattcactcacgtcctatacaacctctctcctgcagagttgtatgagcagtcgataaagtatgagaagggttctttcattacttcaaccggtgcactcgccaccctatccggagccaaaaccggtcggtcaccgagagataagagagttgttatcgatgacactacccaagatgagctttggtggggaaagggctcacccaatattgaaatggacgagcataccttcgtggtgaacagagaaagagctgttgattacttgaattctctggacaaggtataaagggtatcatagtaaattagttntacttggcttgatttcgaatttagtaaacaggtttttggaagagatgatgttgatggagggtatggtcatatggatcattttgcttttagtttcaacagttgtactagggcatcctaatccatgggagagcattttgtcatgttatttggatcctctagatgtatcatcgagtttcattggaaatagaatatgttattatattcatgaatcggatta

SEQ ID NO: 10990 - DNA, 268 bp, Gossypium hirsutum
  unsure (1)..(268): unsure at all n locations
  Clone ID: LIB3166-037-P1-K1-A3
acttttnaaaaannggggcggaccaacgcgtccggggtgactggtgtatccgacccactttttaagagctggagaatttcggtactcgggagttctctatatacaatgctgggcagttcccgtgtaatcgttatacacactacatgacatcctctactagcatagaccttaatcttgctaggagggaaatggtcattctcggcactcaatacgccggggaaatgaagaagggtcttcacagtgttatgcatcatctcatgcctatgcg

SEQ ID NO: 10991 - DNA, 1277 bp, Gossypium hirsutum
  Clone ID: GOSHI-09MAY01-C3384_1
actcaatctcctagaatcattttttttttggttttgaatatcactgatgattgctccaatgaccgatttatcagtattagacctttgacatttcttgatgacagttttcgagtctcccacaactcctatttccccgcctcccccccgcgtcccccctcgtcccccctgtaatcctgcatatgcctctgccgtgaatggatttgctatcccggagtgaataactacctgtgttgcaaggatttccttttcctcgatccatacgattagacccgaagccgatctaaacgattgacggtcgaaggctgcgtcaaaatgaactgtggcccttccccttttgaatacctgttgaatattgccagtagaatgaataagttggtttctgctaaaccagataaaccaaagtctacagaagaagagtcagagttgctcattagtcccttgagcaaagacccaagacactgttgaaaaatatggcagctattttcttcttcacggcagcatctgagacattgagcatccaccacgactcgctttagtttgagattgacaaaggatgggatgaaattccatgatatcctccatactgtcatttgaatctttgaagggatatgtaatctccatagttttctatagaaatttttcgttcatggcaaaattagatcattagaatccaaactaggctcatgtaatagtttattggcttctcctaacggagaactcccctgtcggctcccctctccatacttgataaatcttcatgtgctgtctccgctagtgggatctgtaatattttctccgttacatccgatcggaagcatagtcctttttcaagaagctctttgcgtagcccacgctctttttcaggatgccataaattagccagggtgtcttttcattgctgggtaatgcatgatcctacctgtaagaaaacatccaaccagactaagagcttcttcttcccttaccgactccggatcaacttgtactcgcaagatttcttcttcatcaagggatagaccagccaattctgattccatggacccaggaagagaaaacccaccaaagaagactgttcaagactatggagatatcagccgccgaaacaaaaaaagaactcatgaagccctaaaggcttgccagagaagcagacagagagtgctagggcagcagactttttttaccaatgatttttcttagatgaagtcaatagatgctatttataaagtaaacttaaattttaattgatatgtaacactaacactaattaagtgatagtt

SEQ ID NO: 10992 - DNA, 369 bp, Gossypium hirsutum
  unsure (1)..(369): unsure at all n locations
  Clone ID: LIB3146-018-Q1-K1-E1
aatggggggtctgagacttgagccattaaccacgactcgctttattttgagattgacaaaggatgggatgaaattccatgatatcctccatactgtcatttgaatcttcgaagggaaaagaaatttccatagatctctatggaaatttttcgttctggaaaaaaaaaaaaaaaagggggggggggataaagggaaatttccccccctcttgggaaaaaaaaaaaaaaaaggggggggggtaaaggggttaggttttaaggccccctttaaaaaaaaaaaaaaattnnnnnnnngggggcggggggccctttttaaaaaaaaaaatttttttcccccggaattttagacattatttttttttttgccccc

SEQ ID NO: 10993 - DNA, 745 bp, Gossypium hirsutum
  Clone ID: GOSHI-09MAY01-C3344_1
cggccgcgtgggcggacgcgtgggcggacgcgtgggcggacgcgtgggtaataccaatttgtttctctctttattttcccttttgattcggataattggggggtctagtttgaagaattttccttttgagggtttcactttagctgtctgatttgtgtgtgtttgtttgatgggaataattttccgggaaaatacccggtcatgggaaagttatcttttaaggattcactaaaagcgctcgaagctgatattcaacacgccaatactctggcttttgattatccgagggagaaagatggagcacgacttcaaatgagactgtcttacagccctgcagctcagtttttccttttccttgttcagtggaccgactgccaactagccggtgcccttggtttgctccggatacttatttatatgacctatgccgatggcaagaccaccatgtctgtgtatgagaggaaagccagcattagagagttttatgcggtaatattcccgtctttattgcaacttcaaaaaggcattaccagtttggaagataggaaacagaaagaagtgtgtaccatgaggtaccgtaagaaggatgaatccgagagggggaaactctctgaaattgacttagaaagggaagaagagtgtgggatttgcttggagatgagcagcatggttgttttgcctaactgtagccactctctgtgtttgaagtgttatcgggattggcacggcccgtctcagtcatgtc

SEQ ID NO: 10994 - DNA, 473 bp, Gossypium hirsutum
  Clone ID: GOSHI-09MAY01-C3314_3
cggacgcgtgggcggacgcgtggggggataaatacggaatatctagagtcgatgaggacaggtttggaatttcccgattgttttgatggtagtaattcagttgagtggcagtgtggtaactccgaggatgttagagggttaaaatcgtcaagtgctaggctaaggtgcgacttctccgcccttaggagcctggctttctgtttaagattatacagttcctggtacccctcttgatcttaggcttcgcattcggtttacagcgcttggggaggggggtaaaaaccgaaacttagataactttcccattacgggacctgctagttcgcatgtatgcttgttaaagctgttgtcgttgttgctgtaatgcgcgtgacagtctataactgattgctattaataatgtcttggaatgtcgctcccgatctatataaaagacacattggtcctttccatttgaacacttctaggaactg

SEQ ID NO: 10995 - DNA, 738 bp, Gossypium hirsutum
  Clone ID: GOSHI-09MAY01-C3314_2
tcttccacgcgtccgcccacgcgtccgctcgatttccattcctttgacttcctttcatcatgttagaacaaatccccctcgcgtccgccctcgcctccgaaaacttgtcaatttctgcacttcactgtgctttttctgttgaatttatctctttttttttttcttttcattttgtagttcaagaaatgggttcaggagaaaaggtatttgtttatgaagatctggtgaagcacaaagacagaaatgattgttggcttttgatctctggaaaggtgtataatgtaacccaattcttggaggaccatcctggtggagatgaagttttgcttgctgctagtggaaaagatgcgaccgatgatttcgaagacgtacgtcacagtgatgatgcatgagagcagatgcagaagtactatattggtgaggtcgatgccaccaccattcccgcacgaaggacgtacaaagcacagacgtcaaccgcggcaactcaacaagacgagcctggctttctgtttaagattatacagttcctggtacccctcttgatcttaggcttcgcattcggtttacagttcttggggaagaaggaaaaaaccgaaacttagataactttcccatcacggaacctgcttgttcgtatgtatgctcgttaaagctgctgcttgttggtgttggtgtaatgttcgtgacagtctataactgattgctattaataatgtcttggaatgtcgttttcgatct

SEQ ID NO: 10996 - DNA, 743 bp, Gossypium hirsutum
  Clone ID: GOSHI-09MAY01-C3314_1
cccacgcgtccggttcttcaccatttcccctcgatttccattcctttgacttcctttcatcatttcaagaaatgggttcaggagaaaaggtatttgtttatgaagatctggtgaagcacaaagacagaaatgattgttggcttttgatctctggaaaggtgtataatgtaacccaattcttggaggaccatcctggtggagatgaagttttgcttgctgctagtggaaaagatgcgaccaatgatttcgaagacgtaggtcacagtgatgatgcaagagagcagatgcagaagtactatattggtgaggtcgatgccaccaccattcccgcacgaaggatgtacaaagcacagacgtcaaccgcggcaactcaacaagaggagcctggctttctgtttaagattatacagttcctggtacccctcttgatcttaggcttcgcattcggtttacagttcttggggaagaaggaaaaaaccgaaacttagataactttcccatcatggaacctgcttgttcgtatgtatgctcgttaaagctgctgctgctgttgttgttgttgttggtgttgtaatgttcgtgacagtctataactgattgctattaataatgtcttagaatgtcgttttcgatctattttctattgtttgagtatgtcgttttcgatctattttctattgtttgagatacttgcattgcaatttgcatagccttagactcggcaattcatttgtttgtatcgt

SEQ ID NO: 10997 - DNA, 582 bp, Gossypium hirsutum
  Clone ID: GOSHI-09MAY01-C3294_2
tcttacatacggtgggagaatcccatttgctgaattatttgctaggatcgacgctgttgaccccagcactgttaaacgtgtggcaaaccgatttatttatgacagggatatcgccattgctgccatgggtcctatccaagatttgggtgactacaactggttcagacgccgtacttactggaaccggtattagattaatttgcttttttccccacccgtccgcccccccgcccggggggaatcccaagaaaaaaagacattttggcccttttatatacaagcaaagtttccagggaaacaaaccctcaagggtaaattttatattcattttgtagtcttcatggttctgtaataagtatggctgtctttagtgtttgagctgagagaatcagaaatggccgtaatgtatgtttttctatttaattttatttgaagtattcatgtccaacacattgagaggaatatgaaggatatttcaaataatttggttgcgaacaaaaaaaagaaaacacaaaacctaaagaaatgatcagatcaaataatagaataaaaaaaaaatagagaaaaagacaataaataaac

SEQ ID NO: 10998 - DNA, 2036 bp, Gossypium hirsutum
  Clone ID: GOSHI-09MAY01-C3294_1
ctaattctctgaaaccctaaaaattacacagtggggaaaaagaatcatcaaacatggcgaccaagcaactgctttctcttgctcgccggtcccgcaagccatcatattctttcaccgccgctagatcatcttcttcggccgcctctccgctcgccgccgccgaatctaaagaaatctcccctcctccaccaaccgccatgatctacgatcgattagccctcgccgttaaatcaaagctccaaaagctcgaaaacccagatcctcgtttcctcaaatacggttcccctcacccaaccgtaacatccccccccctccgcttatcttcccccgaaaccaaaatcacaactttgcccaatggccttcgtgtggcaaccgaatctaccctgtcttcccgcacagccacggttggggtctggatcgatgcaggatcgagatttgagaccgaggagacgaatgggacagcgcatttcttggaacatatgatatttaaagggacagagaagaggtctgcgagggaactggaggaagagattgagaatatgggaggccatttgaatgcttatacttccagggaacagacgacttattacgctaaagttatggacagagatgtctttaaagcgttggatatattcgccgatattttgcagaattcgaagtttgaggaacacagaattagtagggaaagggatgtgattctaagggaaatggaagaggttgagggtcaaacggaggaagttatttttgaccatttgcattcaactgctttccagtacactcctcttggtagaactattctcggacctgctgataatattaggacgatcaccaaagagcatttgcaaagctatattcagacacactatactgctcctagaatggtcattgctgcatccggtgctgttaagcatgaggaaattgttgaccaagtgaagaagttgtttaccaagttatcgtctgatccaaccactggttctcagttagttatgaacgaaccagcaacttttactggttctgaggttagaatgatcaatgatgatgttcctctggcgcaatttgctgttgcttttgagggagcttcttggacagatccagattccattgcgctcatggttatgcaggcaatgttgggttcgtggagcaaaaatgctgggggtggaaaacacatgggctctgagctggcacaaagagtcggcattaatgaaattgcagaaagcatgatggctttcaacaccaactataaagatactggtcttttcggtgtctatgctgttgccaagcctgattgtttggatgatttggcttatgctattatgtacgagacaaccaagctagcctatcgtgtttcggaagctgatgtcattcgtgctcgtaatcagttaaagtcatccttgatgcttcacatagatggaaccagtcctgtagctgaagacattggacgccagctacttacatacggtcggagaatcccatttgctgaattatttgctaggatcgacgctgttgaccccagcactgttaaacgtgtggcaaaccgatttatttatgacagggatatcgccattgctgccatgggtcctatccaagatttgcgtgactacaactggttcagacgccgtacttactggaaccggtattagattaatttgcttttttctttatcaatgggccctcgcgtccggttatcacctgtccttggcaatcacaaactttccggtactcatacaccaatttccggaagcacacctaagggtggcctttctattcgttgtgtagggttcttagtttcatcaattcagtaataagcattgctgtctttagtatttgttgtgagaatcaggagacttggatgagcctgatgttgagctgggcccgttttaatggcaaaattctgatcaatttctttctttcttttgtcccccacatcatctccgttgcaaaaagatggcatcttctggttttggccaaaaaaaaaaaaaccccaaaaaaaaaaaaaaaaaaaattttttttttttttttattttttattattaatt

SEQ ID NO: 10999 - DNA, 381 bp, Gossypium hirsutum
  Clone ID: LIB3166-025-P1-K1-F3
cccacgcgtccgcccacgcgtccgttcattcgtccggaatcccatttgctgaagtaggtgctaggattgatgctgttgatccaagcactattaaacgagttgcagaccgatttatctatgacaaggatattgcaattgctgcaatgggtccggtccagcgtttgcccgactacaactggttcagacgcaggacctactggaaccgttattagatgattttggtttgactttctcaatgggttatcacctgtccttggcaatcacaaactttccggtactcatacaccaatttccggaagcacacctaagggtggcctttctattcgttgtgtagggttcttagtttcatcaattcagtaataagcattgctgtctttagta

SEQ ID NO: 11000 - DNA, 635 bp, Gossypium hirsutum
  Clone ID: uC-gsronu33B021c01b1
ttccattcgtccgtggatatattggctgagagtgggcggaattcaaagatggaggaattcaggatccgtagggaaagagatgtgattctaagggaaatggagcgaggtcgagggtcaaacagaggaagctatttttgaccatttgcattcaactgctttacaatacactactcttggtagaactattctgggacctgctgataatgtgaagacaatcaccaaatggcatctgctgaactatattcagacacactacaccggccctagaatggtcatagctgctactggagctggtaagcatgaggaaattgtagagcaagtagagaagttatttaccaaggtatcatctgatccagccacagcttcttagttaggtgtgaaagaaccagccacttttactggttctgaggtcagaatgatcaatgaagatatttctctggcgcaatttgcagttgcttttgaggggagcacttggacagatccagattccattgctctaatggctatgcaggctatgttgagttcttgagcaaaatgctgggggtggaaagcacaagggtctgagctgctcacgagtcggatcatgaattgcgaaggatgtggtttcaccccactgtaagatctggcttttgagc

SEQ ID NO: 11001 - DNA, 432 bp, Gossypium hirsutum
  Clone ID: LIB3828-003-Q1-K6-A12
attgatggaactagtcctgttgctgaggaattggccgtcactcttacatacggtcggagatcccattgtgaatatttgtagatgagctgtgtccaacctataaagagttgcaacgattactataaggattgattgtgatgggtccgtcaggtttgcccgatacaatggtcaaccagacctactggaaccttttagatatttggttgactttcaatggtatacctgtccttggcaataaaactttccgtctctacaccaatttcgaacacacctaaggtggcctttctattcgttgtgtagggttcttagtttcatcaattcagtaataagcattgctgtctttagtatttgttgtgagaatcaggagacttggatgagcctgatgttgagctgggaccgttttaaggcaaaatctgatcaatttctttctta

SEQ ID NO: 11002 - DNA, 366 bp, Gossypium hirsutum
  Clone ID: LIB3166-031-P1-K1-D10
cccacgcgtccggaggatattgttatcaatctctcacctttttcggagaatcccatttgctgaattatttgctaggattgatgctgttgatccaagcactattaaacgagttgcagaccgatttatctatgataaggatattgcaattgctgcaatgggtccggtccagggtttgcccgactacaactggttcagacgcaggacctactggaacctgttttagatgattttggtttgtctttatcaatggattattacttttcccttggcaataacaaacttctcggtttttatacactatttttttgtaaacccacctaattgttgagctttttaattttttcgtgttgggttcttttgttttta

SEQ ID NO: 11003 - DNA, 1063 bp, Gossypium hirsutum
  Clone ID: GOSHI-09MAY01-C3244_1
gtttttcttgcccggcggcccccgcgggcggtttcagactattgaaagagcaaagcacaataaaaaaaataaaacgtgatcagatggtgcaggtgatgagggcggggaaaagggtatccgtgaaattggaagttgaagaatctctagaagaagagttggcctctcttcacaaaaaaagatcaaaactcgacccttgtttacaggaaggtaacgttgaaagtgggaaatttccaatctcaccatcattgtataatccactggatgagccaagtccacttggcttgcgtctgaaaaagagtccatcttttctggacctgattcaaatgaaactttcacagcaaaatggcgataagttaacagctcataacatgaaagatagtaaaggagtttcagtttctggggtacgggataagctcaaagcctcaaacttccctgctgccattttgcgaatcggttcttgggagtataagtcgagatacgaaggggatttggtggcaaaatgttactttgctaagcgcaggcttgtatgggaagtgcttgatggtggtctcaagaacaaaattgaaattcaatggtcagatattgtagctatcaaggcaaattatcctgatgatgttccagggaccttagatgtagtggtaataatcaaacttatgccataagctcttctctctacatacttggtaatataggaataagctgcttcaaattatacttcctggcaaatcgtgttcatataacttctgatgcgttaatgatttatcatgccatgatgtgctgcattgtcagctctacttaaatcttctcttctgatcactgtgaatattttgatgtaatatttattttagatgcaatttttgtttgctacagttggcaagacagccacttttctttaaggagacatatccacaacctaggaagcatactctgtggcaagcaacctcagattttaccggtggacaagcaagcgtacacaggtactactgttgacctttaacttaacaatcagttaaagaaggattaaataagcattaaaattgaaatattaaaaatttattattgg

SEQ ID NO: 11004 - DNA, 1336 bp, Gossypium hirsutum
  Clone ID: GOSHI-09MAY01-C3274_1
tcttgagcattttccctagtaaaagtttctggcacttgcatggtgggtttcctggatgaattataatcgttacagctaggggaggtggtgtgatggcggccaagaaggcgtgtgagtctttttccaagagcttaattgaggatgtgcataaatggggttgcatgaagcagacaggggtgagcttgaggcacatgatggagtttgggtccaaacccactgaccggaacttgttgatttcgggtcagttcctccacaaggagctccccattaggattgctcgcagagccattgagcttgataccctcccttatggcctttctgaaaagcgtgctattttgaaggtccgagactggtacctggattccttccgtgacctaagatctttccctgagatcaaagatataaatgatgagaaggaatttacacaaatgatcaaggctatcaaggtgcgacacaacaacgtggtccctacgatggctttgggggttcaacagttgaagaaaggaatagatcccaagattgtttatgaggatcttgatgagattcatcagtttctcgatcggttttacttgtcacggattggaatccgcatgcttattgggcagcacgtcgagctgcataaaccaaatcctgctccacatgttgtgggctatatacatacaaaaatgtctccagtggaggtggcaaaaaatgctagcgaggctgcacgtgctatttgtttgcgtgaatatggaagtgcacctgatattaatatctacggtgatcctagttttacatttccttacgttccaacacacttgcaacttatggtattcgagctggtcaaaaattccctgcgtgctgtccaagagcgctttatgtactcagttaaagttgcacccacctgttcgaataaatagttgccgaggggaatcgaaggatgtaactataaagatctcagatgaggggggtggcataaaaagaagtggtcttcccaaaattttcacttacctttatagcactgccaaaaaccccttggatgagcatacagatcttggaacagatgatagaataacaatggcaggatacggttatggaatacctataagccgcttgtatgcaaagttttcggaggagatcttcaagttatctccatggaaggatatgggactgatgcatatcttcatttgtctcgcttgggagactcacaagagccattgccatgattctctttatctacttggtctgcaccgccaggaggagggaaatatagcgatgaacaagggggagaaattttaatgtctatcaaagtgtttgtattaaaataaatattgtataatccaagtacaatcacctc

SEQ ID NO: 11005 - DNA, 1293 bp, Gossypium hirsutum
  Clone ID: GOSHI-09MAY01-C3264_1
cggccgcgtgggcacgacaggacaaaattgtagattttacacagccttatatggaatctggactggttgttgttgcaccggtgaaagaggcaaagtcaaacccttgggcattcctcaagccatttactgcagaatgtggcttgtcactgctatgttctttctttttgttggagctgtagtgtggattcttgagccccgcgcgtacggtgaatttcgtggtcctcccagacgacagcttataacaatttgttgggggagcttctcaacgatgtttttctcgcacagagaaaacacagtgagcactttgggacgaatggtggtgatcatatggctatttgtagttctgactattaactcgagctacactgctagtttgacatcgatacttactgtgcagcagctaacatcagggattcaagggattgatagctcgatctcaagtactgaacctattggaatccaagatggttcgtttgcattgaactatttggttgacgagctcaatatagcacaatctaggatagttaagttaaaaaatccagaagcatatctcagagcccttaagcttggaccgaagaagggtggtgtagctgccatcgttgatgagcttccttatgtcgaactcttcttatcaaacaccaattgtttatacaggatagttggcccagaatttacaaagagcggatggggctgggctttccaaagggactcccctcttgcagttgatatgtcaactgctatcctccaactctcggaaaacggggatctccagaaaatccataacaaatggctgacacacagcgactgctcgagtcaggtcaaccaagtggacgagaaccaactttcccttaacagcttttggggcctgttcctcatttgtggcattgcttgcgtactggctcttaccatattctgctgtagagtctttacacagtaccgcagattcagccccgaagatgaggaaagtgagattgagacgatcgaaccgtcgaggtcaagtcgacggtccatccgctcaacaagcttcaagcagattattgactttgtagataagaaagaagaagagattaaggagatgttgaagagaaagaacagtaatagtaataaacaacagactagcatccatagtttctcagatggtcaagcaagttcaccttcctaagagagacaaaaatccaaacacatttttgattggatcatttggaacttcaaatatttcttttttatctgtttatattatagaatctgaattaatacaaaagtcataaatccaattatcagaattccattgcc

SEQ ID NO: 11006 - DNA, 222 bp, Gossypium hirsutum
  Clone ID: LIB3083-095-Q1-L1-B3
ctctggaagcaaagcaactatcaactacgtttacctcagatctaaaacccctcgtctcagatccactaaattcaccatgtcttctactttcagcggcgatgaaacggctcccttcttcagcttcctcgtcttctcctgtatgggagctgcatatgggacggctaatagcggtgcgggtgtggcttccacgggtgtgatcaggcctgagctggtgatgaaatc

SEQ ID NO: 11007 - DNA, 403 bp, Gossypium hirsutum
  Clone ID: LIB3197-019-Q1-M1-B9
gttttctctgtttgccatttgccttaatcatcttcctctttctttaaaacctcttcctatttaatttccgactaaacttgcgctgaattccatggctactgcagaggttgtatcagctcagactgcaatccatgaggagaaacctgaagaagtggtcaaggttggagaaattgcaacagaagaggtaccggctgttgctcctgcagcagaacctgttgctgaagaaccaaaggaagcagtgcctgaagcagcatccggagaaccccaggctccagaaactgaagccacagttgaaactgaatcaaaggaggtggttaaagagcccaaggctgtgactgaggagccagaagttgagaaagcacagagtctacagaagcagcagcagcagcagcagcagcagcag

SEQ ID NO: 11008 - DNA, 369 bp, Gossypium hirsutum
  Clone ID: LIB3145-026-Q1-K1-A5
aaaacccggcccgacccacgcgtccgttgaatatgttggttttagtggattttgttgataaaactagctgggagtatctgtttaaggtgtactgggatcttttaaaagagaagctagctttaagtttacatgagcttactaacgctacaaatccatggaaggaacttagagaagcttcagctaatatagaaccaaagcatcaaatcgacgttgcatatttaataaatagttacaaaagtttatacccaaaatgggtttttgatctcagaggttcagtgttaagcaaaaggagaaggttgcatcttttaagacttcagttgaggttcttactttctttgaaacacctattacccataaacgcttaaattt

SEQ ID NO: 11009 - DNA, 426 bp, Gossypium hirsutum
  unsure (1)..(426): unsure at all n locations
  Clone ID: LIB3146-041-Q1-K1-G12
acggaacccaagcagaatatgaagccaatcgagttgaaaacgtcgccagagcaaatgcagaccataaccaagtcgatgatacttgggaacgagtcaaggaggttggattgagaggccttaccagcaagaggcacatgaagatcgtgctgagatggatgagagagagacaaaagattaggctaatatgcaacgttgtggggcctcacaaacaatttctgtatacaacttggttcagtaaaccaagcattagccacacaagagctgtccataattcctcaacttctacacctagtttttctgtcgatacttctagtccaaagttgtcttcaggttaggttgtagcacgcttgtgctggctgcaataccatcgattgcagaacatgtacttgtttttgcaacagtgtaatataattgtntctgtttcat

SEQ ID NO: 11010 - DNA, 221 bp, Gossypium hirsutum
  Clone ID: LIB3196-053-P1-M1-A1
cgaaaatttacacattctaaaagggaaacaaacaaatatacgcgcgtacagatcaccggatggcgagcggtgacgtggaggccgtggattttgaaccggaggacgatgacctcatggacgaggacgccgattttgatgtaagtacaattgcaactagggtctaggtctgaattctgaatgactgtcgccgcttctacctatctgtctgatgataagaagac

SEQ ID NO: 11011 - DNA, 366 bp, Gossypium hirsutum
  Clone ID: LIB3272-034-P1-K1-A4
gtatctcctaaaactaaagcaattctttatctcaaccaaaaccttctcagcaagttgataaatccctggcaattcctcccttgctccgacattcaagatctatactttaaatcccctaagcttttctttcacctttgataactgtctgagtctctatcgaaatcccatcaaaactcaagatgaaggcaaaacagatgaacttgagtggctatcagaaaacctggattgattgctttatttgatgttgatggcactcttacagcttcaagaaaggcggctacacccaagatgtcggagcttatgaaggaactgtaaaaggttggtactgatggagaggtgggcggatctgatctaacttagatatct

SEQ ID NO: 11012 - DNA, 343 bp, Gossypium hirsutum
  Clone ID: LIB3272-039-P1-K1-B12
cgacatcccagtcaagacactgttgacggttattgaaggagcggaatctgacggagatgtgttagttttccctgaaatgatcaaatacaagggtttggcggactccgatgtggatggttttgttgaggatgtgcttgtgaatggcaagccgtgggcttctggagttcaggaaacattgactggttcatatatctttgtgtgtgctcacgggaatcgggacaagagatgtggtgtttgtggaccagctctgattcaaaagctgaatgtggagattgagttgcgtggactgaaggatcaggtgtttgtaagtgcttgctctcacattggagggcacaagtatgct

SEQ ID NO: 11013 - DNA, 341 bp, Gossypium hirsutum
  Clone ID: LIB3196-039-P1-M1-D3
cggacgcgtgggcggacgcgtgggttcccttctttctttcttcctttttcttttatttgtttcttgatcactatgtatgtgatacagtatttttattttcttaataatcattcattcctttgattagtctaaggtgttattggaagctgtattcttcattttattgcttgtaaaagctattagcttttctcctttagctttaataacttgtatctcgatgagaacaagtcattgatcttaaagattgttgagagccagaattctgggaaattgagtgaatgtgctgagaaccaagcaaggctgcagcgaaacctcatgtacctggctgccattgcggattc

SEQ ID NO: 11014 - DNA, 287 bp, Gossypium hirsutum
  Clone ID: LIB3149-042-Q1-K1-C1
gattgggtctcgctcgattatcaggatcttgatctgtgaagtacttgttatgatcattgggacacgtacctagttggatattacatgttggttaacagttcactgttcaattttttattctcctggatatttatctaagtattgcttgtttcacaataaagcaaaacacggaggcgtcttacaccgccatgaccacaagcctaaagcacccgtcgcccccaaaaaagctcccaaattttaccccgctggaaatgtaaagaagcctgtacttaataagcgcaagccta

SEQ ID NO: 11015 - DNA, 225 bp, Gossypium hirsutum
  Clone ID: LIB3149-039-Q1-K1-B3
gttggcgacaatgtaatcactgaagatgatatcattgctctcattaagggaagtgagggggtggcaagcctgttgaagcttatctattggctaatcctgaatcctgcaactaggatattggttgctttgaattctgattcttggttttaaagagtggtcattgcttttaatggtgtgttttttatattttctttttccttttaaaacctaaattgtcttctaatt

SEQ ID NO: 11016 - DNA, 391 bp, Gossypium hirsutum
  unsure (1)..(391): unsure at all n locations
  Clone ID: LIB3165-037-P1-K1-C2
cccacgcgtnccgcgggccttggcnnagaatcagcggggaattgatagtaccctgttgagcttggactctagtcgcgacgtgttgtgtaaatgggacttgagaggtgnntaggataagtggganngctctcgggcgaaattgaannataccactactttnntaacgttattttaacttaaattccgtgaatcggagggcggggcancggcnnccctcttttttgtgacccaaagggccggcttttcggcccggcccccgatccgggcggaaagacaaattgtcaggtggggagggtttggctgggggcggcaccaatctgttaaaaagaataacgcnnaggtgtcctaaagattgaagctcaacgagaaccaagaaatctctgtgtggaaa

SEQ ID NO: 11017 - DNA, 368 bp, Gossypium hirsutum
  unsure (1)..(368): unsure at all n locations
  Clone ID: LIB3083-102-Q1-L1-H10
gttttacattcttgggaggttgatgagtcaaggaactgtttcagagtgcagacaaagcttaacaagtggggagaggaaatcggccttctttggggttctcttgaaccagatgggcttggcttgtgtccaattattcaagattgacgaggctgcnagttngtttgaagaagcacgagcaatactcgagcaagaatgcggccatgtcatcaggataccctgggaatatacagcaatcttgcagcaacttatgatgctatgggaagggttgaagatgcaatcgagatattggagtatgtactaaaattacgagaagaaaaacttggaataacaaatccggattttgaagacgaaaaagataggctggctga

SEQ ID NO: 11018 - DNA, 404 bp, Gossypium hirsutum
  Clone ID: uC-gsronu33B178d02b1
gcctcttgcccggggaaagcacgaggggctcgcacgagttgtttaacgcgtgtctgagtggacaggcatactatacggcgaatccaccagcgaaggaactggcttggccgattctgcggctgacggcgacccggtctagcagagctgtagacgagctctatgagatgacctgagaggtggacgattggctagagcatttaatggaagatagataaacactactatgaaggtgattttactgacactgggaatggtgggcgtgaggacctcgctctttgtggacccaaggccgactaccgacggacgatacactctgtagacattgtcaggtggggagtttggctggggcggcacatctgttaaaagagtccgccggtgtactaagatgaggctaacgagaacag

SEQ ID NO: 11019 - DNA, 600 bp, Gossypium hirsutum
  unsure (1)..(600): unsure at all n locations
  Clone ID: LIB3825-012-Q1-K6-B10
gccgatgcctatagaattcgtgacggacccagacgaccaaggttcagccatggnaagtcgacgatgttgacacaccggagatcttcggcgaaggcttcatcgcttccgacaacaagctcgcctatgccgatttcttcaacaacttcgaagacgattttgatgactccgatatcgactaaaaaaagaagaatcgtttcaaagcaaacattacaccagggactgtgttgattttgttggctggaaggtttatggggaagagagttgttttcttgaagcaactttatcagggttttcagccaatatggcattgatggtagcacttagaaaccttgcatccctcattgcagcaggcaatgtgcctgtgaaggatgaaaaaattgccattttctctgatgaactaaaccatgcatcaataattgatggtattcgtcttgctgaaagacaaagaagtgtagaattctttgtatataaacactgcgacatgtcccatctccgtgaactgttatcaaattgcaaaatgaagaaaaaggttgttgtgaccgataggttagtcatgtttctacagatgttcattacattgtcatttctctatcctataaa

SEQ ID NO: 11020 - DNA, 438 bp, Gossypium hirsutum
  Clone ID: uC-gsronu33B143d09b1
tgactctcaggcaaaaagggttcgggtgctgggggttttctaaaagctcatggtgcgttgaccagactggagtggcctctaccaacatggagactgttatttggcccatcaacgccttgccatcattgatcctgcttccggtgaccaacctctctttaatgaagacaagtctattgttgtcactgtcaatggagagatttacaaccatgaagaactaaggaagaagttggcccaccacaagttcaggactggcagtgactgcgatgttatttcccatctgtatgaggagtatggtgaagactttgaggacatgttagatggaatcttctcatttgcgctgctggatacccgagacaacagctatctcgttgcacgcgatgctattggtgtcacctccctctatattggctggggacttgatggttcggtttggatatc

SEQ ID NO: 11021 - DNA, 296 bp, Gossypium hirsutum
  Clone ID: uC-gsronu33B125c04b1
cccactcgtccggtaattcttcatacagttacgatttaatcgaaggtgggcctttgggggataagctcgaaaaaattagctatgagaacaggtttgcggcatctgcaggtggagggagtatttgcaagagctaaatgaaattctacactataggcgatcatgttattactgtagaccaaatcaagggtgttattaaagggagtgagggagactacaagcctggtgaagcttacctcttgggtaatgccgaagcctgcaactaggatataaactggttaatttgaagtattatgctt

SEQ ID NO: 11022 - DNA, 501 bp, Gossypium hirsutum
  Clone ID: uC-gsronu33B079e02b1
gtcactctgaagttccgccattaaagctcttcattaacgtggtgccctttgctgattttttatcacaaacacagcccattagtgtaaactccatcaatattcaaaaaggaacttcaatggctgtaaagaaatcctgtttgattgctatattcgatgttgatggaacacttacagctacaagaaaggtggctacccctgaaatgctggagttcatgaaggaactgagaaagtgggttactgtgggagtagtaggcggatctgagcttgttaagagatctgagcaactagtgaaagcagtgattaatgactatgattatgtattttctgaaaatggacttgttgctgataaagatgggaaactcattggaacccagagtttgaagtcctgtctcggagaagataagctgaaggaatttataaacttcagattgcattatattgctgacatggatatcccgataaaaagggggacatccattgaattccgaagtgggatgctta

SEQ ID NO: 11023 - DNA, 368 bp, Gossypium hirsutum
  Clone ID: uC-gsflmaxxa014b07b1
tcgttaatgatagccaatgagcaggagaatgaagtacgcttcaattgatgtcagcattggcaatatttacatgtctctatgtcgctccgatgaggccatcttctcctaccagacggcactaacagtgttcaaatcatcaaagggcgacaaccacccttcagttgccttcgtctctgtacgacttgcggatctataccacagaacaggaaagctccgagaatcaaagtgctattgtgaaaattgccgcttagagttctagaagagaacttgagaggatcttctaacagctgtagtcacagtacatcacctggacgaagcacgagcaatgggcctatcaagcgtcagtcactcggcggagctgcaaactt

SEQ ID NO: 11024 - DNA, 445 bp, Gossypium hirsutum
  unsure (1)..(445): unsure at all n locations
  Clone ID: LIB3493-030-P1-M1-A7
cggacgcgtgggcggacacttggactgttgctgcacccttactggggtgctcttcaccttctctcacgcccgcttcatcacatctgaatcccaacatgatgtcacccccgaaaaatccgaatccgaatccgaccccgaatccgccatccttctccccagcgagaaaccccactttgaaccccccaaatttctcgacttcaagcacgatgatgatgcctccggcgtcgcctccggcgtcgcctccggcgtcgcctccgttcctttgaccaggatccgttttaaccctgtcaaccgccacttcccaaggcgtcccttgaatccgttccgtcacaagcacaactgccgtttccataaacgcttcaggcttttgaatccacgcttccatcanaagcgcttcatttcttacggcaacgatatgatactgtccaacgagagaagttttgac

SEQ ID NO: 11025 - DNA, 468 bp, Gossypium hirsutum
  Clone ID: uC-gsronu33B076e09b1
tatggttcgatggtctcaaggcccatgctgcccgacatgtgaccgataagatgatgttcaatgcttctttcatatttcctcacaacacaccaactacaaaagaggcatattactacaggatgatctttgagaggttttcctctcagaacttgggcagacatgactgtactctgtacaggactagttgaatcctggagacacccttttgatcatcctgagcggatccatgaggaggctatcctttcttcacgtttaccatcactccatggtggtcatcatgtgttatatttgcttagacagtgctcagtcctccgtacccatggtgctggtcaccaactgcgtggtgcatggcgtaatgaacacctattacctgttgtgcaccctggggatgcaccctaagtggaaaaaaatggtgacggattttcaactagtgcagttctggttaagctttttgatcatggccatgct

SEQ ID NO: 11026 - DNA, 358 bp, Gossypium hirsutum
  Clone ID: uC-gsflnu33B008c10b1
tgtgatgccatacaagaagtagaagtaggtaaaaatgaggtggacaaagacaaatgagagccaaatgacctaaccagagaagaagaagactcaaataagtaaaggccattcgagtgtctaccaatctccttcatcctgccattggagagatcctgcaaaaggcagaaatcagggttaaaaacgactgcacaatgtaaatcgtgagccgatttggaaacagaaataagattgtaatgaaaggtgggaacacaaagaacatcagtaaaggtaatatgaggagataaaataaaagaaccagaatgagtaataggagaatgtttaccatttggaagctgaacaaatcgggagttaagagggt

SEQ ID NO: 11027 - DNA, 391 bp, Gossypium hirsutum
  Clone ID: uC-gsflnu33B057f06b1
tttcttctcgtccgtgaccaaatggctttggaaggagacttgttagggatgtgcggacatttatactgtatttggcatcattgcacgccttgccatcattgatcctgcttccggtgaccaacctctctttaatgaacacaagtctattgttgtcactgccaatggttagatttacaaccatgaagaactaaggaagaagatggcccaccacatgtttaggactggcagagactgttatgttgttgcccatttgtctgaggagtatggggaaaactctggggacactcagcatggaatctcttcattagagctgcttgatacccgtggcagcagattcgtagaggcacgcgatgctattggtgtcacctacctgtatattggctggggacat

SEQ ID NO: 11028 - DNA, 144 bp, Gossypium hirsutum
  Clone ID: uC-gsflmaxxa069f11b1
ccctctgcgtccgcccacgcgtccgcccacgcgtgcggggacgcttgggttcgcctgaaaatggtgtctgtacttcgagaaaagtttgctcaccttaacttgacattttcaattggagggcaaatatagctttgatgctctccc

SEQ ID NO: 11029 - DNA, 294 bp, Gossypium hirsutum
  Clone ID: LIB3149-057-Q1-K1-C5
taaaccccctcccaattaaatggcggcgtaaccttgccctgaattccatgcctcctgcaaaggttgtttcacctcaaactgcattccatgaggagaaacctgaagaagtggtcaaggtgggagaaattgcaacagaaaaggtaccggctgttgctcctgcagcaaaacctgttgctgaagaaccaaaggaagccatgcctgaagcagcatccggagaaccccaggctccagaaactgaagccacagttgaaactgaatcaaaggaggtggttaaagagcccatagctgtgactg

SEQ ID NO: 11030 - DNA, 376 bp, Gossypium hirsutum
  Clone ID: uC-gsronu33B168c07b1
tgtcttactcgcttttctcttcacccttacttgggggctctttaccttctctcaagcctgcttcaacacatctgaatcccaacatgatgtcacccccgaaaaatcccgtaccgatttttcccgaatcgaccccgaatccgccatcccttctcccagcgagaaaccccactttgaaccccccaaattactcgacttcaagcacgatgatgatgccttcggcgatgccttcgttcctttgaccaaaaacaggtttaaccctggcaaccggcactttccaaggcgttccttgattccgttccggcacaaggacaactggcggtttcattaaccgttcaagcctttgaaatcaccctttccataaaaaccgcttaatttt

SEQ ID NO: 11031 - DNA, 399 bp, Gossypium hirsutum
  Clone ID: LIB3189-037-P1-K1-B5
cggacgcgtgggtaaagccaatgattagaggcatcgggggcgcaacgccctcgacctattctcaaacttgaaataggtaggacggcgcgagggcttgaggaagacagaatcaattctcagcctcgagaatcaaagcgacgattggtagacaacggatcatcacaaaagcatgacatcatgtgaaagaaagttcttagcatcttatctgagctattaacctccatgacctgtggtctttttctcctttatttactttgtggtttgcaacccatcatttcaaacaacaagacaaccaccaccgtcctacgaccacgttcactctctcttttgttatatttaataaagggaaacatgctgccctttttggataaaatcaaaaggtccatccaagctttcatc

SEQ ID NO: 11032 - DNA, 417 bp, Gossypium hirsutum
  Clone ID: uC-gsflnu33B093a04b1
ccctttcgcccggggagctaattggtgccgagcaggaatgctgtaacgggaatggcaatgaccatgtctaatattacgcaaagccacaggactgagagctgatttggctgaatcacaagagaaagatcacgctgaggagctggtgtttagcacgactcacgtactatgaccatggaggagatctgatatgtgtagactacaggtcgaagtagccactcaccgactcataacgtgtgtttacctattgaatgaatactatgcggatcacggtctttatttacggaccgcctgccggcttcggccggccgatccgggcggaagacattgtcaggtggggagtttggctggggcggcacatctgttaaaagataacgcaggggcgctacgatgagcggaaccagaacagcaatctcgtgt

SEQ ID NO: 11033 - DNA, 457 bp, Gossypium hirsutum
  Clone ID: LIB3189-043-P1-K1-C7
aaaatatgaaaaaaactgtcaacgagagtttgattttaacaatcaaaaaacaaaaaaggggatgggcaacatgatgaaacgcgcggagaaaaacaaaataaaacccaaacataaattcgccatccttctccccagcgagaaaccccactttgaaccccccaaattactcgactttaagcacgaagatgatacctacggaggaaactccaatattttgaaaaagaacagttttaaccctgtcaaccgccacattccaaggcgtcccttgaatccgttccgtcacaagcacaactgccgtttccataaacgcttcaggcttttgaatccacgcttccatcaaaagcgcttcatttcttacggcaacgatatgatactgtccaacgagagaagttttgacccagagtcacgcggtgttgttcgccagatcgaaggcagttggggcagttttgacgatgat

SEQ ID NO: 11034 - DNA, 481 bp, Gossypium hirsutum
  Clone ID: LIB3189-040-P1-K1-H11
attttacttattccgcgaatcggacgcggggcacggaccctctttttggacccaaggccggcttcggccggccgatccgggcggaagacattgtcaggtggggagtttggcttgggcccctcacctgggacttgataacgcgagtgaactaagatgaggtatcaccgaacagaaaactctggtggaacaataccctaatggcttgcaaaatgcctgattattatcactaatactaaccggccaagtatgagataatggaacaatggaggatcgatatgtggaggtaggaatatggattcagctataataggggcacctgcgatgagaaaagggcttttgccatgggagcttttttttggcctgaccaactttaaattacatatatacatgtatgtatatcatgcttgattgggagattgtgtgattaggaagtgcttgcaaaaaggatgcttttatttatgcttaggggatattgagatgt

SEQ ID NO: 11035 - DNA, 402 bp, Gossypium hirsutum
  Clone ID: LIB3189-007-P1-K1-A7
ccagtcccagaactcgtcggctgccttcgcactgctcgagctgctcccgcggcgagagcggttcgccgcgtgccgggcggtggacggactgggaacggctccctcggtggcctttctcgggcgactaacagtcgactcagaactgttactgacaaggggaatcctactgtttaatttaaacatagcattgcgttgtgtcctgttgattgctacgcaatgttatattttctctagttgctctttattgttaataataatttataatttaattcgttctctgttattatccctcttcttctaatatattctctcttaatctatatataataatttatttttttttacttaaaatactattattattttcatattcttattcacttataacttcaaactttatta

SEQ ID NO: 11036 - DNA, 634 bp, Gossypium hirsutum
  Clone ID: AI055357.1
tagagtcgcccccctattctttctatgacaccagagccatatggttatagatgaaaagaatttcaaggcacacttaaaatcaaccctcttaaagcagcatagaatcaaataagcaacttaatcctagtgcagggcttcgggatagcccagagggtaagctccaacagggctgtaaattcccatcccctatgaagagcttgaattcgtcttcagtgataacatttatgcctataagtgtagatttccaatgagctcttgcaaatacttcccctcccctgcaatgcctcaaaccttggttcaaagctattttttcaagcttatcccccaaggcccacctttcgataaatcgtaactgtatgaaaattacttttatcatgtcctccgatctggtgcttcatatattggaatggaaggccttcaacaaagttgatttttacgatacttccagagctaggattagcttcaacttcaaggctctttactgcattaggtgcagccgtgggccaaactttcggagcttcaacagtaaaggccttgaaaagcctggcaggggcgactggggaggtattctcatagtcataagtgacaacacccatgattctaatattagctgggactttgagttcaaataaga

SEQ ID NO: 11037 - DNA, 405 bp, Gossypium hirsutum
  Clone ID: LIB3120-008-Q1-K1-G9
cggaaatcctattagggttttagacctttttcaagattcgaaaggaataagcttcagcgtccaaatcgggaggaaatggtgaagggacgccaaggagagcgtgtcagactctatgtaagaagaaccaccttgggttacaaaaggttgctgttcctagcttggaaacgatgacaatttccatgttgagtaatgtgaagatgatatttcatactgacctatcaccaaattcttttcaaagtctacgaaaattaagtgtttcaaggtgtgagattttgaaaaatctatttccagcgtcaatagctaaacatcttttacaacgttgaagatttaagcataagtgattgtggggtggaggagattgtatcgaaagggaaggagtagaggatcgacctattgaggttgagc

SEQ ID NO: 11038 - DNA, 606 bp, Gossypium hirsutum
  Clone ID: GOSHI-09MAY01-C44_33
aaacaaaaataaatgcattgtatataaagcacggacatgcctggcagtgtcgctatgtcatatggtacctgtattatgtgtcggcgttcgtcaatgtcattatttacccttcaataataagacaaaaaatttacaaggttctgtaatcaaaatctatctatggacctttacatagtcgtaacgagttctgccaccatcataactccgattctaacaactacacatttaagaataatattcagcatctgggcaacttcaccggtttaaggacaaaaccagtataatactagcctgcaacagtgcttgctcatgagttaggagagagcttcctattcctctttatggcattctttgtaagcgcgtcagatatctctcttcttcttttcgagttgcatcttgatggtattctcattattgtatatgttgtaacagaccacagcttcagagcacattccagcaagttttagtttatcttgaacaaaaaccttcaatctccacaacgttaattcactctgggtatatatatcaagatccacctcctgtgccgttggttgaaagcatggattgttctcagcaactatctctagagccttaccaaggtcttcc

SEQ ID NO: 11039 - DNA, 483 bp, Gossypium hirsutum
  Clone ID: GOSHI-09MAY01-C44_34
agcatgtgaagacccgtgcttctacgggagctcatgccaagtggatcatgcagagcttgttgttgtagatcagaaaatggttgctgaccatacaacgagaatgaaagccatcctcaaatgattcatttcatttctcaaacgaattcccatccacaacagaaatgggacaattacaaaaaaaaaaaagaaggaaaaaaaactacaaatggaaaaaaaaaatgcaaacaattcactccaaaatcttctctatatcatctatttggggggtcaaaacccataaacaaccttccattagctccttataattctctgtatgaagcatatgcattaccattacaacatatgtttctgtatttcccttaatcttcttggatattcacaaagataactaacttttctttttcgagttatcgaacttgaaaaaaaattcttttgctcaaccttaaaagatatacccttttaagatttggtttgttttttttc

SEQ ID NO: 11040 - DNA, 584 bp, Gossypium hirsutum
  Clone ID: GOSHI-09MAY01-C44_35
aataatataaaatatataatataaataaataatatacatactaatataaataaatatattatgaaagaattatattaataaaattataatttaatctgaagatataataattttaaaatatataaaaaaacaataaaaagtataatatttttaaaatcaataaaaataattttataacaacaaaaattcaatagatttatagtatatttaacaaaatatattaaaagttataattagtaatataaataaaaataagtgaagcttatacatatttgttccactcgagatttatgttctcattaaattaatcttagaaaacatacgttatcttttaacatatgtgccgccccataataactccccacctgacaatgtcttccgcccggatcgaccgccaaaagccgaccttgggtcctaaaagaggggccgtgccccgcctccgattcacggaataagtcaaataacgttacaagtagtggtatttcaatttcgcccaagagctccgacatatcctacacctctcaaaacccttccctaagtcggactagagtcaagctaaaaaaacgcgtgggcggacgcgtggg

SEQ ID NO: 11041 - DNA, 576 bp, Gossypium hirsutum
  Clone ID: GOSHI-09MAY01-C44_36
caagttataatggttcaactgcaatgttcaaagcctgtaagagatctcacattcatagtttctagtctcgtggtttcaagacagcatgcaatggatgccagtttctgtgaggtaaggccgacggtgtcgactttctcctcttcgccatctttcagttgccactcaaattcctgcaccaatctacctattgcaccacaagtagcaacattgcttgaagtgaaccggcacacgcccttttcccagctccgaacgccattgtcttttgcaaatccaatgggtcgtatttctcgtcgaggaacctttccgggttccattcttcggggttttcccaatagttcttgtccatgttacaaccatagatgttaacagcaatctcacttcctgatggtatatgataccctccaatttgtgtgtcttcatgcacgtatcgtaacggaactaacggcgccggactatgtttccgaagagtttcatgaaaaacggcatccaagtatcggatttgtgagaagttttcttctttaaccttgttggaactgcatactttttggagttcgtgataaagacggtcctgtcggg

SEQ ID NO: 11042 - DNA, 570 bp, Gossypium hirsutum
  Clone ID: GOSHI-09MAY01-C44_37
aaaaaaaaattaaaaaataaatcaataaacaaaaaaacaaaaaaaaaaaaaaaaaataattaaaaaataaaaaaaaaaataaaaaaaaaatgaattaaacaaaaccgaataaattaaaccaataaataaaacaataaaaataaaaaataacaaataaaagcaaaaaaaagaataaaaaataaaaaataaataaaaaaataaatataacaaaaagagaataaacaaaaaataaaaatattcaataaaaaaaaaaaaaactatgaataaaaaaatatccaataatgaacaaaaaaaaaatcaaataaaaaaaagaatcaataaagatagaaaaaaacaaaccagaaaacccaatggaaacaattcagacacctcaagcatcattacaaaaggtctaaaggatagataggccacgctttcacggttcgtatacgtactggaaatcagaatcaaacgagcttttacccttgtgttccacaccagattttctgttctagttgagctcatcttagccaccaaacgcaaataaaaaacacaaactcagaatggaaatgaaactgtttttattaccga

SEQ ID NO: 11043 - DNA, 359 bp, Gossypium hirsutum
  Clone ID: GOSHI-09MAY01-C44_38
ccggggaaggcccccgaaggagccggttccaagccggtccccgggcgggcacgggcggaccgcctttgccgcgggaacaagttcgagcaagggcgccggcaaccgacggggtcgggactgggaccccccgtgcccagccctcagagccaatccttttcccgaggttacggatccattttgcggacttcccttgcgcacagtgttccattcaccagagggtggtcctcgtggtgaaccaagaagggttatgagtacgcaggggaggggaggtgaaggaggaggaagggaagagggagccactccaatggttgtgggcacagtccaagacgaagttgcaggttgtttgacttgcttcagac

SEQ ID NO: 11044 - DNA, 809 bp, Gossypium hirsutum
  Clone ID: GOSHI-09MAY01-C44_39
cccttttattttcctgtttttacacaacacataaaaagaaattaaatgaaaaaataaatccctaaggtcagtactattatgttaagtaaaggcttataattagctttatttttgaaaataaagatgatcaaagctcgatcaccaccaccgctcttattaaaataatcataagaaagtttaggttttaagtggaaaaagaaaatataaaaaacaccattgaaagtaatggccactctttaaaagcagcatgagaattcaaagcaatctatatcttagttgcaggcttcgggattagccaagaggtaagcttcaacaggcttgtaaactccctcactccctttaatgagagccttgatttcatcttcagtgattacattgtcgccaacagtgtaaaatttcatcgagctcttgcaaatgcttcctccacttgcagctgcctcaaacttgttttcataactgattttttcaagcttgtcccccaagggcccaccttcgattaaactgtagctatatgaaaaattattttcgtcatgtcctcctatctggtgcttcatatattggaatggaaggccttcaacaaaattgatctttacgatgcttcctgagctaggattagcttcaacctcaacactcttgacggtattaggggcagctgtgggccaaactttcggagcttcaacagtaaaggccttgaaaagcctggcaggggcgactggggaggtattctcatagtcataagtgacaacacccatgaatctaatattagttgggactttgagttcaaagaagagaataaatggaaggttgag

SEQ ID NO: 11045 - DNA, 708 bp, Gossypium hirsutum
  Clone ID: GOSHI-09MAY01-C44_40
caacgatcggtagtgagcaactggcgtggcatgtctgagggactgtagcagtagagactctcacagctcctccgtcggctcagtctgactcagccaatacttagatatcgccttcatctaagataaagacctggatcttagcagcagcgaagggatagcctgggtcgagcagcttcaaaataccgccccaataaggagagctcagactcgatcttggcccgataatcgcggattagagtgacgtgatcctcattaccacggctctcctctttctgctcaatggaggagacgatccgccaggaagcacggcgtgcaccgattacattcttgtaagcgacggagaggaggttccgttcctcgacgctgagttcctcgctctcggaagaagaggagactttctccatgagctcaaccatttcgtcgtagcgctcggcttgctcggcgagtttggccatgtaaacgaattcctcgcgggacgaaggactagtggcggccatatttggaaattggaaagggctgagagagaatggaagcgaaagggggaatggaagaagggtaggttttgaaaaaaaaaatctagatctgagaccttttggggggtgtgggattgagaggatgggagacgtccgtggcgatgattgcgttgagaatgggagagggaacaatgcttttgctggctaatctcacggtctcaccgccctttttttc

SEQ ID NO: 11046 - DNA, 961 bp, Gossypium hirsutum
  Clone ID: GOSHI-09MAY01-C44_41
ctataaaagaggaacatgcaatggaataaatataagggtaaacgtccaaaatctaagacagagaccccaaagaagtgttgcagagcatagcacagtacaccacctttattatttatgaaaacattacagagtagtaaatcaaaacatagtttgtaacctcggaaccccctctcttcctttattcacgccactattacaaatagaggcatgtctacactaactggttttccatcctctaccaatatctctgtaacggttccggattgatcagcttcaatttcgttcattagtttcattgcctcgatgatgcacacaacttggcctttctgtactttatctcccaccttaacaaatggtggttcacccggtgcagggctcctgtagaacgttccagccatggggcatttaaggggcggatgagaagaaccaaccgctttagcagggggaggtgacgaaggtgctgctgctggaggggctgggttagcaggagcaggagctgctactggggctgctggagctggggtttgaaacgtcggttgaggcatgtactgctgcatgacaattggagatgctgattccagctgctgcaaagcttccttctttcttatgacaagctcacaatccgattgcttcagttgcagctccgtaatatctcgtgaatcaacaagtttttacccttttgttccacacgagatttctgttctcgttgagctcatcttaggacccttgcgttatcttttaccagatgtgccgccccagccaacctccccacttgccaatgtttccggccgggatggccggccgaaagcggcctttgggcccaaaaagagggccgttgccccgcctccgattcacggaataagtaaataacgttaaaagtagtggtatttcaatttcgcccgagagctccgaacgcgtggcgaacgcgtggcgaacgcgtgggcgaccggaattcggaccg

SEQ ID NO: 11047 - DNA, 814 bp, Gossypium hirsutum
  Clone ID: GOSHI-09MAY01-C44_42
acaaacgtaataccaagctttaaaggtactgttttaacccaactgacaggaaaaccaaaaaaattaataaaaaaagagaaaagaaaaaaccaaaaaaattaataaaaaaaaaagagaaagggaaaaagctaacgtctttaactagttaaatcccaaaacatagccctaaaacaacgtaactttttattttctttttcagcctaagaagcctttttaaatttggcacaaatatggcgctaataaattcgttccacacggagcttgttataagccttgaatgacttaatctcctttgtgaccttaacaagatcaactgaaggtttttaacgagaaataggcatatatgatccttgaactgggtttcagttgcaagctctttggcagtagaatcaccagccttaaattttgggagcacatcttggtaagacaacaagtttggcccttgtaggtcttaagtctttgaacattggcttgaagactttcaagatatcgatttttacggcggtgatcaacagcaatacctatggtgggtgcaagtttctttgaaataccagctgccttaagctctccaagagtgaaaccgttgccagctctcaacttcatgttgtacttcaaggtctggccatgaacaacagggcgaagaggcccagcagtaggtcttggaaagatccttactgctttcttttgccttgcaattcttcttctagccttccttgctggctggttgaaccaagttttcacgtagttctgccagtgcttcttaaagtgcccatttggaataacattgttatgcttaaccatggcttacctctgg

SEQ ID NO: 11048 - DNA, 734 bp, Gossypium hirsutum
  Clone ID: GOSHI-09MAY01-C44_43
cccacgcgtccgcccacgcgtccggcagtggtagggaacgaagtcgaactgtttcacacgagcagccatggtgaagtattcaagagaaccggacaaccctactaaatcttgcaaagctaggggttctgatcttcgtgttcattttaagaatacacgagaaactgcattcgcaatccgaaagctacctttgacaaaggcaaaaaggtacttggaggatgttattgcccataagcaagcaattccattccgccgcttctgtggaggagttgggcgaaccgcacaggctaagaatcgacattctaatggacaaggccgctggcccgtgaaatctgcaaaattcattctcgatttgctcaagaatgccgagagcaatgctgaggtaaaaggtttggatgtagactcacttatcatatctcacatccaagtgaaccaagcacagaagcaaaggcgccgaacatatcgtgcacacggaaggattaacccctacatgtcttcaccgtgccacattgaactgatcctgtctgagaaagaggaacctgtcaaaaaagagcccgagactcaattggctccaaggaaatcaaagggtgcttcgtcttaaattgctgagtaatggattgtaactcttgaaaattttacattttactttagttgcctctgtaatgagaacatttttggtttccttatgaaatgcttaagactcaaagttagtctatggagattcttggtttctattt

SEQ ID NO: 11049 - DNA, 865 bp, Gossypium hirsutum
  Clone ID: GOSHI-09MAY01-C44_44
gaaaaagtcagaaagagagcatgagctaaaatctcgttttgagcaaactgtgaaggaagctgctgataaacttaagggtatgaatttatatgttaaaaacttggatgatagtattgatgatgaaaagctgaaggaactgttttcggagtatggcaaaattatttcgtgcaaggtcatgcgtgaccctagtggagttagtaaaggctctgggtttgttgcattttctacacctgaagaagcatcacgagcccttgctgagatgaatcataaattggttgttagcaaaccactttatgttgcacttgctcaaaagcaagaagagagaagagcaaggctacaggctcagttttcacaaatgagacctcttgctatcccctcggttgctcctcatatgcccatgtaccctgctggtgcaccaggtcttggccaacaatttttatatgggcaagcaccctccagctatcattcctcaagctggttttggttatcaacagcaactggttcctggaatgaggcccggtggccctcctgtaccaaatttctttgttcccatggtacagcagggccagggcccaaggggacgacttggagcaagtccatttcaacaggctcaaacacccaatgttgcttagggggcgtgccattcattcccaacttggccgaatggggctgggtcattggaaggagcttgcacttgacaggctatggcttttcaacctttggcttctggttttgcgaatgcacacccctgagcaacaaaagacgatgctctgggaaagcctatatccccttgtgtggaacatctagtgtgtgatgcaacagccaaggttaccggtgtgcttctagagatggaccactctgaagt

SEQ ID NO: 11050 - DNA, 895 bp, Gossypium hirsutum
  Clone ID: GOSHI-09MAY01-C44_45
aaatccaattaaaggttctatttttgtaatcaaacaatccaaatgtaagatggatgagtttgtagtgccaaaccaaaacataaggtttcacagcttgaatccccaaaaacaaatacgagccttgatcccgacttgagcatcgttacagcagaaaacatggtacaatgtgttctcatagacgagtaatgacagcttcaacctctgacggggtgtatagatggtatgtcggtgctactcgagcgatatcgacattgttgggagtcaccttttcttccattacttgctttaaaatcgacagggcaattgtttcagcttcttgaagagttaagtccttgttgtattgctcttgcaaagagctatcagcaccttcggaacccgaacctatagcttttgcattgcattgccaaaatgtgccagagggatcggtatagtataagctagtcccattctcatcatgaccagcaatgagaagagataccccaaatggtcgggacatggattcttcatctccttcaccgaatcgaagggccagatcacaaagagcttgagttgtagactccacggtcattggctcaccatatgagaatctatggttctgagtttcaactcgtgcatgttcaacaagggtccgtgcatcagcaatcaacccactcatggcacatcctatatgctcatcaatttccataatcttctcaacactactgggttccaacaatggtgaagtaatacgcttctccacagccaaaacgacaccgtctttcgtctttagcccaattgcagttgaacccagctgtatttcaatcagaaaaagaaaaaacccattgatattagaacacgcccaaaaaaaattaggcacaaaaaatgataactgtttcaggagtttttcacagaaaac

SEQ ID NO: 11051 - DNA, 469 bp, Gossypium hirsutum
  Clone ID: GOSHI-09MAY01-C44_46
tgaacttaatacatgaaaataataagagaaagaaacaaggaaaaagaacagcgaataagctcaaaacatgttcatgatattaataagctcacaacttcagatcttttctaacaaatataatcaacaatcccataaaacaacaatataaaaactaaaggagcgtaaatttaacactaaattccatagaagatagtaaaacagccctaactagaaaaactttaataaaggataattttcttttccatttaaatttactcttcctcagcggcagactctccattcttcttgttgtgcttccttgcatacctctggttcctcaagaactttggatccatccctttggtggaagtatggcgttgactcttgggtttcttgatgccattcttgtgagccttgtaagactgattgtgagcggtgtggttctttgacttggccattactgctcaaccctaatctgatagatatcaag

SEQ ID NO: 11052 - DNA, 579 bp, Gossypium hirsutum
  Clone ID: GOSHI-09MAY01-C44_47
gttttccatctctgctgctctttcttctctaattattgaggaaatccaccgatcaaagttgttcaaatcgtgggtgaaagttttgagaaactaaaatggcgtccacattcagcggcgatgaaactgctccattctttggcttccttggggccgctgctgctctcgttttctcctgtatgggagcggcgtacggaacggccaagagcggtgtcggagtggcgtcgatgggagtgatgaggccagagctggtaatgaaatcgatcgtccccgttgttatggctggtgttttaggtatttatgtctcttattcttcctcttatttttgatctctttctttagttattctttcatttttatttctttttttttatttttcaatgtctatttttaactttattttatttttctcgtttttctatttttccttttttttacttatattttttttccttttttatctttattattctttctatattttctttttctttcttacttttttcatttctatctatctcttccttttttatcttttctcttcttttactcctctctttttcttataatggtatactttct

SEQ ID NO: 11053 - DNA, 806 bp, Gossypium hirsutum
  Clone ID: GOSHI-09MAY01-C44_48
catgatcgttacctcccttgtaagttttgtccccaaagaagtggatttcttgaaactcttcaagatatctcaagcaatatgttttgtcccagccctcggggaaaacatcaaagcttatttgccctccaattgaaaatgtcaagttaaggtgagcaaacttttctcgaagtacagacaccattttcaggcgaatattgtgaaccttgtcgtacttttcgaattcatccctttcttcttggctacagttacgtccaatcggagatacattaagcatcccacttcggaattcaatgaatgtccccctttttatcgggatatccaagtcagcaatataatgcaatgtgaagtttataaattccttcagcttatcttctccgagaaacgacttcaaactctgggttccaatgagtttcccatctttatgagcaacaagtccattttcagaaaatacataatcatagtcattaatcactgatttcccaagttgctcagatatcttaataagatcagatccacctactactccaacagtaacaacctttctcagttccttcatgaactccagcatttcaggggtagccacctttcttggagctgtaagtgttccatcaacatcaaataaagcaatcaaaccaggtttctttaaagccattgaagttcctttttgaatattgatggagtttagaaaaatgggctgtaattgtaatagaaaataagccaaaggaatgaatttaatgaagagctttaatggcggaacttagggggaattaaataatgtgttggggagattagatctggtctttgaa

SEQ ID NO: 11054 - DNA, 852 bp, Gossypium hirsutum
  Clone ID: GOSHI-09MAY01-C44_49
ccacaacatgacaacagaacaattgtattacattattgcaaaaaacagtacatgtgatggtattacagccagcaaaagcgtggtacaacctaacctgaagacgactttggactagaagtatcgacagaaaaactagttgtagaagttgaggaattatggacagctcttgcgtggctgatgcttggtttagtgaaccaagttgtttacagaaattgtttgtgaggccccacatggttgcatattagcctaatgttttgtctccctctcatccatctcagcacgatcttcatgtgcctcttgcttgtaagtcctctcagtccaacctcctgaactcataaacacatttctactccaatatgtcgagcacaggcaagtaaagacgactttggactaaaagtatcgacagaaaaactagttgtagaagttgaggaattatgcactttcccatgtgtggctaatgcttggtttagtgaaccaagttgtatacagaaattgtttgtgaggccccacatggttgcatattagcctaatcttttgtctctctctcatccatctcagcacgatcttcatgtgcctcttgcttgtaagtcctctcaatgcaacctccttgactcgttcccaagtatcaccgacggtgaggggcccatgctccttaagaatgtcaaagatgactctggttatggtctgcgtttgctctagcgacgttttcaactcgattggcttcattttcggcttgggtttcgttgaaaagtaccggatcatactcccaaacatcttgtcttcccgggagtcgttctgagccgaaacccaactaacgaagatggaatgaaacggtggagttgtattgccgga

SEQ ID NO: 11055 - DNA, 1238 bp, Gossypium hirsutum
  Clone ID: GOSHI-09MAY01-C44_50
gtttttattcctagggaaaacccaaggtctctggtcattcgccccacaaaaagttggccgtccagagcttctgcagagaaggcatcaccattgaaggatgcatccactccgccgcatgagaatggcaaattttctaatgatggctccaacgctgaggataaagacgaaaatcctgctgaaaatggccttgtgaaggagcgaattcatatcatcagaagtaaccaaaaggctaatggagtccatgatgattattctactgagaaagaggacttgtacatgacgatcagtggtcacagagctggtgaggctgctattgtgtatgagcacggggctgacgtcgaggctctaatgccaaagctcaggcgttctgattactatacagaaccccgaatccaagaactggcagcaaaggaaagggctgaaccagggtactgtcgccgtgtcaaggactttgtggttgggcggcatggttatggaagcataaagttcctgggtgagacagatgtgagatgccttgatctagagtcccttgtccagttcaacaaccgcgaggtaattgtttacatggatgacagcaagaaacctcctgttggacaaggtcttaataaacctgcagaagtaacgctgcttaacatcaagtgcttcgacaaaaggaccagagagcagtatacagaagggccaaaagtggagaaatataaggagatgcttaagaagaaggctgaggaccaaggagcagactttctctcctatgatcccatcaaaggagaatggaggttcagggtaaatcacttcagcaagtaccagttggaagacgaagaggaagatgtgctgtaacaatgtttgttttattcatggcaattgttaaggaagagtttgtgggtggcacatgtgttttctccccattaaaaagggtaatgtcttgaatgtacagggttggcaaattgtggtaatgtttcgacttttttaagcgtcacatcagacggtatacatgaatgttttcgtgcgagtgatttcgttattttttttctgttcttgcgatgctgactcttggaattagataatttagtcagaattgtgctccccccctggtttcatacactagggaccagtctaaataaaatgtaaagttgttatgaaatttcaataggaatagaaagtaggtctttgatgtgtaaatgtgaaattgaattttaattcgaagctttagattgaaatttaaattgaaaaaaccccaacac

SEQ ID NO: 11056 - DNA, 753 bp, Gossypium hirsutum
  Clone ID: GOSHI-09MAY01-C44_51
agaaatgctctatgaaccttttcacttaattcaatgatttgaggttgtccttgtttcgctacaattttttttttattttccgccttcaattatagctctctccggattagaatttgtacaaaaaaaaaaaagcttaacattttcagatccaactcattactctcttcaaaggaccaaaaagaagatggcttcaacattcagcggcgatgaaactgctcctttcttcggcttcctgggtgctgctgctgccctcgttttctcttgtatgggagcagcttatggtacagcgaaaagtggtgttggtgtagcatcaatgggtgtaatgagaccggagctggtgatgaaatcgatcgtcccggtggtaatggctggggtgctgggtatttatggtttaatcatcgctgttataatcagtactgggattaacccaaagggctaaatcttattaccttttcgatgggtatgctcatttatcttctggtttagcttgtggacttgctggtctttctgctggtatggctattggaattgtaggtgatgctggtgttagagctaacgcacaacagccaaagcttttttgttgggatgatcctcattcttatctttgccgaggcattggcactatatggcttgatcgtcggcattattctctcatccaaagctggtcagtcacgatccgagtgatagataaggcctaattactcattgtgactcttatatcactggctgtggtttaccgaaagaatttgttca

SEQ ID NO: 11057 - DNA, 657 bp, Gossypium hirsutum
  Clone ID: GOSHI-09MAY01-C44_52
cccacgcgtccgcccacgcgtccgcccacgcgtccgcaaacactgccttgaaggaaagcaactccgagagtttcgactgttctcagatctaaacgacaacgtttccagatccacaatggcttctacattcagcggcgatgaaacggctccgttcttcggctttctcggcgccgccgccgctcttgtcttctcttgtatgggagctgcatatgggaccgctaagagcggtgtcggtgtggcatctatgggtgtgatgaggccagaattggtgatgaaatcgattgtacccgttgttatggctggtgtcttgggtatttacgggttgattattgctgtcattattagtaccgggatcaatcctaaggcaaaatcgtattaccttttcgatggttacgcccatctttcatctggtcttgcttgtggccttgccggtctttctgctggaatggctattggaattgttggtgatgctggtgtcagagctaatgcacaacaaccaaaactttttgttggaatgatacttatcctcatctttgccgaagctttggctctttacggccttattgtcggcatcatcttgtcttcccgggctggccaatctagagcagaataagataccggggaattggggtagattcttttatttgcttatattgg

SEQ ID NO: 11058 - DNA, 697 bp, Gossypium hirsutum
  Clone ID: GOSHI-09MAY01-C44_53
gaaaaaaaaaaaaagctaagagataggaatatatagcgtaagaaaaaattaaatccaactaggacggaaagacagatttaaaattaatgtgattttttttaaatgaaagataaatgatataaattgataactgaattataattcaaaatattcttacaataatattaaaattaacaatgttaaaaatattcttacaataactaaagcacactaaaatgtttacacaatcacctcccagaaacaggtgcaacagtaaccacaagaacaaaaaaaaaagaaaaatacacaaatccagaaacaacagtttttggcaatcactttttcaggagtaataccgaaaaaataaccccctgatttcaacaaaaatgacacattactcagaagtctgcttgctttgtcttcagtttcaaatcttaactgcaaatgctgcaacagactagatcagcctgaatgtccttctcttgcaacagggtttccaaattatcctttcaaatgaatgtgcttaatttcagatattgtgacttttgtcagattcaactgttctagaatgaattcttcaacaacctccattgagaccttatcagtcacaactgagtatctgactatagatgaaaagctagaagcagagaagctcaaaaaatccagtagcagctttgatctcctgggttcttctttgtctccaaaatgggatctccct

SEQ ID NO: 11059 - DNA, 752 bp, Gossypium hirsutum
  Clone ID: GOSHI-09MAY01-C44_54
agctcaaaacatgttcttaatattaataagctcacagcttcaaatctcttttgaaaatgagattcaacaatcccaaaataacatttcaactaaggtgattatagtaaacgaacactcaattccaccggggggaaaaacaacaattggaaaacactaatcaaagctagatcttttgccattaaaaatttactcttcttcagtagcagactcaccgctcttcttgttgtgcttccttgcatacctctggttcctcaagaacttgggatccatccctttggtggaagtgtggccgtgcctcttgggtttcttgatgccattcttgtgagccttgtaagattgattgtgggcagtgtggttctttgacttcgccatttctgttcaccccttgtccgtaccagttctgagtcgactgttcgtcgcccggggaaggcccccgagggagccgttcccagtccgtcccccggccggcacgcggcgacccgctctcgccgcgggagcagctcgagcagtgcgccggcagccgacgggttcgggactgggacccccgttgccagccctcaaaagcaatcctttttccgaggttacggatccattttgccgacttcccttgcctacattggtccattgaacaaaggctggtcaccttggaaaccttaatcggttattaggacggccgggggcggaccgcaattggtccttcggaatttcaaaggccggcgggggcggcacggaccacaacccgacggaaggct

SEQ ID NO: 11060 - DNA, 551 bp, Gossypium hirsutum
  Clone ID: GOSHI-09MAY01-C44_55
aattgaagagtaaaccaaacatcatgatcatccacaactaaaacaacccaaattccaatgccaattcaatgaattggtacttttaacattaacaaagaaaacagtagataaactcgaaacatgttctcaatattgataagctcaaagcttcaaatattttataacaaagataatcatcaaaatagtgctaatgttgaaaaaaacaaaaccctaatttccattgaaacaaacaaaccaaccatcattagaaaaccctaacccaggctagaattttcttttaccccactaaaagcctactcttcttcattggctgattctccattcttcttgttgtgtttccttgcatacctttggttcctcaagaacttaggatccatccctttggtggaagtgtggcggtgcctcttgggtttcttggattccattcttgtgagccttgtcagattggttgtgagccgtgtgattctttgatttagccattacagagtagagataagttgcggcactaactaggtcctccgaatggaaaagaaacaaaagaaataaattaa

SEQ ID NO: 11061 - DNA, 1248 bp, Gossypium hirsutum
  Clone ID: GOSHI-09MAY01-C44_56
ctaggtaattctctccgcgaattacaaatgttgagggttctgcagctgtccaactacaaggcaatgtacaagttggatccttggtaagagtgtttccataggagcaacatataccatcttccctcgtcatgtcttgtaagtccatgtagcctcgtttttgaactgcaagaccatgtaacttcttcacaaaaacagcagcagttgataactttggatgacgtgtatcctgagatacttcaggaccaaagtcagaagtccaaccatcttctgattgctcatagtctgttggttcgggaacatcaaagaattcatcagctgcatcattaagacctaacagacttgaatgtctgaaggagccctttccattacttcacttgtagtttccttagatttcccagcctctatttgtgtacacatatcaattgagccatcctccacactctggtgcaacctaactttccgtgtcaactctccagaagaaagatcgtccgaaggatattttacttgctttgctctgaataattctcgtaatgcagcaactctctcaagcatcctaatggtaataggccgagctgctgaagttcgaagataagatttccagaatttccaatcaattgcaagcatgtgttttacaacagactgttttccttcattcacaggagatatgacatatccaccacttttaaggcaggcacgaacatagcttttctgcgggggacaagtcttgtgaaacactgagtgatagaggataacatatgttccatcatcttctattctcacaatagcgctgcaacaagagatccctccttttcgttgcccaaggtaaccaatcactatagagttgcttgtgaacaatatcagtatgaccatcaagatgttcgaccacactacccttgtagaaacagaagtcccattctgatcttaagggtccaagagacattagtgtctggaaaatggcttctgaagttccatctacaacacccacagccatgattgcaggatggtcgtcccactggcaattagagaggcgtaaaacacaaagccaaattgctatttcatgacccccccgccatagaaaatgacaagcgatattttgaggaatctttatttttcatcagtaaaattgaacacccaaaaaaacaagatttgttaataaaccaaacacacacaaagaaacagaacatagcacagttctggaaatctaagaattaagggagaatcaactttcttaaaaagaaaaccaaccga

SEQ ID NO: 11062 - DNA, 1092 bp, Gossypium hirsutum
  Clone ID: GOSHI-09MAY01-C44_57
gtagtttttttttttctttttttaattagaaaatatattagtctatactaatcattcttatttcacaaatgcgagcaatgaggaataaaagaggcaacccacatgcaaactaaatccaaaatcaaaggttccttttcctgatgaggtgtaactaaaatatccgagtgaagacgtactgaaattttgcacgacaccaaaaaataagggttcacagtttgaatccccttaactcatgctgcatgggatgatagtttataacaaagcatttctctcatagccgactgatgactgcttccacctctgaaggggtgtacagatggtatatcggtgctactttggcaatatcaacattgttgggagtcaccttttcttccattacttgctttaaaatggacagagcaattgtttcagcttcttgaagagttaggtccttgttgtattgctcttgcaaagagctatctgcaccttcagaaccagagcctatagcttttgcattgcattgccaaaatgtgccagatggatcagtatagtataagctaggcccgttctcatcatgaccagcaatgagaagtgatacaccaaacggccgggacatcgattcttcatctccttcaccaaatcgaagggccagatcacaaagagcttgtgttgtggattctactgtcattggctcaccatatgagaatctgtggttctgagtctcaactcgtgcatgttcaacaagtgtacgggcatcagcaatcaacccactcatagcacatcctatatgctcatcaatttccataatcttctcaacgctgctgggttccaacagtggtgaagtaatacgcttctcaacagccagaacgacaccttcttttgtcttcaacccaattgcagttgaacccagcttgatggcctcaatagcatattccacctggaacaatctcccttccggagaaaatgtgttcactccacggtcatactcagttctggtgagaaacatgtttggatcgacttgatcttattagatctaccaaaacttgtgacaaagggtgacattcagcaacgagaaagcttagcgatgatggtatttttcgtcggacgcgtggg

SEQ ID NO: 11063 - DNA, 1990 bp, Gossypium hirsutum
  Clone ID: GOSHI-09MAY01-C44_58
taagacacagatcatatttattattgagcagttcatcctgccggctttcagtgtatatataaatacatatataaattgctgcaaccttaataaagtgaatgtccaaaattcatgattccctcaaatgatagtaaaagagaatcatggtgataccatattttctgcaagttctaaatacccaaaatttaaccactttgaactattactgaataatataaaaactacatacttgagccagcacccggcttgccacatattttttcccataaaccactcgatacaactcggtaataccaagaagaaaagcggtatcgttcaagggttgcttaagaagagagctttgccctgcttcactgtatcaccaggacttgtaactgtgtgtcctactgttctctccgattcataaatttcatgatcgttacctcccttgtaagttttgtctccctctcatccatctcagcacgatcttcatgtgcctcttgcttgtaagtcctctcagtccaacctccttgattcgttcccaagtatcaccgacggtgaggggcccatgctccttgagaatgtcaaaggtgacactctgcttatggtctgcgtttgctcaggcgacgttttcaactcgattggcttcattttcggcttgggtttcgttgaaagtaccgaatcatactcccaaacatcttgcttttaatttcattttatattaattgtataatattaattaaataatattataattgctatatatatcatgtcaatttgcttttaattctaaaatatttaaccctcaacatttatacactatgacaacattgaaaaaggaaaatcaaacagcacttgtataaggtaataattatcaaacgattgaccaaagacaatctttaaatcctgtaagctaacccaaaacagaaaaatcaaaagaaaaaaaatttattcagaaccagcatgcatcaaattaactaagacaataaatgaacaagaaattagttatgacatcattagagaatatatccaacacatctttttatcagtctcataaaccatcaaccaataagcaaattaaaattctgttaatcagtctcatagaacctatttacttaaaagactacaactcaatttcccttcatgtaaggctaggtaacacagatgaatataattctatctttaaccaaaatcagagtactttcaccacatggatatatcaataatcacacagaacttcccattcaactgatatacagagataccatgggtctacctaaaacttccgatcaaaatccatttgcaaaccatacccaacataacacaaacaatcccaagtattttaaagaaaatatacccaacacttactgactaatgcaagcacccagcagtatgaaaaagaaaatatatatgcatacacgaatcatgacaatctccaccgtatataatcatgaaacccaaatcgacaaaaactttgcaattagcaaatcagttgaaattctccaattcttatcaatatcaacaagcatcccaattagattattactatttttttaaaactaaagtacagactttttgagaaaactaagaaacagaatgtcacaactcacaacgaattaaaaagacattttattaccatccagaaaaactaacaaataaactctacatgcgtcacaactcccgctgggttcctagaaccaaaatcaagccaacacagatgcagtaaacaatttacatacggatgctttttgtttaagcaattagtattctgctaagcaaagatttaaaagaaatagaaaataacacaaaagctataatattaaacagagggaaacaaacaatccaaaaataaacaacaacatatagtatacgataaacaaacaaaaatgaagaacaagaccgacatctatagatctgaaagacaaacgaaacagagatttcgaaagctgaaactaaaaaagaaattgatacctgaaatgagtctccgcccacgcggccgcccacgcggccg

SEQ ID NO: 11064 - DNA, 578 bp, Gossypium hirsutum
  Clone ID: GOSHI-09MAY01-C44_59
ttctctaaggaaggaatatatatataacagcttattaagatcagctaattacacacataatttccttacaaatcatgctaaggcatggttaattactacaactcaatatcaccaaagcataaataaaagcatcccttttgcaagcacttcctaatcacacaatctcccaatcaaacatgatatacatacatgtatatatgtaacttaaagttggtcaggccaaagaaaagctcccatggcaaaagcccttttctcatcgacggtgccccatttaaagctgaatccatattccttcaccaacatatcgatcttccattcttccatcttctcataatcggccttcgagtatcgaggataatgaactggcatttggaagccattagggtagtcttccttgcaggttttgatgctggtaatccctctttccatttccttgcaaccgataagtccttcgtttgggcacgatacctctgccttcgcatgctagataccgccatcggtatggccaaaaacttgagtaaatgccgaactgagaaaccacttgagagccatgttttttgaagtttcggacgcgtggg

SEQ ID NO: 11065 - DNA, 1038 bp, Gossypium hirsutum
  Clone ID: GOSHI-09MAY01-C44_60
aacaaagttgctattcagttccataaatgattgattacccaaaacttcgaagtccatgaacaaacacgcaaaaaatccgagatagaagagacattttggcgaaattactagtgccgtagttatgagggatgcagatgggaagtctaagtgttttggatttgtcaacttcgaaaatgctgatgatgctgctaaagctgttggagctcttaatggaaagaaatttgatgataaagagtggtatgttggaaaagcccagaaaaaatctgaaagagagcacgagctaaaagctcaatttgagcaaagtatgaaggaagctgcagataaatctcagggtgcaaatttatacattaaaaacttagatgatagtattggtgatgaaacattgaaggaacttttttcagagtttggtaacattacatcttgcaaggttatgcgtgaccctaatggaattagtaagggctctgggtttgttgcattttcaactcctgaagaagcctctcgtgctcttgctgagatgaatggtaaaatggttgttagcaaaccactttatgttgcagtggcgcagaggaaagaagagagaagagcaaggctacaggctcagttttctcaaatgagaccaattatcccctcagttgctcctcgtatgccaatgtttcctcctggtgctccaggtcttggccagcaatttttatatgggcaagcacctccagctatgcttcctccacaagctagttttggttatcagcagcaactgcttcctggaatgaggcctggtggcccccctgtaccaaacttctttgttcccatggtccagcagggtcagcagggccagcgtccagggggacgaggaggagctggtgctgtccaacagactcagcaaccaatgccgatgatgcagcagcagatgatgcccagggggcatgcctatcgttacccccctggtcgtaacatgcctgaagttccactgtctaatgttggtggaggcatgctttctgttccatacgacatgggtggcatgcccttgcgagatgctggtat

SEQ ID NO: 11066 - DNA, 637 bp, Gossypium hirsutum
  Clone ID: GOSHI-09MAY01-C44_61
tgattgtcttatttcatacaccatcctaaacaaaccaaaaataaacacaaaacatgttgaataagtttatcaaaacaaagtgaaaaggcagagtcactcaagtagtcaatcacaagccgttcggcatcgagacagcttagatattgctagggtacatgaagactctgactcgatctcccatagattttgggggaaggttagacttgaacttagcacggacaacaccactgttaccatgaggtttagtgacctttccccaaatgcagcgatagtgtgagccattcttcttcaccttagctttgtatatataagccatgcgctttcctgcataccaagctacttcctccttggtgttaactccctcaatctggatcaaagaagtatttgggtactggtttgacttcgacctcttgtaacccaagatggttcctcttacatagagtctgactcgctccccttggcggttgacagggttaaaactgatcttggtcaaaggaacggaggcgacgccggaggcatcatcatcgtgcttgaagtcgagtaatttggggggttcaaagtggggtttctcgctggggagaaggatggcggattcggggtcggattcgggaaaatcggtaacggcggacgcgtggaa

SEQ ID NO: 11067 - DNA, 1131 bp, Gossypium hirsutum
  Clone ID: GOSHI-09MAY01-C44_62
gaactctatttcattaaaatttgtttttttttggggttaagttataagaggagagcaaagtcctaatagtaacacgattagcacaactcaaactcaaatcacgcctagagcgataaacaccttgaccatcaagacaaattgattatcggagacccacaaaaaaaagcttacacctttgatataaaatagacttaaaatacgattatgacacaacaaaattcacaaacacgaaagtctgcttaggttataatcatcgtactaaaataatcccaacacgaaatgaatatctcatttctaaattgtcaccatagaaccttgaattatgccctcaatcagttcatacaaacagcacacttttgataattataggtttttactagaatttgttgttatatcgggcagctaacaatcacatcatgtgcttacatcggtttccttcttttccatagtccccgcaccttgctccgcctgcttagcatttccatctgccttgttcatgtcttgctcagatggcttcgtcacttcttgctcttcatcgtcactgctgtcctcaaaatcgtccatgccactgccatccatgcctcccatattgccaaagctcgagaagtccattcctcccaagtcaatatcaccaggaccattctcttcgtcttcatcgacccatttgtcccaatccactttaatataatggggggccttgccttcaccgcgcaatagttttttccaccacactttctcggctttctccaacacacaaactatgttccggactcctatactaattttgctttcctccacattgaccttatcataaagatccaacttcaattcataaaggttgttgtcagctccggcattagccgaaagtgtaaacactccctcgggttcaagattgaccttcgcattcttcgaatccggtaatagcaccgtaatgtaaaccttgtcagctctttcagcccactttacctctggattacgactcatgattagtgagaagaggtatagattgaaaaaccctagaccaccagaaaacgggcaataataatgataatgtgtaagagaaactgcaatggaacaagacaaggttttggccctttggttttttcgcttatatttgtgcggacgcgtggg

SEQ ID NO: 11068 - DNA, 1412 bp, Gossypium hirsutum
  Clone ID: GOSHI-09MAY01-C44_63
attgggtcggggcccctgcaggttgaaggtatcgagaagctggacatcgaatacggcacgaggataagttatagtgaatttattgataaaaggatagcatctgcccttacaaagatgaaaatacaagcaaaatcgaagacttcagagatcatccttaaaagttgaacacaaagttaacttgaaataccagctaaagtgataataaaactcgaccatagaatttcggaaacttcgaaacattcaccaaataaaaccgtccctcgaatttcaactatcaaacagtaaggctcaactcacaaaagccttggaaagaggtacacaaatgttttatcctacttattcattcaatcaataaaataaatggaacatgaactccatcctccttggtttgacaataccagctttcacaattaagattctataccagattcatgagcttgaacggaatcactctgaaacaattactacatgtaacaatggaaacgaaatggaaaaacaaaaaaaagttggtttaattaattattagttacccttgaagaccttggcattggtggagtaactcttggcatgaaagtctgagaacaagtagagaagagagacgttgaaggctccattgaaacaccaactcagaatcccagagcagccagaagcagtgaagtggtagaacacaagcatggccatgatcaaaaagcttaaccggaactgcaccagttgaaaatccgtcaccattttcttccacttggggtgcatccccagggtgcacaacagcgtaataggaaagtacattacgacatgcaccacgcagttggtgaccagcaccatgggtacggaggactgagcactgtctaagcaaatataacacatgatgaccaccatggagtgatggtaaacgtgaaggaaggatagcctcttcatggatccgctgaggatgatcaaaagggtgtccatgaattcaacaatcttggagaggtagaaaatgtaatgcccagaaaaagagagggcccgatggggatgtacccctggagaagcaaacgaggatgttgaagttaggcacctgggagaagatggaaacgaggcaacccagggccatgatgaaagaaagggtaaggaggaagatgttgtggacggctgcgattgatttgaggagtggacgtgaaagtgatgggcgagatagttgggagagaacgaaggtgaaagagatgtaagacaagacagtgagggtgaggaagcggtgagaggaggctggtgtttggccactttcccatgaaaactggaggattttgggatgcttcactagccaatcctccaaggttgagaacaaggcttgttgcaccaccaagtctttgatacaggagaaaagggttgggaaaaaggggacttccatcttgctgctgcctttactactctagtac

SEQ ID NO: 11069 - DNA, 1043 bp, Gossypium hirsutum
  Clone ID: GOSHI-09MAY01-C44_64
atcagaattagattgagataaaagatcaaacaaagctatccactcctttttctcagatccgaaacgccgtcgtcttagtcggaaccacttcgatccacaatgtcttctactttcagcggcgatgaaacggcaccgttcttcggcttcctcggcgccgctgctgctctcgtcttctcctgtatgggagctgcatatgggacggctaagagtggtgttggtgtggcttcaatgggtgtgatgaggcctgaattggtgatgaaatctattgtaccagttgttatggctggtgttttgggtatttatggcttgattatcgctgtcattattagtactgggatcaatcctaaggccaaatcgtattaccttttcgatggttacgcccatctttcttctggtcttgcttgtggccttgctgggctttctgctggaatggcaatttggaattgtcggcgatgctggtgtcagagctaacgcacagcagccaaagctttttgttggaatgatccttatcctcatctttgctgaagctttggctctttatggtcttattgtcggcattatcttgtcatctcgggctggacaatcccgagcagaataagataactcaagtgctgcatagtattctcttattgattttatctgtagcactagaccgaaaaccatttcgatcaatatcaggttagttatggttggacagcaagtgccgtgttcgcacacaaatattgatgaacatttgtttttggtggatgctcttgtcctctttgtagtagtagaaattgagtttctctttaagtcttaataaaatgttttggagctttcccttgtttgattctttttcagcactgtatctttttataagttgaaactaactaatgggttaatttgacggaccaattaaaaattttagacactgactacaatggcgccaacatctcaagtggccacgtaaaccctgccgtcaaccttcagtgcttttgttggcgggaacatcactctgttgcgcggcattctttactggatgggccaactcctaagatgaacca

SEQ ID NO: 11070 - DNA, 858 bp, Gossypium hirsutum
  Clone ID: GOSHI-09MAY01-C44_65
aaggagttggaagaaacttctcaataaaaaaaaatggctcaaaaacaggattttgaacaaaatatgaaaagataactaaagctggctttaaactcacctgacaatccaaaaacaaaaactaatgtctttaacaagtcaaataccaaaacatagtcctcaaagaaagcaaccttacttcttgtcttccttctcagcctcagcagctttcttcaatcgggcaccaatgtgtcgttcatttgtacgttccacacgaagcttgttataggccttgaatgacttcatctcctctgtgaccttcacaagctccacggaaggcttctcacgagaaataggcatgtatgatccctggacttgggttgcagttgcaagctcctcagcaattgaatcaccagccttaaacttgcgagctcgtcttgggaagacaacaagtttggccttgtaagttttaagcctctgaacattggcttgaagaccttcaagggacttgttcttacgacggtgatcgactgcaataccaatggtaggtgcaagtttctttgaaataccagcagccttaagctcttcaagagtgaaacccttgccagctctcaacttcatgttgtacttcaaagtttggccatggacgattgggcgaagaggtccagaagttggtcttggaaagatcctaccggccttcttttgccttgcaatccttcttctagcctttcttgctggctgattgaaccaggttttcacatagttctgccagtgctttttgaagtgcccatttggcacaacgttgttatgtttaaccatgacttacctccggctgaagacgggaagggatgttttatgaatttacgacgcgtgggtcgcgcc

SEQ ID NO: 11071 - DNA, 951 bp, Gossypium hirsutum
  Clone ID: GOSHI-09MAY01-C44_66
atgaaatggcagatctcgtctcatctcatgtcattgattaaatactcgaaatcaagcttacaaattttataccgaagttttctaaaagctgttctaaaactgtctgatgatatgaaaaacagaatgaactaatgcttttaaccaagtcaaaacagcagaacatagccctcgaaaaaaccaccttacttcttatcttctttctcagcctcagcagccttcttcaatctggcaccgatatatcgcgcattcgtacgttcaacacgaagcttgttgtaggccttgaatgacttcatctcctcggtgaccttcaccagctcaacagaaggcttctcatgagaaataggcatgtatggtccttgcacttgggttgcagttgcaagctcctcagcagtagaatcaccagccttagacttgcgtgcacgtcttgggaagacaacaagtttggccttgtaagtcttaagcctctgaacattggcttgaagaccttcaagagatcggttcttacgacggtgatcaactgatataccgatggtgggtgcaagtttctttgaaatacccgcagctttaagctcttcaagggtgaaacccttgccagctctcaacttcatgttatacttcaaagtctgtccatggacaatagggcgtagaggtccagcagttggccttgggaagatcctcacggccttcttttgccttgcaattcttcttctagccttccttgcaggctgattgaaccaagttttcacatagttctgccaatgcttcttgaaatggccatttggcacaacattgttatgtttaaccatggcttacctgtgtgatttagcataaacaaaacaaaccaaaccaaaatgttaaatgatgataacaaaatctgaaaataaacttggggaaaagaaatcagagaaaagaaagagagcaccttggtgggagggatactgacggcgcaag

SEQ ID NO: 11072 - DNA, 1464 bp, Gossypium hirsutum
  Clone ID: GOSHI-09MAY01-C44_67
caactcagttgatgtattaaaaataagagcgtggcaataaactcggctattacagccctatataatgttctttagcaagcatttttctactcataatttcggtatcgagctgaagcattccaaatgtctaattgcatctactgaaacatctcaatgcaagtagatatcaaaataaaagtaatatgactatttgtatccatcccctaatgaagtttgtcgtttggaggattattttattgtcaccattgcctccgcaaccaaaaaacaggggtgtacaacccttgagcaaacagtacgaaattggattacatgtccttaattcagcctgaccttctatagtagctataagccacagcaacggttgccacagctccaaccaccgctgctgctgtaagaacatcacgttgatcccatgatcctacccaacttgtcaaaccgcacagccccttttttccatgagcttttgttgtttcttcagttttctttgtttcacttacttccgagctagcagtcatgcaacagctagacccattagcaccctggcaacaaccgccgaacattttccctggtcttttgaacagttgactcttcaggcttctcatttttcttcacttctgtcccattcggaagcttctgttcccctgttccatcaccactttcagtagaaacccccatttgacccctccaaagacgttctattattttgccattcgcaatgtgctgatccagcaattcaggtacatcttcaggagtaacatagccataccagtggcccgtaatttttcccttggaatctggactgaagataatcaagttcccagcatacttatgccctccaatgtgagagcaagcatttacaaacacctgatccttcaatcctcgcaatgcaatctcctcattcagcttttcaatcaggattggtccacatacaccacatctcttgtcacgattaccatgagcacacacaaagacataagaaccagtaaacgtctcctgcactccggaagcccatggtttgccattcacaagcacatcctcaacaaagccatccacatcaccctcagtcaaacccttgtatttgatcatttcagggaaaatcagcacatctccatcagattgctctccttcaataaccgtcaacagtgtcttaacagggatgtcgtttttgcgagacttaagagtcgaggagaaaagcttaggtagggagtcctcttcaacgcgggaagcccaatcggtataggacctatggcggaggaacaagtgacggtcgtaaggattgacggtgccagcgaggttactcgagtacatctcctcgcgcgtgaagccatacttcgcctcatcttcggcggatacagttgaccagttgctaggatccgccatggaagaagaagaaacagaaggccaacgttttagagaaacgttaagctgagttcgagcaaaggaaatggaggatgtgaagaagca

SEQ ID NO: 11073 - DNA, 1065 bp, Gossypium hirsutum
  Clone ID: GOSHI-09MAY01-C44_68
gggaaccaactgttacacacagcagcagcagcagcagccatggttcgtcaatcttccgcatttcgggaacatctttccatttttttcttagagaagtattcaagtttcattccaaattcttttcgttttcattatatttttattggtttgatttgttttctctctctctctctttttataggtgaagtactcaagagaaccggacaaccctactaaatcttgcaaagctaggggttctgaccttcgtgttcattttaagaatacacgagaaactgcctttgcaatccgaaagctacctttgacaaaggcaaaaaggtacttggaagatgttattgcccacaagcaagcaattccattcaggcgcttctgtggtggagttgggccgaaccgcacaggctaagaatcgccattctaatggacaagggccgttggcccatgaaatctgcaaaattcattctcgatttgctcaagaatgccgagagcaatgctgaggtgaaaggcttggatgtagattcacttatcatatctcacatccaagtaaaccaagcacagaagcaaaggcgccgaacatatcgtgcacatggaagaattaacccctacatgtcttcaccgtgtcacattgaactgatcctgtctgagaaagaggaagccgtcaaaaaagagccggagactcagttggctccgaggaaatcaaagggtgcttcgtcttaaactgctgagtgatggattgttagtcggaagcttttaatttgttgtctctgtaatgagaacatttttgtttacttcacaatgaggtgcttaagactcaaaagtttgtctgtggagattcctggtttctatttaaagctatgctcatttcgcattgaaaaaaaaaaaaaaaaaaaaaaaaaaaaaaaaaaaaaaaaaaaaaaactgacaaaaaaaaaaaaaaaaaacttactaacgctgaaaaacaacaaaaaaaaaataaaaaaaaaaaaaacaaaaaaaaaaaaaaaaaccgggggggcccctttaaaaagaccaagattaacttccccgtttcccaaattaataacctttttt

SEQ ID NO: 11074 - DNA, 1215 bp, Gossypium hirsutum
  Clone ID: GOSHI-09MAY01-C44_69
aaaatcaatgaaaagatagaataattcgttgtttttatgtgatatcctccaaagttattctactccatgttcttctcttttttggttttcttatttttttttttcatttttttttttttatttttttttttttttttttttttttttttcgagaacataatatccaattaaaaaaggttcttttttctgatctggtgtaattaaattatccaactgaaagagtagatgagtttagtgccacaccaaaaataacgttttcacagcttgaatcccaagaaacaaatacaagcttctccccctcaagtcatgcatcattatgacagtaaagcaggttgttgcatggtaagatcgtatgatggcagcgcattctcataggcgagtaatgacagcttccacctctgaaggggtgtatagatggtatgttggtgctactttggcaatatcaacattgttgggagtcaccttctcttccattacttgctttaaaatggacagagcaatagtttcagcttctagaagagtcaggtccttgttgtattgctcttgcaaagagctgtctgcaccttcggaacctgagcctatagcctttgcattgcattgccaaaatgtgccagagggatcagtatagtataagctaggcccattctcatcatgaccagcaatgagaagagacaccccaaatggccgggacatggattcttcatctccttcaccaaatcgaagggccaggtcacaaagagcttgtgttgtggagctatacagtcattggctcgccatattagaatctgtggttatgagtctcaaatcgtgcatgttcaacaagtgttcgggcatcagcaatcaagccactcatagcacatcctatatgtatcatcaatttgccataatcttctcgacagtgctgggctccaacaatggcgaagtaatacgcttatcgacagccaacacaacaccttctttggtctttaacccaattgcagttgaacccagcttgatggcctcaatagcatattctacctggaacaatcttcccctccggagaaaatgtgttcacttccacgtgtcataatcagtcctggtgagaaacatcttggatcgattggatgttagatctaacaaaacccctaaagaacaaaaaaaaacccacaattttttagcttgtttctgaaaagaaaattaaattcaaaagaaaaaaagaaaaaagagagaaagatg

SEQ ID NO: 11075 - DNA, 811 bp, Gossypium hirsutum
  Clone ID: GOSHI-09MAY01-C44_70
cccacgcgtccggtgaaaagaaattttgaagaaaaaaaaatccatcaccgatctaagttccccaaattctgttcaaatcgccggcgaaattttgatctgaaaatctaaaaatgtcgtccacattcagcggcgatgaaactgctcctttttttggcttcctcggtgccgctgctgccctcgttttctcctgtatgggagctgcgtatgggacggctaagagcggtgttggtgtggcgtcgatgggagtgatgaggccggagctggtgatgaaatcgatcgttcccgttgttatggctggtgttttgggtatttatggtttgattattgcggttattatcagtactgggattaacccaaaggctaaatcttattaccttttcgatggctatgctcatctttcctctggccttgcttgtggtcttgctggtctctccgccggcatggctattgggatcgtcggcgatgctggcgttagagccaatgcccaacagccaaagctttttgttggaatgattcttatcctcatttttgctgaggctttggctctgtatgggctcatcgtcggtatcatcctctcttctcgtgccggtcaatcccgagctgaatagagtgcaatattccaagactcgggattttgtatccgttcattcattttcatttgctgtttgtaagattagaacatagattcgattcgaaataattcgttttttacattgtttgtattctctatttctggaatcaaatagttcagtgtactgtaaagaccattatgttgatatttttcactcaattctgcaattggcattgcaat

SEQ ID NO: 11076 - DNA, 1014 bp, Gossypium hirsutum
  Clone ID: GOSHI-09MAY01-C44_71
cttcatcataaacttcacggtgcatatgctgttggtcccccctccctttttaccacttcaagcactgacatcatgcaaagtaagtcttttcacagttttctagttttttttttttgacaccaacaaaagggaagattctcattcatgattaacttccactacaaaatattgattacacacttaaataacacaaagaaccaataggctgatgataacgaaagatgatacgatgatcacagaatctcttggtactcgtaaatatcacctatattatacaacaatgtattcggaagtttgatggacatgccacagctcctactcattttattaaatacttcatacatttggacatgccacaggctcctactcattttattaaataattcatacattctgttgtcttccagtaggcaggcattaactctgtatggcaactccaggaaagtccatccgtggtatactatcaataaccttggatggcttgttgctgaggggagtctctgcgtcataagcagagagatgaacccccaaggcagcccggcccgaagggtcaaggttgtttttccaggcagcgtcccactcaacagctttagctgtgctgcatgccacactagctcctccggggacagtcaatctagccgagttctgagggaaaaacctctcaaaaatcatcctgctcgtaatatgcctcttttgtagttggtgtgttgtgaggaaatatgaaagaagcattgaacatcatcttatcggtcacatgtcgggcagcatgggccttgagaccatcgatccaactataaccaacaccatcactgaactgttctttttgtctgtagaggatatgctttggcagatagggatgctcttcatcatcgaaggcccttcttagaacccacttctccctgcgtccttcatcttttttgatcatcttcgcttcagggtctatagacatggcaacattgataaattctttgtctaagaaggggactcgtgcccacgcgtccgcggacgcgtggg

SEQ ID NO: 11077 - DNA, 795 bp, Gossypium hirsutum
  Clone ID: GOSHI-09MAY01-C44_72
tttttttttttttttttttttttttttttttatatttttattttttttattgaacttctccaagtatattatttgtcagtttttaattttttgtttttttttttttttttttcttttttttttttttttttcaaggagaaaataggtggaaaacccttgatagaaatatgtaaagataaataagtcttatatttcaccatcccaaagaaacaaaatgactgattcaaagcacacaaaatcttgactaagttcataaaaacaaaagtgaaatcgtagagcgtcattcgagtcgtcgatctacacaactcatatattgctggggtacatgaagactctgactctatctcccatagactttgggggaaggttagacttgaacttagcacgaacaaccccactgttaccatgaggtctagtaacttctcccccaaatgcagcgatagtgtgagccattcttcttcactttggccttgtagatatcagccatacgcttgccagcataccaagctacttcctccttggtgttaactccctcaatctggatcaacgaagtgtttgggtactggttcgactttgatctcttgtaacccaagatggttcctcttacatagagcctgactcgctctccttggcggatttcgacttccatgaccaccgtcctgctgtcttaatcgaccaacaccctttgtgggttctaggttagcgcgcagttgggcaccgtaacccggcttccggttcatcccgcatcgccagttatgcttaccaaaaatggcccacttggagctctcgattccg

SEQ ID NO: 11078 - DNA, 2058 bp, Gossypium hirsutum
  Clone ID: GOSHI-09MAY01-C44_73
aaaaccaaggggaaacttccatttcaaaatatgattaccaacttcaataacataaacaacaactaaatataacaaaaacaatgatcaaacgatcacaatatgcatccatccatccatccttccatacatacatgaatacatatatatatagtggttttatatattacctatactatacattatagcatactgaagttccatggattatatggcacaaattatactaatcaatcattaaatttcacacattttgcttcaattttcatggcacttaaccatgtatggcaactccaggaatctccatcatcaacggtattgactcaataatcttggacggcttgttatctagaggtgtctcggagtcctaagccgagagatggactccaagtgctgctctgcccgacgggtcgaggttgttcttccaagtggcatcccattcgacagctttggccgtgctgcatgctacacttgctcctcccgggacggtcaatcgtgccgagttctgagggaagaacctttcgaagatcatcctataatagtatgcttctttcgtggtcggagtgttgtgagggaagatgtttgaagcattaagcatcatcttatcggtcacatttgcagcagcatgagctttgagaccatcgatccaactataaccaacgccatcactgaattgttctttctgccatgtataagatatgctttggcaaatagggatggttttcatcatcaaaggctcgtctaagaacccatttctcaatgcgtccttcatccttattaatcatctttgattcagggtctatagccatggcgacattgatgaattctttgtctaagaatggaactcgagcctccaatccccatgcagacgttgctttgttagctctcaagcaatcatacaggtgaagggctttgatcttccggcatgtttcttgatggaattcatccttatttggtgctttgtggaaatacaaatatccaccaaaaatctcgtcggagccttcaccggagataaccattttgacaccaagtgacttgatctttcgtgacattaagaaacataggagtacttgctctgattgtggtgacatcgtaggtttcaatgtggtaaataacatcttcaatggcatcaattccatcttgaacggtgaagtgaaactcgtgatgaacagtgcccaaatagtctgccacctctcttgcagccttcaaatctggtgaaccctctaggccaacacagaaagaatggagctggcttccccattgtttggcagccttggtaccagccaaataccgagctgtgatggaagcaactaatgatgaatcaagtcctccagataacagaactccaaaaggcacatcagtcatcaaccttttgatcacagcattttcaaatgcacgtctaagaacaagaggatcgtatggaaccgatggagtgacctctgaaaaccaaggtggattataccatctcctaaagcctccagatttactcgagtataaatgaccgggaggaaagctttcgaaatgttcgcagtcatcatttaatcctttcaattctgatgctatccaaactgaaccatcgagtccccatccaatataaagtgaggtgacaccaatggcatcacgagcgacaatatagctattgtcacgagtatccaatagcacaactcgagaagattccatccaacatgtccacaaagtcttccccgtactcctcatacaaatgtgctataacatcacaatcactgccagtcctgaacttgtggttcaccaaattcttccttagttcttcatggttataaatctctccattcaccgtgacggcgacactcttgtcttcattgaagagaggttggtcgccggaggcagggtcgatgatggcaaggcgttgatgagccaaataacaatcgccgtgctggtagagcccgctccagtctggaccacggtgcttcagcctgcgagaaagttcgagaactcgaaccctttttgcctgcgaatcggagcaacccaaaacagctaatatcccacacattttttctctctcaacaatcaacactcccaaac

SEQ ID NO: 11079 - DNA, 1204 bp, Gossypium hirsutum
  Clone ID: GOSHI-09MAY01-C44_74
cccatgcgtccggtaatttccaagttccttcttcaattcattatctctcttgtctctgcctttcattccatcactcacgaaatccagcgatcaaggtttccccaaactcccttcaaatcctcgtctcaacaatttttgtttaaagcctagtaaaatggcgtccacatttagcggtgatgaaactgctcctttcttcggcttcctcggagccgctgctgccctcgttttctcctgtatgggtgctgcgtacgggacggcgaagagcggtgtcggggtggcgtcgatgggagtgatgaggccggagttggtgatgaaatcgatcgtgcccgttgttatggccggagttttaggtatttatgggttgattattgcggttattatcagcactgggattaacccaaaggccaaatcttactaccttttcgatggctatgctcatctttcctctggtctcgcttgtggcctcgccggtctctctgccggtatggctattggaatcgttggcgatgctggagttagagccaatgcccaacaaccaaagctttttgttggaatgattcttattctcatttttgctgaggctttggctctctatggactcattgtcggtatcatcctctcttcccgggctggtcaatcccgggcagaatagagtgcaaagttccgaaacttgggtcattgctagtaggcttcacttggttgtttcgtctccaattcttgccgctagtgcagtatgaaacatttgtcaagttgttcttttgatctcattcatgaattttcttttcaatggttctctgctgtttgtatgattagaagacggattccgtttgaaataaattcttattttacattacattttttttttcagatctagtgttgtaatatgcaagttcaacataatgtaaacaccatttagtttaaaactggtttttcttatatttatatactatttgttatgtgttttaaacaaaactaaaaagcctatgccaattaaaatcaagccgaagaaaaaacactattgccaactcgaagtagactgaaacatgatcccgccaaaaaatctctattttccatatgaacctggcaaacaggttaggagcccggcgaggataaagggccctacctagtcaaatgcagtttttaagtttccaactacagcaccaaaaagtttttttatgcgccctccgaatgctaaccttgcccc

SEQ ID NO: 11080 - DNA, 1299 bp, Gossypium hirsutum
  Clone ID: GOSHI-09MAY01-C44_75
ataatcaaatttattcacccaaagatttattcactcaaacgaacattcttcttttccaaatttcaagagcacatcacagacattcaataacacaaataacaatagtaaaaaggttaagggaaaaaaaatatgaaatcttaaagctccaaaaacagaaagctcaagaaattacaacttgtaacactatacatgatcttccatgatacagaatgtggatataagttggaaaaacagattagatacgacctgggaaatgcctcctttcaaattctgaaaccccattttttcgtcccctctttcttcgccgtcctctttgagttcggatcgatgagattttccagtgattttgcttttctgttgcgtggcctgcccgcttctttcaggagctcagccagcctattcttttcgtcttcaaaatcaggatttgctattccaagtttttcttctcgtaattttagtacatactccaatatctcgattgcatcttcgacccttcccatagcatcataagttgctgcaagattgctgtaatactcccagggtatcttgatgacatgggccgcattcttgttcgagtattgctcgtgcttcttcaaacaactcggcagcctcgtcaatcttgaataattggacacaagccaagcccatctggttcaagacaaccccaaagaaggctgacttcctctccccacttgctctaagctttgttactgcactctcaaaagagttccttgactcatcatacctcccaagaatgtaaaacatcacccctattcgagcttcaattcctgcccttgtgctttgctgaccgcgtttgtcttccaacaacttcattgctttctgcaagagcttcaaagcctcctcaggctcatcaacagattcatatatggctgaaatttcggttaacccaccagctatctcttatgctgtggctccaggcacgggttttgcaaagatcctcagggcattttcacaataggactttgattctcggagctttcctgttctgtggtatagatccgcaagtcgtacaaagacggaggcaactgaagggtggttgtcaccctttgatgatttgaaaactgttagtgccttctggtaggagaagacggcctcatcaaagcgacatagagacatgtaaatattgccaatgctgacatcaattgaagctacttcattctcctgcccattggcaatcattgccatgctggctaggacaaggtgctcaagagccgcctcgtaatctccctttgcctcacatacccgtgccatcaacatgcggtcggctgcctattccag

SEQ ID NO: 11081 - DNA, 737 bp, Gossypium hirsutum
  Clone ID: GOSHI-09MAY01-C44_76
gacttaagaaagcacaaagctcaaccagcaccaccactcttacttgaaacaatcatatgacagtttaggctttaagatgaaaaagaaaatatcagaagcacaacattaaaatctgacccgtctttaaaggaagcatgaaaattcaaagcaacctatatcttagttgcaagcatcggggttagctaagaggtaagcttcaatagctttgtaaactccctcactccctttaatgagagccttgatttcatcttcagtgattacatagtcaccaaaagtgtaaaatttcatcgagctcttgcacacacttcctccacctacagctgcctcaaacttattctcgtagttgattttctcaagcttgtcccccaaaggcccaccttcaatcaaactgtaactgtatgaaaatttgttttcatcatgtcctccaatctggtgcttcatatattggaatggaaggccttcaacaaagttgatctttacgatacttccagggccaggattagcttcaacctcaatactcttgattgcatgaggggcagctatgggccagacccttgtcagcttcaagaacgaaggccttgaaaagcctggcgggagcgacaggggaggtagagtcatagttataagtgacaacacccatgattctaatactacttgggactttgagttgaaagaaaagaataaatggatgattgcgtacgcgtgggcggacgcgtgggcgcgtggggcgattcggg

SEQ ID NO: 11082 - DNA, 1258 bp, Gossypium hirsutum
  Clone ID: GOSHI-09MAY01-C44_77
ggtaaaatataagatttttatagatatggtcatggattcgaatgaaatgggattaaaaattacaccgaggaatgaatccaccacatcagcatcatcacggctgactcaaagatggttaaagtaaaacacagatttggaaagtagaatcatgagaccctacaaaattacatgttaagtttaccataagatgctctgtctcgtactagaaaacacagaccaaaaggtctaaagtttatgtcctaacattgttccttgcatcagaaacaatttcctttaaaaaaatatatatcccctaaattcatcttcttaactatgctaaatcaggatagtagacagaccattaggccgtcaatcgcagccgagaactccacgagcttcggctgaccctgcacttccaatgtcttgcttgccttctccagaagagccatgcctgaaaccagggaaaactccagctccaagtgctccgttgccacctgtagtgctagcttcactttgcagcatgtgaagacctgtgcttccaccggagctcatgccaagtggaccatgcagagcttgttgttgttggtgagcagaaaatggttgctgaccatacaacatggaggaccgtgcagccataagcgattgtggtgtcatctgttgagtttgttgctgttgctgcatgtagtgcccaagctcctgactgcatgatacccccaaatggaaactgtgcatgcatggtgagtggttggggttaagaatccgcaatggcagccaggtacataaggtttccttcaagccttgtttggttctccgcacattcactaaatttacccggaattctggctttcaacaatctttaagatcaatgacttgttctcatccagatactgttgaatatgatcagtagtgacgttgttgggatagtaagctgccatcatgggatgcatctgcatcaggtgctgctgcattttctttctttatatccaaacacagactctccaaatattttaaaaaatatataaaagttttaaaatatatttgtctcactctttttctctttttgtatgcaaaacacactgagctgaaagaggagaatcactccaaaaaaaaaaatttgtaaagaaagaggtagagagagagagaaagagagacaaatagagagatacccttttgctattttctatgtttcttcactttctttcttgcatctcactattaatattattgttttgtttttcccttagttacaaataaccccacgcgtccgcccacgcgtccg

SEQ ID NO: 11083 - DNA, 819 bp, Gossypium hirsutum
  Clone ID: GOSHI-09MAY01-C44_78
atctaagagctatgacgcacgctgcacgcagatgcttgagctctgttccgcgggcgcccttttttttttttttttttttttttaaaaatgaataacgatgacctaagtctgatcaccatcacttttattggcataatccaaagacagtttagagttcaagacgaaaagaaaatatcaaaaccacaccattataatcacaccaccctttaaaagcatgcatgaaaattcaaaggaagctgtatctttagttgcaggcatcggggttagccaaaagataagcttcaatagccttgtaaactacctaactgcctttaatgagagtctggatttcatactcagagattacatagtcgccaacggtgtaatattttattgagctcttgcaaatgcttcctccgtctgcagctgccacaaactggttctcatagctgattttctcaagcttgtcccctaaaggcccaccttcaatcatactgtaactgtatgaaaaaattgttttcgtcatgtcctccaatctggtgcttcatatattggtatggcagagccttcatcaaaggtgatctttacaattcttccagcactagtatcacattcgagctcaacactctagactgcataacggccatccgtggtgcaaaccttggcagcttcaaaaacaaaagccttgatgagcctgtgctgtagcaattgggtaggttacctcaaactcatatctcacatgcacccatgattctaatcctacacatagaggttttgtgtctaagcttagaagcaagaggagcaaagaagaaaaatcggacgcgtgggcggacgcgtggg

SEQ ID NO: 11084 - DNA, 901 bp, Gossypium hirsutum
  Clone ID: GOSHI-09MAY01-C44_79
gtgaataaaaaaaaatttctctggaaacaaagcaactatcaactacgtttacctcagatctaaaacacctcgtctcagatccactaaattcaccatgtctactactttcagcggcgatgaaacggctcccttcttcggcttcctcggcgccgccgccgctctcgtcttctcctgtatgggagctgcatacgggacggctaaaagcggtgtgggtgtggcttcaatgggtgtgatgaggcctgagttggtgatgaaatccattgttccagttgttatggctggtgttttgggtatttatgggttgattattgctgttattattagtactggcatcaatccaaaggccaaatcgtattatctttttgatggttatgcccatctttcctctggtcttgcttgtggacttgctgggctttcagctggaatggcaatcggaattgttggtgatgctggtgtcagagctaatgcacagcagccaaaactttttgttggaatgatccttatcctcatctttgctgaagctttggctctttacggcctcatcgtgggcatcatcttgtcttctcgggctggccaatctagagcagagtaaagcgctggtagagctgttttagtagtattcttttattacttatcgtgtttattatgattggacatcaagtggtgggtttaatgagcagtgtctctttcctcttggtagaagtagaattgagttctctctctaataaattgtatggttattgtttgataagtgtatttgcagtgtgtggaacactattaattttggagagataatatatctatgtatttaatccatagcttttagatggttggtggatatatttatttttggtacgtatcaatattgatgtatcaaaacatatcacactacttgttaaac

SEQ ID NO: 11085 - DNA, 1260 bp, Gossypium hirsutum
  Clone ID: GOSHI-09MAY01-C44_80
gccacagagcaaaaattgaaaaattccataattccagtaaatttcaagcaccaaatcttaaaatctcttgttacaaattgattctcgtaatagagttcaagttagtatcttctcctaggactccgagagcgatgtgtccgtccggctctcatattttttctcttagaggctccaacactgggtccattgctaaaggcccaatcaacattcatagtctgcgtaagaagttctgctccatccattgcagatatggcattctttgcttcttcaaacttttcatattcaatcagtgcatatcccttgacaaatccagtgcgacgatcaagatttaaatgcaaattcttgatctcaccaaattcaccaaatgtattgtgcaaatcatcctcttgtgcttcctcatgtacaccagtgaccaaaattatccatccttcaatagatctctgtggaccggggccgccgtcagagccgagagagtcaaagtcgcgggaagcgagatgggagtgacggtcggcgtcgtcctggcggaagccacggcctttagtcttcttagggccagaaagagaaacggaagcgccgccagtgatggcagacttgagcttaggcatggagacttgaggtgatgcgtcaccagagacggcgtcctcgtccatgaggtcgtcgtcctccggctcgaaatccacggcctccacgtcagcactcgccatcacgtgatttaacgtgcgatcccacgcgtccgcccacgcgtccgcccacgcggccgcccacgcgtccgcccacgcgtccgctttaaatccccgtggggttttgtttcaccttttttaactctttttttctctctcgaaatcccatcaaaactcaagaagaaggaaaaacagataaacttcaatggctatcagaaaacctggtttgattgctttatttgatgttgatggcactcttacagctccaagaaaggtggctacacccaagatgttggagttcatgaaggaactgaaaaaggttgttactgttggagtggtgggcggatctgatctcagtaagatatctgagcaacttgggaaatcagttgtcaatgactatgattatgtattttctgaaaatgggcttgttgctcataaagatggaaaactcattggcacccagagcttgaagtcatttctgggagaaaaaaaggtcaaggaatttataaacttcacactgcattatattgctgacttggatatcccgataaaaaggggtacattcatagaattccgaagt

SEQ ID NO: 11086 - DNA, 1096 bp, Gossypium hirsutum
  Clone ID: GOSHI-09MAY01-C44_81
aatattcacgttaaacctttccattgcaacaagtaaaaaaattcatgaaaaacagaacaactaaaccagtgatctggcaatatgaaatctcacagcgcagttactataatacaaggaacatcatatggttcatctcaaacgagtgcaatcttatttacaacccatagtaaggcacactaaatagtaatatgcacgcataccctaagggctggtgactagaaagtgaaaattacccaaataaacatatagatagatgcaacactagatcactatgatcattttagaaaacgtgcagggtttattcaaaaatgaataaaatacttccggaacttctccatgaacccgccctcgtgctcctctgtctcatccctttcttcctctccatggtgatgatggcggtggtggtggtggtggtggtggtggtggtggtggtggtgatgctcttcctcatgatcctcttcatcatggtgctcgtggtcatggtcttccctcatggtgctcctggtcatggtcttcatcatggtgctcgtggtcatggtcttcatcatggtgttcgtggtcatggtggtctggcttcataaaacctacatgatgcttagactcggtgccatcatcgtcaaaactgccccaaccggcctcgatctggcgaacaacaccgcgtgactctgggtcaaaacttctctcgtcggacagtatcatgtcgttgccgtaagaaatgaagcgtttctgatggaagcgtggattcaaaggcatgaagcgtttatggaaacggcagttgtgcttgtgacggcccggaatcaagggacgccttgggaagtgacggttgacagggttaaaactgatcttggtcaaaggaacggaggcgacgccggaggcatcatcatcgtgcttgaagtcgagtaatttggggggttcaaagtggggtttctcgctggggagaaggatggcggattcggggtcggattcgggaaaatcggtaacggatttttcgggggtgacatcatgttggcgattcagatgtgatgaagcgggcgtgagagaaggtgaagaggaggaaagtaaaggtgaagagaaaagcgagtctagccattttctt

SEQ ID NO: 11087 - DNA, 1330 bp, Gossypium hirsutum
  Clone ID: GOSHI-09MAY01-C44_82
atgttgttgtatataaattttttgatttttggttttttttttttgagcagtaaattcccaatttcccattgtgacttccgaatcattcatttccattccacaatgtgaagaataaaagcagatatatgctcagagcagatagtagagagcattcaggggcacaaagaagctaaaataaaatttaaaaaaagaaaagaagcaaaaaactgagtacatgaacgatcgagttaaaacaaaggcaagaattgcttaagtagcaccaaatcttcttctatcaaaaacacatcaaatcggtagaagtttcgttttgaattgaaaccctaaattggcaaattatataattgaaagtaagagcccggctgactctcagtctctcactactgctttgactattgttgttcttcttcctcgtcacgcttcgctgcttctttaatctcatcatcaccctgcatgtcggaggtccacagagtgagattgtcacgtagcagttgcatgatgagggtgctgtctttgtatgattcctcccctagtgtatccaactcagctattgcttcatcaaacgcctgtttagccagttcgcaagcgcgatcaggagaattgagaatctcgtagtagaaaacagagaaattgagggctagaccgagtcggatcgggtgagttggagccaattcggcgttggcaatctcctgagcggatttataggcagtgagagtactctcagcagcttccttgcgttcggcgctagttttgaattcagccaaatacctgtgataatctcccttcatcttaagataaaagacctttgaatctccaccggaagccgaagggatgagtgtggtgtcaaggagtttcaagatcccgccacagatcgaggagagctcggactcgatcttagcccggtaatcacgtataacggccacgtgatcctcgttaccacggctctcctctttctgctcgatggaggagatgatgcgccacgaagcacggcgtgcgccgatcacgttcttgtaagcgacggagaggaggtagcgttcttcgatggtgagtccctcgttgtcggcggcggaagccgagactttctccatgaactcaagccatttcctcgtagcgttcggcttgctcggcgagtttcgccatgtagacattttcctcgcggggtgaagaagtggcggcggcgacgtctccggactccctaacgttgccgtcagccgccgcgtcccggttcaggaattttaacccgattccctttcgaagctcgcgctggacgcgctgtcggacgggcttcccccgtctcttaggatcgactaacccatgtgcaagtgccgttcac

SEQ ID NO: 11088 - DNA, 932 bp, Gossypium hirsutum
  Clone ID: GOSHI-09MAY01-C44_83
gcaggaaacttctcaatttaataaaatgctcaacaaaaaggattactgtcataataccaaagttttctaaagctgtctcagttcacttgacaaaatgaaaacaaaatttaaggtctttttagcaagccaaataacaaaacactgtccccaaaagggtaaccttacttcttgtcttccttctcggcctcggcagctttcttcaacctagcaccaatatgacgttcgttcgcacgttcaacacggagcttgttgtatgccttgaatgatttcatgtcctcggtgaccttcacgagctcaacggaaggcttctcacgagaaataggcatgtatggtccttggacttgggttgcagttgcgagctcttcggcagttgaatcaccagccttgaacttgcgagcacgccttgggaagacaacaagtttggccttgtaggtcttaagcctctgaacattggcttgaagaccttcaagtgatttgttcttacggcggtgatcaacagcgataccaatggtcggtgcaagtttctttgaaataccagcagccttaagctcttcaagggtgaaaccctttccagctctcaacttcatgttatacttcaaagtctggccatggacaatagggcgaaggggtccagcagttggccttggaaagatcctcacagccttcttatgccttgaaattcttcttctagcctttcgtgctggctgactgaaccaagttttcacgtagttctgccagtgtttcttgatagtgccacattatggcactgacattgttatgcttaaccatgacttacctgcaatatcagtgcttaaaagggaaaaatatcaaataattataacaatcaaaaatgaaaacaaaaattgaaagaaatgagattaaagaagaagagcaactgcggtgagagaagaaaggcgcaaagagaaacgaac

SEQ ID NO: 11089 - DNA, 2259 bp, Gossypium hirsutum
  Clone ID: GOSHI-09MAY01-C44_84
aaaaaccaaagggaatatttccatttcaaaatatgattacgaactttaataacataaacaacaactaaatataacaaaaacaatgatcaaacgatcacaatatacatccatccatccatccttccatacatacatgcatacatatatatatatatagtggttttatatattacccatattatacattatagcatactgaagttccatggataatatggcacaaattatactaatcaatcattaaatttcacacattttgcttcaattttcatggcacttaaccatgtatggcaactccaggaatctccatcatcaacggtattgactcaacaatcttggacggcttgttatcgaaaggtgtctccgcgtcgtaagctgagagatgcactccaagtgctgctctgcccgacgggtcaaggttgttcttccaagtggcatcccattcgacagctttggccgtgctgcatgctacacttgctcctcccgggacggtcaatcgtgctgagttctgagggaagaacctttcgaagatcatcctataatagtatgcttccttttcgtggtcggagtgttgtgagggaagatgtttgaagcattaagcatcatcttatcggtcacatgtgcaacagcatgagctttgagaccattcttatcaactatacccacaccaatcactaaactgttctttctgtctgtaaaggatatgctttggcagatagggatgttcttcatcatcgaaggccctcctaagaatccacttctcgatgcgtccttcatccctttttatcatctttgattcagggtctatagacatggcaacattgatgaattgcttgtctaagaatgggactcgagcctccaatccccatgcagatgttgctttgttagctctcaaacaatcatactggtgaagggccttgatctttcggcaggtttcgtggtggaattcatccttatttggtgccttgtggaagtacaaatacccaccaaaaatctcatcagagccttcaccagatataaccatcttcacccctaaagacttgatcttccgcgacatcaagaacattggagtgcttgccctgattgtggtaacatcataggtttctatgtggtagatgacatcttcgatggcatcaattccatcctcaacagtgaagtgaaactcatgatggacagtgcccaaataatctgcagcctcccccccccctttcaaatcgggtgaaccctctaggccgatacagaaagaatggagctgagctccccactgtttggcagccttggtagcagccaagtaccgagccgttatagaagtaatcaatgaagaatcaaggcctccggatagcaaaactccaaaagggaaatcagtcattagccttttgatcacagcattctcaagtgcatgtctgagaacaaacggatcatatggaaccgatggaatagagtcagagaaccagggtggattgtaccacctcctgagtcctcttgatttgctagtgtacatgtgtccaggcggaaagctctcaaactgttcacaagcatcattcaatcctttcaactctgatgatacccaaatcgaaccatcaaggccccagccgatatagagggaggtgatcccaatagcatcacgagcaacaatcaagctattgtcacgggcatctagcaacacaaatgagaagattccatccaacatgtccacaaagtcttccccatactcctcatactgtaatatagtacaagtttaagaaacaatttttatatttgaaaaaattgcaccccaaatcagttgtatccctcaaaagtttcgcaatggggagttttaccagatgggcaataacatcacaatcactgccagacctgaatttgtggtttaccaacttcttcctcagttgttcgtggttgtaaatctccccattcacagtgacagcaacactcttgtcttcattaaagagaggttggtcacctgaattaggatcaacgatggcaaggcgttgatgggccaaatagcagtctccgtgttggtagagtccactccaatcaggaccacggtgcttcaatctgcgggaaagctccagcactcgagcccttttagtctgagaatcatcagagcaacccaaaactgctaaaatcccacacattttctttttaacaagaactaaggaaaatgaaagggcagtatttgaagaaaacaaagttcagaaagacccagccaagaagatgaaaatgaagatatctgaagggggagtgtaaaagggggaaggc

SEQ ID NO: 11090 - DNA, 1124 bp, Gossypium hirsutum
  Clone ID: GOSHI-09MAY01-C44_85
tatttttaaatattttaaaaaataaacttttttttaaaacaaatgcactatgatttattattattacttgtaaaagacaacatgcaaactgcctcttctaataaaaacatacaagcagaaacactaaatttaagcgacctgcttgggagttgggacccaggaaccacccattacagagaacagattgaccatgaaaaatggtccccccccccccaattcctgcttgaaccttctctaaactctctccctgccatatgccaattgcatgttagtttagccaataggcaagctatcattggtgggtcatttccatgccccagtcccaagcctcatccaccttaatactatcacgtccttattcaactagaatagaaactaattgatttcaacatgcaaacttagctaacagtaagcgcactacacaagcttccattgactccccatcttacaagcttattttactcggtagtagtcttctcagcttgagcttcagctggttcctcttcttcctttgcagcttcctctttgggtgcttccactggggcggcttcggcttcggcttctgcttttacttcttcttctgctgctgcagctactgctgcttctgtagactctgtgctttctttggtttcttcaacggttggctcagtagtctccttggactcctccgcaactggctctgctactgtttcctcaggagtctcttcttcttttttctcaacttctggctcctcagtcacagccttgggctcttcaaccacctcctttgattcagtttcaactgtggcttcagtttctggagcctggggttcttcggatgctgcttcaggcactgcttcctttggttcttcagcaacagcgctctgttgcaggagcaacagccactacctcttctgttgcaatttcttcaaccttgaccacttcttcaggtttctcctcatggattgcagtttgagctgttacaacctctgcagtagccatggaattcagcgcaagtttagtcagaaattaaataggaagaagttttaaagaaagaggaagatgattacgccaccccccatgtgtccgcccacgtgtcagcccacgcgtccgcccacgcgtcagcccacgcgtccgcggacgcg

SEQ ID NO: 11091 - DNA, 1034 bp, Gossypium hirsutum
  Clone ID: GOSHI-09MAY01-C44_86
tggggaaaaccagggtttttccaggtcaaacgttgttaaaagacggccaaggaattagattttggggcccctaaaaaagagctaaaagtatgcctgcccggggaaggaaaattgggtcctttaaaacggccgcccctattttattgttatttatgtatttgttgtttattattttttttttattttatttttattttttttttttttttttttttttttttttttttttttttatatactaggtaaattttttcctagtttatatatttattttatttcatcatatatcaaagatgatcaaagatcaattaccaccgccatttttattaagacaaccggaagacggtttaagttttaagagtaaaaaggaaaataccaaaagcacaccattctttaaattcaagttatgagaattcaaagcaaccaacatatatcttagttgcaggcatcagggttagccaagaggtaagcttcaacagccttgtaaactccttcactccctttgatttgagccttgatctcatcttcagtgatcacatagtcgccaacagtgtaaaatttcatcgagctcttgcaaaggcttcctccacctgcagctgcctcaaacttgttgtcatagctgattttctcaagcttgtcccccaaaggtccaccttcgatcaaactataactgtatgacaaattcttgtcgtcatgtcctccaatctggtgcttcatatattggaatggaaggccttcagcaaagttgatctttcgaatacttccagggccaggattagcttcaacctcaacgctcttgactgcctgaggagcagccttgggccaaaccttgtcagcttcaagagaaaaagctttgaaaagcctggcaggggcgactggagaggtagactcatagttataagtgacaacacccatcgcattctaatattacttgggcaccccctctttgagttgaaagaagagaagaaagggatgagtgaatgaatcggacgcgtgggcggacgcgtgggcggacgcgtgggcggacgcgtggg

SEQ ID NO: 11092 - DNA, 1646 bp, Gossypium hirsutum
  Clone ID: GOSHI-09MAY01-C44_87
ggggggggggggggggttttttttaaacaaacgcactatgatttattattattacttgtaaaagacaacatgcaaactgcctcttctaataaaaacatacaagcacaaacactaaatttaaacgacctgcttgggacccaggaaccacccattacagagaacagattgaacatgaaaaatgcccccccccccccaaaatgcctggcttgaaccttctctaaactctctctccctgccatatgccaattgcatgttagtttagccaataggcaagctatcattggtgggtcatttccatgccccagtcccaagcctcatccaccttaatactatcacatccttattcaactagaattgaaactaattgatttcaacatgcaaacttagctaacagtaagcccactacacaagcttccattgattccccatcttacaagcttatttactcggtagtagtattctcagcttgagcttcagctggtttctcttcttcctttgcagcttcctctttgggtgcttccactggggcggcttcggcttctgcttttacttttgctgctgctgctgctgctgctgctgctgcttctgtagactctgtgctttctttggtttcttcaactgttggctcagaagtctccttggactcctgggactcctcggcaactggctctgctaccgtttccttaggagtctcttcttcttttttctcaacttctggctcctcagtcacagccttggaactctttaaccaccctcctttgattcagtttcaactgtggcttcagtttctggagcctggggttctccggatgctgcttcaggcactgcttcctttggttcttcagcaacagcgttctgctgcaggagcaacagccggtacctcttcttgttgcaatttctccagaccttgaccacttcttcaggtttctgcctcatgaacaacagcaatttatgttttaagatgaaaaggaaaatatcaaaagcacaacattaaaatcaaactcttctttaaaagcaagcataagaattcaaagcaacctagatcctagttgcaggcttcgggattagccaagaggtaagcttcaaggggcttgtaaactgtctcactccctttaattcgagccttgatttcatcttccgttataacattatctccaacagtgtagaatttcattgagctcttgcaaatacttcctccacctgcagctgcctcaaacttgttctcatagctaatcttttcaagcttatcccccaaaggcccaccttcaattaaactgtaactgtatgaaaaattattttcatcatgtcttccaatctggtgcttcatatattggaatggaaagccttcaacaaagttgatttttacgatacttccggaactaggattagcttcaacctcaatactcttgactgcattaggagcagccgcgggccaaacctttggggcttcaacagtaaaagccttgaaaagcctagctgggggcgactggggaggtagtttcataatcacaactcgaaaacacgccatgacttttaattgttaatgcagtcttctgagttcaaagaggacaagcggatcgattccgtgaagcgagggcgcgcgcgtgggcggcccgggcgtccgggccgggccggcgggccggcca

SEQ ID NO: 11093 - DNA, 856 bp, Gossypium hirsutum
  Clone ID: GOSHI-09MAY01-C44_88
ccatgaaaactgtaaaatatatattgggtatagatttttttttttgccagttaataaatttatttatttcattatatatcaaagatgatcaaagttcgatcaccaccaccatcattcttactgagcaaccagaagacaatataggttttaagatgaaaaagaaaatatcaaaagcacaacattaaaatcaaacccctctttaaaagcaagcataagaattcaaattaagcaacttatatcctagttgcaggcttcgggattagccaagaggtaagcttcaacaggcttgtaaactccctcacttcctttaatgagagccttgatttcgtcttcagtgataacattatcgcctatagtgtagaattttcattgagctcttgcaaatactcccttcaactgcagctgcctcaaacctgttctcatagctaatttttttcaagcttatccccccaaaggcccactttcgattaaatcgtaactgtatgaaaaattactttcatcatgtcctccgatctggtgcttcatatattggaatggaaggccttcaacaaagttgatttttacgatacttccagagctaggattagcttcaacctcaaggctctttactgcattaggtgcagccgtgggccaaactttcgtagctttcatcagtaaaggccttgaaaagcctggcaggggcgactgggcaggtattctcatagtcataagcgccaacacccatgattctaatattagctgggactttgagttcaaataagagaagaagtggatgattgagttgagttgtgacactgatagagaactaagatgcccccatagactgaacttgaagcgtaagaactataaaaactct

SEQ ID NO: 11094 - DNA, 1211 bp, Gossypium hirsutum
  Clone ID: GOSHI-09MAY01-C44_89
gttcaatatttaagagattttatttactgatatgaaaattattcaggtagaaatacttgtgttcccatcggccatcattaaaatagaacaagcttcaatcaaataagcacagaacacaaacaaataaggaaactttaagttcttgcataacagaagatactatccaaaatttaggttctggacatatagcaatagcaccccataataaaaccatagataatctaaaccaaaagaattcaaaagtaaaatccctttaacataagggaatgcaaaataccctctagaagacaagctcgtgcggtttcatgccagacttgagagaaaaccttgcggcgaggtaggccttcaagtctgggactccctcaatggactttatcaaagaggcgtcgactgctttctggtcttctttcttgtcttcaggcagttttttcttatcctctttttcagcctcaaaaaactctccctcagtcttcttcttcctcttctctacttccttggcaaagtacttgtcatcaaacttgtctacgttaacccctgagatgtcaaccttggtggaagtagcaatgacataggattgggttaacacgccttaaaggaacaccgttgatcttgaatgggtccggtgaccaaaaggagcccagaagtaagttgcttcaagaaaacaactctcttccccataaaccttccagccacacaaaatcaacacagtccctggtgtaaggcctgctgagatcaaaaacccattttgggtataaacttttgtaactatttattaaatctgcaatgtcgttttgatgctttggttcaatattagctgaagcttctctaagttccttccatggatttgtagcgttagtaagctcatgtaaacttaaagctagcttctcttttaaaagaacccagtacaccttaaacagatactcccagctagttttatcatcaaaatccacttgaacatctctggggaccggggccgccgtcagtgccaaaggactcgaagtcgcgagaggcgagacgggagtggcggttagcatcgccctcatggaagccacgacccttggtcttcttatgagcagaaagagaggtggaagcggcgccagtgatggtgaacttgagcataggcaagggagcttgaggggaggcatcgccgccggcatttgaagtgagggaaagtgaaattttgaagtgaaggattttgttttcagaacttg

SEQ ID NO: 11095 - DNA, 1328 bp, Gossypium hirsutum
  Clone ID: GOSHI-09MAY01-C44_90
tccacgcgtccgcccacgcgtccgtcagtactcactcaacattcccatttccaatctccagctcccaaggtaaatatgccgatcagaaacatagcagttggccggcccgaagaggcgactcaccccgatgctctcaaggcagctttggctgagttcatctcaaccttgatcttcgttttcgctggatcgggctcaggaatggcttttaacaagttgaccgacaacggagcaacaaccccggccggtctcgtagccgccgctctagctcatggcttcggtcttttcgtcgctgtctccgttggcgccaacatctcaggtggccacgtcaaccccgccgtcaccttcggtgctttcgttggcgggaacatcactctcttgcgcggcattctttactggatcgcccaactcctaggctcaaccgtcgcttgcctgttgcttaagttcgctaccggcgacctggctgtaccagcttttggattgtcatcaggtgtgggcgtgtctaacgcattggttttcgaaatcgtgatgaccttctgattggtgtacacagtgtacgccacagcccgtgatcccaaaaagggaagcttgggaacaatcgcaccattggcaattggtttcatcgtgggggccaacattttggcaggaggtgccttcgatggagcctcaatgaacccagctgtttcattcggaccagccttggttagctggacatgggacaaccactggatctactgggtcggaccccttatcggtggtgggctcgctggtctcatctacgagttcatcttcatcagcaacacccacgagcagctcccaaccaccgattattaagcctaatcagggtttaattgatttgtctgtcactttgaaaccggattttctccgatcacatttgagtctcctatctctttccttgtattttgtgtttaatttgtggccgtcgatcttgtttacttttttgttttttttcattcccatcctctatcatgatcatcatgaatggcagatgtttacaattgcatgccctgaaaaaatggtatatgagtgactcactgtaattcttttttcttatattattgaaaaccagcgtcagggctgtaaatgtgacttctctctttaaaaaaaaaaaaaaaaaaaaaaaaaaaaaaaaaaaaaaaaaaaaaaaaaaaaaaaaaaaaaaaaaaaaaaaaaaaatataataaaaaaaaaaaaaaatataaaaaaataaataaataaaaataataagggggcggccgttttaaagattccaagtttacaaccccgggcatgcaaagatataccttttttttagggcccccaaatttaat

SEQ ID NO: 11096 - DNA, 2666 bp, Gossypium hirsutum
  Clone ID: GOSHI-09MAY01-C44_91
acgacacgtgcccttgggggcccagaggcccctactgcgggtcggcaatcgggcgacgggcgcgtgcgtcgcttctagcccggattctgacttagaggcgttcagtcataatccagcgcacggtagtttcgcgccactggcttatcaaccaagcgcgatgaccaattgtgcgaatcaacggttcctctcgtactaggttgaattactattgcgacgcggccatcagtagggtaaaagtaacctgtctcacgacggtctaatcccagctcacgttccctattggtgggtgaacaatccaacacttggtgaattctgcttcacaatgataggaagagccgacatcgaaggatcaaaaaagcaacgtcgctatgaacgcttggctgccacaagccagttatccctgtggtaacttttctgacacctctagcttcaaattccgaaggtctaaaggatcgataggccacgctttcacggttcgtattcgtactggaaatcagaatcaaacgagcttttacccttttgttccacacgagatttctgttctcgttgagctcatcttaggacacctgcgttatcttttaacagatgtgccgccccagccaaactccccacctgacaatgtcttccgcccggatcggccggccgaagccggccttgggtccaaaaagaggggccgtgccccgcctccgattcacggaataagtaaaataacgttaaaagtagtggtatttcaatttcgcccgagagctcccacttatcctacacctctctagtcatttcacaaagtcggactagagtcaagctcaacagggttttctttccccgctgattctgccaagcccgttcccttggctgtggtttcgctggatagtagacagggacagtgggaatctcgttaatccattcatgcgcgtcactaattagatgacgaggcatttggctaccttaagagagtcatagttactcccgccgtttacccgcgcttggttgaatttcttcactttgacattcagagcactgggcagaaatcacattgcgtgagcatccgcagggaccatcgcaatggtttgttttaattaaacagtcggattccccttgtccgtaccagttttgagtcgactgttcgtcgcccggggaaggcccccgagggagccgttcccagtccgtcccccggccggcacgcggcgacccgctctcgccgcgggagcagctcgagcagtgcgccggcagccgacgggttcgggactgggacccccgtgcccagccctcagagccaatccttttcccgtaggttacggatccattttgccgacttcccttgccttcattgttccattgaccagaggctggttcaccttggagacctgatgcggttatgagtacggaccgtgcgcggctggcactcggtcatggcgattttccaggaccgtcgtgggcgcgctgtacaccacgcgacgtccggtgctcttccggtccgatggaccctacgtccgactgagccgttttccagggtgggcaggccgttaaacagaaaagataactcttcccggaggcccccgcagacgtctccggactccctaacgttgccgtcagccgccgcgtcccggttcagcaattttaatcccatatgcctttcgaagctcgcgctgtgacgcgctgtcggacgcccccccctccgtctcttaggaacagactaacccatgtgcaagaaccgttcacatggaaacctttcccctattcggccttcaaagttctcatttgaatatttgctactaccaccaagatttgcaccgacggccgctccgcccggggctcgcgccccgggttttgcggcgaccgccgcgccctcctactcatcggggcctggcccttgccccgacggccgggtataggtcgcgcgcttaagccgggaacatcactctcttgcgcggcattctttactggatcgcccaactcctaggctcaaccgtcgcttgcctgttgcttaagttcgctaccggcgacctgggctgtacccgcttttgggttgtcatcaggtgtgggcgtgtctaacgcattggttttcgaaatcgtgatgaccttcggattggtgtacacagtgtacgccacagccgttgatcccaaaaaggggaagcttgggaacaatcgcaccattggcaattggtttcatcgtgggggccaacattttggcaggaggtgccttcgatggagcctcaatgaacccagctgtttcatttggaccagccttggttagctggacatgggataaccactggatctactgggtcggaccccttatcggtggtgggctcgctggtctcatctacgagttcatcttcatcagcaacacccacgagcagctcccaaccaccgattattaagcctaatcagggtttaattgatttgtctgtcactttgaaaccggattttctccgatctcatttgagtttcctatctctttccttgttttttgtgtttaatttgtggcccgtcgatcttgtttacttttttttcattccccatcctctatcatgatcatcatgcatggcagatgttgtttacaattgcatgccctgaaaaaatagtatatgagtgactcactgtaagtcttttttcttatattattcaaaaccagcatcagggctgtaaatgtgacttttctcttt

SEQ ID NO: 11097 - DNA, 481 bp, Gossypium hirsutum
  Clone ID: GOSHI-09MAY01-C4_31
ttatgtatatttttttatctacctcaaagacggatcgatgttagctttgatgcatgccagccagatcatttttattttggagccgaagttcttctctattatttttatatttattaactctttctttttcttcttttttagtcgctcagtttttttttttaaataatatttctaaaactagcgccgcccaaaattttccacctccttatcaaaattccaagacaaaacacataagattgtgcctaaacatacattggaacatcaaatccagaaccctcttaatcatgaaatgcaaatcaataagatataatcagcagaataagggcttatacttggagatttttgtcccacaatgcgggcttacactcaattaatcagagaattttgtttttgattataataaacagccacccaaaaatactcggcgagcacacagggtaccaaacgttatttgtaatttgtctgattccacagagtaaat

SEQ ID NO: 11098 - DNA, 665 bp, Gossypium hirsutum
  Clone ID: GOSHI-09MAY01-C4_27
tttttttttttttttttttttttaaaaagtgcaaagcacactcagttgtatatgctgagaatattgttttaaagtgaagcaaacaaaaaaccatgaacactcagcgagaactaaggccccccaagcttatttgagtctgatttcacaacctaaattccttgagaagaaaaggacaacccccacaaacagcactaaaagtatttcgtggaaagagaggaagtgttcgaaccatgatcacctgtcgtacagtatttctacatttgatgtgtgatttgtgaagaacatcaaacaaaacaagcactggctttaatatgatgataagtattatggtaattaattaattggcagaaacaacaatgaagctaaaatggtatttattgagcgatactaggttctcggcgcggccgaagtactactatgacgtcaagagtgagaacagctattatccaaaccagctcgacaactcaagaggagttgcttacaggaacgagttcgatgagaatcgttacaacaacatgggaaggtaccaccagaaccaagaggagttcgaggaaagcgaggaagagttcgaaccctgatcacctgtcgtacagtatctctacatttgatgtgagactagtgacgaacatcaagcataacaggcactggctggaatatgatgataa

SEQ ID NO: 11099 - DNA, 651 bp, Gossypium hirsutum
  Clone ID: GOSHI-09MAY01-C4_20
ggttgaatattgccatcatcatttcaaaaacgaagaacttgcattcaagtactaatggaagaacataaactacaagagagtttcaagataaacggaattaaagatgtctgttattagaacaatagtttccatccagaaatctgataataaaagtagaattcctccgtcgatatatgtaagctaactatggatcaagtacacatctacgagaaattagtcactaaggcgtgggtgcggtcgcacccgggtccggcgcggcggcacctggcgtgtagacgagcagcgcacttgcggcagatcatcttgtcctggttgtatttcctagccaatgccatcaaagatggctcgataatgccaccacgaagcctcagaaccagatgcaatgttgattctttctggatattgtagtcggcaagtgtacgaccatcctcaagctgctttccggcgaagatcaacctctgctgggccggcgggataccttccttgtcctggatcttagccttaacattgtcgatagtgtcgctggattcaacctctagggttatggtcttcccagttagggttttcacgaagatctgcattttccttacacctcttatgccgcttatgtttctctatttgatccaaaaattctttttccggacgcgtggg

SEQ ID NO: 11100 - DNA, 783 bp, Gossypium hirsutum
  Clone ID: GOSHI-09MAY01-C4_19
atctcttgagagagccatgcactgtttgttgatgtagcagtagatttgcaggaagaggctccattggaccacacacaggcatcggcattgaagttcctgtaagaggcagtgaaaggagctagggtccagtcagtcttaaccagaccaccccttgtagcccagtcatcagaattccacaagctagagtaaattctcatcggctgatttttaggaaatgggacaccaattgactccatgttcttgaactctctaatgggtgtaccgtccacagagaatatgatactttgggggctccagaggatggaataagtgtggaaatctgcagttgggtcaaaccagagatagaattgttgctctctgttacccttgccttgactgaacacatttgtgtgaagaatgtaaggatcaccacttagatttccaaggaactcgaaatcaatttcatcccatgttgatcctttcgaagaaagatagtaggcagtgacagtgccagcagagtttccagggacaagcttgagctgcatatcaatcttgccgaagagatactcattcttagactggaaaccagaaccagaagatttatcgagggagagagtgaggacctctccattgttgccaatcttaccacgcccgtctccccatgtgatgtcaaaatcattgttgaagttgctcgctgctgctgccataagacagccaaccataagaggcagaagcaaggtaaacttgaaactcgaaaaactgatcattttgtattttgataattttgcagagcagagataaaac

SEQ ID NO: 11101 - DNA, 653 bp, Gossypium hirsutum
  Clone ID: GOSHI-09MAY01-C4_18
cttttgttttttgtttaaggcggggtttttttttcttttataacctttttaattaaaaaagtccaaagcccactcagttggataatacaagaaaaatatggttttaaactgaagcaaccaaaaaaccaatgaaccactcagccagaacttaggcccccccaagcttattttgagtctgatttcacaacctaaattccatgagaagaaacggtctgatttcacaacctaaattccatgagaagaaacggaaaacccccaaaatcatcaatacagaaaatttctctgatacacagaccacaagactaaattcttagtatttgtagtccttaacatgaaggctctctgcagcaccctcactaatctttgcgtcacccttgtatgtacccaaggtggcctccgagttagccttgcacctaacaaggaaagcatcttgtgctttcttcacgttttcctcctttccagcccagcccctccagagtgctctgctgaagggcacgtccaaatgagaatgagagtgaccatggtttcttggtctggagcttgttcatggcattaaggttaagggtagcctcctcctcactttgcccaccagacaagaacacaatagcagggactgcacgcacgcgtgggcggacgcgtgggcggacgcgggg

SEQ ID NO: 11102 - DNA, 651 bp, Gossypium hirsutum
  Clone ID: GOSHI-09MAY01-C4_17
gacaccaagtgattccatgtttttgaactctctaatgggtgtaccgtcaacagagaagctggaaaataacaacatcaaaaacttaatcaatcaatcaatttgaaaacagaaatctaatgggtggtttgttttatgaatactcacattatacgttgggggttccaaaggattgaataagtatggaaatctgcagtcgggtcaaaccagagatagaactgttgttctctgttgcccttgccttgactgaacgcgtttgtgtgtagaatgtacgggtcgccacttagattcccgaggaactcgaaatcaatttcatcccacgttgttccttttgatgataaatagtatgcagtgacagtgccggcagagtttccagggacaagcttgagctgcatatcaatcttgccaaaaagatactcattcttggattggaaaccagaaccagattgtttatcgagggagagagtgagaacctcgccattgttaacaatcttaccacgcccatctccccatgtgatgtcaaaatcgttgtggaagttgctacctgatgctgccataataagacaggcaaccataagaggcataagcaagggaacctcggaagaacttgaataactcattttgtcttatgttttttcgcaccccacgcgtccg

SEQ ID NO: 11103 - DNA, 739 bp, Gossypium hirsutum
  Clone ID: GOSHI-09MAY01-C4_16
tcatcagcattccacaaactagagtaaattctcatcggctggttcttaggaaacgggacaccaaatgattccatgtttttgaactctctaatgggtgtaccgtcaacagagaagctggagcataacaatatcaaaaacttagtcaatcaatcaatttgaaaacagaaaaaaaaaattctaatggatggtttgttttatgaatactcacattatacgttggggattccaaaggattgaataagtatggaaatctgcagttgggtcaaaccagaggtagaattgttgttctctgttaccctttccttgactgaacacatttgtgtgaagaatgtaagggtcaccacttaaattcccaaggaactcgaaatcaatttcatcccatgttgatcctttcgaagatagatagtaagcagtgactgtgccagcggagtttccagggacaagcttgagctgcatatcaatcttgccgaataggtactcgttcttggattggaaaccagaaccagaagctttatcgagggagagagtgagaacctctccattgttgacgattttaccacggccatctccccatgttatgtcaaaatcattgtggaaattgctggctgatgatgccatgagacaagcaaccataagaggaacaagcaaggtaaatttgaaacctgaagaactcatttttgactttcgattttttttgcagagcagaggatttatgcggacgcgtgggcggacgcgtggg

SEQ ID NO: 11104 - DNA, 630 bp, Gossypium hirsutum
  Clone ID: GOSHI-09MAY01-C4_15
attataaaagaaaaaccattgaaagcataatacaaacattttgtgcatattattgcaacccaaaagaagaaactagcccaaacatagtcaaaaagtataatttttaacctcaattataactcaaaactcctcatccacggccttttccgcctatgacataaaccaccatcgtcagtcatggtttacttgatcttcttcttgggcctcaactgattgctatgaccacatttcttcttgcgacagttcaccgctctcggatgcatccgagcataacacttgcggcaaatcattttgtcttggttgtatttacgagccaaagccattaaagaaggctcaataattccgcctctcaaccttaaaacaagatgaagcgttgattctttttgaatgttgtaatcagccaatctacggccatcttcaagttgtttaccagcaaaaattaaacgctgctggtccgggggaattccttctctgtcttggatcttggctttgacattatcgatggtgtcgctgctctcgacctcgagagttatggtcttgccggttagggttttcacgaatatctgcatctttttttctttatatttaagctgtgctttagtggcggattgttagggttttatactgaaa

SEQ ID NO: 11105 - DNA, 650 bp, Gossypium hirsutum
  Clone ID: GOSHI-09MAY01-C4_12
gattggaacaaggcggcattcctgacagatgacagcatacatagctagccggttggaattttcttgcattgcaagcggggtcggctcattagcactgatcttaaggacagcacgccatttagcaaagcgagcaccagcttcatagtacttctggcatcgcttgtgcaaggccattcagactttggtgtgaaagtttttttggttggtttcgttaagtttttcggtatccttgctgccttttgtaaaagagctaaagacagaacacaccattgatgccaatgccaattatcacaccgatttctctaaaatcattttaaaaaggttcagaaattcccaagttccacaaggtcctaattggctaaaactaaacaaaccctctatttctctaatgaaggaaattaggccttacaagctcattggattacctaagacaaagggaggttgaatgctaatggctacctcgcgtttacatttgttcttaagtcttagatgccgtgaaatgcgccttcttcgtctccgtgagatcagtgttgacgttgaagctcataccatctccgctgccgaccatatcggcgaacatcttttgcagatcctccaaactaaccccctcgtctttcacaatgttcatcatcgagatccggacgcgtggg

SEQ ID NO: 11106 - DNA, 832 bp, Gossypium hirsutum
  Clone ID: GOSHI-09MAY01-C4_11
aaccataaatagagaactccaatatcatatcataaaattcaaaattaatgacataaaacaaggagaggttcaagcttaaagaaatcaaacccaacttagaaggttattaagatctgttattagcactacaccattcaaattccaaaccggacgcctgggattgaatgactttaaaactccatcaagatatccaatctacttgatcttgagccttgagaccgagggctcacttgttccgccaaaagtgagttctgtctttcaaatacatccttctctaagcttgtccccatgggtagatcaccaaataccttccctgagggaatacactctttccacccccatgtataaacttctgcagtttctgtaactgcagcacagtgagcccaaccagctgctgcttttactacagaaacttcagttggaagtggaattggctctggaatttccccatgcttcccggatgtgacgtagctttgacccaaatcatctgttgaaccccatgtgatgagcttccctgaatcagaaatggccatggcgaatccacaaccaccaccacagacgtcggtccaagaacaacctgcggaagccggaatccgtacattcaccggcgacaaaagcggcgtccgttgaggtaacgcgccaggcaaatatccccacatgaaagccacgcgctccttgttagctgcttcctccattttcacttccttactttcttttccttctccattcatctccaacagagaaaggaaaagaaatccagaaaaagaaaaaaaattcataaataactattttttcggtcgcgtggtattattttcgggagatttcaatttcg

SEQ ID NO: 11107 - DNA, 748 bp, Gossypium hirsutum
  Clone ID: GOSHI-09MAY01-C4_10
ttaaagtttccccctcctgtacatgtatattcttcgcacgaaatagctgttaaagcagatattcggcgtcatatttatgtttgtccagttttgctccaaaaacgaagaacttgcattcaagtacaaatggaagaacataaactacaagagagtttcaagctaaacgaaattaaagatgtctgttattagaacaatagtttccaaccagaaatctgataataaaagtataatcctccgtcgagatatgtaatctacttgatcttcttctttggcctcaactgattgctgtgtccacacttctttttcctgcagttcacggcacgggggtgcagacgagcataacacttgcggcagatcatcttgtcctggttgtatttcctagccaatgccatcaaagaaggctcgataatgccaccacgaagtctcagaaccagatgcaaggttgattctttctgaatattgtagtcagcaagagtacggccatcttcgagctgctttccagcgaagatcaatctctgctggtccggtggaataccttccttgtcctggatcttggccttaacattgtcgatagtgtcgctggattcgacctctagggttatggtcttccctgttagggttttcacgaagatctgcattttttttcaaaccctgattctgattctgcttctgtatctgaatctaacaaagtatactgacaacctgattaggcggacgcgtgggcggacgcgtgggcggacgcgtggaa

SEQ ID NO: 11108 - DNA, 1316 bp, Gossypium hirsutum
  Clone ID: GOSHI-09MAY01-C4_9
acgtgatggatgtatggaaataataattataaggatataaaacaattttttttttctatgtgaaaagctaggaacgaaggagactgtacaccaccattctctttaaaggacattaaaatccttctaatttttcgtatctttttcataataacttatcacatacagagtgatgggaaatttcaaaagataaaagaatcatgacctcgttttgaataaagaaaaaataataaaagaatataattgaatattaatctctaaaacaatttgatctaataggctctttcaagtcttttaagacatattgcactctggaggtagaccttgaggaaatctcttagcatcattgcagtaattgtatatcatgtagttcttttgcacccactgcaacctttgttgcttagctgaatccatttcttgagagaaccatgcactgtttgtcgatgcagaagatggtgaagcattcgatttgcacgaagaagctccattggaccacacacaagcatcggcattgaagttcctgtaagaggcagtgaaaggagcttgggtccagtcggtcttaaccaaaccaccccttgtggcccaatcatcagcattccacaagctagagtaaattctcatcggctggttcttaggaaatgggacaccaagtgattccatgtttttgaactctctaatgggtgtaccgtcaacagagaagattatacgttggggattccaaaggattgaataagtatggaaatctgcagttgggtcaaaccagagataaaactgttgttctctgttacccttgccttgactgaacacgtttgtgtgaagaatgtaagggtcgccacttaaattcccgaggaactcgaaatcaatttcatcccatgttgatccttttgaagatagcagcaaatccaaaatatagataaatatatataccaccatactttaaagccatcaccgtctattatgacttgataaaaaaaaaaaagtggaatattaacttacataataggcagtgactgtgccagcagagtttccagggacaagcttgagttgcatatcaatcttgccgaaaagatactcattcttggattggaaaccagaaccagaagctttatcgagggagagagtgagaacctctctattgttgacgattttaccacggccatctccccatgtgatgtcaaaatcattgtggaagatacttgctgatgctgccatgagacaggcaaccataagaggcataagaaaggtaaatttcaaacctgaagaactcatttttgacttttgacttaaatttttttgggtggcagagccggacgcgtggg

SEQ ID NO: 11109 - DNA, 792 bp, Gossypium hirsutum
  Clone ID: GOSHI-09MAY01-C4_8
tctcttgaaagaaccatgcactgtttgttgatgtagcagtagatttgcaggaagaggctccattggaacacacacaggcatgggcattgaagttcttgtaggagacactaaaggaagtcagggccggggggctccatgttaggcttccaaagagtaccttcaagcaagaattccacaagctagagtacattctcatcggctgatttttagcaaatggacccccaagcacacttttgaatgtcatgtgatccgtcagcaagaatttcaggctcaacaatggggacaaggccacattgctggcagatggcagcatacatagctagcccgttggcattttcttggattgccaagctcggttggttcattagcactaatcttaaggacagcacgccatttagcaaagcgggcaccagcgccatagtacttctggcatcgctgtgcaaggccatctagaccctgggtgaaagtttcgccatgggttccattaagctcaaccgtacccttgtcaaccttgatgccagggaggacaccaccttccttcaaaacatcaacgaagggcttgcccgaagcggttttttgataaagggtttcctcaaagagaataacaccactgaggtgctgaagagctccaggagttgtgaataggagctcacggagagcacgcctgttgtcttcaacattctctacattaatacttgaaagacgcttgccgatggtgccagtggattcatccgcacgcgtgggcgtaagcgtggccgcacgcgtgggcggacgcgtgggcgtacgagaaaa

SEQ ID NO: 11110 - DNA, 657 bp, Gossypium hirsutum
  Clone ID: GOSHI-09MAY01-C4_7
ttgccttttttttttttttttttaaaaagtgcaaagcacactcagttgtatatgctgagaatattgttttaaactgaagcaaacaaaaaaccatgaacactcagcgagaactaaggccccccaagcttatttgagtctgatttcacaacctaaattccatgagaagaaacggacaacccccaaaaacagcactaaacgtctatcatcaatacagaaaatttctctgatacacagaccacaagactaaattcttagtatttgtagtccttaacatgaaggctctctgcagcaccctcactaatctttgcatcacccttgtatgtacccaaggtggcctccgagttagccttgcacctaacaaggaaagcatcttgtgctttcttcacgttttcctcctttccagcccaggccttgagagtgctctgctgaagggcacgtccaaatgagaaagagagtgaccatggtttcttggtctggagcttgttcatggcattaaggttaagggtagcctcctcctcactttgcccaccagacaagaacacaatagcgggaactgcagcagggacggtacgctgcaaggcacggacagtgtactcagcaataacctctggggcaaccttcggggagccggcgccgggggtcaccatgttaggcttc

SEQ ID NO: 11111 - DNA, 827 bp, Gossypium hirsutum
  Clone ID: GOSHI-09MAY01-C4_6
aaaaagttattacttcgcatgcccgcgtaaaaaaacttggatcctctaaaaaggccgcccccaaatttaataaatattttataattaaaaattttttattttttattattttttttatttttattttttttttttttataatcggccgcgtcgtctttttttaatttatttttctaaaactagcgttacttaaaatttccacctccttatcaaaattccaagacaaaacacataagattgtccaaaaatacattggaacatcaaatccagaacccacaaacaaaatctcaacaaaatagtataatagcaaaagaactcaatggaaatattttcctagtctgacattcaatttcttttaaagcagacaggataacaccagtcagtgtctacttgatcttcttcttcggcctcaactgattgctgtgaccacacttcttcttgcggcagttcacggctcttggatgcagacgagcataacacttgcggcaaatcatcttgtcttggttgtatttgcgagccaaagccatcaaagaaggctcaataattccacctctcaacctcagaacaagatgaagtgttgattctttctggatgttgtagtcagccaaggtacggccatcttcgagctgttttccggcgaagatgagacgttgttggtccggtgggattccttctttgtcttggatcttggctttgacgttgtcaatggtatcgctgctctcgacctcgagagttatggtcttgccggttagggttttcacgaatatctgcatcttttcctccctctctctctccccccgcgtcgcggccgccaccgccgtggagcc

SEQ ID NO: 11112 - DNA, 658 bp, Gossypium hirsutum
  Clone ID: GOSHI-09MAY01-C4_5
accataattagagaactccgatatcatatcataaatttcaaaattaatgacataaacaaggagaggttcaagcttaaagaaatcaaagccaccttagagggtaattaagatctgttattagcactacaccattcaaattccaaacagaacatctgaaattgaatgactttaaacctccatcaagatatccaatctacttgatcttcttctttggcctcagctgattgctatgcccacacttctttttcctgcagttcacggcacgggggtgtagacgagcatagcacttgcggcagatcatcttgtcctggttgtatttcctagccaatgccatcaaagatggctcgataatgccaccacgaagcctcagaaccagatgcaatgttgattctttctggatattgtagtcggcaagtgtacgaccatcctcaagctgctttccggcgaagatcaacctctgctggtccggcgggataccttccttgtcctggatcttagccttaacattgtcgatagtgtcgctggattcaacctctagggttatggtcttcccagttagggttttcacgaagatctgcattttccttaaaactcttatgccgccgctgccgtcgggcgccgcgggaattggggaggggccccaggggtgcagcgctac

SEQ ID NO: 11113 - DNA, 756 bp, Gossypium hirsutum
  Clone ID: GOSHI-09MAY01-C4_4
gaaggtccacccaggccccccacgcgagcaaagcaaagcattagcaaccatagccatggcttcctcaccaaaactcttctctatgtctatcctcttcctttttgccctcttctccatgcaaatccatgctagagagtacttcagcaaattcccaagagttaacaccaatgagaaagagacaacaaccagagagcaagagcacgagaccttcgttccccagaccacccaaaagccagaagagcaagagccaaggttcatccctgaaacccaaaatggttatggcctttacggccacgagtcaggctcaggctcaggctcaggctcaagccggcccagtttcaccaccaaagaaacctatgaaccctatgtcacccctgttagattccaccctgatgaaccctataacagcatccccgaatcctccaacaataaagacacttactactacaacaagaatgcctacaagtccactaagcagcaaaacttgggcgaggccattttcaccgagaaaggatggagcaccaaggaaaaccagaacaacaactactacaacggcaacattaatggcgagaagcaaggcatgagcgatactaggtacttggagaatggaaagtactactatgacgtcaagagtgagaacagctattatccaaaccagctcgacaactcaagaggagttgcttccaggaacgagttcgatgagaatcgttaccacaacatgggaagggtgcaccaaaacaaaagagttcgaggaag

SEQ ID NO: 11114 - DNA, 1538 bp, Gossypium hirsutum
  Clone ID: GOSHI-09MAY01-C4_3
gggccccccctcgtgccggttttttttcattttttttttccctcaaatagtaggtttacggcgcctgatgctcgccacgcagacatggaaaaaagtgcaaagcacactcagttgtatatgcagaaaatattgttttaaactgaagcaaacaaaaaaccatgaacactcagcgagaactaaggccccccaagcttatttgagtctgatttcacaacctaaattccatgagaagaaacggtctgatttcacaacctaaattccatgagaagaaacggaaaacccccaaaatcatcaatacagaaaatttctctgatacacagaccacaagactaaattcttagtatttgtagtccttaacatgaaggctctctgcagcaccctcactaatctttgcgtcacccttgtatgtacccaaggtggcctccgagttagccttgcacctaacaaggaaagcatcttgtgctttcttcacgttttcctcctttccagcccaggccttgagagtgctctgctgaagggcacgtccaaatgagaatgagagtgaccatggtttcttggtctggagcttgttcatggcattaaggttaagggtagcctcctcctcactttgcccaccagacaagaacacaatagcagggactgcagcagggacggtacgctgcaaggcacggacagtgtactcagcaataacctctggggcaaccttcggggagtcggaaccaggggtcaccatgttaggcttcaaaagagtaccttctagcatgacatggtgatcattcaaagccttgtagcaagcagcaagaacacgctctgtcaccgcagcacactttttaatgtcatgtgatccgtcaacaagaatttcaggctcaacaatggggacaaggccacattgctggcagatggcagcatacatagctagcccgttggcattttcttggattgcaagctcggttggctcattagcactaatcttaaggacagcacgccatttagcaaagcgggcaccagcttcatagtacttctggcatcgctgtgcaaggccatccagaccctgggtgaaagtctcgccattggttccgttaagctcaacggtacccttgtcgaccttgatgccagggaggacaccaccttccttcaaaacatcaacgaagggcttgcccgaagcggttttttgataaagggtttcctcgaagagaataacaccactgaggtactgaagagctcctggagcagtgaagaggagctcacggagagcacgcctgttttcttcaatatttactacattaatgcttgaaagacgcttgccgatggtgccggtggattcatcagcagcaaggataccctttccaggggtgccaatgtaagcagcgtttttagccaactcatcggcgtatttgctaatgaagcaagacattatggttgaatagaaaaaggaggattgaattgaacagaaagatgttttttggtggcaaggaaaagagagcgaggggaaaaggaagaggggttagggtttttaaaagagaagggttaggtgagac

SEQ ID NO: 11115 - DNA, 1626 bp, Gossypium hirsutum
  Clone ID: GOSHI-09MAY01-C4_2
ccatttggagctataaggctttacgcttctttttactcttcttttcagtggaatcattttctttttatttatctttatgtttcttttgattttttttgttttttttttgtatttaggtgttttttttttgttttaaccaacagaataagggcttatacttggtcatttttgtcccacaatgcgggcttacactcaactaagcagagaattttgttttaaactgaaataaccagaaaaccaaaaatactcaacgagcacaaaggctcccaaaccttatttgtaatttgtctgattccacagactaaagtcgatgagcaacggcagaaactcaaaagaagaagaaaaaaacactagaaccctaatatcaataccggaatttactctgctaaacatcacatatttgaccacaagcctaatttcttaatatttgtagtccttgacatgaaggctctctgcggcaccctcacaaagctctgcatcacccttgtatgtacccaaagtggcttctgagttagccttgcacctaacgagcaaagcatcttgtgccttcttcacattctcctcttttcctgcccaggtcttgagagtgctctgctgaagggcgcgtccgaatgagaatgagagtgaccatggtttcttggtctggagcttgttcatggcattaaggtttagggtagcctcctcctcactttgcccaccagacaagaatacaatagctgggactgcagcagggacagttcgctgcaaggcacggacagtatactcagcaataacatctggggcaaccttcggggagtccgaaccaggggtcaccatgttaggcttcaaaagagtaccctcaagcatgacatggtggtcatttagagccttgtagcaggtagcaagaacacgctctgtcactgcagcacacttttgaatgtcatgtgatccgtcaacaagaatttcaggctcaacaatggggacaaggccacattgctggcagatggcagcatacatagctagcccgttggcattttcttggattgcaagctcggttggctcattagcactaatcttaaggacagcacgccatttagcaaagcgggcaccagcttcatagtacttctggcatcgctgtgcaaggccatctagaccctgggtgaaagtttcgccattggttccgttaagctcaacggtacccttgtcgaccttgatgccagggaggacaccaccttccttcaaaacatcaacgaagggcttgcccgaagcggttttttgataaagggtttcctcaaagagaataacaccactgaggtactgaagagctcctggagttgtgaataggagctcacggagagcacgcctgttatcttcaacattctctacattaatgcttgaaagacgcttgccgatggtgccagtggattcatcagcagcaaggataccctttccaggggttccaatgtaagcagcgtttttagccaactcatcggcatatttgctaatgaagcaagacatgattgaacgggaaaaagaacgagagaaaggaaagagggttttttttttttgggctagggggaaagaagaaagaagaggggtggggaagggcgggggaaggggggcaggggttagggagacatttaaaag

SEQ ID NO: 11116 - DNA, 1118 bp, Gossypium hirsutum
  Clone ID: GOSHI-09MAY01-C4_1
cccacgcgtccgcccacgcgtccgcccacgcgtccgcccacgcgtaaagcattagcaaccatagccatggcttcctcaccaaaactcttctctatgtctatcctcttcctttttgccctcttctccatgcaaatccatgctagagagtacttcagcaaattcccaagagttaacatcaatgagaaagagacaacaaccagagagcaaaagcacgagaccttcgttccccagaccacccaaaagccagaagaacaagagccaaggttcattcctgaaacccaaaatggttatggcctttacggccacgagtcaggctcaagccggcccagtttcaccaccaaagaaacctatgaaccctatgtcacccctgttagattccaccctgatgagccctataacagcatccccgaatcctccaacaataaagacacttactactacaacaagaatgcctacgagtccactaagcagcaaaacttgggcgaggccattttcaccgagaaaggatggagcaccaaggaaaaccagaacaacaactactacaacggcaacaatggttacaacaatggcgaagcaaggcatgagcgatactaggtacttggagaatggaaagtactactatgacgtcaagagtgagaacaactattatccaaaccggttcgacaactcaagaggagttgcttcgaggaacgagttcaatgagaatcgttacaacaacatgggaaggtaccaccagaaccaagaggagttcgaggaaagcgaggaagagttcgaaccctgatcacctgtcgtacagtatttctacatttgatgtgtgatttgtgaagaacatcaaacaaaacaagcactggctttaatatgatgataagtattatggtaattaattaattggcaaaaacaacaatgaagctaaaattttatttattgagccttgcggttaatttcttgtgatgatctttttttttattttctaattatatatagtttcctttgctttgaaatgctaaaggtttgagagagttatgctctttttttcttcctctttcttttttaactttatcatacaaattttgaataaaaatgtgagtacattgtaactcgccgccgcaccgcggtgg

SEQ ID NO: 11117 - DNA, 421 bp, Gossypium hirsutum
  Clone ID: uC-gsronu33B007h03b1
aaatacaaacccaaaaaaaaaaacggggtgttctttaaatcgcggggggtcaaaacaatccatgcttgcttcattagcaaatatgccgatgagttggctaaaaacgctgcttacattggaacccctggaaagggtatccttgctgctgatgaatccactggcaccatcggcaagcgtctttcaagcattaatgtagagaacgttgaagataacaggcgtgctctccgtgagctcctattcacaactccaggagctcttcagtacctcagtggtgttattctctttgaggaaaccctttatcaaaaaaccgcttcgggcaagcccttcgttgatgttttgaaggaaggtggtgtcctccctggcatcaaggtcgacaagggtaccgttgagcttaaccgaaccaatggcgaaactttcaccc

SEQ ID NO: 11118 - DNA, 400 bp, Gossypium hirsutum
  Clone ID: LIB3583-058-P1-K1-H6
cccacgcgtccgcccacgcgtccgcccacgcgtccggtcttccctggcatcaaggtcgacaagggtaccggggagcttaacggaaccaatggcgaaactttcacccagggtctagatggccttgcacagcgatgccagaagtactatgaagctggtgcccgctttgctaaatggcgtgctgtccttaagattagtgctaatgagccaaccgagcttgcaatccaagaaaatgccaacgggctagctatgtatgctgccatctgccagcaatgtggccttgtccccatttgtgagcctgaaattcttgttgacggatcacatgacattaaaaagtgtgctgcggtgacagagcgtgttcttgctgcttgctacaaggctttgaatgatcaccatgtcatgc

SEQ ID NO: 11119 - DNA, 469 bp, Gossypium hirsutum
  Clone ID: LIB3197-035-Q1-M1-G7
tctctttgcaaagcattagcaaccatagccatggcttcctcaccaaaactctggtctatgtctatcctcttcctttttgccctcttctctcatgcaaatccatgctagagagtacttcatcatattcccaatagttaacaccaatgtaaatgatacatcttctttttatgcatttttcttattactcttttttcttagtcctctcttatttaattatctacattgttcacggtcaatggaagcatattctctttttttttatatttataattatatccttattttttttattattatttctaatctttgtctttttaatttatttattttcttcttcataattctttttgtttttttttcttctattactttatttaatttattttaattattttttttacttttcttttttctataccttcttttttactttattttctttttttatttcattttttctatttttctt

SEQ ID NO: 11120 - DNA, 373 bp, Gossypium hirsutum
  Clone ID: LIB3147-019-Q1-K1-G10
atcgagcgttctttgatggctttggctcgcaaatacaaccaagacaagatgatttgccgcaagtgttatgctcgtgttgatccaagagccgtgaactgccgcaagaagaagtgtggtcacagcaatcagttgaggccgaagaagaagatcaagtagatactgactggtgttatcctgtctgctttaaaagaaattgaatgtcagacgaggaaaatatttccatttggttcttttgctattattctattttgttaagattttgttttgggttccggatttgatgttccaatctatgtttggacaatcttatgtgttttgtcttggaaattttaagaacactgttttagaaatattatttaaaaatgttagtgtt

SEQ ID NO: 11121 - DNA, 472 bp, Gossypium hirsutum
  unsure (1)..(472): unsure at all n locations
  Clone ID: AI729788.1
cggccgcgtcgaccattagcaaccatagccatggcttcctcaccaaaactcttctctatgtctatcctcttcctttttgccctcttctccatgcaaatccatgctagagagtacttcagcaaattcccaagagttaacaccaatgagaaagagacaacaaccagagagcaagagcacgagannttcgttcntncttatttccttttgtcctattatctttatcctttgtcctcccctgattccctctntggtcttggccttctctgcccccacttcttgttcttgttccggcttctgctcctttcggctctgtcttctccccttttgtgtctcctgtttcctctgttttcccttttttgttcctctctgctttctctcttctcttgctttttcctcctttccccccgcctggctcttctgtttctcccctttttgctttgctcttttgtggcgtcgctttcgtctccttgct

SEQ ID NO: 11122 - DNA, 300 bp, Gossypium hirsutum
  Clone ID: LIB3083-118-Q1-L1-E6
tggccagcaatgatgccttgtccccattgttgagcctgaaattggggttgactgatcacatgacatgaaaaagtgtgctgcggtgacagagcgtgtttttgctgcttgctacaaggtttttaatgattactttttcatgcttgtatgtttttttttttatttttatcaatgttttcttttttatttattacttattttttatgtttgtttatatttgttacttttttttttttttaatatattttatatttattatatttatattttttttttttttttttattatttatttgtatctta

SEQ ID NO: 11123 - DNA, 409 bp, Gossypium hirsutum
  unsure (1)..(409): unsure at all n locations
  Clone ID: LIB3189-015-P1-K1-A3
ccggncgaccacgcgtccgctctcaagacctgggcaggaaaagaggagaatgttaatattgttcaagatgctttgctcgttatgtgcaaggctaactcagagggcggtttgggtacatacaaaggtgatgctgagctttgtgagggtgctgcatagagccttcatgtcaaagactacaaatattaagaaattaggcttgtagtcaaatatgtgatgtttagaggagtaaaattcagtattgatattatttttcttgattgtatactttttgtttttttattaaattatttcttatattattttataatttttttttttattattatacatgattttctatttttattttttttaaatattattttatttattttaattttatctatgtgtcattatatttttattttta

SEQ ID NO: 11124 - DNA, 436 bp, Gossypium hirsutum
  Clone ID: LIB3147-015-Q1-K1-G3
gctttggctcgcaaatacaaccaagacaagatgatttgccgcaataccataaatgggactacaagttgaaccctcttttgagctaaagaatgaaaaggagggcatcttagttcccaaaattcaaatttccattctcaactttgtcaactggtctaaactttacttggcagttgattttctagtgtggtacatgatgatcaattctctgtttcgtacttatgtagcttgataaatcccaagatcgatttcttctgagtaatgagaatttttaagatcaaagtgaaggagctaattagtagtctgcccattgcatgttatcttaaaagacgcatgtgcatggaagttatttgataattgagaatgtgcgttgctaggtgttatgctcgtcttcatccaagagccgtgaactgccgcaagaagagtgtggtcacagcaa

SEQ ID NO: 11125 - DNA, 415 bp, Gossypium hirsutum
  unsure (1)..(415): unsure at all n locations
  Clone ID: uC-gsronu33B146b09b1
caaatataaagcacaacgcggcaccaccgcgccggaacttgccggaccgacccacgcgaccgctttatcaaacccaaagngaagaaccaaaacggggagggaaaaaagaacggaccagggagaagaaacacaccacgccaggaaagcaaaactgaggaaggacgaacacctgccgactacaatatccagaaagaatcaacattgcatctggccccgaggctccgtggtggcaatatcgagccacctctgatggcactggctaggaaatacaaccaggacaagatgatctgccgcaagtgctatgctcgtctacacccccgtgccgcgaactgcaggaaaaagaagtgcgggcacagcaaccagctgaggccaaagaagaagaccaagaagaccggatatctcgacggagatctaa

SEQ ID NO: 11126 - DNA, 382 bp, Gossypium hirsutum
  Clone ID: LIB3166-044-P1-K1-D10
gctgtgcgaaaaatcaaaagacaaaatgggttattcaagttcttccaagtggcggttgcttatgcctcttatggttgcctgtctgattatggcagcatctggtagcaacttccacaatgattttgacatcacatggggagatgggcgtggtaagattgccaacaatggcgaggttctcactctctccctcgataaacaatctggttctggtttccaatccaagaatgagtatctttttggcaagattgatatgcagctcaagcttgtcccgggaaactctgctggcactgtcactgcatactatgtaagttatttgcttagttttccactcatttttaccgagacacaatagatgacattggcaatggcttataatatgatg

SEQ ID NO: 11127 - DNA, 486 bp, Gossypium hirsutum
  Clone ID: LIB3147-024-Q1-K1-H10
gtccgcccacgcgtccgttcgtgaaaaccctaaccgtcaagaccataactctcgaggtcgagagcagcgacaccggcgataatgtcaaagccaagatccaagacagagaaggaattcccccggaccagcaacgtttaatttttgctggtaaacaacttgaagatggccgtagattggctgattacaacattcaaaaagaatcaacgcttcatcttgttttaaggttgagaggcggaattattgagccttctttaatggctttggctcgtaaatacaaccaagacaaaatgatttgccgcaagtgttatgctcggttgcatccgagagcagtgaactgtcgcaagaagaaatgtggtcatagcaatcagttgaggcccaagaagaagatcaagtaaaccatgactgacgatggtggtttatgtcatttgcttcaaaagaacttgaataccagacttgtcaaatattttttttcccatttggttcttt

SEQ ID NO: 11128 - DNA, 245 bp, Gossypium hirsutum
  Clone ID: AI729903.1
aacagcatccccgaatcctccaacaataaagacacttactactacaacaagaatgcctacgagtccactaagcagcaaaacttgggcgaggccattttcaccgagaaaggatggagcaccaaggaaaaccagaacaacaactactacaacggcaacaatggttacaacaatggcgagaagcaaggcatgagcgataatagttgttctcactcttgacgtcatagtagtactttccggaagaattc

SEQ ID NO: 11129 - DNA, 356 bp, Gossypium hirsutum
  Clone ID: LIB3148-034-Q1-K1-B1
taagaaattaggcttgtggtcaaatatgtgatgtttagcagagtaaattccggtattgagatgagggttctagagtgtgtggcggctccttttgagtttctgccgctgctcatcgactttagtctgtggaatcagctcatacttcaattaaggtcacggtgcctatgtgcttgtattgttcatacttattacttattcttcttatttttattatttatcctatatgatttatcctttttttattgttggttgtttgtttttttcaattacctttgattttttttcttattactcttttatttttccttttggctttttttcttcgtcctcttttttttcccccactttttttatat

SEQ ID NO: 11130 - DNA, 283 bp, Gossypium hirsutum
  Clone ID: LIB3197-016-P1-M1-F4
ctttcttaccaaaactctactctatgtctatcggggtgtgctttttgccctgttctggatgcaaatccatgctatatagtacttcaacaaattcccaagagttaacatcaatgagaaagagacaacaaccagagagcatatgctcgagaccttctttccccataccaccctatagccataagatcatgagccaaggttcattcctgaaacccaaaatggttatggcctttacagccacttttcaagctcaagcccgcctcatttcaccaccaaaaaaacctat

SEQ ID NO: 11131 - DNA, 664 bp, Gossypium hirsutum
  Clone ID: GOSHI-09MAY01-C54_2
tttccgggggtgccaccacgggcgcgcttttttgtgcgcgcatatttttttggtgtcttccagggcctcctcaaagtcctagctggagtagacaccaacttcaccgtaacagcaaaagcagcagacgatacagaattcggtgaactttatctcttcaaatggacaactctcttaatccctcccacaactctgataatactgaacatggtcggagtcgtggccggagtttcagacgcaatcaacaacggctatggttcatggggtccattgttcggcaaactgttcttcgcattctgggtcattcttcatctttacccattcctcaaaggtttgatggggagacaaaacaggacgcccaccattgtagtgctttggtccatacttttggcatcgattttctcacttgtttgggtacggatcgatcccttcttgcccaaacaaacaggtccagttcttaaacaatgtggcgtggagtgctaaatggtgttttacaaacctttgttattattttatttttcctttttgccactatatgttgatttgctgtgattctaaaagggatttatcttgtttgtagaaaatctcttacgattctgttggcaatgcaccagcaccctgtgtgattcacctaaccagattttacggggcggggccgattcaattt

SEQ ID NO: 11132 - DNA, 2788 bp, Gossypium hirsutum
  Clone ID: GOSHI-09MAY01-C54_1
gtaaaaagtaggtttggtaagcaacgataatgggggatctgttccgcctgaagaagatgattatctcttggctgaagctcgccagcctctatggcgaaaagtgccaatttcgtcaagtctgataagcccttaccggatagtcatcgtcctccgattcttcatcctcgcatttttcctccggttccgtattctaacacccgcctacgacgcttacccgttatggctaatctctgtcatctgcgaagtttggttcgccttctcctggattctcgatcagttccccaaatggttccctattactcgcgaaacttacctcgatcgcctctccttgaggttcgagcgtgaaggagagcccaatcaacttggcgccgtcgacgtcttcgtcagtaccgtcgaccctctcaaggaaccccccatcataacggccaacacggttctatcgatcttggccgtcgattacccggtcgagaaagtgtgttgttatgtgtcggacgatggtgcttccatgcttcttttcgattcgttgtctgaaacggctgagttcgcgaggagatgggttccgttttgtaagaagcataatgttgagcccagggcgccggagttttatttcaatgagaagattgattatttgaaggacaaggtccatcctagctttgttaaagaacggagagccatgaaaagggaatatgaagaatttaaagtaaggatcaatgcattagtagcaaaagctcagaagaaaccagaagaaggatgggtgatgcaagatggcaccccgtggcccggaaataacactcgtgatcatcctggaatgattcaggtctatctaggaagtgccggtgcacttgatgtggatggcaaagagctgcctcgacttgtctatgtttctcgtgagaaacgacctggttatcagcaccataagaaagccggtgctgagaatgctctggttcgagtttctgcagtgcttactaatgcacccttcatattgaatctggattgtgatcattacatcaacaatagcaaggccatgagggaagcgatgtgctttttaatggatcctcagtttggaaagaagctttgttatgttcaatttccacagagatttgatggtattgatcgtcatgatcgatatgctaatcgaaatgttgtcttctttgatatcaacatgttgggattagatggacttcaaggccctgtatatgtaggcacagggtgtgttttcaacaggcaggcattgtatggctacgatccaccagtctctgagaaacgaccaaagatgacatgtgattgctggccttcttggtgttgctgttgttgcggaggttctaggaagaaatcaaagaagaaaggtgaaaagaagggcttactcggaggtcttttatacggaaaaaagaagaagatgatgggcaaaaactatgtgaaaaaagggtctgcaccagtctttgatctcgaagaaatcgaagaagggcttgaaggatacgaagaattggagaaatcgacattaatgtcgcagaagaatttcgagaaacgattcggacaatcaccggttttcattgcctcaactttgatggaaaatggtggccttcctgaaggaactaattccacatcactgattaaagaggccattcacgtaattagctgtggttatgaagaaaaaactgagtggggcaaagagatcggatggatttatgggtcggtgacggaagatatattaacaggtttcaagatgcattgtagagggtggaaatcggtttattgtgtaccgaaaagaccggcattcaaagggtccgctccaatcaatctctcggatcggttgcaccaagttttgagatgggcacttggttctgtagaaattttccttagtcgtcactgtccactttggtatggttatggtggaaaactgaaatggctcgagaggcttgcttatatcaacaccattgtttaccctttcacctcgatccctttactcgcctattgtactattccagctgtttgtcttctcaccggcaaattcatcatcccaactctaagcaaccttacaagtgtgtggttcttggcacttttcctctccatcattgcaactggagtgcttgaacttcgatggagcggggttagcatccaagactggtggcgcaatgaacaattctgggtgatcggaggtgtctccgcccatcttttcgccgtcttccaaggcctcctcaaagtcctagctggagtagacaccaacttcaccgtaacagcaaaagcagcagaggatacagaattcggtgaactttatctcttcaaatggacaactctcttaatccctcccacaactctgataatactgaacatggtcggagtcgtggccggagtttcagacgcaatcaacaacggctatggttcatggggtccattgttcggcaaactgttcttcgcattctgggtcattcttcatctttacccattcctcaaaggtttgatggggagacaaaacaggacgcccaccattgttgtgctttggtccatacttttggcatcgattttctcactggtttgggtacggatcgatcccttcttgcccaaacaaacaggtccagttcttaaacaatgtggcgtggagtgctaaatggtgttttacaaacctttcttattattttattttccctttttgccactactgttgatttgctgtgattctaaaagggatttatcttgtttgtaaaaagtctcctatgattttgttggttcaatttaatttctatatggtaaaaaaatatttctttaaactaactatataaaaaactcgcta

SEQ ID NO: 11133 - DNA, 540 bp, Gossypium hirsutum
  Clone ID: LIB3585-050-P1-K1-D3
cgagaaacgattcgggcaatcaccggttttcattgcctcaactttgatggaaaatggtggccttcctgaaggaacggagtgcacatcactgattaaagaagccattcacgtaattagctgtggttatgaagaaaaaactgagtggggcaaagaggcgagtaatattatatatttcaacggattacttcaatggactaatgccatttgcaactgttatgtttcaatacatttcatataggtcaggagtcaatttatgcattaacgagcctgtattattggcattgcagatcggatggatttatgggtcggagacggaggatattttaacaggtttcaagatgcatcgtagagggtggaaatcggtttattgtgtaccgaaaagaccggcattcaaagggtccgctccaatcaatctctcaaatcggttgcaccaagttttgagatgggcacttggctctgtacaaattttccttagtcctcactgtccactttggtatggttatggcggaaaactgacatggctcgagaggcttgcttata

SEQ ID NO: 11134 - DNA, 482 bp, Gossypium hirsutum
  Clone ID: uC-gsronu33B124e06b1
ctgtctcgtgggcggacgcgtgggcggacgcgtgggcggacgcgtgggggaatgagtcaggtctatctaggaagtgccggtgcactcgatgtggatggcaaagagctgcctcgacttgtctatgtttctcgtgagaaacgacctggttatcagcaccataagaaagccggtgctgagaatgctctggttcgagtttctgcagtgcttactaatgcacccttcatattgaatctggattgtgatcattacatcaacaatagcaaggccatgagggaagcgatgtgctttttaatggatcctcagtttggaaagaagctttgttatgttcaatttccacagagatttgatggtattgatcgtcatgatcgatatgctaatcgaaatgttgtcttctttgatatcaacatgttgggattagatggacttcaaggccctgtatatgtaggcacagggtgtgttttcacaggcaggcattgtatggc

SEQ ID NO: 11135 - DNA, 329 bp, Gossypium hirsutum
  unsure (1)..(329): unsure at all n locations
  Clone ID: LIB3083-021-Q1-L1-F7
tgagaaatggaaagtcaggcatgaaaaaagaggtttggtaagcaacgataagtgcggaaatgatcctcctgaagaagatgattatctcttggctgaagctcgccagcctctatggcgaaaagtgccaatttcgtnaagtctgataagcccttaccggataggcagacttggctaaattggcgcttttcctgcctgttcgtgtcttaacaccggcctacgacgcttacccgatctggctaatatgtgtcatctgctaagcatgtttcgccttcttctggacactggatcagttgaccaattggttacctatgactatgctaacttacctc

SEQ ID NO: 11136 - DNA, 228 bp, Gossypium hirsutum
  unsure (1)..(228): unsure at all n locations
  Clone ID: LIB3146-007-Q1-K1-A1
cacggaggnggcggcgaattctagaactagacggatccgtcgggctgtaggtattcagcgcgcgcacattatatttgttggtttgatcgtcatgatcgatatgctaatcaaattgtggtcttttttgatatcaacatgttgggattagacgtactccaaggccctgtatatgtaggcacagggtgtgttttcaacaggcaggcattagtatggctacgatccgccggt

SEQ ID NO: 11137 - DNA, 297 bp, Gossypium hirsutum
  Clone ID: GOSHI-09MAY01-C74_11
atgggggtattgtggagagggggatgtctggttttttaatgggttaagaccactcaggtctggtataggggggttaaatgtgcttcctgatcaaaactagtgacttcgaatatttattcatatattgtaaagcaaatcttgtttagtcgtgttgtggaatcagcccgtgaagagaatatttgggagggggcatgtttaaatttatgggcttaaatttgttaacctgcctgaaagagcgattgaaccaggtcggttatgaaaatgtgtccttgggtaaagtaggatgcgtgtttttca

SEQ ID NO: 11138 - DNA, 394 bp, Gossypium hirsutum
  Clone ID: GOSHI-09MAY01-C74_10
ttctgattcttttaatttgtttttgtatttcatgtagtttaagttgaattagggaaataggggaggtaaggttgaatttatttataattagggcactctgattctgttctgagtgcatttaggaccttcgacttctgttttaaatcctattctgattttcttttttggcttagaagttttctagcttgaagattagggcttttgggaattatacagtaattatctaagatctggcttttccgtgttatgtttggtagttaatgagaaaatgtaacttgttttatattttttaattgtcttctgaaattattcatatctttgcagagatggcccgtaccaagcagacagcccgtaagtcgactggtgggaaaggctccaaggaagcaacttgcta

SEQ ID NO: 11139 - DNA, 698 bp, Gossypium hirsutum
  Clone ID: GOSHI-09MAY01-C74_9
cccacgcgtccgaaattctgattcttttattttgtttttgtatttcatgtagtgtaagttgaattagggaaataggggaggtaaggtagaattaggttgaatttgtttataattagggtaccttttataggctctgagttcatttaggaccttcgacttctgttttaattcccattctgattttctttttcggcttagaagttttctagtttgaaaattagggcttttgggaattattcaagatggcccgtaccaagcaaaccgcccgtaagtctactggtggggaaggctccaaggaagcaacttgctaccaaggctgcccgtaaatctgccccaaccaccggtggtgtgaagaagcctcatcgctaccgtcctggaactgttgctcttcgtgaaattcgtaagtaccagaagagtactgagcttcttatcaggaaattgcctttccagaggcttgttcgtgaaattgcccaggactttaagactgatttgcgtttccagtgtcatgcctgtcttgctcttaatatagctgtttttgctttctttttgttcttttttaattatctctatttttctttgtattttcttcttccttttttctataaatttttttatttttttttttatcctttttttatttcttattttattcctcttctttctttattattttttattatctcttctctttttttatt

SEQ ID NO: 11140 - DNA, 1077 bp, Gossypium hirsutum
  Clone ID: GOSHI-09MAY01-C74_3
cccacgcgtccgcttggctcttatttatttgtttatttttatagtaaattagggtttgtaaattctgattcttttaatttgtttttgtatttcatgtagtttaagttgaattagggaaataggggaggtaaggttgaatttatttataattagggcactctgattctgttctgagttcatttaggaccttcgacttctgttttaaatcctattctgattttcttttttggcttagaagttttctagtttgaagattagggcttttgggaattatacaagatggcccgtaccaagcagacagcccgtaagtcgactggtgggaaggctccaaggaagcaacttgctaccaaggctgcccgtaaatctgccccaaccaccggtggtgtgaagaagcctcatcgctaccgtcctggaactgttgctcttcgtgaaattcgaaagtaccagaagagtactgagcttcttatcaggaaattgcctttccagaggcttgttcgtgaaattcccccgcgtccccccacgcgtccgcgtttccagagccatgccgttcttgctcttcaggaagctgcagaagcataccttgtgggtctctttgaagacaccaacctgtgtgcgatccacgccaagcgtgttactataatgcccaaggacatccagttggctcgtaggatcaggggcgagcgtgcttaatttccaagtgtgttgatcactcaacttagaatggagaaactgttgtttgttgttaggcagatgtgttgtactatttttttttttttatgtttatttttattcctcttttaggccaagattaaatgataggtttatcttagtgcgtaggttccaatgttatgatgaaatggggttatggtggagagtgtgatgtctgatattttaatggataagatctcatgtctggtatagtttgttttaatctgcttcctaatcaaaactagtgacttcgaattttattcatatattgaaagcaaaaaaaaaaaaaaaaaaaaaaaaaaaaaaaaaaaaaaaataaaaaaaaaaaaaaataaataaaaaaaaaataaactaaaaaaaaaattaatg

SEQ ID NO: 11141 - DNA, 946 bp, Gossypium hirsutum
  Clone ID: GOSHI-09MAY01-C74_2
tgattctgttctgagttcatttaggaccttcgacttctgttttaaatcctattctgattgggttttttgggttagaagttttctagtttgaagattaggcttttgggaattatacagtaattatctaagatctggcttttccgtgttatgtttggtagttaatgagaaaatgtaactagttttatattttttaattgccccgcctagcgtttgtctcagatctcagaagatggcccgtaccaagcaaaccgcccgtaagtcgactggtgggaaggctcctaggaagcaacttgctaccaaggccgcccgtaaatctgccccaaccactggtggtgtgaagaagcctcatcgataccgtcctggaactgttgctcttcgtgaaattcgaaagtaccagaagagtactgagcttcttatcaggaaattgcctttccagaggcttgttcgtgaaattgcccaggatttcaagactgatttgcgtttccagagccatgccgttcttgctcttcaggaagctgcagaagcataccttgtgggtctctttgaagacaccaacctgtgtgcgatccacgccaagcgtgttactataatgcccaaggacattcagttggctcgtaggatcaggggcgagcgtgcttaatttccaagtgtgttaatcacacacttagaatggagaaactattgtttgttgttaggcaaatgtgttgtactatttttttatgtttatttttaatcctcttttaggacaagattaaatgataggtttatcttagtgcgtaggttccaatgttatgatgaaatggggttatggtggagagtgtgatgtctgatattttaatggatacgatctcatgtctggtattgttcggcttctatgaaaataggactcattaaaaaataaaaatagaataataataaaatcaaggtgattattattaacacctgt

SEQ ID NO: 11142 - DNA, 809 bp, Gossypium hirsutum
  Clone ID: GOSHI-09MAY01-C74_1
tcctcgcgcccgccggaagataataaagcgtttgtctcagatttcagaagatggcccgtaccaagcagacagcccgtaagtcgactggtgggaaggctccaaggaagcaacttgctaccaaggctgcccgtaaatctgccccaaccaccggtggtgtgaagaagcctcatcgctaccgtcctggaactgttgctcttcgtgaaattcgaaagtaccagaagagtactgagcttcttatcaggaaattgcctttccagaggcttgttcgtgaaattgcccaggacttcaagactgatttgcgtttccagagccatgctgttctagctctccaggaagctgcagaggcataccttgtgggtctttttgaagacaccaacctttgtgcgatccacgccaagcgtgtcacaattatgcccaaggacatccagttggctcgtaggatcagaggagagcgtgcttaatttccatgtgtgtggatcagtcgcttagaaagaagaaactattgtttatttttaggcaaatgtattggttttttgttttttctaatcatcttttaggccatgatggtagtggtaggttcaatgtgatgtgatgatgaagtggggcgtctgatatgttaatggacaatagctcatgtctggtatagtctgtttaaatgtgtttttgcttaatcgaaagttgctttgccacacagtagtggctttggttgtttatttgttgcgagtaaaacttgcttaatcgtgtcagttcttgatttggcttaagaaaatgttttatttgtaatggtaattaatcggccttttagtgaa

SEQ ID NO: 11143 - DNA, 583 bp, Gossypium hirsutum
  unsure (1)..(583): unsure at all n locations
  Clone ID: LIB3829-024-Q6-K6-H12
taaacgtttgtctcagaactcagnaagaggcgccgggggaagcaaaccgcccgtaagtctactggtgggaaggctccaaggaagcaacttgctaccaaggctgcccgtaaatctgccccaaccaccggtggtgtgaagaagcctcatcgataccgtcctggaactgttgctcttcgtgaaatgggtaaataccagaagagtactgagcttcttatcaggaaattgcctttccagaggcttgttcgtgaaattgcccaggacttcaagactgatttgcgtttccagagccatgctgttctagctctccaggaagctgcagaggcataccttgtgggtctttttgaagacaccaacctttgcgcgatccatgccaagcgtgtcacaattatgcccaaggacatccagttggctcgtaggatcaggggagagcgtgcttaatttccagaagtgtggatcagtcgcttagaagaaactattgtttatttttaggcaaatgtattggttttttgttttttctaatcatcttttaagccatgatggtagtggtaggttcaatgtgatgtgatgatgaagtgggagtctg

SEQ ID NO: 11144 - DNA, 521 bp, Gossypium hirsutum
  Clone ID: LIB3828-016-Q1-N6-B5
aatcaccaccgggaaattcggagccaattcactaaaaggccgattaattaccattacaaataaaacattttcttaagccaaatcaagaactgacacgattaagcaagttttactcgcaaaaaaaaaaaaaaaaaaaaaaaaaaaaaaaaaaaaaaaaaaaaaaaaaaaaaaaaaaaaaaaaaaaaaaaaaaaaaaaaaaaaaaaaaaaaaaaaaaaaaaaaaaaaaaaaggggggggcgcccccctttttttttttttttaaaaaaaaaaaaaccccttttttcccgtttttttggaaaaaacccggccaaaaaaggttttgggggattaaagggggcctttccaaaaaattggcccaaaatttgggccgggtaacttttttttaaaaatttccggggatttggtaaaaaaaagggggaaagggggttttaaaacccccaaaaaaaaaaccgggggaaagaaaaattttttggggtaaaaaaaaaaagggggtttagggccccccaaattaatccgggggg

SEQ ID NO: 11145 - DNA, 627 bp, Gossypium hirsutum
  unsure (1)..(627): unsure at all n locations
  Clone ID: LIB3828-016-Q1-K6-G5
gttgagtcaaaggaaananaaggagtttctcacaccgtggnaaatcagtgaatgtgatgacgtggaggtttatgtggaaactgtggttttgatgtactctgatgatttgaagaagaggttgattggtgaaaatgttaacaaggtcttggctttgcttcaggtttctgcggctattatgtttgatgctggaattagttcgtgcttggaatatctggaagctgtcccctggtccgaggatgaagaggagaaagtcctatctcttctctgccaacttgagcttcatggctcgatgactgaagttcttcagagagtattatccgaaccatctacttctgtgagaacagatgacatcttcttgaagctacttagtggtgttcttcaagcaaaagatgataaagcgcgtcgagaaatgaaaactcttatttcacggttactcagagaagattcgtttgattataacagccgggttgatgtctccaaagatatcctttatcatctttgtcatagatgtctttgttctctcgtgctctgcttatctgaagctatgtgcatggacagcagcaagcaagatcgaagagttttaatggctgaaatagctcgagaagctgacaacttgcagtggctagt

SEQ ID NO: 11146 - DNA, 513 bp, Gossypium hirsutum
  Clone ID: uC-gsronu33B019d05b1
ccctctcgtccggcacaaaagagttttatctgagaaaagtaggttctttgctgagaagttgagtcaaaggaaagagaaaggagtttctcacactgtggaaatcagtgaatgtgatgacgtggaggtttatgtggaaactgtggttttgatgtactctgatgatttgaagaagaggttgattggtgaaaatgttaacaaggtcttggctttgcttcaggtttctgcggccattatgtttgatgctggaattagttcgtgcttaatttccagaagtgtggatcagtcgcttagaagaaactattgtttatttttaggcaaatgtattggttttttgttttttctaatcatcttttaagccatgatggtagtgggtaggtccaactttgtgcttattatgagtgatctttaaacctgggttagtgctgcactgacagatgaagatacttgcatggatggattcttaggcagggctttgaatgggtatgcgaagatgatggtgaggaaacgaatcgg

SEQ ID NO: 11147 - DNA, 440 bp, Gossypium hirsutum
  unsure (1)..(440): unsure at all n locations
  Clone ID: uC-gsronu33B007b06b1
ccctcgtttccgtaaaaaaaaaaaaacaaacagggagggtagatttaaaagaaaggggggagtaccaaaagagtactgagcttcttatcaggaaattgcctttccagaggcttgctcgtcaaaaatgcccaggatttcaagactgacttgcgtttccagagccatgccgttcttgctcttcaggaagctgcagaagcataccttgtgggtctctttgaagacaccaacctgtgtgcgatccacgccaagcgtgttactataatgcccaaggacattcagttggctcgtaggatcaggggcgagcgtgcttaatttccaagtgtgttaatcacacacttagaatggagaaactattgtttgttggtaggcaaatgtgttgcactatttgtttatgtttattattaatcctcttttangacaagattaaatgataggtttat

SEQ ID NO: 11148 - DNA, 481 bp, Gossypium hirsutum
  Clone ID: LIB3829-018-Q6-K6-C5
ggtttatcttagtgctgaggttcaatgttatgatgaaatggggttatggtggagagtgtgatgtctgatattttaatggttaagaacactcatgtctggtatagtttgtttaaatgtgcttcctgatcaaaaaaaaaaaaaaaaaaaaaaaaaaaaaaaaaaaaaaaaaaaaaaaaaaaaaaaaaaaaaaaaaaaaaaaaaaaaaaaaaaaaaaaaaaaaaaaaaaaaaaaaaaaaaaaaaaaaaaaaaaaaaaaaaaaaaaaaaaaaaaaaaaaaaaaaaaaaaaagggggcgtgttttaaaattatacaaattttaataccgggacaaccccgcttttaccttttttaatggggcacaaaaaaataactccttgcccccgtttttcaaaacggggaggaggggaaaaaacctgcgttccccccaaattttcccctttttgaactccccttttttccacatttgttgtaaatcaaaaagc

SEQ ID NO: 11149 - DNA, 283 bp, Gossypium hirsutum
  Clone ID: LIB3146-021-Q1-K1-H6
cggggcgcccacgcgtacgtttcatgaagctgcaaaagcataccttgtgggtctatttgaagacaccaacctgtgtgcgatccacgccaagcgtgttactataattgggaaggacattaagttggctcgtaaggtaatgagcgcgctctctttaatggcaagggtgaaaatcacactgatggcggaaacttaaccatcaagcgtcgaaggcaaatgtgttggactatttttttatgtttatttttaatcctcttttaggacaagattaaatggattggttttt

SEQ ID NO: 11150 - DNA, 243 bp, Gossypium hirsutum
  unsure (1)..(243): unsure at all n locations
  Clone ID: LIB3583-032-Q6-K7-F3
cccgcgttcgccccgcgtccgacgtttgtctcagactcanaanaggcccgtaccaagcaaccgcccgtaagtctactggtgggaaggctccaaggaagcaacttgctaccaaggctgcccgtaaatctgccccaaccaccggtggtgtgtattttttctttcgataccgtcctgnaactgtgggtggggggggggttcncaattaccnnaatattactgttctttgtagggggggggtgcttt

SEQ ID NO: 11151 - DNA, 214 bp, Gossypium hirsutum
  Clone ID: LIB3148-017-Q1-K1-F8
tgaaaacccggggccgacccacccgtccggttttttgttttttctaatcatcttttaggtcatgatggtagtggtaggttcaatgtgatgtgatgatgaagtggggcgtctgatatgttaatggacaatagctcatgtctggtatagtctgtttaaatgtgtttttgcttaatcgaaagttgctttgccacacagtagtggcttttggttgttt

SEQ ID NO: 11152 - DNA, 187 bp, Gossypium hirsutum
  Clone ID: LIB3197-020-Q1-M1-E4
cgtttgtttaaaattttcgaaaatgataccgacccaaggggacagcccataggtggactggtgggaaggctccaaggaagcaacttgctaccaaggctgcccgtaaatctgccccaaccaccggtggtgtgaagaagcctcatcgctaccggcctggaactgttgcttttcgtgaaattcgaaagta

SEQ ID NO: 11153 - DNA, 439 bp, Gossypium hirsutum
  Clone ID: GOSHI-09MAY01-C64_13
ggcgacgtgggcggttcgctgcccgcgacgtcgcgagaagtccactgaaccttatcatttagaggaaggtgaagaatattgatgtgcttatgcaaaatcatctattttgaagatcggttcaccgtgtgagggtatgcccaccctcttttcctatatccttcctatcgttctttatttgtgaggtttgcgaaattatgcatgtaataggcctaggatcttttcatgctattaatggaataaacccacgcgtccgtttgcatgtcatttttgttagaaatgcttgtcttttacttttgaaagatgcttcataagaacatgaatagcctaataagctatcctatttttcatgtttaaaactgtcatatctatgggtgttgaaagattgtctaaaacctttttatgctgtcaatggagtgatattttagattcccccccccca

SEQ ID NO: 11154 - DNA, 513 bp, Gossypium hirsutum
  Clone ID: GOSHI-09MAY01-C64_9
tcctaccactcttccggttcggatcgcggcgacgtgggcggttcgatgcccgcgacgtctcgagaagtccactgaaccttatcatttagaagaggaagaagccttggaaaaagttgttgaattcttccagtctaaatatttcaagaaggattcagtcggcgcttaccattttccagcaaattcagccactgctgagattgcattcacgacggagggaaaggaggaagcaaaaatcaaagtagagaatgcgaatgtggtcgagatgatcaagaaatggtacttaggaggaacaaggggagtgtctgcaactaccatttcctccttagctaataccctctccgctgagctttgcaaatgaacccatgccgttttgttaccaagtctttcctactaagaaccatcctgtttgttgtgctttctctaccaataaattatgatatgattggagttttcgcttatttacagatccattttctttacaaaaaaaaaaaaaaaaaaaaaaaaaaagggcgg

SEQ ID NO: 11155 - DNA, 936 bp, Gossypium hirsutum
  Clone ID: GOSHI-09MAY01-C64_4
gtatggtgagcagaatatccgtcgtgcagttcctttggctcttggtcttctttgtatatcaaacccaaaggttaatgttatggacacattaagcaggcttagtcatgattcggattcagaagttgcaatggctgcagttatctccttgggtttaataggtgctggaaccaataatgctcgcattgctggcatgcttcgcaatctttcaagttattactacaaggatgctagccttctcttttgtgtgcgaattgctcaaggtttagttcatttggggaagggtctattgactcttaatccatatcattctgaccgctttttgctatcaccgactgcacttgctggtttggttacaatgttgcacgcatgcctcgatatgaaagctatggtactgggaaaataccattatgtcctctacttcattgttctggcaatgcagccaaggatgttgatgaccgtcgacgaaaacctcaaacctctatcggtcccagtccgtgtaggtcaagctgttgatgttgttgggcaggctggtcgacccaagactatcactggcttccaaactcattccactccggttcttcttgctgccggtgatagagcagaactggctaccgaaaagtatattcccctttcacccatcctggaggggcatgttattttgaaagaaaacccagactacagagaggatagttaagttaaaaagcaagaactcggccgctacttccatggttggtgattgtaatgtgacaccgttttcaaacaaagtttcgaactttattattatttttttcatgataaaagtttttcaagtcagaacgactagatatgaaaatgttagttaaaccaggcaagctttcttttcggccgcagttcattctaaatatatatttttagggcggccgtcgcgatctacccacgcgtccgcggacgcgtggg

SEQ ID NO: 11156 - DNA, 936 bp, Gossypium hirsutum
  Clone ID: GOSHI-09MAY01-C64_3
cggtcgcccgggctgcacaaaaaaaatttctctctcgtctttagggagggaaaagaaagtcaatattttttactaaatccctgtaaattcgccaaaaagacttaaaaatccataattcgttgtcttcccgtaatggattttagtcagcctcctgttgaaaattatgccaaccccaagacttgtttctttcatgttctcttcaaggctgcagcattggctttttacatcctttcagctctctttttcaacagctttgtgatcatatttgtggtgactgttcttctttccgcccttgatttttgggtggttaagaatgttagtgggcgcatattagtcggtttgaggtggtggaatgaaattaacgatctcggcgagagtgtatggagatttgaatgtcttgaccaagagtcgttggctcggatgaacaagaaagattcatggctattttggtggaccctttacctttcagcggttgcgtggattgtgcttggaatattctctctcataaggtttcaagctgattatctccttgtcattggagtttgtttgactctcaacattgccaatatcgtcggcttcaccaaatgtcgcaaagatgccaagaagcagattcaacagtttgccacccagaccattgcctcaagattttcttccaccttacaatcagcatttagtgttgtttgaaatagtcgatagtaatatacaagaacgaaaacggaagaaaatgcagtagtagacgagagaagttaacaagtgtggcatgtaaaaaaaacgaggcgtatcgaattgccgattttcgattgtttttttctttatggtacatctaatgcttttgtataatgaatcacacagtaaaactttgtgataacaatggtctttctgcaaaggttacattcctacaattacaatcttctttgagatttttttttcttctta

SEQ ID NO: 11157 - DNA, 1173 bp, Gossypium hirsutum
  Clone ID: GOSHI-09MAY01-C64_2
gcttaaaccaaatcaaagcaatcacccagaattcataaatcctatcttcctgcgggtcaaatgggggaaaattaggtgaatcacaaatgacaagcccttaacttacctaccaaccaccatctgcccatccaggaggccccaagtcttactcttcgtgctatgttgaaatgctgatgtcctatgtctatgccatttatgctttgatataaaaggcatcaccactctttaatttctcatttcacttacaaactcaaccatctttgccctttcattgcttccttgcctgccttaaacctccttcaagcatagccatgactactgaaatggtaatggttgatgaagtcccttttcctccacaaatcacaactaccaagccactatctcttttgggtcatggaattaccgacattgagattcactttttgcaaatcaagttcacagcaattggggtttaccttgaaccagaagttgtaggacatttgcaacaatggaaggggaagcctgggaacgtgctagctgaagatgatgacttcttcgaggctcttattaatgctccagtggagaagtttctgagagttgtggtgattaaggagatcaaaggttcccaatatggagtgcagctagagagtgctgtgagggaccgattggcagctgacgacaaatacgaagaggaagaggaagaagccttggaaaaagttgttgaattcttccagtctaaatatttcaagaaggattcagtcatcacttaccattttccagcaaattcagccactgctgagattgcattcacgacggagggaaaggaggaagcaaaaatcaaagtagagaattcgaatgtggtcgagatgatcaagaaatggtacttaggaggaacaaggggagtgtctgcaactaccatttcctccttagctaataccctctccgctgagctttgcaaatgaacctatgctgttttgttaccaagtctttcctactaagaaccatcctgtttgttgtgctttctcttccaataaattatgatatgattggagttttcgcttatttacaaatccatttccttcactcccatgattgagtgaagcccaaaaatgaaaatgccagacaatttgctttcatgttttcagatgtgcttcattgcctataaaagcaaccgcattgcacaaaaaaaaaaaa

SEQ ID NO: 11158 - DNA, 1261 bp, Gossypium hirsutum
  Clone ID: GOSHI-09MAY01-C64_1
cccccgccgccgcgcacgccccgcccgttcccccgcaatgtcgacggcttccatcaacggttggtgccttacctcctcttcttcctccaccaccacctcctctttttccgctcgtcgacgacctacattgcggccttcggtcgtcgctagccttaactcttctccttctcctccgactcttatccaagaccgcccggttttcgctgcccctgttcctttgctcaccccgagagaagagatgggaaacaagtcctacgacgaagccattgaagctctcaagaaacttctcagtgagaaaggagaactgaaagctgaagcagctgcaagggtagatcaaataacagcagagttaaacacaacatcagctgacggcaaaccatctgactcttctgttgagagactgaaagaaggcttcgtttacttcaagaaagaaaaatatgaaaagaatcctgctctgtatggtgagcttgccaagggtcaaagccctaagtatatgattgttgcctgctcggactctagggtctgcccatctcatgtgctggacatgcaacctggtgaagcttttgtggtccgtaatgttgctaacatggtgccaccatatgaccagattaaatatgctggcattggatctgctattgaatatgcagttttgcatctcaaggtacaagaaattgtggtgattggacacagtgcctgtggtggaatcaaggggcttatgtctttcccatttgatggaaacaactcaactgatttcatagaggattgggttaagattggaatccctgctaagaccaaggtgctagctgaacatggtggtgagcctttgggagtccaatgtacacactgcgagaaggaagcagtgaatgtatcccttggaaacctgctgagttatccatttgtgagagatggattggtgaagaaaaccctgggaatcaagggcggttactatgacttcgttaaaggaagtttcgagctatggagtcttcagttccaactttcaagctctctctctgtatgaaaacacaccaaaccatcaccattgacaccatctttgttccttaactaccaatcctttttcttacaatgtactatgttcatgtctttatcgtctattacaataaatatagatgatagagatcacctgccgcccgccgtctgcggtggtggctgcggtggctctttccatctataaattctcctttgaagaggtgttcattattcggttttaattgaattaatcggtagaaatttacttcggttc

SEQ ID NO: 11159 - DNA, 437 bp, Gossypium hirsutum
  Clone ID: LIB3120-001-Q1-K1-D8
tgctgagttatccatttgtgagagatggattggtgaagaaaaccctgggaatcaagggcggttactatgacttcgttaaaggaagtttcgagctatggagtcttcagttccaactttcaagctctctctctgtatgaaaacacaccaaaccatcaccattgacaccatctttgttctttaactaccaatcctttttcttacaatgtactatgttcatgtctttatcgtctattacaataaatatagatgatagagatcacctgccgcccgccgtctgcggtggtggctgcggtggctctttccatctatcaattctcctttgaaaaaaatcattggctacaagaggctctgatagtcaatggcatagaaacggggactattcagtgtgtgcatacaacggagcagaagttctggatctcgtttgcctatcgagattc

SEQ ID NO: 11160 - DNA, 458 bp, Gossypium hirsutum
  Clone ID: LIB3120-004-Q1-K1-C8
cccacgcgtccggacggcttgtatcaacggatggtgcctaacctcctgtcttttcaccggggccaggtccaattttgggggtcggcgacgacctacattgcggccttcagtcgtcgctagccttaactcttctccttctactccgactcttatccaagaccgcccggtttttgctgcccctattcctttgctcaccccgagagaagagatgggaaacaagtgctacgacgaagccattgaagctctcaagaaacttctcagtgagaaaggagaactgaaagctgaagcagctgcaagggtagatcaaataacagcagagttaaacacagcatcagctgatggcaaaccatctgactcttctgttgagagactgaaagaaggcttcgtttacttcaagaaagaaaaatactgaaaagaattctgctctgtatggtgagcttgcctagggtcaaagccct

SEQ ID NO: 11161 - DNA, 420 bp, Gossypium hirsutum
  Clone ID: LIB3120-053-P1-K1-H6
cggcattgcgtgcgggacccacgcgttcgcggacgcgtgggcggacgcgtgggcggacgcgtgggcggacgcgtgggggcttccatcaacggttggtgccttacctcctcttcttcctccaccaccacctcctctttttccgctcgtcgacgacctacattgcggccttcggtcgtcgctagccttaactcttctccttctcctccgactcttatccaagaccgcccggttttcgctgcccctgttcctttgctcaccccgagagaagagatgggaaacaagtcctacgacgaagccattgaagctctcaagatacttctcagtgagaaaggagaactgaaagctgaagcagcttgcagggtagatcaaataacagcagaggtaaacacaacatcagctgacggcaaaccatctgactct

SEQ ID NO: 11162 - DNA, 414 bp, Gossypium hirsutum
  Clone ID: LIB3147-020-Q1-K1-H7
gggcggttcgctgcccgcgacgtcgcgagaagtccactgaaccttatcatttagaggaagggtctattgactcttaatccatatcattctgaccgctttttgctatcaccgactgcacttgctggtttggttacaatgttgcacgcatgcctcgatatgaaagctatggtactgggaaaataccattatgtcctctacttcattgttctggcaatgcagccaaggatgttgatgaccgtcgacgaaaacctcaaacctctatcggtcccagtccgtgtaggtcaagctgttgatgttgttgggcaggctggtcgacccaagactatcactggctttcaaactcattccactccggttcttcttgctgccggtgatagagcagaactggctaccgaaaagtatatttccctttca

SEQ ID NO: 11163 - DNA, 360 bp, Gossypium hirsutum
  Clone ID: LIB3120-053-P1-K1-H8
cggacgcgtgggcggacgcgtgggaaatctgtgatcatcccactctttgccatacccatcagtacttccgtcagctgtagctgcgctaccttctatggtacctccaccaccacctcctgttttgccgctcgccaacgacctacattgcggccttcgtgcgtatctggccttaactgtccttcttctgctgcgactcttatacaagaccgtccggccttcgctgtccctgttcctttgctcaccccgagagaagagatgggaaacaagttctacgacgaagccattgaaactttcaagaaacttctcagtgagaaaggagaactgaaagctgcatcagctgcaagggttgatcaaataaca

SEQ ID NO: 11164 - DNA, 341 bp, Gossypium hirsutum
  Clone ID: LIB3120-011-Q1-K1-E11
ggctctcatgaagggatggcgccttacctactttcattactacaacaccacctgctatttttgcgatcgccgactacctacattgctggcttccatcgcctctaacaccatctattatacctgtcctgctactgttattcaaaaccccccaatttttccttgccctgttcctttgctcaacccaagagaagagatgggaaacaagtcctaaactaatccattgaagctctcaagaaacttctcactgtggaaggagaactgaaagctgaagcagctgcaagggtagatcaaataacagcagagttaaacacaacatcagctgacggcaaaccatctgactc

SEQ ID NO: 11165 - DNA, 436 bp, Gossypium hirsutum
  Clone ID: LIB3120-003-Q1-K1-H3
gttcggatcgcggcgacgtgggcggttcgctgcccgcgacgtcgcgagaagtccactgaaccttatcatttagagaaaggagaactgaaagctgaagcagctgcaagggtagatcaaataacagcagagttaaacacagcatcagctgatggcaaaccatctgactcttctgttgagagactgaaagaaggcttcgtttacttcaagaaagaaaaatatgaaaagaatcctgctctgtatggtgagcttgccaagggtcaaagccctaagtatatgattgttgcctgctcggactctagggtctgcccatctcatgtgctggacatgcaacctggtgaagcttttgtggtccgtaatgttgctaacatggtgccaccatatgaccagattaaatatgctggcattggatctgctattgaatatgcagttttgcatc

SEQ ID NO: 11166 - DNA, 493 bp, Gossypium hirsutum
  Clone ID: LIB3585-017-P1-K1-E3
acggaccaagccgtccgcccacgcgtccgcccacgcgtccgcccacgcgtccgcccacgcgtccgctcaaccatctttgcccttgcattgcttccttgcctgccttaaacctccttcaagcatagccatgactactgaaatggtaatggttgatgaagtccctttgcctgcacaaatcacaactaccaagccactatctcttttgggtcatggaattaccgacattgagattcactttttgcaaatcaagttcacagcaattggggtttaccttgaaccagaagttgtaggacatttgcaacaatggaaggggaagcctgagaacgtgctagctgaagatgatgacttcttcgaggctcttattaatgctccactggagaagtttttgagagttgtggtgattaaggagatcaaaggttcccaatatggagtgcagctagagagtgctgtgagggaccgaattggcaaatgacgacaaatactaagaggaaga

SEQ ID NO: 11167 - DNA, 546 bp, Gossypium hirsutum
  unsure (1)..(546): unsure at all n locations
  Clone ID: AI725530.1
aatcaccgacatggatattcactttttgcaaatcaagttcacagcaattggggtttaccttgaaccagaagttgtatgacatttgcaacaatggaaggggaagcctggggacgtgctatctgaatatgatgacttcttcgaggctcttattaatgctccagtggagaagtttctgagagttgtggtgattaaggagatcaaaggttcccaatatggagtgcagctagagagtgctgtgagggaccgattggcagctgacgacnaatactattatgaatatgaagaaaccttggaaaaagttgttgaattcttccagtctaaatatttcaataaggatgcagtcatcacttacaattttccatcaaattcctccactgctgaaattgcgttccttactgatggaaatgacgacactatcatcgtcttttataatgatatattggggaatatgatgattacatgctattggttatgaaatgagcgaatttctgcaactatcaatttcctatttatatcaatatattctccgcttaccatttaggtttt

SEQ ID NO: 11168 - DNA, 299 bp, Gossypium hirsutum
  Clone ID: LIB3120-013-Q1-K1-F7
ctaaggcctgcccatctaatgtgcttttcattttttctgatgaagcggaactggaccgtaatgtggctaacatggtgccaccatatgaccacattaaatatgccggcattggatctgctattgaatatgcagttttgcatctcaaggcacaagaaattgtggtgattgtacacagggccatgggtggaaacaaggggcttatgtctttgccatttgatggaaacaactcaactgatttcatacaggattgggttaagattggaatcccagctaagaccaaagtgctagctgaacatggt

SEQ ID NO: 11169 - DNA, 270 bp, Gossypium hirsutum
  Clone ID: LIB3135-021-Q1-K1-E10
tatagcccacacctgctttaactatatccattactatcgtactctatttgtgaggtttgcgaaatgattcatctgacccgccccaaaactgttcctgccattaagagaatatataaatagatgggtgtgcatgagaatcttagaagaaaagcttgacgattactatagaaagatacgacattattacatgatttgcctaataagctatcctatttttcatgtttaaaactgtcatatctatgggtgttgaaagattgtctaaaaataaaa

SEQ ID NO: 11170 - DNA, 309 bp, Gossypium hirsutum
  Clone ID: LIB3145-054-Q1-K1-C10
gttcggatcgcggcgacgtgggcggttcgctgcccgcgacgtcgcgagaagtccactgaaccttatcatttagaggaaacggagtgcttgcatcaaagttctgtacaatatgggcattccatattttaccctcaaattagaatcttagtatccattgcacgttaaactgttcaattgaagctatgtttgctattttgttttatattctcaaacatttaatctaaagggtgatgaaatagttagttcgatccattgttaattgaactataattaactaaaccgttagttaaattgagctttttttctgtt

SEQ ID NO: 11171 - DNA, 334 bp, Gossypium hirsutum
  unsure (1)..(334): unsure at all n locations
  Clone ID: LIB3829-018-Q6-K6-B10
tcgctccnagtggagagtttctgagagttgtggtgattaaggagatcaaaggttcccaatatggagtgcagctagagagtgctgtgagggaccgattggcagctgacgacaaatacgaagaggaagaggaagaagccttggaaaaagttgttgaattcttccagtctaaatatttcaagaaggattgagtcatcacttaccattttccagcaaattcagccactgctgaggtatattttgagtccataagaaaaaccattcattcattcatgttttaatatgatagtttttgtgtatgtgtggatgtgctcaaacagattgcctttcctactgt

SEQ ID NO: 11172 - DNA, 176 bp, Gossypium hirsutum
  Clone ID: LIB3196-042-P1-M1-H5
gcgacgtgggcggttcgctgcccgcgacgtcgcgagaagtccactgaaccttatcatttaagggaaaagaaagtcaatattttttactaaatccctgtaaattcgccaaaaagacttaaaaatccataattcgttgtcttcccgtaatggattttagtcagcctcctgttgaaaat

SEQ ID NO: 11173 - DNA, 1020 bp, Gossypium hirsutum
  Clone ID: GOSHI-09MAY01-C14_2
cggccgcctcgcttctctcaaataattattgcatccgtcctttcccttcaaacaaaacacccccccctacatatatgcatatcccaaagttgttctcttaatcggaattatcatgggacgatcaccctgttgtgaaaaggcacataccaataaaggtgcctggaccaaagaggaagaccaacgcctcattgactacatccgtctccgcggtgaaggttgctggcgttccctccccaaagctgctggactgcttaggtgtggtaagagttgcaggttaagatggataaactacttgaggcctgatcttaagagaggaaatttcagtgaagctgaggatgaacttatcattaaactccacagtttacttggaaacaaatggtctttaatagctgcgagattaccgggaagaactgacaacgagatcaagaactactggaacacgcacatcaaaaggaagcttataagcagaggaatcgatccacaaactcatggtccactcaatcaacccaccaacaccaataaatccactgaattggatttcaggaacgtacctaaagcttcaaaatccaactttgctccaaacccatctcgggatttcaatttcaatgaatttcaagttaaggccaaagcagaatccattgaagaaggaaactctagcagcagtggaatgactactgatgtagtaacaacaacaacatcatcatctggaggacaagtttgcaggttatagtcaagagttagatttggagctatcaattgcgattagttcatccggaaagtactacaactcaaccggggtttcaactgctaactcagcccaatccaaaccgccgttagacaaaagcaatttccagttcctgggactggctatggcggctaaagcagtctgtttgtgttggcagttagggttcggaacaaatgaaatttgcaggaactgtcaaaagtacaaatgggtttaatacatattgttgaccttgggattcatatagtgctcaatatgattctatttttcttgttttg

SEQ ID NO: 11174 - DNA, 1081 bp, Gossypium hirsutum
  Clone ID: GOSHI-09MAY01-C14_1
cgtggggttgttcctctcctgcggtcgggccggtaacaccgttattctttctctattctacctgatttgatttgatttgattttgtaactgatgggacgatcaccttgttgtgaaaaggctcataccaacaaaggtgcctggaccaaagaggaagatcaacgcctcatcaactacatccgtgtccatggtgaaggctgctggcgttccctccccaaagctgctgggctgcttagatgtggtaagagttgcagattaagatggataaactacttgaggcctgatcttaagagaggaaatttcactgaagaagaagatgagcttatcatcaagcttcacagtttacttggaaacaaatggtcattgattgctggaagattaccaggaagaacagataatgagataaagaactactggaacacacacatcaaaagaaagcttataagcagaggaattgatccacaaactcatcgtcctctcaatcaaaccgccaataccaacacagtcacagcccccaccgaattgggtttcagaaactcgcccacatccgtttccaaatccagttccctcttaaacccctccctggatttcaattacaatgaatttcaattcaagtccaacacagattcccttgaagaacccaactgtacagccagcagtggcatgactacagatgaagagcaacaagaacagctgcacaagcagcagcaatacggtccgagcaatgggcaagacttaaatttggagctgtcgattgggattgtttcagctgactcatctcgggtatcaagtgccaactcggccgagtcgaaaccaaaggtagataacaacaatttccagtttcttgaacaagctatggtggctaaggcggtatgtttgtgttggcaattaggttttggaacaagtgaaatttgtaggaactgtcaaaattcaaattcaaatggcttctatagttattgtagacccttggattcatagggtcatctttttcttctttctttctgtttttaggagataaattaatgcttaattattatctttttgcctgcccactgtaatcaaagcaaaattataaaacaaact

SEQ ID NO: 11175 - DNA, 413 bp, Gossypium hirsutum
  Clone ID: GOSHI-09MAY01-C34_3
gtttgtgaggaaagtaatgaatttgttttttctaagttcaagttgattctaagagtttctagttagtgcattaaaatatgaagttgaagatatgtcatgccagccagtattgctggtgaagttcttcagttggttctatatgatttggggagggctagccccatgtcaaagcataagcaaaagcaacagatacgtgaaatgataaaatcaagaggttgaataacggttatattatatgacaggtccaattctccttgaagactatcatttggtggagaagctagctaatttcgatagagaacgcatacctgaacgtgttgttcatgctagaggagccagtgcgaaagggttcttcgaggtcactcatgatatatcccagctcacatgtgctgatttccttcgtgcccctggag

SEQ ID NO: 11176 - DNA, 1783 bp, Gossypium hirsutum
  Clone ID: GOSHI-09MAY01-C34_1
acgcgtcgagagctcccttcatacgttactaaattatcttctttctcttctcttaccatggatccttacaagtttcgtccttcaagttcctttgattccccgttctggaccaccaattctggtgctccagtttggaacaataactcatcacttactgtgggagcaagaggtccaattctccttgaagactatcatttggtggagaagctagctaatttcgacagagaacgcatacctgaacgtgttgttcatgctagaggagccagtgcgaaagggttctttgaggtcactcatgatatatctcagctcacatgtgctgatttccttcgtgcccctggagtgcagaccccgctcattgttagattctccacggttattcatgaacgtggtagtcctgaaactttgagagacccccgaggtttcgctgtgaaattttacactcgagagggaaattttgatctcgtggggaacaatttccctgtgtttttcatccgtgacggaatgaagttccctgatatggtccatgctcttaaaccaaacccgaagtcccacattcaggaaaactggaggattctggacttcttttcgcaccatcccgaaagcttgcacatgttcaccttcctgtttgatgacatcggtgttccacaggattataggcacatggatggctctggtgttcatacctacacactaatcaacaaggctgggaagtcacactatgtgaaattccattggaaacccacttgtggtgtaaaatctttgttggaggatgaagccataagagtaggtggtgcgaatcacagtcatgccacacaagatctttatgactcgattgcagccggaaactaccctgaatggaaactgttcattcaaataatggatcctcttcatgaggataggtttgattttgacccacttgatgtaaccaagacatggccagaggacatcttcccgttgcagccaatgggtcgaatggtgttaaacaagaacatcgatttcttctttgctgagaacgagcaattagcctgctgcccttccctcattgtccctggcatctattattcagatgataagttgcttcaaactagaatcttctcctattctgacactcaaaggcaccgtcttggaccaaattatctgcagcttccagctaatgctcccaaatgtgctcatcacaataatcaccatgaaggttttatgaattttatgcatagagatgaggaggtgaactacttcccttcgaggtacgatcctgttcgccacgctgagaagcaccctattcctagcaccgttttgagcggcaaaagagagaagtgcattattgggaaggagaacaactttaagcagcctggggaacgataccggtccttttcagctgacaggcaagaacggtttattaatcgctggattgatgccttgtctgatccaagggtcacacacgagatccgcagcatttggatctcatactggtctcaggctgacaaatctttgggtcaaaagattgcttctcgcctcaatgttagaccaagcatttgatcgatgatattgatggaatcccagctctttcagatggagaaaagtgcttccttgcgcggttgtgccgatatactagttatattgtccccaatacttgcattctgcaatcaaataagatcatgtactataccaattctatgactcaaaacgtctgtaacaagatgtgttactattttgttttatgtgtacgttttgaaatattcaattcctctactttttaatgccaacttctctctagttcttctgt

SEQ ID NO: 11177 - DNA, 490 bp, Gossypium hirsutum
  unsure (1)..(490): unsure at all n locations
  Clone ID: LIB3165-037-P1-K1-A2
taccggtaacggaacgggccggagccacgcgatgcgacaatagaatcaccatgaagggttttatgtttttttatgcatnagagatganggaggtggagctagcgttctccttcgaggtacccgatcctcgttcgccacgccctgagaagcancccnntattcctagcaccgtttaccagtggcaaaaggaagagaagtgcattatcggtaagggagaaccaactttaagcnagcctggggaaccgatancccggtccttttcaagctgacccaggcaagaaccggtttatnntaatcgctggattggatnngcattgtctgatcccaagggtcancacacgaagatccgcagcatttnggatctcatacntggtctcaaggctgacanaatctttgggtcaaaaagattgcttctcgcctcaatgttagaccaagcatttgatcgatgatattgatggaatcccaactttttcagatggagaaaagtgct

SEQ ID NO: 11178 - DNA, 255 bp, Gossypium hirsutum
  Clone ID: LIB3120-054-P1-K1-B9
taccggcggaataccgcccggtcggcggacgcgtcaggccacgcgtccgcccacgcgtgcgctttctcttctcttaccatggatccttacaaggttcgggcttctagttcctttgattccccgttctggactaccaattctggtgctccagtttggaacaataactcatcacttactgtgggagcaagaggtccaattctccttgaagactatcatttggtggaaaagctagctaatttcgacagaaaacgcata

SEQ ID NO: 11179 - DNA, 753 bp, Gossypium hirsutum
  Clone ID: GOSHI-09MAY01-C24_2
ctttcactactttttctaaaggcattatatttgttgatatgtactttgagaatttttgaaatggatgatgtgtttaggtggaccaaatgaaacaagaaccctttaatgagaaagagatggcgagggaaaggaaagaagagagacaagaagatgcagagctgaggaaacaagaggcccgccatcataacgccacggctggccatgctggtggtggtggtattggtggtactggctacaccacagctgggtacaacagaggggatactggtggctatggcggtaccggtggacatgacaaccgtgggtaccccaccgcaggtagtgggtatgatacaggcaggcaagatgacctcagcagtatggggtttggcggagatacagggggtgcttacggtacaacgggaaaccaagacttcccaagtgcggcgcctaacaatgctgggactagaaggagcacccgcggaggtacccaggatgatccttattatcgatcctattaaatgaaaggagcgactttttgtgctctgctactgccttgagtctgtgtttgttgtttgtttgcttctacttttttctttttcaagttcgtactgttgtaccatataaagaaaagtttggtcctgttgtaatgttcagtgttagccagggcagttctataaatcaataaaagttgggaataattagagaacctttttatattccaagaagggcggcccgcccttttttttttttttttttttttttttttttggt

SEQ ID NO: 11180 - DNA, 882 bp, Gossypium hirsutum
  Clone ID: GOSHI-09MAY01-C24_1
cccacgcctccgagcaaatataccctgaaaaccctttcactaaatattgaagatgcagtcaatgaaggatgctgctgcctctgctaaggccggcatggagaaggccaaggcctccatgcaggaaaaggtggaccaaatgaagacaagagaccctaatgagaaagagatggcgagggaaaggaaagaagagagacaagaagatgcagagctgaggaaacaagaggcccgccatcataacgccacagctggccatgctggtggtggtggtattggtggcactggctacaccacagctgggtacaacataggcgacactggtggctatggcggtaccggtggacatgacaaccgtgggtaccccaccgcaggtagtgggtatgatacaggcaggcaagatgacctcagcagtatggggtttggcggagatacagagggtgcttacggtacaacggggaaccaagacttcccaaatgcggcgtctaacaatgctgggactagaaggaacacccgcggaggtacccaggatgatccttattatcgatcctattaaatgaaaggagcgagtttttgtgctctgctactgccttgagtctgtgtttgttgtttgtttgcttctacttttttctttttcaagatcgtactgttgtaccatataaaaagaagtttggtcctgttgtaatgttatagggttagccagggcagttctataaatcaataaaagttgggaataattagagaaaaataaagaaatgtgatcatcagttaaaaacctttttatattcaagacatctgtggagaaaagcacgagacacatatctcgcgactaataccttttactttgttgcgttacaattttttaatatcaataatgatatttgtatc

SEQ ID NO: 11181 - DNA, 707 bp, Gossypium hirsutum
  Clone ID: GOSHI-09MAY01-C994_2
accacgcgtccgcccacgcgtccgaaaatttgaaacaatagaaattggactcgggggtgaaacaaatctgatttgtattgtttggtgttagtgaatagagataattgtttcagatctatcggtcgatcgaatatcttagcagaggagacggaagaaaatggctggaagcccagatcacttgttcaatttgaggaacaatttctatttgggttcgtaccaggctgccatcaacaacagcgatctgcccaatctctcccccgacgacgccgtcgagcgcgactgtcttgtctatcactcttacatcgccctcggcagctaccaactggtgatcaatgagatcgattcctctgctgccactcctctacaagccgttaaattgctcgctctctatctctccaaccctcatgataaggaatccacgatttctagcttgaaggaatggttggcagatccagctattgggaataatcccatcttaaggttgattgctggaatcattttcacgcacgaagaagattataacgaggctcttaaacacaccaatgctggtggcaccatggaactgcatgcactgaatgtgcaaatattcattaagatgcatccgtcggactatgcagagagacagctgaggtcatgcagcagattgatgaggatcatacgttgacacaactagcaaatgcatggttgaaacctgcagtgggtggttc

SEQ ID NO: 11182 - DNA, 1246 bp, Gossypium hirsutum
  Clone ID: GOSHI-09MAY01-C994_1
gaggggtcagcagattgaagactgaatggaaaaaagcatttgtaattgtaattgtaaattgtttcgagatctctgtgtgtatagacagtctcaaatggcagcagctgcagcaccagatcacttgttccatttgaggaacaatttctacttgggttcctttcaggctgccatcaacaacagcgatcttcccaacctctcgcccgacgacgccgttgagcgcgactgcctcgtctaccgctcttacatcgctctcggcagctaccaactggtgatcaatgagatcgactccgccgctaccactcctctccaagccgttaaactgctggccctctatctctccaaccctcatgataaggaatcaacaattgcgagcttgaaagaatggttagcagatccagcgattggaagcaatgccatattaaggttgattgctggaatcgttttcatgcatgaagaagattatattgaagctcttaaacacaccaatgctggtggcaccatggaacttcatgcattgaatgtgcaaattttcattaagacgcaccggtcagattatgcagagagacaactgagggtcatgcagcagattgatgaggaccatacactgactcaacttgcaaatgcatggttgaatctagcagtgggtggttccaagatacaggaagcttatctgatcttccaagatttctctgagaaatatccaatgactggtttgatcctaaatgggaaggctgtctgctgtatgcacatgggaaactttgacaaggctgaaacactgttacttgaagcacttaataaggatgcaaaggatcctgaaactctggccaacctggttgtatgcggccttcacctcggtaaatcatcttcacgttatctaagccaattgaaactcacacatccagagcacattcttgttaaacgtgcatcatctgcggaagacagctttgaaagagcagtgcaatcagttgcttgaagaagtggagttagttttgttttattctacaactgctctgactgctattctttgccctacgtgagtctatgatcaattatgagattgttggcaaatttagtgcttgctcggcaaaatagaagggtacttggaaacatttggattctatgcgtttttttttggctgtttgtactgttcttaaaaaacacttgaaattcatcatcgtttatatcactccgctattgtttgtactgtagaaagaaaacttttttaagttcatggaaattttgggtc

SEQ ID NO: 11183 - DNA, 552 bp, Gossypium hirsutum
  unsure (1)..(552): unsure at all n locations
  Clone ID: LIB3543-012-Q1-K6-E1
gaaaaacgaggagtaagaanattgaagtctgaaaaagaaaaaagctttgtaattgtaattgtttcgagatctctgtgtgtatagacagtctcaaatggcagtagctgcagcaccagatcacttgttccatttgaggaacaatttctacttgggttcctttcaggctgccatcaacaacagcgatcttcccaacctctcccccgacgacgccgtcgagcgcgactgcctcgtctaccgctcttacatcgctctcggcagctaccaactggtgatcaatgagatcgactccgccgctgcaactcctctccaagccgttaaactgctggccctctatctctccaaccctcatgataaggaatcaacaattgcgagcttgaaagaatggttagcagatccagcgattggaagcaatgccttattaaggttgattgctggaatcgttttcatgcatgaagaagattatattgaagctcttaaacacaccaatgctggtggcaccatggnaacttcatgcattgaatgtgcaaatcttcattaagatgcaccggtcag

SEQ ID NO: 11184 - DNA, 281 bp, Gossypium hirsutum
  Clone ID: LIB3166-040-P1-K1-A9
tcccactcgtccggacagagttttttctgaaggagtcaagacagagttgaaggggtgaaaaaggaaaaaagcatttgtaattgtaattgtttcgagatctctgtgtgtatagacagtctcaaatggcagttgctgcagcaccagatcacttgttccatttgtggaacaatttctacttgggttcctttcatgctgccatcaacaacatctttctttccatcctcttcctctactacgccttttagctcgtctgtcttctttttccgtttttacattatttc

SEQ ID NO: 11185 - DNA, 1044 bp, Gossypium hirsutum
  Clone ID: GOSHI-09MAY01-C944_2
gtcacacccgaaagcgcaaaaaaaaaaaaaaaaaagaaaagaggaaaaacgttctctcccacgaaacccaccattactgcaaatggcgacgacggcccccgacaacctgagccgcgatcagtacgtttacttagcgaagctatccgagcaagctgagcgctatgaggagatggttcagttcatgcaaaaactggtcctcggctcaaccccagccgctgaattaactgtcgaggaaaggaaccttctctccgtcgcctacaaaaacgtcatcggatctctacgtgccgcgtggagaatcgtttcttccatcgagcagaaagaagaaggtcgaaagaacgaggaacatgttgtgctggttaaggagtacaaatccaagattgaatccgaattgtcggaagtttgcgctagtatcttgactttattggagtcgaatctgatcccctctgctactgctagtgagtccaaggttttctatttgaagatgaaaggagattatcatcgctatttaccggagtttaaggttggtgatgagaggaaagctgctgctgaggatactatgttgtcttacaaggctgctcaggatattgcactggcggatctagcaccgacgcacccgatcagattggggcttgcactgaatttctcggtgttctactatgagattctcaatcagtccgacaaggcttgtagcatggctaaacaggcgtttgaggaacccattgctgagcttgacacgctgggagaagagtcttacaaggacagcactctcattatgcaactcctaagggataaccttactctctggacttcggatgttcaggaccagttagacgagccatagaaggtggtgttacccgtgttggtcctagtcttcttccggaggaggtgggctttgaatgtcatttgcttatgttgattaaagtgtgtaatttaaaatcggaagtaatccatggcatgatgctatactctactcccgactagatttctgaatttggaagtgacttggataggtggcatttccaattagttagttatatttactgc

SEQ ID NO: 11186 - DNA, 1153 bp, Gossypium hirsutum
  Clone ID: GOSHI-09MAY01-C944_1
cggacgcgtggggacgtgattaccagtttgccctccacatccctttcattaaaaaaaaccctgttcaatttaggcgcccacctcacgcggcccaccacccggaaaaaaaatattcctctctttctaaccttcggaagctcaccaatttctgcaaaaatggcgacgatggtgcctgacaacctaagccgtgaccagtacgtttatttagccaagttagcggaacaagccgaacgctacgaggagatggttcaattcatgcaaaagctcgtcctcggctctactcctgcttccgagctcaccgtcgaggaacggaaccttctctcggtcgcttacaaaaacgtaatcggatctctacgcgccgcgtggaggatcgtttcttctatcgagcagaaagaagaaggtcggaagaacgaggaacatgtggtgctcgtcaaggagtatagatcgaaggttgaatccgagttgtcggatgtttgcgctagtatcttgactttgttggactcgaatctgatcccatctgctgctgcgagtgagtcgaaggttttctatttgaagatgaaaggggattatcatcggtatttagcagagtttaaggttggtgatgagaggaaagctgctgctgaggatactatgctgtcttacaaggctgctcaggatatcgcactgacggatctagcaccaacgcacccgatcaggctgggacttgcgctgaattactcggtgttctactatgagattctgaatcagtccgataaggcttgtagcatggctaaacaggcatttgaggaagccattgctgagcttgacacgctgggagaagagtcttacaaggacagcactctcattatgcaactcctaagggataaccttactctctggacttcggatgtgcaggaccagttacacgagccgtagaaggtgtgttatagcggtgttggtcctattcttcatctgaaggaggtgggctttgaatgtcatttgattctctgattacagtgtgtaatttaaaaaaatgggaagcaacccatggcaatgatgttatattctgtactgaacttgtttttggaatatggaagtgattttattagagtggcattttccaattagttagttatatttactgcacagtagtaattccatgatagttttgttt

SEQ ID NO: 11187 - DNA, 505 bp, Gossypium hirsutum
  Clone ID: LIB3584-061-P1-K1-A9
cacatcagaggcagaaacgaccggctgagaaatgaaattgggatgctgaccaatcattactgcatgggggtgctgctgtaaacggcaacctgagccgtgatcagtacgtttacttagcgaagctatccgagcaagctgagcgctatgaggagatgcttcagttcatgcaaaagctggtcctcggctcaaccccagccgctgaattaaccgtcgaggaaaggaaccttctctccgtcgcctacaaaaacgtcatcggatctctacgtgccgcgtggagaatcgtttcttccatcgagcagaaagaagaaggtcgaaagaacgaggaacatgttgtgctggttaaggagtacagatccaagattgaatccgagttgtcggaagtttgcgctagtatcttgactttattggagtcgaatctgatcctctctgctactgctagtgagtccaaggttttctatttgaagatgaaaggagattatcatcgctatttagcggaatttaaggt

SEQ ID NO: 11188 - DNA, 435 bp, Gossypium hirsutum
  unsure (1)..(435): unsure at all n locations
  Clone ID: uC-gsronu33b023e04b1
tttacgcgtccgnccacgcgtccgcggtggggggtatgagattctgaatcaggccgataaggcttgtagcatggctaaacaggcatttgaggaagccattgctgagcttgacacgctgggagaagagtcttacaaggacagcactctcattatgcaactcctaagggataaccttactctctggacttcggatgttcaggaccagttagacgagccatagaaggtggtgtaacccgtgttggtcctagtcttcttccggaggaggtgggctttgaatgtcatttgtttatgttgattaaagtgtgtaatttaaaatgggaagtaatccatggcatgatgctatacttctacccccgactagatttatgaatttggaagcgacttggataggggggactggaataactcggccttggaatttggaattcttggatg

SEQ ID NO: 11189 - DNA, 431 bp, Gossypium hirsutum
  Clone ID: LIB3585-003-P1-K1-F4
cggacgcgtggggacgtgataccagttggccttcaccttcctttcatttaaaaaaacccttcttcatttaaggcccccccaggaaaaggaaaccaccccggaaaaaaaattttcctctttttctacccttcggaagctcaccaatttctgcaaaaatggcgacgatggtgcctgacaacctaagccgtgaccagtacgtttatttagccaagttagcggaacaagccgaacgctacgaggagatggttcaattcatgcaaaagctcgtcctcggctctactcctgcttccgagctcaccgtcgaggaacggaaccttctctcggtcgcttacaaaaacgtaatcggatctctacgcgccgcgtggaggatcgtttcttctatcgagcagaaagaagaaggtcggaagaacgaggaacatggtgtgctcgtc

SEQ ID NO: 11190 - DNA, 859 bp, Gossypium hirsutum
  Clone ID: GOSHI-09MAY01-C904_1
aaagaaaagaccgaagagttattgaaagagaaagatgaaatgttgaagatgaaggatgaagagattgaaaataaaggtaaagagcaagagaagttgcaaatggagctgaagaaattgcagaaaatgaaggaattcaagcctaatatgaaattcgcaatttcgatgaacaaaggaggaggatttgaaaagaaaaggccatctccaccgtacattttgtggtgcaaagatcaatggaaagagataaagaaagagaatcccgaggctgatttcaaagaagtttcgaatattttgggtgcgaaatggaagacgatcacggccgaagaaaagaagccttacgaagaggtatatcgagccgaaaaggaagtgtatttacaggcgattgcgaaagagaaacgcgagacggaagccatgaaactctttgaagatgagcataaacaaaagacagcaatggagttactggaacaatacttgcagttcaaggaagaagctgagaaagaaaccaagaaaaaaaccaagaaagaaagggatcccttaaagcctaagcaacccatgtcggctttcttttttgttctccaacgagaggagggcggctttactcgccgatacccggagcatgaacgttttggaagcggcgaaaatcgcgggcgaagaatggaagaacatgactgcagaacaaaaaaagccttatgaagagatagcaaagaagaacaaggaaaaatacatggaagaaatggaggtttacaagcagaaaatggaagaagaagctttgaatgttaaaaaacatgaagaagagatgttgaaactactgatacaagaagcactttaattgctttaaaagaaagagaaaactgatcatatt

SEQ ID NO: 11191 - DNA, 700 bp, Gossypium hirsutum
  Clone ID: GOSHI-09MAY01-C894_1
ggactactcttttttgagggaatggcgacagtagagaacaggcaagtggtgcttgaaaggtacataaaaggagtacccaaggtaacagatatggcaatgaagattgggaaaaaagagttgaaggctcccaaaggctcgggggcttttctagtcaagaatctctatctctcttgtgatccttacatgagaggtcgcatgcgtgattttcatggttcttatatcccaacttttgttccttctcagcctattgaaggatttggagtgggaaaagtgttggattctgataaccctgatttcaaaccaggagacttcatttccggaatcactggatgggaagagtacagcttgattcacaacacttcacagttgagaaagattcaaccagatgatgctatccctctctcttaccacttgggacttcttggtatgccagggtttactgcttatgtaggattttatgaaatctgtagcccaaagaaaggagaatatgtttttgtatctgcagcttcaggagctgttggtcagcttgttggacaacttgccaagttacatggctgctatgcagttggaagtgctggaagtaggcaaaaggttgatcttcttaagaacaagcttgggtttgatgaagcctttaactacaaagaggaggcagacctagacgctgctttgaaaaggtacttcccaaaggcatcgatctttg

SEQ ID NO: 11192 - DNA, 728 bp, Gossypium hirsutum
  Clone ID: GOSHI-09MAY01-C844_1
ccaacgccgtccgcccacgcggtccgccattgtacgacaaaagcttcagaattgcaaatggagattctttctcaacgaccatcttctttctcaactttgaatcccaacgctccattgtttgttccgttagcgtatcggacggtggaggatttctctgatgagtggtgggctctcgtccaatcctccccgtgtttccgcgactactggcttcaagaacgtttccacgatccccaaaacgacgacgccgatcttctttttcccgacgatcttgatgccgtctttgacgattacgacgactttttcgttgaccctacctgtgaagggaaggaagaagatactcaaaaggaattggtacccgttggagcattcaaatggcggaaggggcgagttgtgagcgagtcacctaggtttcttgagaaagcgcccaagatcgtgaatgtgaaagtgagtccgaggaatattcaccaaccaaggtagatcgattcctgcagatttgaaatgggaggtctccttagagccgaaaaccgtcagctttaggttttatctgctgctacctgtaacttgcttttctttttctttttcttttttgaatttgtaaaattattgtgtacagagttttaggtctgtaatctgtaactttgtttcagtaatactagaattacctcccatatcccacaaaaaaaaaaaaaataaaaaaaaaaaaaaataaaataaaaaatattatcaac

SEQ ID NO: 11193 - DNA, 333 bp, Gossypium hirsutum
  Clone ID: LIB3145-053-Q1-K1-D5
acgaccatctcgtctctcaagtttcaatcccagcactgcataaaatgatgcttaagcatgccatgcagcccaggcaaagagaggtgtacgcactttaaaacaccctatcgaacatgggattgctagactacgggatgaaagaacgtttccacgatccccaaaacgacgacgccgatcttcttttccccgacgatcttgatgccgtctttgacgattacgacgactttttcgttgaccctacccgtgaagggaatgaagaagatactcaataggaattattacccgttggagcattcaaatggccgaaggggcgagttgtgagtgagccaccta

SEQ ID NO: 11194 - DNA, 259 bp, Gossypium hirsutum
  Clone ID: LIB3148-039-Q1-K1-C3
agcaagggaacggcaatgggaggtgacgtaaacacgaacgagagaacgacatcaaccatctatttggatatgtaccaattgatgacgcttttgacgattacgacaacattaacactgaccctacctagtgggggaaggaagaagatactcaaaaagaattggtacccgttggagcattcaaatggcggaaggggcgagttgtgagcgagtcaactaggtttcttgagaaagcgcccaagatcgtgaatgtgaaagtgag

SEQ ID NO: 11195 - DNA, 607 bp, Gossypium hirsutum
  Clone ID: GOSHI-09MAY01-C874_1
tccacgcgtccgatcttttcctatcttattggtttctttctctttcaaaactcagtccgcagcaagctaaggattccttagaataataagaccatgaagagagaagagatagctgggggtgacattggtttttacacttactttgcatgcagcatttagcctctcagatagaatcaagatttcttaatctagtacctatagcaacatagaagtcgagaaccaagatacaccaatgcaagcatcccagcaacatagaagttcagtcatggccagcagattgtttcctcgagtaaaggaagaagtcgagccttgcagcttccctcaattcccagctattgatcgctctttctgctataccgacagcagccacggatcccatttctcagtcaagaattcccatgagccttattgcaccttggagtcatcttctgcacgtggcagttatacggtctacaattcttcatcaaatggaagcccaatgtcacagcaggaatcacagtctaatatgtctgacctgcatcactctcccgataatacctatagctctcccattagcggttcctgcataactgacgatgtaagtgatctgaaggtagctgagagagct

SEQ ID NO: 11196 - DNA, 863 bp, Gossypium hirsutum
  Clone ID: GOSHI-09MAY01-C864_3
ccgcccacgccgtccggccactgtgtaactcatcttttggaccgaattggatccatttggtcggcggaggcgtggtatgttgactcccggtcgtgcgttgctttgaacgattattgatgatatcacttaagtgctttcaaccagcttattagacccataaacttctggggttcaagtattacccagcagttattttgcaccagcataccacctttaaagaagagcccaaagggaatgaaataatagttgatattcaaatcatgtgcctggatgggtatttttgcaccctcagaaccctgccttctacaatggcacaagcaaatgctgcaccctgataagcttttaccgagaccatttgaggattggaatttgggaactctcgatgcggagtcaccaatcgttgacgctccggatttatttgatacccgagatgacccgaaggcaaaattcctatcaaaggaaggcagattgtgaagttgatccagaaatgagagatgtccaggtgagtttgatgccagtagagccggtagagaaatgtgcaaaggcaatagttgaaagcgccaggcgtggggacagatacttgacggtgccgtcgtggatggagactcaccatactttggaaggtcttttgccctgagattatggatgggtggatccggttcatgatattagggcctggatcttcttacagggattcacctagcaagaagatactcgacgtagttaatgaaatcaagcagcttcttctcccttgatgtcgaatatataaagaacttaatttaaatagaagtttctgtttttccataagttaaatcatacaatctatacatttgaaatcaattagcagctgtctttgttcttct

SEQ ID NO: 11197 - DNA, 905 bp, Gossypium hirsutum
  Clone ID: GOSHI-09MAY01-C864_2
gacatatcttgtgctattgtgcttgccataatttttgacaggagttatagggagagaaagaacaccggttgtgctttcgctttgtttcggttgttcggtttcttcccaacaatctccactgtcagaaccttattcaaagaaaatttgaccggaaaagttgtgcttattaccggagcatcttccggcattggcgagcatttggcatatgagtatgcaaggagaggagctcgattagcactcgttgcacggagaaatcaacgtctgcaagaagtagcggatgtgtgtgagataattgggtcacctgaaactgttcacatacttggagatgtctctaacaatgatgactgtaagcggcttattgatgccactgtgaaccactttggacaatgtaagaagcactgtaccacctcatgatgtaacatggaggcccttatttgcttctttactcaaaaaagccaaattagtccctattaaactgatcgttcatctactcaaacaacaaaaatactcctattaaattttaatttctggtcataagttcttaaattataggaggcgtattgtattttatgaggtaaattagttaatttctttattttagatgaaaaaagtaaacggatgattttattaaaaattttatttatttttactggtcaaatatttttgcatatcattatcaattgtatcagtttttaacaatataaatagaagaatttttagaaaaaaaggattaggattaatttattatttttttagtacactcttagtacaaaggtttctatgatacttttattttgtaagtaattatctattattttgtcattcattaacggtaaaaatgaatactattttaaattttttatcaaatatataagaattaatttatctttttaataaaataaaaa

SEQ ID NO: 11198 - DNA, 1166 bp, Gossypium hirsutum
  Clone ID: GOSHI-09MAY01-C864_1
gaagaacctggatttggccgataagttgatgaatgttatcgttattactatttcccttcttgcactcttcttccttcaccaatatcgttttctcaactcccttatctccactgccagaaccttattcaaagaaaattgaccggaaagttgtgcttattaccggagcatcttccggcattggcgagcatttggcatatgagtatgcaaggagaggagctcgattagcactcgttgcaaggagaaagcgacgtctgcaagaagtagcggatgtgtgtgagataattgggtcacctgaaagtgtttacatacttggagatgtctctaacattgatgactgtaagcggtttattgatgccactgtgaaccactttggacaattggatcatttggtcgccaatgctggagttgcgccggtctgcttgtttgaagattatgaggatgtcacttagtttaggcactaaatattaaccttatctcaggacataaacttctggggttcagtatacagcagttattttgcacagcaacacctaaagaagagcaaagggaagataatagtgatatcatcatgtgctggatgggtatttgcacccagaactgccttctacaatgcaagcaaagctgcactgataagcttttacgagacattgaggattgaatttgggactcaaatcggagtcacaatcgtgacgcccggatttattgataccgagatgaccgaaggcaaattcctatcaaaggaaggcagattggaagttgatcgagaaatgagagatgtccaagtgagtttgatgccagtagagtcggtagagaaatgtgcaaaggcaatagttgaaagcgccaggcgtggggacagatgcttgacggtgccgtcgtggatggagaccaccatactttggaaggtcttttgccctgagattatggatgggtggaaccggttcatgatattagggcctggatcttcttacagggattcacctagcaagaagatactccatgtagttaatgaaatcaagcagcttcttctcccttgatgccgaaccccatgcccaaaaaaactgtgtaatatataaagaacttaatttaaatagaagtctctgtctttccattagttaaatcatacaaactatacatttgcaatcaaaaaaaaaaaaaaaagggcggcc

SEQ ID NO: 11199 - DNA, 1756 bp, Gossypium hirsutum
  Clone ID: GOSHI-09MAY01-C804_3
cccagcgtccgccccgcgccggcccgtcgcccgctctctctcgcgcggagaagctaagctgagaaaagatgcaggcgattacgaggcgattagggcaccaatctctgaggccaactgcttcaatctcttctatcaagtctatttgcgctctctccgatcactactatggaggtgatcatccgcgatacggatctacactggcttcccacaagggcatgggccacctcgttcgcaagggcaccggtggccgatcttccgtcagtggcattattgctactgttttcggcgctactggattccttggtcgttatcttgtgcaacaactggctaaaatgggatctcaggtgttagttcccttcagaggttccgaggataaccctcgtcatctcaagttgatgggagatttaggacagatagtgccaatgaaatacgatccaagggatgaaaattcaatcaaggctgtgatggcaaaggctaatgttgttatcaatctcattggaagagagtatgagacaagaaactttagctttgaggaagtgaaccatttcatggcagaacaactggcagtgattgccaaagaacatggtggtatcatgagatttattcaagtttcttgcttagggtcttctctgacatctccatcaagatttctaagagctaaggctgctggagaagaagctgttttgaaagaacttcctgaggctactgtcatgaaacctgctgtaatgattggtactgaggatcgtattatgaatcgatgggcacattttgcaaagaaatatagttttctcccactcattggtggtggatctaccaaaatccagccagtatatgttgttgatgttgcttctgcaatagttgcggccttgaaagatgatggaagcagcatgggaaacgtttatgaattgggtggaccagagatctataccgtgcatgaactggctgagcttatgtatgagacggtccgtgaatggccacgctatgtaaacgtacctttaccggttgcaaaggcaattgccatgcctagagaggtattactcaagaaagtgccattcccactaccaaatcccgacatcttcaatctggatcagatacatgcatttgcaaccgacactgttgtctcagaaaatgcgttaacttttatggatttgggtattgtgccccataagttgaagggttacccagtcgagtatcttattcaataccgtaagggcggtccacaatttggttctacagtcagtgaaaaagttaacccagattcttatccttaattttatttggatctcatttcccgatgtgttttcctttttacctttttcttggtcctaaaaacgcctccgatgttgaaaagcctattctggtatgtgatgctatcaatttcttaaagacaagaatgaccaaaagagtgcatagttgtagtttcccttttccaaaaacgaagaatgtgagtttgctgagtagcaaagatttaataaaagttgagatacttggttaatcactatgtaaaacatctgcaactcttgggacttaactagttagtggcatcataggttattctttttacaggaaggggggcttttttgcgttggctgaaactaggaatgaataataaggggaagcaccctttagttatttcatgtgattatatatttgtgagaaaatatttaatctcatttgtaatttttcttgtttttaaagatcatctttgggaggttatctcctgttaaaaataaaccattttatttgtttcttcctc

SEQ ID NO: 11200 - DNA, 1191 bp, Gossypium hirsutum
  Clone ID: GOSHI-09MAY01-C804_2
caaaatataattgttttttcaatttaaaaaaaaatgaaaaacccaaaccctaaaatatctctgcgggagagcatcaaacatggaaagagttttcaaatttgccactattcgtacctgagtcagtgttttttcctgtcttcttttcatctctttgtttcaaagagcgggaaacaaagaaaagcctaaagttaggggttttgtgtttttttcttcgagtgatggcgaatgtagcatgcataaagatcaacagtggctaatgaatttccgtttaaggaattgttgtgtaaattagaaagagtgggagctttcaattgtcatatcgattcacgcaaacacaataagaagtgaggaggaagttaacagaggtgaaattttgtgtttgttttgtaagagcttaaaccaggtttgagctactatgcaaaagatccacaggctgctgcaaattcattaacttctcttcttgacaaggcagaaagtgttgttccgctagatttacgatcaaagactgttgtgagagttggggcaactgatggtctgagggcattaggaggcgaggcatttgataaaatttgcaatcggttagggagcttttgaaaagtagaagcacccttaaatccgaggcaaatagggtcaaaattctggacggctctgaagaaggttcttatgagtgggtgacaataaattacctactagggaatttgggaaggacatatcaagacacagttggcatagttgatcttggtggtagatctgttcaaatggcgtatgccatctccaagaatgctgcttcaagagctccaagtttaccagctggacaggacaattatgtaaatgaaatgtatctcaagggatcaaaatattacctctatgtacacagttatttgcactatggcttactggcagctcgagcagaaattttgaaggccactgaagattctggcaacccttgcatcttggagggttttgatggttgaccagctaattggaaaagatcatcttttcaaacacagtattattattttgatcaaggcctggtgctattacgagagccggatccttggtgcacaccatggcttgatttctacatatgcattagaaacaatgattttatatatcattaatgtctttcattcatccttattttgttctatttgtattttgttaaatttctggtgtagtatgataagtgcg

SEQ ID NO: 11201 - DNA, 1691 bp, Gossypium hirsutum
  Clone ID: GOSHI-09MAY01-C804_1
cccacgcgtccgatccatccctatcgttcttataaccttttttttatacgtcatgccggggaaatcggcgtctgatgctgccgtgctggaggagatcgagatcaatagcaggaaagtgggggcgaattcgagagggaataggaattatgcggtgatttttgatgcggggagttccgggagtcgagttcatgtttattgttttgatcagaatttggatcttgttccaattggctctgatttagagctttttgaacagcttaaaccaggtttgagctactatgcaaaagatccacaggctgctgcgaattcattaacttctcttcttgacaaggcagaaagtgttgttccactagatttacgatcaaagacccctgtgagagttggggcaactgctggtctgagggcattaggaggcgaggcatctgataaaattttgcaatcggttagggaacttttgaaaagtagaagcacccttaaatccgaggcaaatggggtcaaaattctggacggctctcaagaaggttcttatgagtgggtgacaataaattacctactagggaatttgggaaggacatatcatgacacagttggcatagttgatcttggtggtggatctgttcaaatggcgtatgccatctccgagaatgctgcttcaagggctccaagtgtaccagctggacaggacaattatgtaaatgaaatgtatctcaagggatcaaaatattacctctatgtacacagttatttgcactatggcttactggcagctcgagcagaaattttgaaggccactgaagattctggcaacccttgcatcttggagggttttgatggtacttataaatatggaggagaagaatataaagcatcggcgccgtcatctggttcaagcatggaagaatgcaggagggtgactctcaaggctcttaaagtaaatgattcatgcacgcatatgaagtgcacatttggtggcatatggaacggcggaggtggagatggacagaagaatctgtttgttgcttcatttttctttgacagggctgccgaggctggttttattaaagccagtgatcctgttgcaaaagttcagccccattcgtttgcagatgctgctaaacgtgcttgtcaaaccaagtatgcagatgctaaagcaatatataaagatttgggcgagagtaacctggcatatatatgcatggatctggtttaccagtacacgttgctcgtcgatggattcggccttgatccgtaccaagatgttacgttcggtgaagaaagtgaaataccgaaattcccttgttgaagctgcttggccgctaggcagtgcgattgaagctgtatcatcaatgaagtaaaaattccagaactactcagaaattggattttttggttctgtcagcatcatcaactttaaattagtcactgaaaaattgcatgacttgggttaatattggcatttgctaatcgaatacactgtaatttgcagaacgactcagaaattggattttttggtgcggaataatcggaagagaaaacagtttgatttaatcttcttcattggtaatttacaattttccccccctgatttttataatttttgtgagagttaattgaattagttcatttagtttgtaaactgattatgttatgttaccaatgtgtttgagttccctaattaccttttgttaggt

SEQ ID NO: 11202 - DNA, 606 bp, Gossypium hirsutum
  Clone ID: LIB3543-013-Q1-K6-B6
ctggcttcccacaaggcatgggcacctcgttcgcagggcaccgatggccgatcttcctggcattatagctactgttttcggcgctactggattccttggttgttatcttgtacaataactggctaaaatgggatctcaggtgttagttcccttcagaggttccgaggataaccctcttcatctcaagttgatgggagatttaagacagatagtgccaatgaaatacgacccgagggatgaaaattcaatcaaggctgtgatagcaaaagctaatgttgttatcaaactcattggaagagagtatgagacaagaaactttagctttgaggaagtgaaccatttcatggcagaacaactggcagtggttaaaatagtgaaatgcactgtgaatgacataccggtggacatccctttcaatcaaacggctggtctatctgcactttgctttctggagaaggttgaccagctaattggaaaagatcatcttttcaaacgcagtattatttttgatcaaggcctggtgctattacgagagccggatccttggtgcacaccatggctttgatttctacatatgcattagaaacaatgattttatatatcatt

SEQ ID NO: 11203 - DNA, 591 bp, Gossypium hirsutum
  unsure (1)..(591): unsure at all n locations
  Clone ID: LIB3829-021-Q6-K6-G11
tgggtatttgtgccccttgagggggggagggttggcggaggcaagatatcttaaattcaataccgtnaaggggcggtncnncacaatttgggttctaccagtcagtgnnnaaaaagttaacnccagnnattcttatnnccttaatnntttatttggnnatctcattttctcttgtatgtgnnttttctnnttttgacccttttttgcttggggggcgtgaaaannacgcctcagnnatgttgnnnaaaagccttattnnnctggtatttgtgnaatgccanntcatttnntcttaaagnacaagnannatgaccaaaagnaagtgcatttagttgtnanngtttcccttttnntccaaaaacggnagaaatnngtgattttgcttgagnntagcaaagaatttaatnnaaaagttgagatagcttgnngttaatcactttatgtactaacatncnntgcaactcttttgggatnnttaactagtnnntagtggcattcattaggtnnntatttttttnnttacagggnaggngnngggctttgtnntttcgnntcggctttgaaactttaggaatnngaataanntaaggg

SEQ ID NO: 11204 - DNA, 447 bp, Gossypium hirsutum
  unsure (1)..(447): unsure at all n locations
  Clone ID: uC-gsronu33B106h02b2
gaaattttgtaggcatctgatgattctggcaacccttgcatgttggagggttttgatggtacttatacatatggaggaaatcagtataaagcatcagctccttcatcgggtgcaagcatggaagaatgcaggagggtgactcacaaggctcttaaaataaatgacacatgcatgcatatgaagtgcacatttggtggtatatggaatgggggaggcggagatggacagaagaatttgtttattgcttcgttcttctttgacagggctgctgaggctggttttatcaaagctgctgatccagttgcaacagttcagcctcattcttttgcagaagctgctaaacgagcttgtggaaccaagtacacagatattaaagcaacatacccagctgtggatgtgggtaaccaggcttatctatgctnggatctagtttatcagtacaccctg

SEQ ID NO: 11205 - DNA, 418 bp, Gossypium hirsutum
  unsure (1)..(418): unsure at all n locations
  Clone ID: LIB3493-001-P1-M1-F5
gttggtgaagaaagtgaaataccgaaattcctttgttgaagctgcttggccgctaggcaatgccatcnaagctgtgtcatcaatgaagtaaaaattccaggtcagcatcatcaactttaaattagtcactgaaaaattgcatgacttgggttaatattggcatttgctaatcgaatacactgtaatttgcagaacgactcagaaattggattttttggtgcggaataatcggaagagaaaacagtttgatttaatcttcttcattggtaatttacaattttccccccctgatttttataatttttgngagagttaattgattagttcatttagtttgtaaactgattatgttatgttaccaatgtgtttgtgtccctaataccttnntggtagttaaaatgatgttcaattctcattt

SEQ ID NO: 11206 - DNA, 1218 bp, Gossypium hirsutum
  Clone ID: GOSHI-09MAY01-C594_1
ctccgtttttcaagaaagatcgattttttcttccactgggtcgttgtttgaggcatgtgaaacgttaacttctcaacacagagcttactctgaatttctcttagatatagcatggttattgagggagcctacattggaaaattttaaagaaactatggcctcttctcagattctaagattcaatcgtttattgagctttctcatacaaaatgaatcgactttcttctcgtggaaaatattacaaaatctgaagattgtggtggagatgatcaggtttgatggaactaatgattcagatgtaaggttattacagaaatatatgaatcatgctagagatatcctaagtaacgaacttcagaaaggtgaaattcccgtctttcgttcagagtacattgagcaagaaagaaaccaggtttctcaaagcagtttcgataacaatgagctatcaattgttccaaatatttctcaggttttggaggagagaactagtaaactacagacaataatggcagcacctactcccagtgaaactgttccacttttaaacaaagaaattatcatgaatgtgaacctcagcaaggattactcgagaaaatcgtgtggatttgctaccatgagattgaggtcccatgcggctgtactcataattgctgctactgctatttgcttaggcatgtgtgcagtcattttccaccccaacagagttggtgagtttgcagtaacaatgcgcaggtgtttgttcgacagggtataagggggtatatggacaaaacaattagtgcatgcgaacagggacgaggcatgcttggaccattgcttcgttaggatgtaaatatatgtatgttagtgtttgatgaaatcagggtgtccgaaaacatcctccagttttgagatgggtttaagaggatttgacgttgttgcctgaatccaagtggcaatgtaggtgtagaaaggtaattgacttttcatattccttgaagtttatcagaacaataattcagagatggtatagagtccaagtacggtagatgggaacatgaaggttgttgaatcatgtaagagggactttttttttttttttcatcattgtaaatcatataaactacaattgttaagcaggtttaggtgctgctattttccctgtatttgtctaagcactctccatatgcaaagaagctcctttttttttgaaatttaattagatttgtgagcttcagt

SEQ ID NO: 11207 - DNA, 616 bp, Gossypium hirsutum
  Clone ID: GOSHI-09MAY01-C494_1
cccacgcgtccgcaaggtcaaagccccaatctctctttctgatctgctttccatttcccctttgcgcggcggcagtatctctcgtcattcagtgagatgcacttccggtcatcatcataccaaaatgcaggtattgagttggttttcttttataaatggactgcaagaagttcatccaattggttgaggagaagaagaagcgagctttggagaagaaagaagcccctttaaaatgggagcagaagctagaagctgctgcaaaggccagggcagttgctgaggccaaagagaggagttcaaagaaggctaagcacaaaaggtgtgtctttgatactgacagtgagagtgatagtactgacggggaaataaaaaggagaagaagaatccataaaaagcataagaagaatgcccactgtgattctggtgaccatgagaggaaaaaggacaagaagtcaaagaagaagtcgaagagacattccccaggttccagtgatgatagcagcaattactacggagtagttctgaggaagagaggaggaaaaagcgaagctgcctgagatggaagcatcatgattctaaatcagattcggaatctcttgttcctcagatgatgatg

SEQ ID NO: 11208 - DNA, 1116 bp, Gossypium hirsutum
  Clone ID: GOSHI-09MAY01-C474_2
tttgtccatccataactgccctggtttcggcgatgctagcttgtttgcgtcggggaagttgtgccctcaactgcagcatgtagagttgtgtgggcttcatggaataacagatgctggggttctcctgttgctcgagagtggggaggctggtttattaaaggttaatctcagcggttgtgtgaatttgagcgacaaagttgttcaaacgatctccaacttgcatgggtggactctagaactgctgaatctcgatggttgcaagatcagcgacgctagtttagttgcaattgccaaaaactgtcagttgctaactgatctcgatatctccaagtgcaccatcaccgattctggaatcgcagctctggcttatttcaatccgattaatctgcagatcctttcggtatctgggtgctctatggtttcagacaaaagcttgccttcacttgggaaaactgggtgagaccctcttggggttaaacctacagcaatgcaaagcaatcagcagccgtgccgtggagctacttacggagcagctatggaggtgtgatatccttttctaaactaatgcatacaaactcctccatacatagatttttcagaacagcctttgcaagtagccagcagctttttcctccagtacttggtccccttttccagggaatacggtcgttctttctttctttcttttttgcaggtttccatcatccgggatgatctgctactactttgtgagcctgacaatgggcgtcggtttcttcatggctgaatttccctgagatgggttctggatttttgcttagcctttgtgcatatttgctttaggcgaaagcttttgcttaatattgtccttatttaaagtaggttttccaatattgggttgtagtttgaggttgctttttgcagtttcaaagcgtggtgttgcaagcttttcatgggctttggccatggcagctatatatagtctgccatgacaactcttgtaagtggttttttttttggttttggtaccaagccctggttttgctggtttcatctgctctgaaactgccaactgtaacctctcaaaccatgtaataaaattaaattcatggtatgttttctgctctcatgaagaat

SEQ ID NO: 11209 - DNA, 1461 bp, Gossypium hirsutum
  Clone ID: GOSHI-09MAY01-C474_1
ggatacctctcaaggagtttgggtggggagaaagcaacagatattagacttgcatctattgctgtcggaacagctagtcgtggaggattggggaaacttttcattcgaggaagcaagtccaggcatggagtaactactgttggcctcagagccatttcccgcgggtgcccttctttaagggttctttccttgtggaatttgtcttctgttggagatgaaggtctttgcgagattgccaacgggtgtcaccagctagagaagcttgacctttgccactgtccctcaattactgataagtctttgcttgctgtagcaaagggctgccctaacttgactgatctgaccatcgagggttgtgcaaacattggaaatgaaggtcttcaagcaatagcacgtagctgtcccaatctaaagtccgtttccatcaaagattgcccccttgttggagatcagggagttgcgagcctgttgtcttcagcctcatattccctcacaaaagtcaagctccaggccttgaacatcactgatgtctctcttgctgttatcggacactatggcaaggcagtgaccgacctttctctcactagccttccaaatgtgagtgaaaagggcttctgggtaatgggtaatggtcatggactacagaaattgaaatctttcacagttacatcctgccgtggagcgacagattcgggacttgaagctgttggaaaaggttgcccgaatttgaagcagttatgcctcagtaaatgccctttcttatctgataaggggttgtcgtctttagccaaagcagccggttcactagagtgcttgcaactggaggagtgccacagaatctcccagtttgggtttttttgctcccttattaactgtggtgcaaagttgaaggttatttcctttgcaaactgtttaggcattaaggacctaaactcgggattgccacctctatccccttgtgaatcccttagatctttgtccatccataactgccctggtttcggcgatgctagcttgtttgcgttggggaagttgtgccctcaactgcagcatgtagagttgtgtgggcttcatggaataacagatgctggggttctcctgttgctcgagagttgtgaggctggtttattaaaggttaatctcagcggttgtgtgaatttgagcgacaaagttgttcaaacgatctccaacttgcatgggtggactctagaactgctgaatctcgatggttgcaagatcagcgacgctagtttagtgccttgcaaatggtcagtgtactgatctcgattttcaaggcacctaccgatctgattcgcacttgctatttaatccgatatcgcagcctttcggtcttggtcttatgtttcaacaaactgcctccttgaactggtgaaccttggggtaaactcgcatgaacatagagcggccggactctacgacacttgagggaatcttctaaca

SEQ ID NO: 11210 - DNA, 1052 bp, Gossypium hirsutum
  Clone ID: GOSHI-09MAY01-C464_1
cggagtttggcggagcaggcttttaggcaacaagctgaggtgattttagctgatggacagttgaccaaggctaggatggagcagctcaatgagctgcagaagaatgttggcttacctggaccatatgcacagaaaataataaagagcataacaaccaccaaaatggcagctgctattgaggcagctattggtcaagggagactcaacattaagcagataagggaactcaaggaatcaggtgttgatttagacaacatgatctcagagagcttacgggaaaacctcttcaagaaaactgtagatgagattttctcatcaggcactggcgagtttgatgaagaagaagtctatgacaaaatcccagcagatctcaagattaatcctcagaaggcaaaaggtgttgttcatgatctcgcacggactaggttgtccaattcacttattcaagctgtggcattgctaccgcaggagaaaccgacagggagcggtttcctcgcttaatgatttgctagcttgtgacaaagctgtgccttcggagccactatcatgggaggtgcctgaggagctagctgatctgtttggtgtatacgcacaaagtaatcctgttcctgagaagttgtcccgcttgcagtatctgcttaacataagtgattcagtggcggcagctgccaaagagatgggacatggatcagtatcagtcggagcagaggaagaaaagtttgtgttttgaatgtttgcttgaaattgtggtgtagagagccttttgtttaggaagctctgttttgaaggcttttctttttttatatgttactaagttgaaaaggagaatagtaggatcgaggtaggatggcgataatgataaaggtgtttgatcttaattgctgctttcttcttgctccatccgtgttttccttgcacttattatttttgctcaatggtattttccaaaacatgatattctctctttatatataataataacaacgaaaattctctgaaaaaaaaaaaaaaaaaaaaaaaaaaaaaaaaaaaaaaaaaaaaaaaacggcggc

SEQ ID NO: 11211 - DNA, 995 bp, Gossypium hirsutum
  Clone ID: GOSHI-09MAY01-C414_4
cccacgcgtccgaaaaaagagtgaagcgtttttcgggtcatcacgtaggatccaagatcggggaggagcatttattgtgtgttggttgaggtggtgttttatctgatcggaggtggtaggtgttgataaacaaaagtttgaaaatgagttcagacagcgggagccgaagcaggagcaggagccgcagccccatgggtcgtaagatccgatctgaccgcttttcttaccgtaatgcaccttacagaagggagtctcgtcggggtttcagccagagcaatctctgcaagaactgcaaacgacctggtcactatgctagagagtgccctaatgtggctatttgtcacaattgtaatctccccgggcatattgcttctgaatgcacaaccaagtctctatgctggaattgccgtgaacccggacacacagctaacaactgtccaaatgagggaatctgccacacctgtgggaaagctggacaccgagcaagagagtgcactgcacccccaatgccacccggggacgttaggttatgcaataattgctacaagtctggacatatagcagctgactgcacaaatgacaaggcatgcaacaactgtaggagaccaggtcacttggcacgggagtgtacaaatgatccaatttgcaacttgtgcaacgtagccggacatgtggctaggcattgccctaaaggcaacatgataggtgagcgaggcagttttggtggtggtggtggtggtagtggtagtcgtggcggtggctatcgagatcatcatcatagagatgtagtgtgccgtaactgccatcaattcggtcatataagccgggattgcatgggaccgttgatgatctgtcacaactgtggtggaagaggacacatggcatatgagtgtccatcaggaaggtatttggaccgttatcctcctcggaggtactagatgatgatgccagccaggttatggcaggatcaaaaaatattttaattaataacatgc

SEQ ID NO: 11212 - DNA, 667 bp, Gossypium hirsutum
  Clone ID: GOSHI-09MAY01-C414_2
ccgatgcccattgtggcatcttgcatgtttctgttcattctccttgttttctcttttgaaccacaacagttttccttatggacgcaaaagctcctatcctatcagccattccctttttaaatgtttaacaatgttgcttctttctcttttaattatctcttggttactggccaaggaacattatctgtctagaaaggatggatggctgtgaatggcgtttgtgtgtctgttcatgagtttccgggcctgatgtatgctggcatgatgactatttgctagagatggttggacctttaatgaggaatttggttgaagtgtgggtggggtcatcaagtactctgtagttggcgctgaattttgtggtttgtaattgatataagatggattgcttgttgactgttctgtgtgttttactcttgggatttggtgtttatgttttggagggaatagtgagaggtttgatatggctcacggatgatgattgctgtatggttgtgctgtggacagggaggagcatttattgtgtgttggttgaggtggtgttttatctgatcggaggtggtaggtgttgataaacaaaagtttgaaaatgagttcagacagcgggagccgaagcaggagcaggagccgcagccccatgggtcgtaagatccgatctgaccgcttt

SEQ ID NO: 11213 - DNA, 880 bp, Gossypium hirsutum
  Clone ID: GOSHI-09MAY01-C414_1
cccacgcgtccggagatgtgtaatttgtgtgttttgttgtttgtttttgttttgctaactgtgcccgcgcgtcagtgcacgtaacgtgccaggcaataatgggctcaatggctccaagaaggaacgagataatggaagccaatgcacccaaggcggaatcacccaaggggaatggcattgatgacaagaagcactttgtttacggtggagttggtgggtttgtggggtgggacgctggaggccattgtgactcttactcatgctgcatctgcttccccagaggggccgatgggggaacccctaagttttgaggtctttgttgctcaaaggtctcatgtgattcatcgagctatcagccaagcagttggcgatctgcgtctaatgaatccgagtatgatgcatcccgtggctctcgttgagaaccatccatcatgtcctagagacggaaatggagaaattttgcttccgaatgggcaaagttggatgtcacagttgctactcttgtgctattcagtgaaagatcttatctgaagcaagttcattgtcgaaaccacgagaacaatttgatcaccagaagctttttggcttccgacttcgttccccacctctagcttacttgctgtcttctttgttgcaatcccgatctcacttcatactacctaacaatgaaggcagtgatggatgttgacttggatactgagttgggacgtctgacatattctgatgaagaatatatgattattatgatcagctttcaccattcagctcttgagagactgaggctgtaaccttctctgataagattactactatgagatttgatttggtttccactgtaagaccatgtcaaggtgtaatattgtggattcatataatggat

SEQ ID NO: 11214 - DNA, 531 bp, Gossypium hirsutum
  Clone ID: LIB3583-023-P1-K1-F1
gagatgtgtaatttgcgtgttttgttgtttgtttttgttttgctaactgtgcatgcatgtcatgcacgtaacgtgccaggcaataatgggctcaatggctccaagaaggaacaaattatggaagccaatgcacccaaggcggaatcacccatggggaatggcattgatgacaagaagcactttgtttacggtggagttggtgggtttgctggggtgggaggctatgctggggtagctggtgggctgccattggttggtagtggtagtcgtggcggtggctatcgagatcatcatcatagagatgtagtgtgccgtaactgccatcaattcggtcatatgagccgggattgcatgggaccgttgatgatctgtcacaactgtggtggaagaggacacatggcatatgagtgtccatcaggaaggtatttggaccgttatcctcctcggaggtactagatgatgatgcagccaggttatggcagtatcaaaaaatattttaattagtaacatggtttgtgattgaagatttgg

SEQ ID NO: 11215 - DNA, 364 bp, Gossypium hirsutum
  Clone ID: LIB3165-036-P1-K1-A1
aaagaggttcataaggaagttcccacccgatgttgttctttatgttgatcgtttggacgcgcatgacagagatcatactgattttctattattgaagtctctcacggattctctcggttcatcaatatggcaaaatgcctttgtgactcttactcatgctgcatctgcttccccagaggggccgatgggggaacccctaagttttgaggtctttgttgctcaacggtctcatgtgattcatcgagctatcagccaagcagttggcgatctgcgtctaatgaatccgagtatgatgcatcctgtggctctcgttgagaaccatccatcatgtcctagagacggaaatggagaaaatttgctttcc

SEQ ID NO: 11216 - DNA, 331 bp, Gossypium hirsutum
  Clone ID: LIB3196-027-P1-M1-G8
gtttttgttttgctaactgtgcatgcatgtcatgcacgtaacgtgccaggcaataatgggctcaatggctccaagaaggaacaaataatggaagccaatgcacccaaggcggaatcacccaaggggaatggcattgatgacaagaagcactttgtttacggtggagttggtgggtttgctggggtgggaagctatgctggggtagctggggggctgccattggttggtggtcttggggggattggaaaatttggtgggattggtggtgcagctggaataggtggttacaaaagcattggtggtctagggggtttaggcggtggaattggag

SEQ ID NO: 11217 - DNA, 661 bp, Gossypium hirsutum
  Clone ID: GOSHI-09MAY01-C404_1
cccacgcgtccgcccactcgtccgcccacgcgtccgcccacgcgtccgcccacgcgtgtagccaaacgctcccttactttgattctatcgtcgattcaaagcagctttcttatccatggcgtctacatttttggcactacccaaaaccttcacttcaaacaagcctaccttcccttctctttcaacccacaaacttctcgggactcgaagaaattcacttagaatcaatgctgtggccactaaatgggaacccaccaaggttgttcctcaagctgacagagttcttatccgtctccaagaattacctgagaaatcagctggtggagttttgttgcccaaatcagctgtcaagtttgagaggtacctgatgggggagatagtttcggtcggtgccgaagtaggaaacgtggaaactggaaagaaggttcttttctcggatataaatgcttatgaggtggatttgggaacagatactaggcatgtgttttgtaaagagagtgacttgttagctgaagttgattgaagttttttctggtcttttgttttaagatgaagagtcaattgtatttcagaatttagcggtttttatttgcaattataatgttcttcagctgctgctacatttatgttagtaacttattggagatgatatttaattgtt

SEQ ID NO: 11218 - DNA, 413 bp, Gossypium hirsutum
  Clone ID: LIB3166-007-P1-K1-H10
gcaatttttataccacagaaatcagttggtagagttatgttgcccaaattagctgtcaagtttgagaggtacttgatgggggaggtacgatgacaatcccttaaacacctttttccctttttcaaatgaatgcttgagatgtcttaattcattttatgatttcaacttcagttagtttcggtcggtgctgaagtaggaaaagtggagcttggaaagaaggttcttttctcggatataaatgcttatgaggtggatttgggaatagatactaggcacgtgttttgtaaagagtttgacttgttaattgaagttgattgaagtttcttctggtcttttgttttaagatgaagaatcaattgtatttcaaaattgagcagtaattgtatttcaaaattgagcagttcttacttaca

SEQ ID NO: 11219 - DNA, 444 bp, Gossypium hirsutum
  Clone ID: GOSHI-09MAY01-C434_4
tcgcccacgcgtccgcccacgcgtccgcggacgcgtgggccttaatcatatcatcgagggcgacgaatatgaagtgtctcacaccagtatctgcgctagaggatagagtgcggatccctggcacctgacctttacgcgaagtgtgtttggggtggatgccttggtaaatttgagcgctgagaaacaagctgatgggaatcttagtgggtacatctggataaggtgcatgacccagggtctcgctcttagtctcggggataagattactctaaaacaaatcggaggcgggtgatctgtgggatgttgacatcatttgtttaaccaatactggtagtcattctggttttcgcttttgtcagctgctgcctgtctcaatctcctttgaaatgcaaaaattattactgatctaaaaatgcaggtactttgcctgcattttaaagatag

SEQ ID NO: 11220 - DNA, 1206 bp, Gossypium hirsutum
  Clone ID: GOSHI-09MAY01-C434_3
aattccggggcacgacgccacgcgtacgcccacgcatccgcttgaattgtagtatgatgtccaccatgatttgtatcatccatgtggggagtctgtccagggtgcagatcattcacataatcttaatggcattcttcaactgactgaattgagtgaccccgtatatgctgaagcatatgtgactgtccattactatgatattcgtcttgatgacactgatatcaatcaaaccaatgaaactcttcacaacttgcgcttggacttgtctaccatgtgcgatctcgaaacttgttgagcgtacacataactataccgtcgctcctgcttctagcgagctgataaacgctaacatcaacgtgtcttcaactgagactggtgtcatatttggcaatatcgtttacgagacttcacatgtgctcgaaagaactgttgttgttcttaatgacattcatctcgatatcttggactacatctctcctgccgtttgtagtgatactgcattcagaactatgtgggcagaatttgagtgggaaaataaggttgctgttaacactgtaattcaagatgagaaggaattccttaaccatattatcaagtccatcaacatgaagtgtctcactgcaccatctgcgctagatggtgagtgcggattcctggctgctaacctgtacgcaaaaagcgtatttggggaggatgcattggtaaatttgagtatcgagaaacaagcagacgggaagcttagtgggtatatcaggataaggagcaagacccaaggaattgctcttagtcttggggataaaatcactttaaaccaaaagggaggcagttgatttgcttgcagtatttcaacattatcaatttgttttctcccaaaactgttgcaggtatattagttctcgcatttggaaagatggccaccacacttcatttttgttgtgctttctgtatctagcggtagtagcacagttgatgaccttgttgtatttggagttgcatatttgaagacaaaaaaggcccccattgagcaatggttaaaatactgccttttatcatttttatgctgatttttttataatattgaattcattcagacctttccaggaccattggctcaataaataaatctcttcatttaacctttttctttttggatgtattcccattttttctcagtgtactctcgataacgggcatgtttttttattt

SEQ ID NO: 11221 - DNA, 2234 bp, Gossypium hirsutum
  Clone ID: GOSHI-09MAY01-C434_1
agaatacagacaaatgctcattcaagctattcattcctgtgcaattaagttcccagggggggcaagcacagttgtgcatcttcttatggatttcttgggtgacagtaatgttgcttcagccattgatgttgtggtttttgttcgagaaataattgagactaaccctaaacttagggtctccattataacaaggctattggatacattctatcagatccgagctgcacgggtttgctcctgtgccctttggatcattggagagtattgcctatctctatctgaagttgagagtgggatggcaaccataaagcagtgcctcggagagctacctttctactccgtttctgaggaaggggaagctactgatgcttctaagaaaactccacaggcaaactccattactgtctcctcaaggagaccagctgttcttgctgacggtacttacgcaacccagagtgctgcctctgaaactgctttctctgctcctaccgttgttcagggatcattggcttccgggaatctcagatctcttctcctcaccggcgactttttccttggggcagttgttgcttgcactctgactaaacttgttctgaggctgcaggaggtacagccttcaaaagttgaagttaacaaagcaaccacacaggcattgctgatctttgtctctatgctgcaattaggacaatcacctgttcttccacacccaattgataatgattctaatgataggattgttctgtgcatgagattgttgtgcgatactggtgatggcatcaggaaaatatggttgcaatcttgccgccagagttttgttaaaatgctttcagagaaacagttgcgagaaaccgaggaattaaaggcaaaggctcaggtttctcatgcacaaccagatgaccttattgacttctaccatttaaagagtcgaaagggtatgagtcagctggaattggaggatgaggttcaagatgatttaaaacgtgcaactggagagtttgtcaaggatccagatgatgcaaataagctcaaccgcattcttcaactgactggatttagtgatccagtatatgctgaagcatatgtcactgtccatcactatgatattgttcttgatatcactgttatcaatcgaaccaaggaaacccttcagaatttgtgcttggagttggcaactatgggtgatctgaaacttgttgagcgtccacaaaactataccctagctcctgaatctagcaagcaaataaaggccaacatcaaggtgtcttcaactgagactggagtcatatttggcaacattgtttatgagacttcgaatgtgcttgaaagaactgttgttgttcttaatgacattcatattgatatcatggactatatttctcctgccgtttgtaccgatgctgcattcagaactatgtgggcagaatttgagtgggaaaacaaggttgctgttaacactgtaatccaagatgagaaggaattccttaatcatattatcaagtcaaccaacatgaagtgtctcacaccagtatctgcgctagatgatgagtgcggattcctggcagctaacctttacgcgaaaagtgtgtttggggaggatgccttggtaaatttgagcgttgagaaacaagcagatgggaaacttagtgggtacatcaggataaggagcaagacccagggtattgctcttagtctcggggataagattactctaaaacaaaagggaggcagttgatctgtgtgggatgttgacatcatttgtttaaccaatactggtagtcattctggttttcgcttttgtcagctgctgcctgtctcaatctcctttgaaatgcaaaaaattattactgatctaaaaatgcaggtacttttcctgcattttaaagatggccgccttcatttttgttgtgttctctgtatctaggggtggtaccgatttcaagagatgacattgttgtatttgcagttacatatttctacagtaaaaaagggtcattgaacatttgttaaaaaaagatacttctttttggcgatgttaaaacaggattatctttttgcggattctctaaattgatagtattgaattcggagcttcctttagtaccattgttccctatttaaaaaaaaaaataggataaaaagatagaaacacaaaaacaaaaaaatatccgaaaaaaaattcattaactattccgatttaaaagtaggaaagttccacttaaaccctttttaaaatt

SEQ ID NO: 11222 - DNA, 542 bp, Gossypium hirsutum
  Clone ID: AI054750.1
atctttttctctatgctgcaattaggacaatcacctgttcttccacacccaattgataatgattctaatgataggattgttctgtgcataagattgttgtgcgatactggtgatggcatcaggaaaatatggttgcaatcttgccgccagagttttgtaaaaatgctttcggagaaacagttgtcgagaaaccgaggtaattgaaggtcaaaggcttcaggttttctcatgcacaaccagtatgtaccttattgtatttctaccatttgaagagtaggaaggtgtatgagccactgtgattggaggatgtatgttcaagatgatttaaaactgcacggtagagtttgtcacgataatgatgacgccaataagctcaccgcattcttcacttactggattatcgatccagtatatgcttagcctatgtctctgtgcccatatgatattgttctgaataacagttatcaatagaccaagaaacactcaaaattgtgctggaatggcacatggggtgacgaaactctggagcgtcacaaatatac

SEQ ID NO: 11223 - DNA, 398 bp, Gossypium hirsutum
  Clone ID: LIB3048-042-Q1-L1-A9
tgggtccccccggcttgaagaatatccggccaagggatttaaaggcaaaagctcaggtttttaatgggcaacgcgttgaccttattgacttttaccatttaaagagtcaaaggggtttgagtcacctggaattgaaggatgaggttcaaaatgatttaaaacgagcaactggaaagtttgtcaaggatccagatgatgcaaataagctcaaccgcattcttaaactgacaggatttagtgatccggtatatgccgaagcatatgtcactgtgcatcactatgataatgttcttgatattactgttataaaccgaaccagggaaacccttcaaaatttgtgcttggagttggctactatgggggatctgaaacttgtggagcgtcctcaaaattatacc

SEQ ID NO: 11224 - DNA, 355 bp, Gossypium hirsutum
  Clone ID: LIB3585-044-P1-K1-B7
cccacgcgtccggtgggatagcaaccataaagcagtgcctcggagagctacctggctagggggtttctgaggaaggggaagctactgatgcttctaagaaaactccacaggcaaactccattactgtctcctcaaggagaccagctgttcttgctgatggtacttatgcaacccagagtgctgcctctgaaactgctttctctgctcctaccgttgttcagggatcattggtttccgggaatatcagatctctgttcctaaccggagactatatccttggtggcagaacccgtatgcggataggctaggctttaaaagaggttgcaggaggtacagccatcaaaagattaatgtt

SEQ ID NO: 11225 - DNA, 335 bp, Gossypium hirsutum
  Clone ID: LIB3048-010-Q1-L1-B1
ggaattttataggcattagctcatgtttctcatgcacaagcgtatggccttattgacttttaccatttaaagagtcgaaagggtatgagtcagctggaattggaggatgaggttcaagattatttataactagcatctgtagaagttctcctaggatccatgataatgcaaattcaccataaccgcgattactcatctgagcaagatttaagtgattccatatatgccggagcatatgccattgagcatgaccttgatagtggtctagttattactggatgctaccaaggattgctggcgatgtacgttgttgacaagcactcatttacaatacc

SEQ ID NO: 11226 - DNA, 605 bp, Gossypium hirsutum
  Clone ID: GOSHI-09MAY01-C424_30
tctcccacgcgttcgtttttattgatggatttttactaacgatgatgatatcaaattaatcattattcattccaatatatttgaataaaggaacatttgttcagataaaatatactctatgttctctggtcttatctaatttatcatcaatttgccttctcaacgacatgaattttaccagaatcctcactgattgaatcatacctatgaaacatgcgagctataatatactgtgtaagctaatggagttaccatagtttagctcttttattgttttgactggtggcaaatggaacaggaaaaaccaactacactggattgcggtccaagaacaatttgcacaaggcacataatggctggctgctacctctacgaatgcttgtgggaggcattgcagcagcgaataagaatgatattgatcaacatgcagttgacaccgtatgtgctctgaatccaattgagttggttttgtatcggtgtattgaactcgttgaagagaatttgaaacatttagcctagcatgcttgagtgtttggtgctcaagccatttattggggaattcctcacaacatctgaagccattatatcgaagtaggcaatgctaa

SEQ ID NO: 11227 - DNA, 555 bp, Gossypium hirsutum
  Clone ID: GOSHI-09MAY01-C424_24
aaaatcccaaaatagatatcccaaacgtttagccatttccagtaaaaccccaaaacagatttccccaattctctacatttcccctaatccctaaatttcccccaaaatccctaagtttttttaatagttcttcgtttaagtaaagtccttatatttaaaaaaaattcaatttttttcaggtattagggaaagcgattcggccaggtatttcagcatctagagtttctgtcaatgttggagaagagcgttgaaggaatagcttcagatcctaaagtgcacactttcgaggaggttgccaaccacaacaaaaccaaagattgttggctaattatttctgggaaggtttatgatgtaactccgttcatggatgatcatcccggaggtgatgaagttttgctgtcagctactggttactaccattgccttgctgctgttttcctttttttagctatagttttagttcccggagatattcacagtggctttaaacatggggattgaatggaagagaaatgaattgaaaagctgtgatttttttaaaggaagttgggtttt

SEQ ID NO: 11228 - DNA, 630 bp, Gossypium hirsutum
  Clone ID: GOSHI-09MAY01-C424_23
tcttgtaaattcaacgaggttgtcgattcctctgaacaaggctgacttcacttttaggagggaaaatgctgtagcattgaatttatcaagcttcttgaatttatcaggctgcagtgctagcaatggatgatacggtattagatgttgatcaagtggaaaatctcataaaattttgtccaactaaagaggaaatggaacttctcaagaactacactggtgacaaggaaagtctagagaagcgtgaacaggtttctgaatttaaaaggagcttaaatactgtaaattctacatctaatgaggctaagaagttagcatcacaatatcaaaaggaagcggacaaatgcaattcgggtatggagcacgtgcgaagaagtaagggagaaagctgaagaagcactgtcggctcaaatgaaattaacagcaatgtgggaaataagagctcgtcagaaagggtggagagaaaaggtcgccaaatctaatgcatttccttatttcatttaagtaacttcattataatgtcctattttattgatatttttatatttaatctagtttttattatttaaaaaaaaaaaaaaaaaaaaaaaaaaaaaaaaaaaaaaaaaaaaaaaaaaaaaaaaaagggcgaag

SEQ ID NO: 11229 - DNA, 659 bp, Gossypium hirsutum
  Clone ID: GOSHI-09MAY01-C424_20
cccacgcgtccgcggacgcgtgggttcaaattctcctgttgagcaagaacaggtccttatggggaatatattcaagctgcacgacaagtatattgcatatgtgaccgacttttttcaaaaccatactctctttcacaagtgactgttctaatatctaaactcaactgcacatcctgggattgatttgacagtgactgttctcacaacaggattctggccaagttataaatcggtaaggcttatctctttgataaggtgtcaagtgtgtagaagttttcaaagggttctatgaaacaaaaacaaaacacagaaagcttacatggatatactcacagcggaaaaaccaactacactttgcggtccaagaacaatttgtaggaggcacataatgactagctcctacctctacgaatgcttgtgggaggcattgcagcagcgaataaggatgataacatgtagttgaaaccgtatgtgctatgaatccgaattcaagtgtgatttttagatattttatgtgcaaaaaagtattagagtgtcttatgtttatatgtttgttaagcagattatagatagaacctgcagtaggatcaactaattagttgatcaaaagctacaccctattttgtaatcgtctacttgcatatttgcatatacttaat

SEQ ID NO: 11230 - DNA, 712 bp, Gossypium hirsutum
  Clone ID: GOSHI-09MAY01-C424_19
atttatgtggttgcttttgtctgatagattgaagttttttcaattggcagaactcatattatctctgattagttgaataaaagggtaatgatgggatctaatcacataaatatgcaaatgaaccattccagtagttccatcatctccgccccgccggcggtcccgtgggtaaaaatagtagggtgctacctgtaattgaatacggggaatgaagagattgtgatttctggtgtttgtaggtcaaattttcgttatatatcaaacgtttctcctttgatgtttagtagtccattgaagtcaagaataaggtatttgaagttaaactaaactattgtttatgattgagatttctcttgatctaggtttatgatgtaactccgttcatggatgatcatcccggaggtgatgaagttttgctgtcagctactgggaaggatgccaccaatgattttgaagatgtgggtcacagtgattcagcaagagaaatgatggaaaaatactacattggtgagattgatccaaaaactgtcccagcaaagcgcacttacattccaccacagcaaacgccttacaatcccgataagacccctgagtttgtcatcaagatcctacaatttcttgttcccctcttgatcctgggtttggctattgccgtacgtcactataccaagaaagagtagcttattactatacaggagtttacctgttacga

SEQ ID NO: 11231 - DNA, 635 bp, Gossypium hirsutum
  Clone ID: GOSHI-09MAY01-C424_17
tttgacaggttttactgtcaaagcactttattttggagtacaagcatccttgaattggttgagtcagttttgaggcctgacacaggaggaccaccaatccttcctgacaatagtgatgctgttctatctgcccttaacctgtacagatttgtattaatgacagaggcagcaggaaaaaccaactacactggattgcggtccaagaacaatttgcagaaggcatataatgaatggctcctacctctacgaatgcttgtgggaggcattgcagcagcgaataagaatgatattgatcaacatgcagttgacaccgtatgtgctctgaatccaattgagttcggattctaggtgtgacggtgtatcaaatattttatgtacaaaaaagtattagagtgccttatgtttgtatgttagttaagcagattatagatagaacctgcagtaggatcaactaattagctgatcaaaaactacacctagttttgtaatagtctacttgcatatttgcatatatttaataataatctcgtgtcaaaaaaaaaaaaaaaaaccaaaaataaaaaaaacaaggggctgcccacttaaaagaacacaagcttactacgggggcatgcttcgggatgccctttctttct

SEQ ID NO: 11232 - DNA, 875 bp, Gossypium hirsutum
  Clone ID: GOSHI-09MAY01-C424_15
gttttacacatttcaggtatatcaggaagtgcatgaaaaatcagagatgccgtaattgcccttattgataaagaacgtgagggagaacagatagaccgagcattattgaagaatgtcttgggtatttttgttgagattggcatgggacatatggatcgttatgaggatgattttgaagaagccatgcttcaggatactggtgcttactattcacggaaagcatcaagctggattgaggaagattcttgtcctgattacatgttgaagtctgaagaatgtctgaagacccggtcggcccggcggccgcattacctgcattcaagcagtgagaacgaaattgtcagagaaagtgcaacatgagttgttggtcgtgtatgcaaatcggcttacttgaaaaggagcactcaggatgtagggccttgcttagagatgacaaggtggaggatctttctaggatgtacaggctttattgtaaaatacttcgaggcttggatcctgttgctaatatattcaagcagcatattactgctgaaggcaccaccttggttcaacaggttgaagatgctgcaagtaaccaggcctcaagttcttcaggtgtgcaggagcaggtccttatcaggaagataattgagcttcatgataagtatatggcatatgtgagtgactgttttcaaaatcatactctcttccacaaggccttgaaagaggcttttgaggtattctgcaacaaaactgtaactggcagctcgagtgcggagcttttggctactttctgtgataatatcctcaagaagggtggaagtgagaaattaagtgatgaagcgattgaagaaacacttgagaaggtagttaagctacttgcctatattagcgat

SEQ ID NO: 11233 - DNA, 908 bp, Gossypium hirsutum
  Clone ID: GOSHI-09MAY01-C424_14
ggaaaagtgcaatacctatttccccaaatttttcacgaaattctaacttaaaccttttctttttgttagccccgatttccccaaagtttttcacgaaactctgtatttcttccctaaaatctgaaatccccaatttttccaaatcgttaagttttcccccaaatccttcgccccgtgatcaggaaaacccatctcctccgtcgccttctccccgtgcatcgcaactcattccctccatcgtcttcaccccgtgcatcgcaacccatctcctccatcgccttcgccctgtgcatctgctgcatagccgtccagtgtcccctctgctgcccgaatatatttggtaaattcaacgaggttgtcgattcctccgaacaaggctgactttacttttagtgctagcaatggatgatacggtattagatgttgatcaagtggaaaatctcataaaattttgtccaactaaagaggaaatggaacttctcaagagctacactggtgacaaggagagtctagagaagtgtgaacaggtttctgaatttaaaaggagcttaaatactgtaaattctgcatgtaatgaggctaagaagttagcatcacaatatcaaaaggaagcggacaaatgcaattcgggtatggagacgtgcgaagaagtaagggagaaagctgaagaagcactgtcggctcaaatgaaattaacagcaatgtgggaaataagagctcgtcagaaagggtggagagaaaaggtcgccaaatctaatgcatttccttatttcatttaagtaacttcattataatgtctggttttattaatttctatgtttaatctagtttttattatttattttagttttgattctaaatttttattttaatatttaagataacttgagttctaacttttggatttt

SEQ ID NO: 11234 - DNA, 644 bp, Gossypium hirsutum
  Clone ID: GOSHI-09MAY01-C424_12
ctccattttctctcgcttcgacagtcaaagctcaactacagctgatttttttttatcttctattttccagaggtttgtgagaagaaataagcttttcactaacattttaacttgatttaaccaagttgataaaaaggttatgcccagtatggaaaatgaaggttctgaagtctcacgagctgaagaaatcaaaaaccaagctaatgaagcatttaaagcacacagatatggtcaggctattgacttgtacacacaggcgatagagctaaatagtcagaatgcagtgtactgggccaatcgctcacttgctctcacaccaaattggaagagtatggtagtgccatacaggatgctactaaggcaattgaagtggatcctaaatattcaaagggttattacagacgaggcgcagcttatcttgccatggggaagtttaaggaagcactaaaggattttcaacaggtcaaaaggatttgtcccaatgatcctgatgctaccaagaaattaaaggagtgtgagaaagcggtaatgaaattaaaatttgaagaagcgatttctgtacccgagtcggagaggcgttctgtagctgactccatagattaccgcaccatcaaggtggagccacaatatttaggcgcaaaaat

SEQ ID NO: 11235 - DNA, 623 bp, Gossypium hirsutum
  Clone ID: GOSHI-09MAY01-C424_11
agaactgttatttatatttaacatcattgtttcaggtcaagtgtgtagaagttttcaaagggttctatgcaaacaaaaacaaaacacagaaagcttacatggatatactcacagcggtatcgttttgtatttttgcattctcataatttaactgtatattgtttttctggatatcgttttaatgattacttttgtgtggcaatagctcttttatgttttgactggtggaccaaatggaacaggaaaaaccaactacactttgcggtccaagaacaatttgcaggaggcacataatgactagctcctacctctacgaatgcttgtgggaggcattgcagcagcgaataaggatgataacatgcagttgacaccgtatgtgctatgaatccgaattcaggtgtgatttttagatattttatgtgcaaaaaaagtattagagtgtcttatgtttgtatgtttgtgttaagcacattatagatagaacctgcaataggatcaactaattagatgatcaaaagctacgccctattttgtaatcgtctacttgcatatttgcatatacttaataattatctcgtgtcaactaattattctaattttttatctaattgttctgtttcaac

SEQ ID NO: 11236 - DNA, 875 bp, Gossypium hirsutum
  Clone ID: GOSHI-09MAY01-C424_10
aatataagcaatgtccataagatcgttaaggcaagaaaaaggaagcatgttactggcattagcaatgctttatccttttgttgtactcatgggaggagtgctcatttggctattgacttgtacacgcaggcgatagagctaaatagtcagaatgtagtgtactgggctaatcgctcacttgctcacaccaaattggaagagtatggtagtgccatacaggatgctactaaggcaattgaagtggatcctaaatattcaaaggtagtcgataagcactaaaactgatttttcacagttttcttcttctatttcagcgacaccgaagactattctggacctgatggatttagatggactccctcgcgtccgtgttcagtgccctcttcatgaattacttgagttaggggacagtgttggaacacaaagtcggggtctcacccaagaacttatttcattgctacctgtttcaaaatactagtgcagcttattctcaaggaagaaatcaaggaaagagaggaaaaaccaactacattagattgcagtccaagaacaatttgcagaaggcacataatggctggctcctacccctacaaatgcatgtgggaggcattgcagcagcgaataagaatgatattgatcaacatgcagttgacaccgtatgtgctctgaatccgaattcacgtgtgagtttcagatattttatctgcaaaaaagtattagagtgccatatgtttgtatgttagttaagcagattatagatagaatctgcagtaggattacctaattagttgatcaaaaactacgcctagttttgtaatagtctacttgcatatttgcatatatttaataataatctcgtgtcaactaattattct

SEQ ID NO: 11237 - DNA, 1099 bp, Gossypium hirsutum
  Clone ID: GOSHI-09MAY01-C424_9
cggccgcgtgggcggccgcgtgggcggacgcgtgggcggacgcgtgggcggacgcgtgggcggacgcgtggggtttttcacgaaactctgtatttcttccctaaaatctgaaatccccaatttttccaaatcgttaagttttcccccaaatccttcgccccgtgatcaggaaaacccatctcctccgtcgccttctccccgtgcatcgcaactcattccctccatcgtcttcaccccgtgcatcgcaacccatctcctccatcgccttcgccctgtgcatctgctgcatagccgtccagtgtcccctctgctgcccgaatatatttggtaaattcaacgaggttgtcgattcctccgaacaaggctgactttacttttagtgctagcaatggatgatacggtattagatgttgatcaagtggaaaatctcataaaattttgtccaactaaagaggaaatggaacttctcaagagctacactggtgacaaggagagtctagagaagtgtgaacaggtttctgaatttaaaaggagcttaaatactgtaaattctgcatgtaatgaggctatgttgttagcatcacaatatcaaaaggaagcggacaaatgcaattcgggtatggagacgtgtgaagaagtaagggagaaagctgaagaagcactgtcggctcaaatgaaattgacagcaatgtgggaaataagatctcgtcagaaagggtggagagataaggtcgccaaatctaatgcgcagacacaaggaaaaaccaactacactagattgcggtccaagaacaatttgcagaaggcacataatggctggctcctacctctacaaatgcatgtgggaggcattgcagcagcgaataagaatgatattgatcaacatgcagtcgacaccgtgctctgaattcgaattcaggtgtgagtttcagatattttatgtgcaaaaaagtattagagtgccatatgtttgtatgttagttaagcagattatagatagaacttgcagtaggatcaactaattagttgatcaaaaactacaccttgttttggtatagtatacttgcatattgcatatatttaataataatctcgggtc

SEQ ID NO: 11238 - DNA, 1095 bp, Gossypium hirsutum
  Clone ID: GOSHI-09MAY01-C424_8
caacgtttagcctttccgcaaaccccaaatagatttccccattctccacatttcccctaatccctaaatttcccccaaaatccctaagtttttttaatagttcttcgtttaagtaaagcccttatatttaaaaaaaattcaatttttttcaagtattagggaaagtgattcggccaggtttttcagcatctagagtttctgtcaatgttggagaagaggagcatacaagatttctggaagaaaaagtggagcaattgagaaatgagaatgcacttttaaagaaattactttccctggaagctgcagcagctgagagactcccagagaaaaggcaaagattgaagctcaaatcttagctgctgaagcagcagcaaaaatgaaggcagaggttgagctgaaaaagcaacgggaaagagaagagaagctgctggaattacattacaaaaggctaagaagttagcatcacaatatcaaaaggaagcggacaaatgcaattcgagtatggacacgtgcgaagaagtaagggagaaagctcaagaagcactgtcggctcaaatgaaattaacagcaatgggtcgaaataagagctcgtcagaaagtatgtatagaaaaggtcgccaaatctaatgcacagacacaagaatccccaccgattgaatcatacctttgaaagctcttttatgttttgactggtggcaaatggaacaggaaaaaccaactacactagattgcagtccaagtacaatttgcagaaggcacataatgactggctcttacctctacaaatgcatatggaaggcattgcaccagcgaataagaatgatattgatctacatacagttgatactgtatgtgctctgaacccgaattcaggtgtgagtttcagatattttatgtgcaaaaaaagtatcagagtgccttatgtttgtatgttagttaagcagattatggttagaacctccagtaggatcaactaattagttgatcaaaaactacacccaattttgtaatagtcaacttgcatatttgcatatatttaataataatctcgtgtcaactaattattctatttttttatttaattgttttgttttc

SEQ ID NO: 11239 - DNA, 1383 bp, Gossypium hirsutum
  Clone ID: GOSHI-09MAY01-C424_7
gttgaagtctgaagaatgcttgagaaaggaaagggagagagtgtctcattacctgcattcaagcagtgagacaaaattgttagagaaagtgcaacatgagttgttggtcacatatgcaaatcggctacttgaaaaggagcattcaggatgcagggccttgcttagagatgacaaggtggaggatctttctaggatgtacaggctttattgtaaaatacctcgaggcttggagcccgttactaatgtattcaagcagcatgttactgctgagggtacagccttggttcaacaggcagaagatgctgcttcaaatgctccgggtgtgcaggaacaggtccttataaggaaaataatcaagctgcacgacaagtatatggcatatgtgaccgactgttttcaaaaccatactctcttccacaaggctttgaaagaggcttttgaggtattctgcaacaaaactgttactggcagttcaagtgcagagcttttggcaactttctgtgataatatcctcaagaagggtggaagtgagaaattaagtgatgaagccattgaagaaacacttgagaaggtagttaagctgcttgcttatattagtgacaaggacctctttgctgaattttacaggaagaagcttgctcgtcgactgctttttgaccgcagtgctaatgacgaccacgagaggagtatatctgaccaagctgaaagcagcagtgtggtggccagttcacttcaaagatggaaggaatggtcacagatttgacattggcaagggaaaaccagacaaattttgaggagtacttgagcaataatccaaatgtaaatccagggatcgacttgacagtaactgttttgacaactggcttctggccaagttacaagtcttttgatctcaaccttcctgctgagatggtcaagtgtgttgaagttttcagggacttctatcagacgaaaaccaaacatagaaaacttacttggatatattctttgggtacttgtaaccttatcgggaagtttgagccaaaaactatggagttgattgttacaacatatcaggcctctgccttactgctgttcaattcctcggataggctcagctattcggagatcatgacacagttgaacttaaccgacgatgacgttgttagacttcttgcatttcgttgtcatgtgctaaagtataaaattctgaacaaggagccaagcacaaaaaccatctcctccactgatcagttcgagttcaactccaagtttaccgataaaatgaggaggattaaatttggagaatattgatcaatggcatgatgatgaagggctttgtattataaaatatgcaacatctccagcatatgatagaataaagtactgcaatatattccagtt

SEQ ID NO: 11240 - DNA, 1312 bp, Gossypium hirsutum
  Clone ID: GOSHI-09MAY01-C424_6
cccacgcgtccgcttctatttcaggtatgttaagcttctcttttacccttttttttttattttctggaatcttttgctactttgggtctcctgtaatataaatttctttctttttttttctttttttgcagcattttcaacagctacgtaccatggttttgagttggtatttcgaatggtaaactgatgtgccaatgaatgaaagaaaaacagttgaagctgagagtgagactcagcttgctgttgcagatggtcttgaatgctactggaatgcatttgagttgccttatacttttcctgcttcttaccttgaccctcaaaactacacttcattacttccattatattccattccacctgaagtcatcccatatgaaactttcacgatccattggtgctatggatgttggggagttcattattcctgttccatacgtaaagcaagtaaaggaattacttgagttaggggagagtgttggaacacaaagtcggggtctcacccaagaacttatttcattgctacctgtttcaaaatacaagtgcagcttattctcaaggaagaaatcaaggacagagaggtactgcttatgcttcatctttgtctcgttaaaatgtgatttgcttttatcagctgctgcttttggtcttccacagattttaaattgaaatactcaacaacccttgttcatcttggcataagttttatatgttaattttttcccttatgccactgttttaagagattggatatgtacttggctgtaatggagttcctcgaaattccaaaccagtaacagcgctgattttgtgatcattaactccatagtagagccattaatttcatatccgtatcctcatgtgtcccatacttgcacgttgaagtgcttttgcatttggaatatcttatattttacatgggaatggatattcaaatcttatattttacatggttatgatttaaggccttatttcatttaagtaacttcattataatatcttattttattgatatctttatatttaatctaatttttattatttattttagttttgattctaaatttttatttttattttaatattttagagatcttgagttctaacttttatattttaattgtgttatcaatttaatattttaaattttaaatttgaattcattaatttttgtatttaggtttaaagttaaaattttaatagaaaatttttatatttatatcgtagatattattcttcttaatattttgataatgaattttagattttttatatttatcatgacctttataatagtttataaattgtttttaaa

SEQ ID NO: 11241 - DNA, 688 bp, Gossypium hirsutum
  Clone ID: GOSHI-09MAY01-C424_5
gcctattgtaaatgccgtaattgacggggatgatattatttatcgagattatatagatatcagcattgctgttggaacttctaagggacttgtcgttccagttgtccgtgatgctgataagatgaattttgctgagatagagaagacaatcaacaatcttgcaaagaaggcaaatgatgggcccatatcaattgatgaaatggctggaggctcgtttacaatatccaatggcggtgtttatggaagtctattgagtacccccattatcaaccctcctcagtcggcgatcttaggtatgcactcgatagtgtcccgaccgatggttgttggaggtactgtactcccaagaccgatgatgtacattgcactcacttatgaccataggttgatcgatggaagagaggctgtcttcttcttgcgtcgtatcaaggacgtcgttgaagacccttgcaggctgctactcgatgtatgaactatgaagaccagttagtaagatttcatggtttttatagcacccagcatttgatttttattcctatatatataataaaaagaacaagaggaataaatgcctcaagttttttgtagggttgcatttgttgattcacccttttttttaattactttctgaaaggacggatggccattgttggagtatttgaaatacaatatttcctgttttcttttc

SEQ ID NO: 11242 - DNA, 1652 bp, Gossypium hirsutum
  Clone ID: GOSHI-09MAY01-C424_4
cccagctccggaaatgctaaaccttgttgggtttgcttggggtctcaccaaagcaactctcttcttttagagttttataaaaaggatagtcctcgagttaacaaagacaaagtgttattccaagtatggataatgaaagttctaatgtatcacaagccgaggaaataaaagtccaagcggggtagacggtggaaagcccacaagtatggtcaggccattgacttgtacacacaggcaatagagctaaatagtcagaatgcagtatactgggcaaatcgtgcatttgctcacaccaaactggaagagtatggtagtgccatacaggatgctacgaaggcaattgaagttgatcctaaatattcaaagggttattacagacgtggtgctgcttatctcgcaatggggaagtttaaggaagcgctaaaggattttcaacaggtcaaaaagatttgtcccaatgatcctgatgctaccaagaaattaaaggaatgtgagaaggcagtaatgaaattaaaatttgaagaagcaatttctgtacctgagtctgagaggcgttttgtagctgactctattgattaccatagcatagaggtggagccacaatattcgggtgcaaagatagagggagatgttgttactttggattttgttaagaaaatgatggatgacttcaagaatcaaaagtgtttgcataaaagatatgcattccagattgtcttacaaatgagaaaaatgcttcgatctcagccctctcttgttgatattaatgttcctgatggcagtcttttcactgtctgcggtgacgtgcatggccagttctacgatctgataaatatttttgagcttaatggtctcccttctgaagagaatccatatctctttaatggtgactttgttgatagaggatctttctctgtggaggtcatcctcacactatttgcattcaagtgcatgtgtccatcagctatttaccttgctagagggaatcatgagagtaagagcatgaacaaaatctacggttttgagggtgaggtcaggtccaagctgagtgagacatttgtggaactctttgcggaagtattctgttatttgcctttggctcatgtaataaatcagaaggtctttgtcgttcatggaggccttttcagtgttgatggggtgaaactctctgacattagagcaatagatcgattttgtgagcctcctgaggaagggttgatgtgtgaattgctttggagtgatccacaaccttacccaggacgagggcctagcaagaggggagtgggtctttcttttggtgcagatgtgacaaggagatttttgcaggataataatctagatttagtagtgcgatctcatgaagtaaaagatgaaggttatgagattgagcatgatggtaaacttattactgttttctctgcaccaaattactgtgatcagatgggtaacaagggtgcatttattcggttcgaagcccctgatttaaagccaaatattgttacattctcagctgtgcctcaccctgatgtcaaaccgatggcttatgccaataactttctccgaatgttccaatagtgatgccctacatctttctctaatttcaggctgggggttttaatctaatccaatccaaaggccagttcaagttgggc

SEQ ID NO: 11243 - DNA, 826 bp, Gossypium hirsutum
  Clone ID: GOSHI-09MAY01-C424_3
cggcacgagggcaattagcactgtccgtttgacgcaaaaaaagcacaaagacagtgggggacgtaagctaaagccttttctcccttttcatccgttgaaggaatggcttcagatcctaaagtgcacattttcgaggaggttgccaaccacaacaaaaccaaagattgttggctgattatttctgggaaggtttatgatgtaactccgttcatggatgatcatcctggaggtgatgaagttttgctgtcagctactgggaaggatgccaccaatgattttgaagatgtgggtcacagtgattcagcaagagaaatgatggaaaaatactatattggtgagattgatccaaaaactgtcccggcaaagcgcacttacattccaccccagcaaacgccttacaatcccgataagacccctgagtttgtcatcaagatcctacaatttcttgttcccctcttgatcctgggcttggctattgcggtacgtcactataccaagaaagagtagcttattactatacaggactttacctgttacgagggaagaatcagtgtgtctcatctgttagttgaaatagcacagtcatatcttttgtttaatttccttttagcatttgtgtgtcgaactaaatacctgttgatgatatgctccattgtcaaaagacaatactatatttgagcatctttgagcccccatttaagttagcagggaaaccagacaatgtttaatattgttggaatttaaaagcaggagcatgtttttatcaaaaaaaaaaacaaagaaaaaaaaaagaaaaaaaaaacaaaaggggctccggctacaaaaa

SEQ ID NO: 11244 - DNA, 1968 bp, Gossypium hirsutum
  Clone ID: GOSHI-09MAY01-C424_2
tggatccagcagccccgcaaaacgtgcatcgtcacagtctctcctctctctctttttcgctcgttcttttctcttctccccacgcctcccaaaaaaccctaatttatttttaaacaaattccaaaaaaaaagactgtattttacaactctcaaatttgtctgcaaagcttaaaatcagaagtcagtaatgttgggcgctttaaggagaaaagttgcgagcggacgctcatcagcttcgatattaggaaagtcattacaggcgattcggcctggtgtttcggcttccagagtttcttctaatgctggaaaagagatgctatcagttcaactgagagggatcgcccatgttcggaacttctctcatcttgttctgcctggatgttctgctggtttaacaaaaacaagagatgccatttgtatcatccaaccggaggctatcatgcaaacatcatgcagggctttctcttctggagatggggatctcgttgatgctgttgtcccatttatgggagaatcaatcagtgacggaactttggcaacattcttgaaaaaaccaggtgatagagtaaaagcggatgaaccgattgctcaaatagaaacagataaggtaacaattgatgttgtcagcccccaagatggtgtgatacaagagtatgtagccaaggaaggagaaactgtggaaccaggtactagggttgctgtcatttcaaagtctgctgagggggtagcagctgctgctcccactgaaaagaaatccgaaaaagctgcttctgagccatctcctgctgaagctgtaaaggaggataagccaaaagctaaagttgaagcttctgctgctgcggcgaaacctaaagccccttctccaccacctccaaaacgaacagcttctgaacctgtacttccacccaaggaaagggaaagaaaggttcctatgacaaggcttaggaaacgagttgctacacgattgaaagattctcagaatacttttgcaatgttgacaacgttcaatgaagttgccatcactaatttgatgaagctccgctccgattacaaggatgcctttgttgagaaacatggtgtcaagttgggatttatgtcaggatttgttaaagccactgttagtgcacttcagcatcagcctattgtaaatgctgtaattgacggggatgatattatttatcgagattatgtagatatcagcattgctgttggtactccaaaggggcttgtcgttccggtagttcgtgatgctgacaagatgaattttgctgagatagagaaaacaatcaacaaccttgctaagaaagcaaatgatgggaccatttcaattgatgaaatggctggaggctcatttacgatatccaatggtggtgtctatggcagtcttttgagtacccccatcatcaaccctcctcagtcggcgatcttgggtatgcactcaatcgtgtcccgaccaatggttgttggaggtaatgtagtgccaagaccaatgatgtacattgcactcacttatgaccataggctgattgatggaagagaagcagtcttctttttacgacgtatcaaggatgttgtcgaagaccctcggaggctgctacttgatgtctaaaaggcctaaatcgcaactaccgtgataattttcatgcttttttttccggcacacttagcattggatgtatatctcctatctaaatgaacatgaataaatgtctgaagttttgtagggtttcatttgttgattcacccgtaaacgagttccaaaatcgcggctggccatcgttgaactgttctcgagtttgctgatgtggcaactatggtgttctttctattttgcactaagttgtttgaagttctggtatagaaagggtgggcatagtaccactgctagtttaatgtattacccataaatcaaacatttgtgacacttttaaatgtgaaaaaaaaaatcagacatggacagtttgaatt

SEQ ID NO: 11245 - DNA, 960 bp, Gossypium hirsutum
  Clone ID: GOSHI-09MAY01-C424_1
ccccgcgtccggccagttttcaagatactcccatgatttgttgtattttctctaggctctcaaggaggcttttgaagtcttttgcaataagggtgttgttgggggctcaagggcggagctacttgccactttttgtgataatattctcaagaaaggtggcagtgagaaattgagtgatgaagcaatagaagaaacacttgaaaaggttgtgaagctacttgcttatattagtgacaaagacttgtttgcggaattctacaggaagaagcttgctaggcgacttctttttgaccgcagtgctaatgacgatcatgaaaggagtattctgactaagctaaagcagcaatgtggtggacagttcacctcaaagatggagggcatggttacagatctgacattggcaagggaaaaccaggccagctttgaggactaccttaggagtaactcagctgcacatcctgggattgatttaacagttactgttcttactacaggattctggccaagttataaatcatttgatctcaatcttcctgctgagatggtcaagtgtgtggaagttttcaaaggattttatgaaacaaaaacaaaacacagaaagcttacatggatatactcgctgggaacttgccacattaatggcaagtttgaacacaaaactattgaacttattgtttctacttatcaggctgctgtcctactgctcttcaatgcttctgatcggctgagctattcagagatcatggctcagttgaacttgacccatgatgacttggttagattactgcattcgctgtcatgtgccaagtataagattctaagtaaagagccaaacacaaaaaccatcttccacagtgactacttcgagttcaactccaagtttaccgataaaatgaggaggatcaagattcctctccctcctgtggatgaaaagaaaaaaagttgttgaagatgttgata

SEQ ID NO: 11246 - DNA, 538 bp, Gossypium hirsutum
  Clone ID: uC-gsflnu33B015f10b1
ttactcgatagaactcagggtaactggaaacttataaactattttaaagggaaggccctcacctatgatatacgccttgtgtgacagatgtggggttagagttagtacgtgggacttatcgtaatcggtacatatgcttatttaattatgtgatgggaaagtattgatgtgggatctaagaacagcggtatcattttgtattttctgcatgcttataatttaactatatattgtttttgtggatatcgatttgatgattactctgtgcgtggcaatagctcttttatgttgtgagtggtggcaaatggaataggaaaaatcaactacactagattgctgtccaagaacaatttgcagaaggcacataatgactagctcctacctctacgaatgcttgtgggaggcattgcagcagcgaataaggatgatattgatcaacatgcagttgagaccgtatgtgctctgaatttgaattcagatgtgacttttagatattttatgtgcaaaaaagtattagagtgccttatgtttgtatgta

SEQ ID NO: 11247 - DNA, 569 bp, Gossypium hirsutum
  Clone ID: LIB3583-054-P1-K1-E2
ccaaaatcccaaaacagatatcccaaacgcttagccatttccagcaaaaccccaaaatagatttccccaattctctacatttcccctaatccctaaatttcccccaaaatccctaagttttttttaatagtacttcgtttaagtaaagcccttgtattttaaaaaaattcaatttttttcaggtattagagaaagcgattcggccaggtatttcagcatctagagtttctatcaatgttggagaagaggtaaatattcgagtaattcatgcttctagttgatttttatttgaaatttgatcgatcttatttttcttttatttgtaattgatgtcgaagatgcttgatttgtttaggctttgtctcagtaaatactgatataaagtaagaagatagtaaagaatgcaagattaacatttttttttgtttctttttcttttaatatatgtgaggttctggcagatttatcaacggaaataaacttttagaaaaatgaaaatatcggaggttttcgcgagagagaatttctttttctctttctccagattcatttgaattatgtgattatgt

SEQ ID NO: 11248 - DNA, 448 bp, Gossypium hirsutum
  Clone ID: LIB3145-016-Q1-K1-G12
cacaaagtcggggtctcacccaagaacttatttcattgctacctgtttcaaaatacaagtgcagcttattctcaaggaagaaatcaaggaaagagagatgtgtaatttgccagatggaatataaaagaggtgagagacagattaccctaccttgcaagcatgtctaccatgctgggtgtggcaccagatggcttagcatcaataaggcttgccctatatgttatacggaggtgtttggcaatggatcaaaacattaaggggcaatggatcaaaacattaagggacaatgacgatgaacataaagaaaatattcgtatgctataaatatttttgggttggatttgggtatatccccctaatacgaagatgttctatttcgaccttttacgttgtttaacaaaaaaatagttgattttgacttttgcaataattgaaaggaagtatgata

SEQ ID NO: 11249 - DNA, 482 bp, Gossypium hirsutum
  Clone ID: LIB3582-025-P1-K1-B10
atttgttttattttattttaatcattaattgtatgtcactaatgcttaattgttataattttttacataaatgttttttttactcgaggctaagaagttagcacacaatatcaaaaggaagcggacaaatgcaattctggtatggacacgtgcgaagaagtaagggagaaagctaaagaagcactgtcggctcaaatgaaattaacagcaatgtggtaaataagagctcgtcagaaagggtggagagaaaaggtcgccaaatctaatgcatttccttatttcatttaagtaacttcattataatgtcttattttattgacatttttatatttaatctagtttttattatttattttagttttgattctaaatttttatttttattttaatatttaagataacttgagttctaacttttggattttaattgtgttattaatttattattttaaattctaaaatttaaattcattaatttttgt

SEQ ID NO: 11250 - DNA, 544 bp, Gossypium hirsutum
  Clone ID: LIB3825-005-Q1-N6-C11
aactcaaatactactttctgcactttaaattttattatatttactactaatatataataaaaggctgcattctgtaataaccctttgaatatttaggatccacttcaattgccttagtagcatcctgtatggcactaccatactcttccaatttggtgcgagagcaagtgagcgattggcccagtacactgcattctgattatttagctctatcgcctacgtgtacaagtcaatagcctgaccatatttgtgtgttgcaagccactgtaggtaaaatagcaattggtgtcaacaaatacacagcagctttatatgttggaagttcattaacataaggtatccaactcaagaagggtatcgattgctgaaatggctgagcccaccactgggcaccaacaattgttgtcataaagtgcaatccatatatcagcgcaagaccctcagtcggcccattgacaacaggaaggataagtgcattggtgaaatagtgttcccatgtagctccataaaatggtatagatgaaattacccaaaaccagaaact

SEQ ID NO: 11251 - DNA, 543 bp, Gossypium hirsutum
  Clone ID: LIB3584-050-P1-K2-B10
cccacgcgtccgcccacgcgtccgcccacgcgtccgcccacgcgtccggttcctgatggctgtcttttaaccgtctgtggtgacgtgcatggtcagttctacgatctgataaatatttttgagcttaatggtctcccttctgaagagaatccatatctctttaatggtgactttgttgatagaggatctttctctgtggaggtcatcctcacactatttgcattcaagtgcatgtgtccatcagctatttaccttgctagagggaatcatgagagtaagagcatgaacaaaatctacggttttgagggcgaggtcaggtccaagctgagtgagacatttgtggaactctttgcggaagtattctgttatttgcctttggctcatgtaataaatcaaaaggtctttgtcgttcatggaggccttttcagtgttgatggggtgaaactctctgacattagagcaatagatcgattttgtgagccttctgaggaagggttgatgtgtgaattgctttggagtgatccacaaccttacccaggacga

SEQ ID NO: 11252 - DNA, 521 bp, Gossypium hirsutum
  Clone ID: LIB3827-002-Q1-K6-E7
gcccaacttgaactggcctttggattggattagattaaaacccccagcctgaaattcttaaaaataaaaagaaacaataacataaaaaaccataacgggcagttatcaacatttaccactttgccagctgccccctggacaggaacaaacttagcatcaacccgtgaacagacattgtatcccaaaaaaagattcataccactgagcagtagagaaacatcgtttagcgaacaatggagctacagagcagtatagagattttatagcaaaaacctaattcatacgagattggagcattactactcacagagaaagatgtagggcatcactattggaacattcggagaaagttattggcataagccatcggtttgacatcagggtgaggcacagctgagaatgtaacaatatttggctttaaatcaggggcttcgaaccgaataatgcacccttgttcccatctgatacagtaatttggtgcagagaaacagtataagttaccatcatgctaatctcatacc

SEQ ID NO: 11253 - DNA, 525 bp, Gossypium hirsutum
  unsure (1)..(525): unsure at all n locations
  Clone ID: LIB3828-023-Q6-N6-D1
taaaaattagaataattagttgacacgagnatattattaagtatatgcaaaatgcaagtagacgattacaaaatagggtgtagcttttgatcaactaattatttgatcctactgcaggttctatctataatctggttgggtggacatacaaacataagacactaatacttttttaaaatatctaaaagtcaacctgaattcggattcatagcacatacggtgtcaactgcatgttatcatccttattcgctgctgcaatgcctcccacaagcattcgtagaggtaggagctagtcattatgtgcctcctgcaaattgttcttggaccgcaatctagtgtagttgatttttccgctgttcttagatcccacaacattactttcccatcataagatgaagaaagtaaatgaagaggagacgtaaatgatttataacttggccagaatcctgttgtgagaacagtcactgtcaaatcaatcccaggatgtgcagctgagtttagatattagaacagtcacttgtggaa

SEQ ID NO: 11254 - DNA, 515 bp, Gossypium hirsutum
  Clone ID: LIB3583-024-P1-K1-E12
attgataatttttatatcagtttgttagcagccttatcaagtatcaaatggctatttgttacttcttgtatattgcaggtgcagtttgatgaacttttctaaatatacaaggtgcttaaagtgtaaagcagagggtcaaagagggttgctacggatgatgttcaaataaagaaaggggattggaattgcccatggaatatcggcacccgtgtttcagttctcttcacatagtcattggatttcagcttgcaagtggcacaatacatctcctcttcatttactttcttcatcttatgatggggaagtaatgttgtgggatctaagaacagcggaaaaaccaactacactagattgcggtccaagaacaatttgcagaaggcacataatgactagctcctacctttacgaatgcttgtgggaggcattgtagcagcgaataaagatgatattgatcaacatgcagttgacaccgtatgtgctctgaatccgaattcaagtgtgacttttagatattt

SEQ ID NO: 11255 - DNA, 530 bp, Gossypium hirsutum
  Clone ID: LIB3585-013-P1-K1-C9
ctttcccggatatcaaaattttaatatcttagaaaaacgctggattttttaatacttttttagtttattagctttttaaaaaatgttgtaagtggataattttagacttatgattttttatagtgtattttaggcattttaatttctaagttttacggtactttttcttatggatgttagctattgtataggatgatattgtttcccgagatgaaagcgtggtggtttgctattctgttgtttatttaatgttgtcatggatgatgcagagttttataaaaaggatagtcctcgagttaacaaagacaaagtgttattccaagtatggataatgaaagttctaatgtatcacaagccgaggaaataaaagtccaagcaaatgaagcatttaaagcccacaagtatggtcaggccattgacttgtacacacaggcaatagagctaaatagtcagaatgcagtatactgggcaaatcgtgcatttgctcacaccaaactggaagagtatggtagtgccatacaggatgcttc

SEQ ID NO: 11256 - DNA, 438 bp, Gossypium hirsutum
  Clone ID: LIB3146-037-P1-K1-E9
caaaagtttgcgtaagttagttttttattttagctaaaattttattagcttttattagtttcttttttgtataaagtttggtcttctaaaaattttcctgtctcaagctcaataggtagtcaataagcactaaaactgatttttgatagttttcttcttctatttcagtattttcaacagctacgaaccatggttttgaggtcatatttcgactggcaaactgatgtgccaatgaatgaaagaaaaacagttgaagctgagagtgagactcagcttgctgctgcagatggtcttgaatgctactggaatgcatttgagctgccttatacttttcctgcttcttaccttgaccctcaaaactaaacttcattacttccattatattccattccacctgaagtcatcccatatgaaactttgagctcctacccatgccct

SEQ ID NO: 11257 - DNA, 306 bp, Gossypium hirsutum
  Clone ID: LIB3197-019-Q1-M1-C6
aaaatttgtctattaagcttaaaatatcagaagggattgaatatcggtgatgttgggcgctttaaggagaaaagttgcgattggaggctcgtcagcctcggtattaaggaaagcgattcggccaggtatttcagcatctagagtttctgtcaatgttggagaagagattctattacttcaacctagaggaattgcccatgtccggaacttttctcatctcattctcccaggttggtctggtggtttagcaaaaacaagggatgtcttttctagcattcagttagagactatcatgcaaaagtcatg

SEQ ID NO: 11258 - DNA, 301 bp, Gossypium hirsutum
  Clone ID: LIB3585-019-P1-K1-G7
cccacgcgtccggttcttcaggtgtgcaggagcaggtccttatcaggaagataattgagcttcatgataagtatatggcatatgtgactgactgttttcaaaatcatactctcttccacaagccttgaagaagctttgagtatctaacaaactgtactgcactcagtcgactttgctcttctgaatatctagaggtgatttaaataatataacatgaaaacatgaaggataatatgctttacaaaactttgaatcaaggagtttttttgcatattaatatgcaaaggaacatatgtgactt

SEQ ID NO: 11259 - DNA, 266 bp, Gossypium hirsutum
  unsure (1)..(266): unsure at all n locations
  Clone ID: LIB3584-031-P1-K1-A5
cccactcttacactgacacatcgcactcttttaactatctacccagacctccatnatcatttctacgagcttatggagatttttaagcttaatggtctcccttctnaatacaatccatatctctttaataatgactttattgatagaggatctttctctatggaagtcatcctcacactatttccattcaactacatgtgtccatcaactatttaccttcctaaactgaatcatgatactaacatcataaacaaaatctacttttt

SEQ ID NO: 11260 - DNA, 1206 bp, Gossypium hirsutum
  Clone ID: GOSHI-09MAY01-C794_1
tcgattttctgaaaacttctaaaccctaaagcttctctcttttcttctccattcaatcaaatatcatttaaaaaaaaaaccccttttttttggcagttttccccccttgttttccttgtcaaaaatggcaacacttcaagtaacaagcccaaaggaattgatatcaataaccgcttcttcttctttgttttcttcaagactacgttcttcttcaaaaatttcattgaagaaaagctttttgaggacgcgtcaccgttttggagggatagcctgttcatttgctccaatggaaactgccaagataaaggtggtcggtgttggtggaggtggtaacaatgctgttaatcgaatgattggtagcggtttacagggtgttgatttctatgcaataaacacagattctcaagcactattacagtctgctgccgagaacccacttcagattggagagcttttgactcgtggactaggcaccggtggaaatccacttttgggtgaacaagctgctgaggaatctagagatgccattgcaaatgctcttaagggctcagatcttgtcttcataactgctggcatgggcggaggcactgggtctggtgctgctccagttgttgctcagatagccaaggaggctggttatttgactgttggtgtggtaacctatcccttcagctttgagggacgcaaacgaactgtgcaggcactggaggctattgaaaagttgcaaaagaatgttgatactctcatagtgattcccaatgaccgtctgcttgatattgcagatgagcagacacctctccaagatgcttttcttcttgctgatgatgttctgcgccaaggtgtacaaggaatttcagatataatcacggtctctgattctctcatatgcaagctagatattcttagattggaccctttttagaggttttagattcagcttcaccattccagttaacaatcatgacctttggtcttgcaataactattgaatatatatggcgatgcatttatcatcttggccataaatgattaaatgctcgaaccatttgaaacttggttttatgattgttattcctgtgaagtatttgcggttttgagttttgtctattattgaaatttcttcatttcattttgcagatacctggattggtgaatgtggattttgcagatgttaaggcagtcatgaaagattctggaactgcgatg

SEQ ID NO: 11261 - DNA, 684 bp, Gossypium hirsutum
  Clone ID: GOSHI-09MAY01-C784_1
acgcgtacgcaacccgggcagccacgcgtccgcccacgcgtccggaaactgaggacaaagatgttgtatcagagggccttggttcgattgttgtatatgataaatggatttcacccccggtaattggccaacgtcccaaagcccgctaccagcatggagctgctgttgttcaggataaaatgtatatatatggtggaaaccacaatggacgttatctaaatgacctccatgttctagatttgagaagctggacttggtcaaaggtcgaagctaaggttgtacctaagtcagtggaatcaccatccccagtgaatatagccccgtgtgctggtcattcattgatcccttgggagaacaagcttctttcaattgctggccatacaaaagtcccttctgaaactatccaggggaaggcatttgatctgcaaactggtacatggtcagtgttgagtacttatggcaaagcaccggtctctcgtgctggtcaatctgtgacccttgttggaacaaccctagtgatatttggtggacaggatgcaaaaagaacactcttgaatgatctacatatacttaacctagaaacgatgacctggaacgaaattgatgctgtgggggctcctcatcaccacgagctgatcatgctgctgctatacatgcagagcgttaccttcttggttttggtgg

SEQ ID NO: 11262 - DNA, 1993 bp, Gossypium hirsutum
  Clone ID: GOSHI-09MAY01-C754_1
tcttcttctttttggtgaagccctcgcgtccgcttgatacttgaaagtataatattattatcatcggcaacatgtcatccgaatcggaagagcagcagctgagcaagaaagccgccaaaaaagaagctgccaagctggagaagatacgccgccgccaggaagccgccgccttggcctcagcggcttcttctctctccgtcgaggaggaggacccctattcctccaactacggtgacgtcactctcccggagcttaaatcttgctccaaaccagatgctggcaattggagcatggcaatttcttccatggactggactcgtgtcggagcccttacccaagagctgaaggagaaggaggtgcttataaggggacgagtccacacaacacgaccagtgtcgaagaatatggcgttcgtggtggtgagggagaggggatttaccgtgcagtgcttggttgctacgcatgaagcgggagtgagtcgtcagatggtgaagtttgtagctgcactcaatcgagaatccatcattgatgcaatcggtatggtatctgtccctgggaatcccatcaagggaaccacccagcaggtcgagattcatgttagaaaattgtattgtgtgaataaagctatgcctaccttacccattaacgttgaggatgctgctcgaagtgatgctgaaattgaagctgctttgcaagccggagataagcttcctcgtgtcaatcaagatacacgcttgaactttagggttcttgatattaggaccccagctaatcaaggaattttccgcatccagtgccaagttggaactatatttaggcaattcttgctgtctgagggttttgttgaaatccacacccctaagctgatagctggctctagtgaaggtggttctgctgtttttaagctagactacaaagggcaacctgcgtgtctggcacagtcccctcaacttcacaagcagatggcgatatgtggggactttggacgggttttcgaggttggcccagtttttagagctgaggattcctacactcataggcatttgtgtgaatttacaggtcttgatgttgaaatggagatcaagaagcattactctgaggtgatggacatcccggaccgaccgtcgcgtcccacgtcggtcggtctgactgacaagtgtcggaaggaacttgaagctgtagggaagcagtatccctttgaacctctgaagtacaagccgaagaccctgcgacttacatttgaagaaggaattcagatgcttaaggatgctggtgtggaagttgaccctcttggggaccttaatacagaagcagagagaaaattgggccagcttgttttggagaactatgacactgaattttatttgctgcatcgctatcctttggctgtgaggccattctacaccatgccttgctatgataatgccctttacagtaattcatttgatgtcttcatacgaggtgaggagataatttctggagctcagcgtgtccatgtaccagaatttttggcagaacgtgcacaggcatgtggaattgatgtcaatacaatctcaacctatgttgattctttcagatatggtgcaccaccacacggtgggtttggagtgggattggagcgtgtggtgatgctcttctgtgctctgggtaacattcgtaaaacttcactttaccctcgtgaccctcaaagaattgctccatgatcatgatagagcagaatttctgccaatgcaactcttggattttctccgaagttcgatgtgctatttggatagagaatcaaaggaatcttatttctgcttttatctttaaaaaattggctagtttttttttcccagcacaactctccctttgtttactaatggttttgttttgacttttggaaccgtgtttagaataacccgagccttaaccaattccttggatttgaaaagaaaggaacctttcgcaaatgaaaaattaaaaaactattaaaaatttaaaaagggcgggc

SEQ ID NO: 11263 - DNA, 365 bp, Gossypium hirsutum
  Clone ID: LIB3166-039-P1-K1-F2
ggttcttgatattaggaccccagctaattaaggaattttccgcatccagtgccgaggtggaactatatttaggcaattcttgctgtctgagggttttgttgaaatccacacccctaagctgatagctggctctagtgaaggtcttgatgttgaaatggagatcaagaagcattactctgaggtgatggacattgtggaccgattatttgttaccatgtttgatagtttgaatgagaagtgtcggaaggaacttgaagctgtagggaagcagtatccctttgaacctctgaagtacaagccgaagaccctgcgacttacatttgaagaaggagttcagatgcttaaggatgctggtgtggaagttg

SEQ ID NO: 11264 - DNA, 327 bp, Gossypium hirsutum
  unsure (1)..(327): unsure at all n locations
  Clone ID: LIB3147-017-Q1-K1-H4
acgcgtccggccacgcctccgccattatcatganagtgcagagttnctgccaatgcaactctcggatcgtcttctaagttcgatgtgggatttggatagaatcaaaagaatcttatttctgctttttatctttaaaaatcggctagtttgttttcccagcacactcttcctttgtttactaattgttatgttttgacttttgagacgtgtttagaataagccgagcctaaaacagtttattgaattttaaagaaaggactttgcaaatggagggatggatttttggatgcatgatggtggcatgcataaagtagtaatgatttgttt

SEQ ID NO: 11265 - DNA, 843 bp, Gossypium hirsutum
  Clone ID: GOSHI-09MAY01-C714_1
caagctcaaaaggaagcacctactgatatgcaatgcaaagataagtttttacttcagagtgtggttgctagtcctggagctaccccgaaagatataatggcggagatgtttaataaggaatctgggcataatgttgaagagtgcaagttgagggttgtttatgttgcacctcctcggcctccttcccctgttcgagaaggatctgaggaaggctcttcacctagggcttcagtctcggacaatggtagctttaatgctgctgaacttacatctgtgtctagagctcatgttgagcggcatgaaactcaagacaactcatgtgatgcaaggaccctcatttccaagctaactgaggagaaaaactctgccattcagcaaaatagcaagcttcagcaagaactggaactgttgagacgcgaagccaaaagaaaccaaagtggtattccattcatttatgtatttcttgtgggcttgatcggcatcattttgggatacctattgaaaagaacatggccaccaccgtgttacacattcttcgttttctttgatgcaacttccatggctgggaaaagaaaagaaatttggaaaattggtaaggtaactggtatcttattctgccggaatgtagtgcactgcttattgatctgtatggaggactagcaaaaaaaaaaaaaaaaacatgtgaagagcgttgtttgttcactgtatttccgtgcattatttaggaaaactaactctttattgctgatggtaggggttaaagtctagggtttctcgttcatgcgccttgatggattggttattaaatagtcgtatctttagattttttacgtttctcctttt

SEQ ID NO: 11266 - DNA, 602 bp, Gossypium hirsutum
  Clone ID: LIB3584-011-P1-K1-F6
tttgtagcacctactgatatgcaatgcaaaggtaagtgtttacttcagagtgtggttgctagtcctggagctaccccgaaagaataatggcggagatgtttaataaggaatctgggcataatgttgaagagtgcaagttgagggttgtttatgttgcacctcctcggcctccttcccctgttggagagggatctgaggaaggctcttcacctagggcttcagtctcggacaatggtagctttaatgctgctgaacttacatctgcaaggaccctcatttccaagctaactgaggagaaaaactctgccattcagcaaaatagcaagcttcagcaagaactggaactgttgagacgcgaagccaaaagaaaccaaagtggtattccattcatttatgtatttcttgtgggcttgatcggcatcattttgggatacctattgaaaagaacatggccaccaccgtgttacacattcttcgttttctttgatgcaacttccatggctggggaaaagaaaagaaatttgtaaaattggtaaggtaacttggtactttattctgccggaatgtagtgcactgcttattgatctccctggaggcctcgc

SEQ ID NO: 11267 - DNA, 275 bp, Gossypium hirsutum
  Clone ID: LIB3147-005-Q1-K1-G9
cccacgcgtccggaaaaagcctcgaaatgtggctagctaatagtggcaatgttcctttttcctctattgctgaagctgttctaaaattctgcaattatccaaaaggggggaaaaagggccttaaaaaacattgaggctttgctgtggcattgttattctgaaaaaaactttttattgcaggcaaggaccctcatttccaagctaactgaggagaaaaactctgccattcagcaaaatagcaagcttcagcaagaactggaactgttgagacgcga

SEQ ID NO: 11268 - DNA, 713 bp, Gossypium hirsutum
  Clone ID: GOSHI-09MAY01-C684_4
cccacgcgtccgcggacgcgtgggtaaatttggctctattttatggcatttaaatttcatgggggtgttcaagcttttaagattgaggaactcaaaatgatacatgaatataacgtcatcataatttcttgccccttctgttttcaacttttcttttcatggtgcttttgtttttgcgtacagctccaagggccgtggaaaaatgccggaaccggaactagctagtttaatacatgatttttgctatccgaagcagttctttctgaagaaataagaggatgttggagcgggcaggagatcacagggtatctgctttcacatggtgctactttttatcttctatttgcatgggaatttatatcatgtacgcttgtttttatctactaaaattataaaaccatcaaggtctagtgttttagagtctctgaacgaatcgctggtcccaatccttttttaagcttgtaaagtgcattgtttcttgaactttcatcgtgtgtgtgttttgtatgttgaaagacccccgacattatctgtaaacccctgactttgattgtattaatcctgtgtgctgctgctttgcgtgttctaaaaaaacaaataaaatcaaaataaaatataaaaaaaaataaaaaaaaaaaaaaaaaattattaaaaatacaattcaaacataaacaaataataaaagtaagtaatttaaattaaaggggcggccg

SEQ ID NO: 11269 - DNA, 578 bp, Gossypium hirsutum
  Clone ID: GOSHI-09MAY01-C684_3
cgtccggagaaactgagaaattgtgaaagaaaaagtgccggaatctcgcttctgttggtacccccccgtccgggagtgttgaagtattgaagctgtctggtgttttgtttgttttttgaaatctgatgtctccgccgcttcttggcgtggaggaagggggtcagaacaatgtgactttactgggttcttctggctctattgatagtgtgtgccagaataatgctgaattgaaggagcgcaattacatgggcttgtctgattgttcttctattgattgctctgttgtcacccttggttccgacgatagcaacgtaagtttgaatctgaaggcaacagagctcaggcttgggcttcctggatcacagtctcctgaaagaaatcctgagctttgcttgttaagctctgctcaacttgatgagaaaccccttttccctttgcatccttcaagtgatggtcactgctttccatctcaaaagactgtagtttcaggcaacaaaagaggcttctctgatgcaatggatgggttctcagaggggaatttcctttctaattcgaaagtagatgtgatgttgacaccc

SEQ ID NO: 11270 - DNA, 1799 bp, Gossypium hirsutum
  Clone ID: GOSHI-09MAY01-C684_2
gacttttgttactttgtgacaaatggagggtccttagctttctctctctctccaaaaaaaaaaaaaaagaaaacgaaaaaaagtttcgcttctttgctttctttcgagtaaaaatcaaacgaaaaacaacttaaataatattaaaagattttgattttgatcatcaaattttctgtttctgatccaccagtccagtcagagtgttgaagtattgaagctgtctggtgttttgtttgttttttgaaatctgatgtctccgccgcttcttggcgtggaggaagggggtcagaacaatgtgactttactgggttcttctggctctattgatagtgtgtgccagaataatgctgaattgaaggagcgcaattacatgggcttgtctgattgttcttctattgattgctctgttgtcacccctggttccgacgatggcaacgtaagttcgaatctgaaggcaacagagctcaggcttgggcttcctggatcacagtctcctgaaagaaatcctgagctttgcttgttaagctctgctcaacttgatgagaaaccccttttccctttgcatccttcaagtgatggtcactgctttccatctcaaaagactgtagtttcaggcaacaaaagaggcttctctgatgcaatggatggtttctcagaggggaatttcctttctaattcgaaagtagatgtgatgttgacacccaggccttcgtcaaacttgggactgaaatctggttctatgcttgagaaccttggggttcaaccaacaagggccaaagaggtcacgaaccagaaggtggtaaaggactcgtctcatgctgctaatgagacgaggcccaatcataatgcatctgcaaacaataacagtggagcacctgcttccaaggcacaggttgtaggttggcctcctattagatcgtttagaaagaactcattggccacctcttccaagaacactgatgaagtagatggaaagacagggcctgatgctctttttgttaaggtcagcatggatggtgctccttatctgaggaaagtggacttgaaaaactactctaaatatcaggatctgtcttctgcacttgaaaagatgttcagctgttttaccataggtcaatgtggttctcatggaaccctgggtagggagctgctgagcgaaagcaagctgaacgatcttctgcatggatcagaatatgttctcacttatgaggataaagatggtgattggatgcttgtgggtgatgtcccatgggagatgtttactgatacctgcaaaaggctgaggatcatgaaaagctctgatgctattggactcgctccaagggccgtggaaaaatgccggaaccggaactagctagtttgatacatgatttttgctatccgatgcagttctttctgaagaaataagaggatgttggagcgggcaggagatcacagggtatctgcttttcacatggtgctactttttatcttctatttgcatgggaatttatatcatgtacgcttgtttttatctactaaaattatgaaaccatcaaggtctagtggtttagagtctctgaacgaggtcgctgttcccaatccttttttaagctttgtaaagtgcattggttcttgaactttcaaaaaaaaaaaaaaaaaaaaaaaaaaaaaaaaaaaaaaaaaaaaaaaaaaaaaaaaaaaaaaaaaaaaaaaaaaaaaaaaaaaaaaaaaaaaaaaaaaaaaaaaaaaagggggttaaaaaaaaaaaaaatttaaaaaggggggtggaaaggaaaagatttttttttagggccccc

SEQ ID NO: 11271 - DNA, 1817 bp, Gossypium hirsutum
  Clone ID: GOSHI-09MAY01-C684_1
tttagcggccgtgaatttcacatccaacagcaaataagcttttgttactttgtgacgaatggagggtccttagctttctcttttaaattaaaaaaaaaaatcacacataaaaatatttaaaaaaaattaaactttgaacaaatttcaaagattttggttttcttctgcaatttctcatccaccaattgaatcaggttgtgaagtattgagggtgtttattatttgttgtttttttataattactgatgtctccgccgctgcttggcgtggaggaggaagggattcagagcaatgttactttactcggttcttcaggctcaatggaaagtgtgtgccagaatagtgctgacttgaaggaacggaactacatgggcttgtctgattgttcttcagtggatagctctgttttttcccctccgtccgaggaaagaaaggctagtttgaatctaaaggcgactgagcttaggctcggacttcctggattgcagtcgcctgaaagaaatccagagctttgcttgttaagttcttctcagcttgatgagaagccgtttttccctttgcatccttcaagtgatggtcactgctttgcatcacagaagagtgttgtttcagggaataaaagagggttctctgatgcaatggatgggttctcagagggcaagtttctttctgattcaaaagttgatgttatgctgtcacctaggccttcttcaaacttcggggctcaaccaatgaaagctaaagaaatcacgagccaaaacgtggtgcatgacaggcctcatgctgctgacaagaccaggcctaatcccaatgcatctgcaaacaataacagcggagcacctgctaacaaggcacaggttgtaggttggccacctatcagatcatttaggaagaactcattggcctcggcttcgaagaacactgatgaagtcgatggaaaggcagggcctggtgctttgtttgtgaaggttagcatggatggtgctccgtatttgaggaaagtagacttgaaaaactacactaaatatcaggagctgtcttctgcacttgagaagatgttcagctgttttaccataggtcagtatggatctcatggaacctcgggcagggagctgttgagcgaaagcaagctcaaggatctacttcatggatcagaatatgttcttacttacgaggataaagatggtgactggatgcttgtgggtgatgttccatgggagatgttcactgacacctgcaaaaggttgaggatcatgaaaagctctgatgccattggactcgctccgagggccatggaaaaatgcaggaaccggaactagctaccatcatacatgatcttttcccacacaccgaagattattatttctgaaagagatgacatgatgctggagtgggtaggagatcatcatgtaagcctgtttttgttctactgaaaaaagtcgtatccagtgcgtaaggctactgctataagcaagaactagaaattcccattgtaggcacaaccatttgtcggtgtttgtagcaaataaacctgttagtctacattaagttataaaaccttcctagtcctagcgtttgtgaggaactttaagattctatcagtcatgagtccgaacgagtccctgtttcaaagcatgatctttttagtttgtaaagtgcattgcttgttgaacttttatggtgcgtgtttgaatgatgaaagacctcgacatattatctatacaaaaaaaaaacaaaaaaaccggcccgggaaaaacagattaaaagacacaattttctttgtgcattaagtacaggtctgaacctttgttctaaaa

SEQ ID NO: 11272 - DNA, 562 bp, Gossypium hirsutum
  Clone ID: LIB3829-024-Q6-K6-B8
ctttctggtttaatccttcttttactttgtctttatgatcttaactatttcactggattttgttaaaagaaaaaaaaaggttgtgaagtattgagggtgtttattatttgttgtttttttataattactgatgtctccgccgctgcttggcgtggaggaggaagggattcagagcaatgttactttactcggttcttcaggctcaatggaaagtgtgtgccagaatagtgctgacttgaaggaacggaactacatgggcttgtctgattgttcttcagtggatagctctgttttttcccctccgtccgaggaaagaaaggctagtttgaatctaaaggcgactgagcttaggctcggacttcctggattgcagtcgcctgaaagaaatccagagctttgcttgttaagttcttctcagcttgatgagaagccgtttttccctttgcatccttcaagtgatggtcactgctttgcatcacagaagagtgttgtttcagggaataaaagagggttctctgatgcaatggatgggttctcagagggcaagtttctttctgattca

SEQ ID NO: 11273 - DNA, 531 bp, Gossypium hirsutum
  unsure (1)..(531): unsure at all n locations
  Clone ID: LIB3585-007-P1-K1-G9
cccacgcgtccgcccacgcgtccgcccacgcgtccgtctgtttctaagagaaaaatttgtgttgggctctttctttcttgttagctggtgtttgtttcctgagaaagctaaaaaaaatgcaggaatcttttgttcttagttaagcgttaaaagctgaaagtttaaattccagttctttctcagcaaccaaacatgttacaaccctacaaagcttctttaatgttgtgaagtattgagggtgtttattatttgttgttttttttataattactgatgtctccgccgctgcttggcgtggaggaggaagggattcagagcaatgttactttactcggttcttcaggctcaatggaaagtgtgtgccagaatagtgctgacttgaaggaacggaactacatgggcttgtctgattgttcttcagtggatagctctgttttttcccctccgtccgaggaaagaaaggctagtttgaatctaaaggcgactgagcttaggctcggacttnctggattgcagtcgcctgaaagaaat

SEQ ID NO: 11274 - DNA, 419 bp, Gossypium hirsutum
  Clone ID: LIB3493-011-P1-M1-A10
gcaaaaggctgaggatcatgaaaagctctgatgctattggactcgctccaagggccgtggaaaaatgccggaaccggaactagctagtttaatacatgatttttgctatccgaagcagttctttctgaagaaataagaggatgttggagcgggcaggagatcacagggtatcttctttcacatggtgctactttttatcttctatttgcatgggaatttatatcatgtacgcttgtttttatctactaaaattataaaaccatcaaggtctagtgttttagagtctctgaacgaatcgctgttcccaatccttttttaagcttgtaaaatgcattgtttcttgaactttcatcgtttgtgtgttttgtatgttgaaagacccccgacattatctgtaaacccctgactttgattgtatt

SEQ ID NO: 11275 - DNA, 442 bp, Gossypium hirsutum
  Clone ID: LIB3585-046-Q6-K1-H7
caaggatgttcgaagtctcttcagctttcgcttgttttggggggttttttttaaacgttgattctttgggggataagccaattattggataattgtttttttcggctcatagttgtttaataagattgtttttcatttaagaaaagagaagagtgttgaagtattgaagctgcctgtgttctgtttgatttttgaaatctgatgtctccgccgcttcttggcgtggaggaagggggtcagaacattgtgactttactgggttcttctggctctatggatagtgtgtgccagattaatgctgaattgaaggaacgccattacatgggcttgtctgattgaacttctattgatagctctgttgtcacccctggttctgacaatggcaacgtaagtacgaatctgaaggcaacatactcaagctagggcttcctggatcacattc

SEQ ID NO: 11276 - DNA, 429 bp, Gossypium hirsutum
  unsure (1)..(429): unsure at all n locations
  Clone ID: uC-gsronu33B143g05b1
gcaataactcatccaccaattgaatcaggttggggaggatttatggagaatattatgggttgcaaaccataattactgatgtctccgccgctgcttggcgtggaggaagaaagggattcagagcaatgttactttactcggttcttcaggctcaatggaaagtgtgtgccagaatagtgctgacttgaaggaacggaactacatgggcttgtctgattgttcttcagtggatagctctgttttttcccctccgtccgaggaaagaaaggctagtttgaatctaaaggcgactgagcttaggctcggacttcctggattgcagtcgcctgaaagaaatccagagctttgcttgttaagttcttctcagcttgatgagaagccgnttttccctttgcatccttcaagtgatggtcactgctttgcatcaca

SEQ ID NO: 11277 - DNA, 458 bp, Gossypium hirsutum
  Clone ID: LIB3582-044-P1-K1-F12
cccacgcgtccgcccacgcgtccgctcatccccatttctcctttttttttctttttctttttttgctcttctgtttttttattctttctatttttgttgttattttagttattgctttattgtttcctggtgtttgtttcctgagaaaactgaggaaaatatgtgaaagataaaaagtgcaggaatctcgcttctgttggtagttctccgtacagtagtgttgaagtattgaagctgtctgtgttctgtttgttttttgaaatctgatgtctccgccgcttcttggcgtggaggaagggggtcagaacaatgtgactttactgggttcttctggctctatggatagtgtgtgccagaataatgctgaattgaaggaacgcaattacatgggcttgtctgattgttcttctattgatagctctgttgtcacccctggttctgacgatggcaacgtaagt

SEQ ID NO: 11278 - DNA, 406 bp, Gossypium hirsutum
  Clone ID: uC-gsflmaxxa090f03b1
gcatgtttggaccttagctctctcctttaaattcaaggggggattttatacataacagtgtttttaaaaaaattaaactttgaacaaatttcaaagattttgattttcttctgcagtttctcatccaccaattgaatcaggttgtgaagtattgagggtgtatattatttgttgtttttctataattacctgatgtctctcgcctctgcttggcgaggaggaggcaggggttcagagcaatgttactttactcggctcttcaggctcaatggaaagtgtgtgccagagtagtgctgaattgaaggaacgggactacatgggctcgtctgattgttcctcagtggatagcatctggttcttccctccctacgaggaaagaaaggctagtttgaatctaaaggccact

SEQ ID NO: 11279 - DNA, 484 bp, Gossypium hirsutum
  Clone ID: uC-gsflmaxxa039f09b1
tttcagttgagctgtcaacacttaacagaacagaaaatacttgaaatggcagctaaataattttcaagtgttgaagtattgaagctgtctgtgttctgtttgttttttgaaatctgatgtctccgccgcttcttggcgtggaggaagggggtcagaacaatgtgactttactgggttcttctggctctatggatagtgtgtgccagaataatgctgaattgaaggaacgcaattacatgggcttgtctgattgttcttctattgatagctctgttgtcacccctggttctgacgatggcaacgtaagtacgaatctgaaggcaacagagctcaggcttgggcttcctggatcacagtctcctgaaagaaatcctgagctttgcttgttaagctctgctcaacttgatgagaaaccccttttccctttgcatccttcaagtgatggtcactgctttccatctcaaaagactgtagtttcaggcaa

SEQ ID NO: 11280 - DNA, 408 bp, Gossypium hirsutum
  Clone ID: LIB3165-052-Q1-K1-H3
cttccgccaacccgtccgcccacccttccggggaagtattgagggggttaattattggttgtttttggataattactgaggtctccgccgctgcttggcgtggaggaggaaggggttcaaagcaatgttactttactcggttcttcaggctcaatggaaagtgtgtgccagaatagtgctgaattgaaggaacggaactacatgggcttgtctgattgttcttcagtggatagctctgttttttcccctccctccgacgaaagaaaggctagtttgaatctaaaggcgactgagcttaggctctgacttcctggattgcagtcgcctgacagaaatccagagctttgcttgttaaggtcttctcagcttgatgagaagccgcttttccctttgcatccttcaagtgat

SEQ ID NO: 11281 - DNA, 261 bp, Gossypium hirsutum
  unsure (1)..(261): unsure at all n locations
  Clone ID: LIB3148-022-Q1-K1-G6
ccgaccccgcgtccgcccaccgtccgcccacccttccgtagtctttgcttttgagagtaactttaaaatcctagcagccttgagtcctaacgagtccctgtttcaatgcttgnctttttagtttgtaaagtgcattgcttgttgaacttttatggtgcgtgtttgaatgatgaaagacctcgacatattttcttttaaaataaaatttattattttttaatgttatatattatttaatgtttgttatttaattattatttt

SEQ ID NO: 11282 - DNA, 1838 bp, Gossypium hirsutum
  Clone ID: GOSHI-09MAY01-C644_1
gaatctgttgagatccactctagagtatggagttggctacttgcatgagggtttaagcagtttggatcaagaagttgtttcacagctgtttgaagctggatggattcaagtttgtgttatgagcagtgcattatgttggggagttccattatcagcgcacttggtggttgtgatgggcactcaatattatgatgggagggaaaatgctcacacagattacccggttacagatttgttacagatgatgggccatgcgagtcgtcctctacttgataattctggcaaatgtgtcatcctctgtcacgcccctcgtaaagagtattacaagaagttcttgtatgaagcattccccgttgagagccatttgcaccattttctacatgataacttcaatgctgaaattgttgctacagttattgagaacaagcaagatgctgtggattatcttacttggactttcatgtataggaggctcacccaaaatccaaattactacaatctccagggtgtaagtcacaggcatctctctgatcacctttctgagctcgttgagaacacattaaatgatctggaagcaagtaaatgtatcactatagaagatgacatggatctttctcctttgaatcttggcatgatagcctcttattattacatcagttacactaccattgagcgtttcagttcttccttgacttccaagacgaagatgaagggtcttctggagattctggcctcagcttctgagtatgctaatcttcccatacgacctggggaagaggaggttcttagaagattaattaatcaccagaggttttcctttgacaatccaaggtgcacagatccacatgtcaaagcaaatgccctacttcaggcccacttctctcggcagcatgtgggtgggaacctatcactagaccagcgagaggtgctcttgtttgctactaggctacttcaagccatggttgatgttatttcgagcaatggttggttgagccttgctcttcttgcaatggaggtgagccaaatggtgacacaaggaatgtgggagcgagactctatgcttctacagctcccatacttcactaaggaattagccaagagatgccaagagaaccctgggaagaacattgagaccatttttgatctggtggagatggaagatgacgagaggcgtgagctgttacagatgtctgatttgcagcttctggacattgcaaagttctgcaatcgtttccccaacatcgatttatcatacgaggtgattgatagtgacaatgtaagggctggggaatatgtcaccttgcaggttaccctcgagagggatctagaggggaagacagaggttggaccagttgatgctcccaggtaccccaaagcaaaagatgaagggtggtggctggttgttggtgacaccattagtaaccagctgcttgctatcaaaagggtgtctcttcagaggaaagcgaaggtgaaacttgaatttgctgctcccactgaagctacggagaaggcatacactttgtatttcatgtgtgattcttacctaggttgtgatcaggagtatagcttcactgtcgatgtgaaagaagccgctggccctggtgaagacagtggctcagagtaggctcatgttctgctaatgtttttttaaattcctgaaccactgttttactggtttgtctgcttctactctactcgttagaacgtgaatttatcattttgcaatagttctaatctcttatgtatgcttctgtgcttgagctccattgtagcagccctttcttatgcttaatggagttttttctatgatatgattatgctgaggaattatatattct

SEQ ID NO: 11283 - DNA, 398 bp, Gossypium hirsutum
  Clone ID: LIB3146-014-Q1-K1-B2
agccgtcggccaacgcgtccgcccacgcgtccgcccacgcgtccggccaaatggtgacacaaggaatgtgggagcgagactctatgcttctacagctcccatacttcactaaggaattagccaagagatgccaagagaaccctgggaagaacattgagaccatttttgatctggtggagatggaagatgacgagaggcgtgagctgttacagatgtctgatttgcagcttctggacattgcaaagttctgcaatcgtttccccaacatcgatttatcatacgaggtgattgatagtgacaatgtaagggctggggaatatgtcaccttgcaggttaccctcgagagggatctagaagggaagacagaggttggaccggttgatgctcccaagtacccg

SEQ ID NO: 11284 - DNA, 675 bp, Gossypium hirsutum
  Clone ID: GOSHI-09MAY01-C664_1
gaaaaaaggaaatctaaaacagtgaagaaccctacttttccagtttcggtgttctgtagtaaccaatttggtaggagattcagaggaagaagagtgatctttcataattagtagtaagtttatgtttttattgaatggcactagctttgcattgacgccctgattcttgttctcgttcacaattgattttagtaaaaatatcatagcttgcttctgtttctctacatctttaacttctatttctttacagctataaacttgcttgccgtaaaccctaaaatgatgtattcctttaatcggattgccaaatccatcacaaagccagtgatgtacacaattcactcgaaatttggtaaaccccacttgaatctgactaccctttgcagaaactctctccactaaacctcctcaaaatggcaaagatgactcttggaacgatgcctgggaaacagcttggctccctgatgacatttctcccaagaacagagctccttgggaagctgatgttaacttcccttctaatgaagaatccgcaaaaatggcgctttcatcggacgtcgatgctgaaaccaaggcatttgtcgaagacatgaatgagaattgcgatgagagacgaaagtcacgggggggaagcagaaagaggaagcataaaaggaggggaaaggagagggtggt

SEQ ID NO: 11285 - DNA, 528 bp, Gossypium hirsutum
  Clone ID: GOSHI-09MAY01-C614_2
cccacgcgtccgagtggagtctctttttgatgctgctggaagagacacctgggctggaataagaaaacttcttagacgtgagactgagactgctgcgttagagttttcaactgccatttctagttttgagttagaccagcctacaattgagagcatgctgcaaggtttgagggattatgcaagatatttggtggtgaagaaagcaggagaggatgcgccgaaaagttctgatcctcatgaaggataggttctcaactgtcttcagtcatgacaacgaattaatgccaagagtttggcctggaaaagaagacattaagacaattactaaggatgctcgtgctgcgtctctgaggctgttagctgttatggctgccatccggttggacgagaaaccagataaaatcgaaaacatactactttcttccctaatggaagcaaccgtgacttctccagaccctcttgcctctagcacatgggaggaggttcctcctgagaataccctgattacaccagtacaatgtaagtcac

SEQ ID NO: 11286 - DNA, 1386 bp, Gossypium hirsutum
  Clone ID: GOSHI-09MAY01-C614_1
gtctctgaggctgttagctgttatggctgccatccgggtggacgagtcgcccgcgcgtccccccacccgtccgctttcttccctaatggaaggaaccgtgacttctccagaccctcttgcctctagcacatgggaggaggttcctcctgagaataccctgattacaccagtacaatgtaagtcactatggagacagttcaaatcagagactgaatatacagttactcaagctatttcagcacaggaggcatacaagcgaagtaacaactggttacctcctccatgggcaattgtggcaatggttgtccttggatttaatgaatttatgcttcttctaaggaatcctctctatctcatgtttctatttgttgcatttttactctcaaaagctatgtgggtacagatggatgtcccagggcagtttcaacatggcactttggctgggctaatctctatttcatcaaggtttcttcctactgtcatgaatcttctaaagcggcttgctgaagaggcccaaggccatcgaaccccagagtcccccaggcaacaggaatcatcagtagcttttcagagcttcaggaatcaaagtcagctaaatccaacaagctcgattgcacagtcatctgtatcatccaacgtttctgtgtctgatagtagtgtcgagtactccagccctaacttaatgcagagaagaagtacaaaagttcaagaagcagagctttctcaataaaagctagtcttccggtgtagaatgtataccaagttagttcaagtgctacctcatgcaacttaaaatcttctttgggatgaaaaatggggatatataatatatggagagagagtcttttacatatgtaacgaaggatgcaggatttggatgtgctctatatgttcaatgagtctgccaaagttaccagggagatttgttttgtacgcacttttgaataaatttaattaatgacatcttcctttttatcctctaagtgacactcgggtattctagcccaaaacatcatttgatgctacaagttggtttaattttgctgtacttgcctttgcttcttccattccgtgtccctctccttggagctaaaggataatatcgatttctccgcctgtgcattgtactgttaacattaagttcagtcctccgtgcattccttattctctcagtggatatgatgtcggagctccagaccaacaggaatttcaacttgaaaagttgcaagctaaatgtgtgtagaaatccatgaaaaagcaagacctaatgttgctgtgaaggaaggtatgacaatcttgaacaaaaatcatattacaaattttaagcctgtatctgcttgaccaatgaacattaaaagttccaaatggattgcatgaaatggcgag

SEQ ID NO: 11287 - DNA, 544 bp, Gossypium hirsutum
  Clone ID: LIB3583-003-P1-K1-A6
cccacgcgtccgcccacgcgtccgcggacgcgtgggttgaaaacatactgttttcatcccttatggaagggagctgtgactgctgtatcttcagtggacagaagtattactacttcagaccctcttgcctctagttcatgggaggaagtttctccaaaaagtatcctgatcacgccagttcaatgcaagtcattgtggagacagtttaaagcagagactgagtatacagttactcaagctatttcagcgcaggcttacaagcaaagtaacaactggttacctaccccatgggcaattgtggcaatggttgtccttggatttaatgaatttatgctccttttaaggaatcctctctatctaatgggtctatttgttgtgtatttactttcaaaagtgatgtgggttcagatggacatcctagggcagtttcaacatggcactctggctgggctaatctttatctggtcgaggtttctttccaccatcatgaattttctaaggcgacttgcagaagaggcttcaggggcataaaactgatgagccc

SEQ ID NO: 11288 - DNA, 619 bp, Gossypium hirsutum
  Clone ID: GOSHI-09MAY01-C634_1
gtgctaccgagtttgcattgtcgggaatatataccgtaaagagtgatgtgtatagcttcggggtggtgatgttggagctgctaactggtcggaaaccactagacagttcaagggtgagatcagaacagtcacttgtccgttgggccactccacaactacacgatatcgatgcccttgcgaaaatggttgatcctacactcaatggcatgtatcctgcaaaatctctgtcgcgttttgccgacatcattgctctatgtgttcagccggaacccgagtttcgacctcccatgtctgaggtcgtgcaagcgttagtgaggttagtacaaagggcaagtgttgtgaaacggcgaccaagcgatgaatcgggattcgggtataagactccagatcatgaggcaggggacttttcgttctaaggtctgggaaaaccatcaatcccgaaaatcgaaagagtaatcaagtttatgtaattatatgtctcatacgttgacacttttttttaaaaagtttattatagtgtttacggtgcaaatatataggtgtattattggacaacatgatgcacattcatgttttttgcatcatagtaataaaataataattttctgtagtttcaagc

SEQ ID NO: 11289 - DNA, 661 bp, Gossypium hirsutum
  Clone ID: GOSHI-09MAY01-C194_4
cttggatgtatgaaagacgaacaactgcgaaagcatttgcgagggatgttttcatgaatcaagaaacttcccctttacaagcacattgctaaccttgccggtaacagcaagttggttcttcctgtccctgctttcaatgtcatcaatggtggttcacatgcaggaaacaaacttgctatgcaggagttcatgattcttcctgtaggagcatcatcctttaaggaggccatgaaaatgggtgttgaagtctaccaccacttgaagtctgtgatcaagaagaagtatggtcaagatgcaaccaatgtcggtgatgaaggcggctttgctcctaacatccaggagaacaaggaagggcttgaattgttgaagactgccattgctaaagctggttacactggcaaagttgttattggaatggatgttgctgcgtccgaattttatggatcagcagataaaacctatgatctgaacttcaaggaagaggtgatttgtgatacaagatattctcagtcattgcagctttatgagattctgtttatatatgattaccatatcattttagatatatattcaagttgctgtgtatatgtcggtctatattctattgttcggcatgtgcagaaaaatgatggttcacaaaagatatcaggagatgctctca

SEQ ID NO: 11290 - DNA, 607 bp, Gossypium hirsutum
  Clone ID: GOSHI-09MAY01-C194_3
tcttatccctttgaccaagatgattgggagcattgctccgaactgaccaatgaaatgggaacaaaagttcaaattgtcggagatgatcttttggtcaccactccatagagggttgagaaggctatcaaagaaaaaacttgcaatgctcttcttctcaaggctaatcaaattggatctgtcaccgaaagtatcgaagctgtcaaaatgcccaagaaagctggatggggtgtgatggccagccaccgcagtggtgaaactgaggatacatttattgcggatctttcggtcggtttggccacgggtcaaattaagaccggagctccatgccggtctgagcgtctagctaagtacaatcagcttttgcgtatcgaggaggagctcggttcggatgccatctatgccggagctagtttccgtgctcctgttgaaccttattaggagttggtttgatgataaagtttgttgcgactggatgtgcgcgatagagctctacttccaatgaataagttataataacacatagtgggttagtcaagactttttctttttcaataattttgacggaaattttgtttccaaagaaccataaatttatgtcgacaacctc

SEQ ID NO: 11291 - DNA, 659 bp, Gossypium hirsutum
  Clone ID: GOSHI-09MAY01-C194_2
ggattgattaattttaaaaatcttccattattgttctctcagtctccctttctctttagatctcataaaagctctaatctgatggctgctaccatcgtttccattaaagctaggcagattttcgacagccgtggaaatccaacggtcgaggttgatgtggaaacatccaacggtaaaaaggctagagccgcagttccaagcggtgcatccactggaatttacgaggctcttgaactgagagatggaggttccgattaccttggtaaaggtgtatcaaaggctgttgctaatgttaacacgattatcgggcctgcattgattggaaaggatccaactcagcagactgctattgacaatttcatggttcaacaattagacggaactcaaaacgagtggggttggtgcaaacaaaagcttggagcaaatgccattcttgctgtgtcccttgcagtttgcaaagctggagctgaagttctgaatattcccctttataagcacattgctaaccttgctggtaacaaaaagttggttcttccagtccctgctttcaatgtcatcaatggtggttcgcatgcaggaaacaaacttgctatgcaggagttcatgattctccctacaggagcatcatcttttaaggaggccatgaaaatgggtgtgga

SEQ ID NO: 11292 - DNA, 1769 bp, Gossypium hirsutum
  Clone ID: GOSHI-09MAY01-C194_1
aaacggcccttccttttcctttaatatcaacggttctcattcacttattctcctctttataaaccacatttcacttccacctgctggcttacctcacgcgtgcgaaaatctcgaagcttccttttccgttttagatctcaaaattcaaaaggctctctttttcatctcatggctgctactatcgtctccgtcaaagctaggcagatcttcgacagccgtggaaatcctacggttgaggttgatgtggaaacatcgaacggtataaaggctagggccgcagttcctagcggtgcatccactggaatttacgaggctcttgagttgagagatggaggttccgattacctcggtaaaggtgtatcgaaggctgttgctaatgttaacacaatcatcggccctgcattgattggaaaggacccaaccgagcagactgcaattgacaatttcatggttcaacaactggatggaacccaaaatgagtggggttggtgcaaacaaaagctcggtgcaaatgccattcttgccgtgtcccttgctgtttgcaaagctggagctgaagtcaagaaacttcccctttacaagcacattgctaaccttgccggtaacagcaagttggttcttcctgtccctgctttcaatgtcatcaatggtggttcacatgcaggaaacaaacttgctatgcaggagttcatgattcttcctgtaggagcatcatcctttaaggaggccatgaaaatgggtgttgaagtctatcaccatttgaagtctgtgattaagaagaagtatggtcaagatgcaaccaatgtcggtgatgaaggtggctttgctcctaatatccaggagaacaaggaaggacttgaattgttgaatactgccattgctaaagctggttacactggcaaagttgttattggaatggatgttgctgcgtctgaattttatggaacagataaaacttacgacctgaacttcaaagaagagaacaatgacggtaaacaaaagatctcaggagatgctttgaaagatttatacaagtcattcgtagccgagtatccgattgtgtcaattgaagatccatttgaccaagatgattgggagcactactccaaactaaccaatgaaatcggagaaaaagttcagattgtaggagatgatcttttggtcaccaacccaaagagggttgcgaaggctattgctgaaaaaacttgcaatgcccttcttctcaaggtcaatcaaattggatctgttactgaaagtatcgaagctgtgaaaatgtccaagcaagctggatggggtgtgatggccagccaccgcagtggtgaaacggaggatacttttattgctgatctttcagtcggtttggccacgggccaaattaagaccggagctccatgcaggtctgagcgtttagccaagtacaatcagcttctgcgaattgaggaggagcttggtgcggaagctgtctatgctggagccagcttccgtgctccagttgcaccctattaagatgcttgtttagatgataatttgctgagactggatgcgtgcggcagagcttcagtggtttattgtgaccctaaaacatgtttcaataattttgatagcaattttgtacttgttcagaattatatcaatctccgtgttatttttgttggactttgcctgcatatatgctcgctattttcataaatacatgatgcttggaatggaaaacaaaaaaaaaaaaaaattaaaaaaaaaaaaaatataaattaattaattttatattt

SEQ ID NO: 11293 - DNA, 469 bp, Gossypium hirsutum
  Clone ID: LIB3585-009-P1-K1-C6
cccacgcgtccgctatgttcgtcacttatttcccgatttgtttgcttttggatagtacgactcgacgagtcgaatcggtcgagcagttgaatattctaatcattttccgctgtttgcataaaataaatgctatcccggttgatgtggaaacatccaacggtaaaaaggctagagccgcagttccaagcggtgcatccactggaatttacgaggctcttgaactgagagatggaggttccgattaccttggtaaaggtgtatcaaaggctgttgctaatgttaacacgattatcgggcctgcattgattggaaaggatccaactcagcagactgctattgacaatttcatggttcaacaattagacggaactcaaaacgagtggggttggtgcaaacaaaagcttggagcaaatgccattcttgctgtgtcccttgcagtttgcaaagctggagctgaagttctgaatat

SEQ ID NO: 11294 - DNA, 218 bp, Gossypium hirsutum
  Clone ID: LIB3583-044-Q6-K1-F7
tcggaaacatcgaacggtataaaggctagggccgcagttcctagcggggcatacactggaattcacgaggctcttgtattcagagatgctatgctctatcaccctatgcaatgacaaataacttctcttcataataagatcagatgatcctcaactgaattactaggactagacaccaacgatgccaattggatacacatgtacaaactgaacaagac

SEQ ID NO: 11295 - DNA, 770 bp, Gossypium hirsutum
  Clone ID: GOSHI-09MAY01-C174_1
ggttaatactaagcttttatgtttttgctgtcaattccatgtatgactcacctccgctactgatgggcagatcacttgcgttatgtaaattgtatatggtttgaatgaacaggccagccaaggaggcatttgctcacaacgggatggagtacatttgttacttcaaagagattagtagctggtgattcctttgtgttcttgagaggggaaaatggggagctgcgcgttggagtgaggcgtgttgctcatcaacagagcagcatgcctacatcagtgatttcaagtcagagcatgcatttaggagtactagcaactgcatctcatgccgtttcaacacaaaccctctttgttgtctactataaaccaaggacaagtcagttcattattgggttgaacaaatatttagaggctctgagcaataagtttacagttggcatgaggtttaagatgagatttgaaggagaggattctcctgagagaaggttttctggcacaatcgttggggttgaagacttttctccttactggaaagattcaaaatggcgttcattgaaggtacaatgggatgaacctgcctctataccaagacctgacagggtttcaccatgggagatagaacccttcgctgctcctattccaccaactctgggtcaacctgttgctgctaagaacaaaaggcctagaccaactgctgaaattcctgctctagatttatctttcacagcattagcttcttggaattctggagttatgcatactcatgatctaat

SEQ ID NO: 11296 - DNA, 619 bp, Gossypium hirsutum
  Clone ID: GOSHI-09MAY01-C164_2
cccacgcgttcgcccacgcgtccgcccacgcgtccgcccacgcgtccggctttgattgaattctcagctgaggaagatgcacaaaaggttttggagcaaagcttggtttatgcaggcgctgaattggaactgaaacctaagaaggattttgatgctataagagaagaagaagcagaagaatatgaggataatcatccagtcacaggttcgaatggagataaccgtttgaatgctgaggataaataccccaagggcttggttgttgcatttgcattgaagaacatttcaggtggggacgctgcagagaaaaatggttctgatgaacctgcaaaggatggtgctactgagaagaatgaagagaagactgcagaaaatgacgaagataacaaagatcagggtgatgataaacaacctggtgtcgggtgacgaaacggagaacaaaaagtcctgtccagaagtgatgaggggaacaggacgtagaaacactgcatctgttttcaaagacgatatgaatgttgttttacgggaagatttgaaggaggccttccaaaaatttggcactgtgaagtttgttgacttcaaagctgttgaggagaagggttacattcggtttgatgaa

SEQ ID NO: 11297 - DNA, 895 bp, Gossypium hirsutum
  Clone ID: GOSHI-09MAY01-C164_1
cctaaacatcttcaaacctttgtttcttttctcttctctctaattttgtctctcgatcgcttaccgtacaataatggcgtcgccttctttaagcgaagatactgccaaggctgttcttcgccaggtagagttttacttcagtgatagcaatattccgagagataactttctcaagaaaaaaattaacgaagacgatgatggcaggcatggtcagtttggcattgatttgttcgttttcaaagatgagaagccatttgaatttaagggatgtgaaggcggaagaagtgccagaggctactttgaatgtcgttgctgaaactctcagaacttcctcttccctcagggtttctgaagacgggaagaaagttggtagaagcactgcactattagagcctgaagaattgttagagcaattagacagtagaacaattgctgcatcaccatttgagtttaatgtcaagatggaagctgtagaagccttttttggtcaatatgctaaggtaaatagtgtgaggttacctcgtcatgtagcaaacaaaaagtatttttgtggcactgctttaattgaattctcagctgaggaagatgcacaaaaggttttggagccaagcttggtttatgccaggcgctgaatgggaactgaaacctaagaagggattttgatgctattagagaagaagaagcagaagaatatgaggataatcttccagccacaggttcgaatggagataaccgtttgaatgctgaggataaataccccaagggctggggtgttgcatttgcattgaagaacatttcagtgggacgctgagagaaatggtctgatgacctgcaagatgtgctctgagagatgaagagacgcaatgcgagatacaagatagtgtgatacactggt

SEQ ID NO: 11298 - DNA, 315 bp, Gossypium hirsutum
  Clone ID: LIB3145-040-Q1-K1-F8
cccacgcgtccgcgtcgccttctttaagcgaagatactgccaaggctgttcttcgccaggtagagttttacttcagtgatagcaatattccgagagataactttctcaagaaaaaaattaacgaagacgatgatggcagtatcctttgtcttttttaaaactatttcccgctgtttgtgtaatattttatttacttattttatgctgctgcttcttgttgtttgctcttgaccgtgaattaccaaaaaagtggtcagtttggcattgatttgttcgttttcaaagatgagaagccatttgaatttaagggatgtg

SEQ ID NO: 11299 - DNA, 548 bp, Gossypium hirsutum
  Clone ID: GOSHI-09MAY01-C114_29
atataggaccgcccgccttttttttttttttttttagtctcttatttttgtgtttttgtgctggtttccagctttaaatacaaatttgaatgattttaaagttgccgatttaattaatcaaagtaccggcacatggaagaaagagttgataatttctacctttccggaggatgtagctgagaagattattggcatcccattggcagaagaacctcatgatgattttcgggtctggagtgtagaggcgtcgggcgaattcacagtgcgaagagcctataaactattacagagtattgaagcccacccgtccgcccacgcgtcccaagatgactataaggaattttacaaaaaattatggggacagctctcttagagaagaaaaagagaactatgtgttaagttgggatgttgtctaatgtctagaatatttaatgtctgtcatttagactcttttatggtgctgtttttatcgtcactgggtttggtggttttcaggaacttgctttatgtagtttttacgattaactaccattaaataagatactctt

SEQ ID NO: 11300 - DNA, 616 bp, Gossypium hirsutum
  Clone ID: GOSHI-09MAY01-C114_25
ccctcttcgtccgcccacgcgtccgcccacgcgtccgatttacatccgccttatccgttgctctagcagttgtgtttcttgtcattactgttggaatagcaattatcaagttgattagcggaactgtaatgatgcctagattgcttcccgatgtcactgatttgacctcattctggaaactcttcaccacagtccccgttttagtcactgcgtatatctgccattacaatgtccacagcatagataacgaactggaagattcaacccaaataagaccggttgtgcgaacagctctggctttatgctcaactggttacataatgacatgctttttcggattccttctattttggtgaccgccacaatggatgatgtgcttgccaactttgataccaaccttggcatcccctatagttcccagctctcttagagaagaaaaagagaactatgtgttaagctgggatgttgtctaatgtctagaatatttaatgtctgtcatttagactcttttatggtgctgtttttatcgtcactgggtttggtggttttcaagaacttgctttatgtagtttttatgattaactaccattaaataagatactctttttcatcatcc

SEQ ID NO: 11301 - DNA, 334 bp, Gossypium hirsutum
  Clone ID: GOSHI-09MAY01-C114_16
gaatagagatagaatatatacaagcaggcgctcccttcgaatatgatgttgctttggattttcaatgttttttttttttttgggttttggcaactttgggtgatatttccagttcatggttttttcaataaacaagtttatcaaggcttttaacttaatgccaggaactccattgattgaatgtggaatgttgatttcctgcttgggtatgggaccccacctttgataaaaatgtatatggattttatttaaatagtttatatatataaaaaaggctttagtaaaaaaaacccaaaaaaaaaaaaaaaaaaaaaaaaaaaaaaaaaactcgcta

SEQ ID NO: 11302 - DNA, 381 bp, Gossypium hirsutum
  Clone ID: GOSHI-09MAY01-C114_15
ggcccccaaaacattttctcttcgttattttccaaatccctaaaaaaacccccggaaagcctaaaacctaaaacaaggctataatcggaagcttgtttcattagatttggaggaataaaagaaaagagtagaaagggggaatggattcagatcaggggaagctgtttattggagggatatcatgggaaacaagtgaggataggctaaaggagtactttggccagtacggcgacatcttgcagactgttgtcatgagagataaggtcacggggagacctcgtggctttggatttgttgtcttctcagatccgtacgtcatcgatactgttcttcaagaaaagcacaccattgatggttgaacggcggagagatgcttcaaga

SEQ ID NO: 11303 - DNA, 338 bp, Gossypium hirsutum
  Clone ID: GOSHI-09MAY01-C114_13
ttttcggtggtaataaaaatctaggctttggagcaattcccgccatcgatgacaaactcggaaggcgagtctgtgagctgtgtagggtagccgagataagcactcaagaccaagttcttcaggtaaacccggaagcaactcggttgaaaactcaaatgtcttcatttcttaaagttttaagagggtttagcttttgtgaaatgccaggaactccattgattgaatgtggaatgttgatttcctgcttgggtatgggattccaactttgataaaaatgtatatgtattttatctaaatagtttatatatatatcccaggctttagtaaaacatattttt

SEQ ID NO: 11304 - DNA, 609 bp, Gossypium hirsutum
  Clone ID: GOSHI-09MAY01-C114_12
cccacgcgtccgcccacgcgtccgtccacgcgtccggttcagagagctgtctgcatgatctccaactcaaccagcgttgcggaagtgttttcccgcattgatcataaatttgatctcatgtatgccaagcgtgcatttgcgcactgcgtggggttggtgagggcatggaggaaggagagttttccgaggcacgtgaagatctcgctgccctggaaaaagattatgaagaagttggcgctgagtctggtgaaggagacgaaggggatgaggaggagtattgagggatgtaccgttatccgtttgctactgtgatgtattttcttgttgattttggatgtgtgttttcagggttgaatacctcggtataatgtactagtttttggtattttctatgaataaagtgcacggtaaaattaaaaaaaaaaaaaaaaaaaaaaaaaaaaaaaaaaaaaaaagggggggggggagtaaaaatataaaaaaaaataaaataaaaaaaaaaataaaaataaaaaaataaaaatattaaaaagggggggggccgttttaagggaccaaagtttacgtccccttgctgggaaggataaatcttttttataggggacccaa

SEQ ID NO: 11305 - DNA, 622 bp, Gossypium hirsutum
  Clone ID: GOSHI-09MAY01-C114_11
gttcggaaaccactacgccgaggtatttttgtctctagtattaatgttaataaaacgtgggttccttttaagtacgataatctaccgacattttgttttggatgtggaagaatggggcacgggataacagattgcactcaaataatacctttccggaggatgtagctgagaagattattggcatcccattggcagaagaacctcatgatgattttcgggtctggagtgcagaggcgtcgggcgaattcacagtgcgaagtgcctataaactattacagagtattgaagatgatcctagagcttacgctttacaagatggctataaggaattttacaaaaaattatggctcctgaaccttccttcaaaaatcaaaattacaatttggaagatatcatggaatttcctagctatacgagttaatatgcttcaaaaaaagctaacaaacataatagtatgtccacgctgtggagttggatcagagaacatggaccatcttttccgtgaatgccctgggtatttgcgaagaactcagcatcacaatgtaagatattctgctgtgcattatgggtaatttggggagatagaaatggcagagtgcacaaaaaagtgagtaaatctgac

SEQ ID NO: 11306 - DNA, 779 bp, Gossypium hirsutum
  Clone ID: GOSHI-09MAY01-C114_9
aggaaaaatcgtatcttcagcaaggggaaatccgaaggggtgcttcgacatgacgattggcggccaaccggctggccggatcgtaatggagctcttcgccgattgcactccacgcacggcggagaacttccgtgccctttgcaccggggagaaaggtgtcggacgcagcgggaaaccactccactaccaaggctcaaccttccaccgcgtgatccccaacttcatgtgccagggaggcgatttcaccgccggaaatggcaccggaggtgaatcgatatacggagccaagttcgaggacgagaacttcatcaagaaacacaccggaccggggatcctctcgatggcgaacgccggaccgggaaccaacgggtcgcagttcttcatttgcacgactaagactgagtggctcgatgggaagcacgtggtgtttggacaagttgttgaaggaatggatgtggttcgagacattgagaaagttgggtctagtggtggaagaacttctaagccagttgttattgccgattgcggacaactctaaaattaaaaagacagccacggtggttcatgtctgaagttttaagcttcattttatttttgttttaaatggttagtggttttggtggttctttaagaactaaccatggaataagataggctttttcattagtttccgtcattaatgaactgaaatttcagtttaaggcaatttatggatttggattattataattacatgattttggatatttattatatttgatgggaggtatgttgaggac

SEQ ID NO: 11307 - DNA, 915 bp, Gossypium hirsutum
  Clone ID: GOSHI-09MAY01-C114_8
ggagaacactggtggaatggccgcacctttgttcttatcgtcacaacactcggcatcttctctccattggcatgtttcaagcggatcgattccttaagatttacatccgccttatccgttgctctagcagttgtgtttcttgtcattactgttggaatagcaattatcaagttgattagcggaactgtaatgatgcctagattgcttcccgatgtcactgatttgacctcattctggaaactcttcaccgtagtccccgttttagtcactgcatatatctgccactacaatgtccacagcatagataacgaactggaagattcaacccagataagaccggttgtgcgaacagctctggctttatgctcaactgtttacataatgacaagctttttcggatttcttctatttggtgacgccacaatggatgatgtgcttgccaactttgataccaaccttggcatcccctatagttccctgcttaatgatgctgtccgtgtcagctatgctgctcacctcatgctcgtatttcccattgtcttctatccactgcgactcaacatggatggcctcctcttcccttattcaaggcctctagctcagtctaatacaaggtttgcttgtattactgccggactcgtagcagttatcttcttgggtgcgaatttcatacccagcatctgggatgctttccagttcactggagcaactgctgctgtttgccttggcttcatttttcctgctgcggttactcttaggaatcaccacttcatagcaacaaagaaggacaagatgttagctcttttcatgatgggccttgccgtattctcgaatgcggtagccatatacagcgatgcatacgccctgtttaagaagaattcaggagcaggacccaaggcatgatccatctagcag

SEQ ID NO: 11308 - DNA, 1075 bp, Gossypium hirsutum
  Clone ID: GOSHI-09MAY01-C114_7
tttttaatctcctcctcctcctcagaaatcggggggtcattttcatggccttttgtggcaaggactcctttgacatgactatcggtggtcagcccgctggtcggattgtgatggagcttttcgcagattgcactcctcgcactgctgagaacttccgtgccctctgtaccggcgagaaaggcgtcggccgcagcggtaagcccctccactacaaaggctcctctttccatcgtgtgatccctaactttatgtgccaaggaggtgacttcaccgccggaaacggtaccggaggtgaatccatctacggatccaagttcgctgacgagaacttcatcaagaagcacactggtcccggtattctctcaatggctaacgctggtcccggaactaacggatctcagttcttcatttgcacggctaagactgagtggctcgacggacagcacgttgtgttttggacaagttgttgaaggcatggatgtggtgtaagccattgtgatagtttttttttgcattttttgtatctttatgccctgcttttttttttttttctttctttcatattcttttttctttttaattttgttttccttttttattattctttttgctatttttatatccctatttatattctattttttatttttatattattttttatttatttgctttctttattctttttatctcattgtaatttttttttactctatttcttttatttatttttttccttcttttttctctattaattcgtttttttttttttatctttccattttttctttaattattccttttttatctttttttatttcttctatctttttttttatcttatatgttttattatttgattttttttactctttttatattttttttttttttttttattttcttttccattttatcttttatttattttttttttactctttttcttttttatttttactttctgttttttttctcgttttttttttctatgttttttttattttttttctatttcttactttatttattatctatctattctaacaatcttatttttttcttaatatttttt

SEQ ID NO: 11309 - DNA, 1242 bp, Gossypium hirsutum
  Clone ID: GOSHI-09MAY01-C114_6
ctcacccgttcgagccccaccctcccgattgatactacttttcaaacacattttcccttcaattttcgtataaggtcctaggaaaagaaatatgagagagtgcatttcagttcacatcggtcaggccggtattcaggtcggaaatgcttgctgggaactttactgtctcgagcatggcattcagcctgatggccaaatgccaagtgataagactgttggtggaggagacgatgctttcaacacctttttcagcgaactggtgccgggaagcacgtccctcgcgccatctttgttgatctggagcctactgttatcgatgaagtgaggactggtacgtaccgccagttattccaccctgagcaactcatcagtggcaaagaagatgctgccaacaatttcgctcgtggccattatacaattggcaaagagattgttgatctctgcttggatcgtatccgaaagcttgctgataactgtactgggctccaaggcttcttggttttcaatgctgttggtggtggtactggttctggtcttggatctcttctcttggagcgtctctctgccgactatggaaagaagtcgaagcttggtttcaccgtctatccttcacctcaggttctacatcagtgggggagccccacaacagtgcgcaggccactcattcactctttttttattctgtttttttttttcggcgggttatcgaagcattctctgacatctgctggcgttctttggtctttgttcgaccctcttcttccgttctttaccgccttgtctctctggttttctcttctctcccccctcctttgaggtttgatggagccctgaatgtggatgtgactgagttccagactaacctggtcccatatcccaggatccactttatgctttcttcttatgcccctgtcatttcagctgagaaggcttaccatgagcagctatcgtgggctgtgattacgaacactccttgcgcaccgctgttaatgctggccggaccggatgctgctctctgatttgggctttggttgatctcgatgctgccgatggccttttcactccatattaaagctaatcgtgtgggggttaacctaaacgttactgtttcattgactttgctcctcaattcctgcgaaaagctaaagcctgctgtgtactaaagtgcttaaacttattttcactggggctcagcaatgtttgggtttttcttttacgcgttcttttcttttctgggctttg

SEQ ID NO: 11310 - DNA, 1370 bp, Gossypium hirsutum
  Clone ID: GOSHI-09MAY01-C114_5
cccggtcgccccgcgtccgggcgcggggcggacgcgtgggcggcgcggacgcgtgcgcacgccccctcttacttatatcattcaataattttcatcaacaaagaaaaatgagagagtgtatttcgattcacattggtcaggccggaattcaggtcggaaatgcttgttgggaactttactgtctcgagcatggcattcagcctgatggccaaatgcctagtgacaagactgttggtggaggagacgatgctttcaacacctttttcagcgaaaccggtgccggaaaacacgtccctcgagctatatttgttgatctggagcctactgttatcgatgaagtgaggactggaacataccgccaactgttccaccctgagcaactcatcagtggtaaagaagacgctgcaaacaattttgctcgtggccattatacaattggaaaagagattgttgacctctgcttggatcgtatccgaaagcttgctgataattgtactgggctccaagggttcttggttttcagtgctgttggaggtggtactggttcaggtcttgggtctcttctccttgagcgtctctctgttgactatggaaaaaagtcgaagcttggtttcactgtctatccttcacctcaggtttctacatctgttgtagagccttacaacagtgtgctgtccacacattcactccttgagcacactgatgtttctgtgcttctcgacaatgaagcgatatatgacatctgcaggcgttcccttgacattgaacggcccacttataccaatcttaaccgcctcgtctctcaggttatatcatctcttaccgcctctttgaggtttgatggagccctgaatgtggatgtgaccgagttccagacaaacctggtcccttatcccaggatccattttatgctttcctcctatgctcctgttatttcagctgcaaaagcttaccatgagcaattatctgtggctgagatcaccaacactgcttttgaaccctcttccatgatggccaaatgtgatccacgccacggaaagtacatggcttgctgtctcatgtaccgaggtgatgttgtgcccaaagatgtgaatgcagctgtggctaccatcaagaccaagcgcacaatccaatttgtcgattggtgccccaccggatttaagtgcggtatcaactaccagccaccaactgttgttccgggtggagaccttgccgaggttcagagggcagtatgcatgatctctaactctaccagtgttgcggaagtgttttctcgcattgaccacaaattcgatctcatgtatgccaaacgtgccttcgtgcactggtatgttggtgaaggcatggagaagaaaattctcaaaggctct

SEQ ID NO: 11311 - DNA, 889 bp, Gossypium hirsutum
  Clone ID: GOSHI-09MAY01-C114_4
catttatcctgagccccgcgtccgccctcccgcccgcgctcccgtgggttcagctgcaaaagcttaccatgagcaattatctgtggctgagatcaccaacactgcttttgaaccctcttccatgatggccaaatgtgatccacgccacggaaagtacatggcttgctgtctcatgtaccgaggtgatgttgtgcccaaagatgtgaatgcagctgtggctaccatcaagaccaagcgcacaatccaatttgtcgattggtgccccaccggatttaagtgcggtatcaactaccagccaccaactgttgttccgggtggagaccttgccgaggttcagagggcagtatgcatgatctctaactctaccagtgttgcggaagtgttttctcgcattgaccacaaattcgatctcatgtatgccaaacgtgccttcgtgcactggtatgttggtgaaggcatggaggaaggagagttctcagaggctcgtgaggaccttgctgccctggaaaaagattatgaggaagttggagctgactctgctgaaggagatgaggaggatgagggagatgagtactgagcgaaggtcagggacgactacacctttacgactatgatgttgctttggattttcaatgtttttttttttttttgggttttggcaactttgggtgatatttccagttcatggtattttcaataaacaagtttatcaaggcttttactatgccaggaactccattgattgaatgtggaatgttgatttcctgcttgggtatgggattccaactttgataaaaatgtatatgtattttatttaaatagtttatatatttattaaggctttagtaaaacatgaattcaccttagctataaaaaaaaaaacctcgaa

SEQ ID NO: 11312 - DNA, 1025 bp, Gossypium hirsutum
  Clone ID: GOSHI-09MAY01-C114_3
aaagaaccctctccaacatggcttctaatcccaagtcttcttcgacatgaccgtcggtggccaaccagctggttccccacgcgtccgaagcaacccttgttttactcaaaaagatccctctccaacaatggcttctaatcccaaggtcttcttcgacatgaccgtcggtggccaaccagctggtcggattgtgatggagctctttgccgattgcactccccggactgctgagaacttccgtgctctctgcaccggcgagaaaggggtaggccgtagcggcaaacctctccactacaaaggctcatccttccaccgggtgatccccaatttcatgtgtcaaggaggcgactttaccgccggaaacggtaccggaggtgaatccatctatggagccaagttcgcggacgagaacttcatcaagaagcacacgggacctggcatcctttccatggcgaacgctggacccggaacaaacggatctcaattcttcatctgcacgaccaagacggagtggctggacggaaagcacgtggtgttcggacaggtagttgaaggcatggatgtggttaaagcgattgagaaggtggggtctagcggtgggaggacttccaagcctgttgttattgctgactgtggacagctttgaaaaagggcttattgaattgtgtttccttcataatatctggtctttttaggctccttttttttatgctatgctgcttctatggctactgggttttggtgttttttaagaagttgcttgatgtagctttttcattaactgccataaataagataggctttattttccaatcaaaaaaaaaaagaaaagttgttcttgctgactgtggacagctttgaaaaagggcttattgaattgtgtttccttcataatatctggtctttttaggctccttttttttatgctatgctgcttctatggctactgggttttggtgttttttaagaagttgcttgatgtagctttttcattaactgccataaataagataggctttattttc

SEQ ID NO: 11313 - DNA, 891 bp, Gossypium hirsutum
  Clone ID: GOSHI-09MAY01-C114_2
tcgaccacgcgtcccccgcgtccagaaaatatctcaaatctccttctccttctcagaaatcttagtatcatcaccatggcctcaaatcccaaggtcttctttgacatgacgatcggtggtcagcccgctggtcggattgtgatggagcttttcgcagattgcactcctcgcactgcggagaacttccgtgccctctgtactggcgagaaaggcgtcggccgcagcggtaagcccctccactacaaaggctcctctttccatcgtgtgatccctaactttatgtgccaaggaggtgacttcaccgccggaaacggtaccggaggtgaatccatctacggatccaagttcgctgacgagaacttcatcaagaagcacactggtcccggtattctctcaatggctaacgctggtcccggaactaacggatctcagttcttcatttgcacggctaagactgagtggctcgacggaaagcacgttgtgtttggacaagttgttgaaggcatggatgtggtgaaagccattgagaaagttgggtctagcagtggaagaacttccaagcccgttgttgttgctgactgcggacagctctcttagagaagaaaaagagaactatgtgttaagttgggatgttgtctaatgtctagaatatttaatgtctgtcatttagactcttttatggtgctgtttttatcgtcactgggtttggtggttttcaggaacttgctttatgtagtttttacgattaactaccattaaataagatactctttttcgtcatcacaagcaagccactgtaaaaagaaaaaaaaaaaaaaaaaaaaaaaaaaaaaaaaaaaaaaaaaaaaaaaaaaaaaaaaaaaaaaaaaaaaaaaaaaaaaaaaagggggg

SEQ ID NO: 11314 - DNA, 1641 bp, Gossypium hirsutum
  Clone ID: GOSHI-09MAY01-C114_1
ccggccccgcggcttccggaaggcgtcttgatacacgcccccatttattttatttttcaaacaaattttcccttcaattttcgtataatttcctaggaaaagaaatatgagagagtgcatttcagttcacatcggtcaggccggtattcaggtcggaaatgcttgctgggaactttactgtctcgagcatggcattcagcctgatggccaaatgccaagtgataagactgttggtggaggagacgatgctttcaacacctttttcagcgaaactggtgccgggaagcacgtccctcgcgccatctttgttgatctggagcctactgttatcgatgaagtgaggactggtacgtaccgccagttattccaccctgagcaactcatcagtggcaaagaagatgctgccaacaatttcgctcgtggccattatacaattggcaaagagattgttgatctctgcttggatcgtatccgaaagcttgctgataactgtactgggctccaaggcttcttggttttcaatgctgttggtggtggtactggttctggtcttggatctcttctcttggagcgtctctctgttgactatggaaagaagtcgaagcttggtttcaccgtctatccttcacctcaggtttctacatcagttgtagagccttacaacagtgtgctgtccactcattcactccttgagcacactgatgtcgctgttcttctggataacgaagcaatatatgacatctgcaggcgttctttggacattgaacgacccacttatacgaatcttaaccgccttgtctctcaggttatctcatctcttaccgcatctttgaggtttgatggagccctgaatgtggatgtgactgagttccagactaacctggtcccatatcccaggatccactttatgctttcttcttatgcccctgtcatttcagctgagaaggcttaccatgagcagctatcggtggctgagataaccaacagtgcttttgaaccctcttcaatgatggccaaatgtgacccacgacacgggaagtacatggcttgctgccttatgtaccgaggagatgttgtgcccaaagatgtgaatgcggctgtggccaccattaagaccaaacgcacaatccaatttgtggattggtgccctactggattcaagtgcggtatcaactaccagccaccaactgttgttccaggaggggaccttgccaaggttcagagagctgtctgcatgatctccaactcaaccagcgttgcggaagtgttttcccgcattgatcataaatttgatctcatgtatgccaagcgtgcatttgtgcactggtatgttggtgagggcatggaggaaggagagttttccgaggcacgtgaagatctcgctgccctggaaaaagattatgaagaagttggcgctgagtctggtgaaggagacgaaggggatgaggaggagtattgagggatgtaccgttatccgtttgctactgtgatgtattttcttgttgattttggatgtgtgttttcagggttgaatacctcggataatgtactagtttttggtattttctatgaataaagtgcacggtaaattttttcatatatatccatttttcttatttatttttctattccttttttatt

SEQ ID NO: 11315 - DNA, 553 bp, Gossypium hirsutum
  Clone ID: LIB3585-062-P1-K2-H1
gtccggttgatctggaccctactgttatcgatgaagtgaggactggtccgtaccgccagttattccaccctgggcagctcatcagtggcaaagaagatgctgccaacaatttcgctcgtggccattatacaattggcaaagagattgttgatctctgcttggatcgtatccgaaagcttgctgataactgtactgggctccaaggcttcttggttttcaatgctgttggtggtggtactggttctggtcttggatctcttctcttggagcgtctctctgttgactatggaaagaagtcgaagcttggtttcaccgtctatggtggagtgaggtttctacatcagttgtagagccttacaacattgtgctgtccactcattcactccttgagcacactgatgtcgttattttttttgataacgaatcaattatttaatttctccattacgtgcttttttacatttaatcgcctaatttattcataattttgaatcactctctttatttttaagtgatattaaatttgtaataatttctattaattttatttttt

SEQ ID NO: 11316 - DNA, 306 bp, Gossypium hirsutum
  Clone ID: LIB3189-006-P1-K1-E1
catggcttgctgtctcatgtaccgaggtgatgttgtgcccaaagatgtgaatgcagctgtggctgccatcaagaccaagcgcacaatccaatttgtcgattggtgcccgaccggatttaagtgtgggatcaattactttccaccaactgtttgttccggcgatttgtctctaccaattttttttttctagttttttttctctcatatttgtttcatgcgttgttttttaagttagtttttcttgcacacatattttttttaggcaaagttttcttttgtacaatattttgttttcttcaagttttt

SEQ ID NO: 11317 - DNA, 387 bp, Gossypium hirsutum
  Clone ID: LIB3083-100-Q1-L1-E8
aaaaatcttaaaaagattaatttattattttttgagtaaaaagaataaaatgcaatctgaagggcttcgatcttataattttaccgtgcactttattcatagaaaataccaaaaactagtacattatccgaggtattcaaccctgaaaacacacatccaaaatcaacaagaaaatacatcacagtagcaaacggataacggtacatccctcaatactcctcctcatccccttcgtctccttcaccagactcagcgccaacttcttcataatctttttccagggcagcgagatcttcacgtgcctcggaaaactctccttcctccatgccctcaccaacataccagtgcacaaatgcacgcttggcatacatgagatcaaattatgat

SEQ ID NO: 11318 - DNA, 510 bp, Gossypium hirsutum
  Clone ID: LIB3583-013-P1-K1-H11
aaaacacttacctcgcgccatctttgaagatctggcgcctactgtgctcaatcaatgcaggactcgcacgggcttaacaaggattccaccctcgatcaactaatcaacggcaaagaagatgctgccaacaactaccctcgtggccattatacaattggcaaacagattgttgatctctgcttggatcgaattcgaaagcttccttataactgtactggactccaaggcttattctttttcaatgctgttgatgaaggcactggttctgctcatggatctctcttcttggagcgtttctctgttgactattgaaagaagtcgaagcttggtttcaccgtctatccttcaccttacatatgtacatcagtatgctagccttacaacattacgcttagcactcattcactcattgagcacactgaagggactgaacttttcgattacgaatcaatatatgacatatttaggcgatctttcgacattgaacgaccaacttatacaaatcttaac

SEQ ID NO: 11319 - DNA, 479 bp, Gossypium hirsutum
  Clone ID: uC-gsflnu33B028b08b1
tgttttcgcgttcgatccataaggaggacacactgcatattgtgcttcgtcttcgcgggggcttctaattggtggcctattttagtcgatcacgtaattttattgtgtatgaactgtttgtgttttagagtgcgtttgcggctgtttaagggaactatgctttgacgtgctgaaatggtcagggaaccacatgtttaattaccatatgcataaggttatatgttcatcgggtgatccccaatttcatgtgtcaaggaggcgactttaccgccggaaacggtaccggaggtgaatccatctatggagccaagttcgcggacgagaacttcatcaagaagcacacgggacctggcatcctttccatggcgaacgctggacccggaacaaacggatctcaattcttcatctgcacgaccaagacggagtggctggacggaaagcacgtggtgttcggacaggtagttgaaggcatggatgtg

SEQ ID NO: 11320 - DNA, 351 bp, Gossypium hirsutum
  Clone ID: uC-gsronu33B178f02b1
ccgccgaaagcacagggtgtttggccatggctctgaaggcatggacgtggggaaagcccttgaaaaagtcaggagctagcagtggaagaacttccaagcccgttgctgtcactctctgccgacagctctcttagagacgaaaaagagaactatgtgttaagctgggatgttgtctaatgcctagaatattcaatgactgtcatttagactcttttatggtgctgtttttatcatcactgggttaggtggttttcaagaacttgctttatgtaggttttatgattaactaccattaaataagatactctttttcatcatcaagctaactcttgacgatggatcttaataaaa

SEQ ID NO: 11321 - DNA, 519 bp, Gossypium hirsutum
  unsure (1)..(519): unsure at all n locations
  Clone ID: LIB3828-024-Q6-K6-E12
ccgcccccatttatttattggggggggggattgccggggcttttcgttaatttcctcggaacagaacttgcagaagtgcgtttcagttcacatcggtcaggccggtcttcacgtcggtaatgcttgctgggaactttactgtctcttgcntggcnttcagcctgatggccgggggcgcggggtggtctgactgttggtggaggagacgatgctttcagcacctttttcagcgaaactggtgccgggaagcacgtccctcgcgccttcttttttgatctggagcctactgttttcgatgatgtgaggcctggttcgttccgccgtttttccaccctgtgcttctcatcagtggcttttatgatgctgctctcattttttgcttcgtggctctttttctttcgcctcttgagattgtttgatctctgcttggtttcgtttccgtttgcttgcttttttctgtttctgggtctccttggcttttcttggtttttcaatgtctgtctgtgtggttggttctct

SEQ ID NO: 11322 - DNA, 519 bp, Gossypium hirsutum
  Clone ID: LIB3829-011-Q6-N6-C8
agcaagcaaaacattatttttctacaattctgaaaatgctatatttgctattttacaacttgttttaatgtcttacacaacctaagtagaggaggggggagggggtatgatgtatgaacttcatacacttccctacacaatctaactttcatacattggaagcaaagttacatcttattatatagcttatcaaacctcctcttcccttattcaaggcctctagctcagtctaatacaaggtttgcttgtattactgccggactcgtagcagttatcttcttgggtgcgaatttcatacccagcatctgggatgctttccagttcactggagcaactgctgctgtttgccttggcttcatttttcctgctgcggttactcttaggaatcaccacttcatagcaacaaagaaggacaagatgttagctcttttcatgattgtccttgccgtattctcgaatgcggtagccatatacagcgatgcatacgccctgtttaagaagaattcaggagcaagaccc

SEQ ID NO: 11323 - DNA, 467 bp, Gossypium hirsutum
  Clone ID: uC-gsflnu33B037b06b1
ccttctcgtccgcttctttgttgctatgaagtggtgattcctaagagtaaccgcagcaggaaaaatgaaggacaagatgttagctcttttcatgattgtccttgccgtattctcgaatgcggtagccatatacagcgatgcatacgccctgtttaagaagaattcaggagcaggacccagggcatgatccatctagcagttcccttggttgcacaaaatgagattttatgtcaccatatccttgaagacacctggagttatctttcgatatccaattcgaaaatccaggtgttcggaggaggtttgataagctatataataagatgtagctttgcttccaatgtatgaaagttagattgtgaggggaagtgtatgaagttcatacatcataccccctcccccctcctctacttaggttgtgtaagacattaaaacatgttgtaaaatagcaaatatagcatatttca

SEQ ID NO: 11324 - DNA, 448 bp, Gossypium hirsutum
  Clone ID: uC-gsflmaxxa006c12b1
gttgaatccatagtgaagaacactgctaatagagctttgtaagatgacccaacgctgacagcagggtcgtcttggacgcaactacatgagtgcagcccgcgggaggattgtgatggagcttttcgcagattgcactcctcgcactgctgagaacttccgtgccctttgtaccggcgagaaaggcgtcggtcgcagcggtaagcccctccactacaaaggctcctctttccatcgtgtgatccctaactttatgtgccaaggaggtgacttcacggccggaaacggtaccggaggtgaatccatttacggatccaagttcgctgacgagaactttatcaagaagcacactggtcccggtattctttcaatggctaacgctggccccggaactaacggatctaattctttatttgcacggctaagactgcgtggttcgacggaaagcacg

SEQ ID NO: 11325 - DNA, 422 bp, Gossypium hirsutum
  Clone ID: LIB3148-050-Q1-K1-B9
cccacgcgtccgggcggatatggcaccgtattatatggcaccagatgctaaggcggatgcggagccagcatcaaaggccagaactaaattataaaacacatttgaccgactatgctttcaatagcgaacaccggaccagaaaccaacatacctcatgagtgtatttgcacgactaatactaagtgtctagaacagaagcacataatgtttgaacaattagttgaaagccttgatgtggttcgagacattgagaaagttgggtctagtggtggaagaacttctaaaccagttgttattgccgtttgcggacaactctaaaattaaaaagacagccacagtggttcatgtctgaaagtttaagcttcattttatgctgctttgttttgttttaaatggttagtggttttggtggttcttgaaaa

SEQ ID NO: 11326 - DNA, 385 bp, Gossypium hirsutum
  Clone ID: LIB3166-015-P1-K1-G10
cccacgcgtccgcccacgcgtccgcccactcgttctgccattacaatgtccacagcagagatgacgaactggaagattcaacccagataagaccggttgtgcgaacagctctggctttatgctcaactgtttacataatgacaagctttttcggattccttctatttggtgacgccacaatggatgatgtgcttgccaactttgataccaaccttggcatcccctatagctccctgcttaatgatgctgtccgtgtcagctatgctgctcacctcatgctcgtatttcccattgtcttctatccactgcgactcaacatggatggcctcctcttcccttattcaagtcctctagctcagtctaatacaagggttgcttgtattac

SEQ ID NO: 11327 - DNA, 368 bp, Gossypium hirsutum
  Clone ID: uC-gsflmaxxa006e12b1
tttatatctcaaatctcctcctcctcctcagaaatcttagtatcatcaccatggcctcaaatcccaaggtcttctttgacatgactatcggtggtcagcccgctggtcggcttgtgatggagccttgcgcagatagcactcctcggactgctgagaactgtgcatgccctttgtacggtggtgaaaggcgcacgaccggggagctcgtctgtattctacggagtctggtgttgctataaggttggccggaaactagtgtacccgactggggaattttccattgacaaggcagccatccattatacccgttgacttttgatgagttacagaacacctttggtggaattggaaaggacttcggatccttg

SEQ ID NO: 11328 - DNA, 456 bp, Gossypium hirsutum
  Clone ID: uC-gsronu33B146f05b1
gaatttatttacggatcaaagttcgctgacgagaacttgatcaagaagcacactggtcccggtattctctcaatggctaacgctggaccgggaactaacggatctcagttcttcatttgcacggctaagactgagtggctcgacggaaagcacgttgtgtttggacaagttgttgaaggcatggatgtggtgaaagccattgagaaagttgggtctagcagtggaagaacttccaagcccgttgttgtctgcatgatctccaactcaaccagcgttgcggaagtgttttcccgcattgatcataaatttgatctcatgtatgccaagcgtgcatttgtgcactggtactgttggtgagggcatggaggaggagaaaagttttctgaggcacgtgaagatctcgctgcactggaaaaagattatgaagaagttggcgctgagtctggtgaaggagac

SEQ ID NO: 11329 - DNA, 399 bp, Gossypium hirsutum
  Clone ID: uC-gsflmaxxa058c04b1
ccctcgcgtccgcccacgcgtccgcccacgcgtccggatacacgccccttcttacttttatcattcaataattttcatcaacgaagaaaaatgagagagtgtatttcgattcacattggccaggccggaattcaggtcggaaatgcttgttgggaactttactgtctcgagcatggcattcagcctgatggacaaatgcctagtgacaagactgttggtggaggagacgatgctttcaacacctttttcagcgaaaccggtgccggaaaacacgtccctcgagctatatttgttgatctggagcctactgttatcgatgaagtgaggactggaacataccgccaactgttccaccctgagcaactcatcagcggtaaagaagacgctgcaaacaatttt

SEQ ID NO: 11330 - DNA, 405 bp, Gossypium hirsutum
  Clone ID: uC-gsflnu33B137a05b1
taacattttctcttcgttattctccaaatccctaaaataaccccccaaaaccctaaaacctaaaacaaggctataatcggaagcttgtttcattagatttggaggaataaaagaaaagagtagaaagggggaatggattcagatcaggggaagctgagtctggtgaaggagacgaaggggatgaggaggagtattgagggatgtaccgttatccgtttgctactgtgatgtattttcttgttgattttggatgtgtgtttttagggttgaatacctcggataatgtactagtttttggtattttctatgaataaagtgcacggtaaaattataagatcgaagcctttttttggaaacaaatcgaggttttttgagaaccaatcaacatgtaagtaaaaactattg

SEQ ID NO: 11331 - DNA, 241 bp, Gossypium hirsutum
  Clone ID: uC-gsflmaxxa060b07b1
tcggttaatatcacaaatcttcttctccttctcagaaatcttagtatcatcactatggcctcaaatcccaaggtcttctttgacatgacgatcggtggtcagcccgctggtcggattgtgttcgcgcttttctccgattgacctccttgcatttcttaaatctttcttttttctctctctcttatttcatctttttttttctctcacttttatcccctttccttcttcattttctctcttt

SEQ ID NO: 11332 - DNA, 271 bp, Gossypium hirsutum
  Clone ID: uC-gsflnu33B058c02b1
ccttgaagacacctggagttatctttcgatatccaattcgaaaatccaggtgttcggaggaggtttgataagctatataataagatgtaactttgcttccaatgtatgaaagttagattgtgtagggaagtgtatgaagttcatacatcataccccctcccccctcctctacttaggttgtgtaagacattaaaacaagttgtaaaatagcaaatatagcatatttcagaaaaaaaaaaaaataaactaaaatttgaaataaataagtaat

SEQ ID NO: 11333 - DNA, 144 bp, Gossypium hirsutum
  Clone ID: uC-gsronu33B029c07b1
tcgggttaagttgggatgttgtctaatgtctagaatatttaatgtctgtcatttagactcttttatggtgctgtttttatagacactggtttagtagcaaactttagacttcatttattatcaattttcattatttacttatat

SEQ ID NO: 11334 - DNA, 748 bp, Gossypium hirsutum
  Clone ID: GOSHI-09MAY01-C104_2
ccttcttcgtccgtcaggagtgtactttgagccccaatattcacttggtagaaagatgttgacaaaagtgatagcaatggcatccattgtagatgatacatatgactcatatgcaacatatgaagagctcattccctatacaaatgcaattgagaggtgggatatcaaatgcatagatgaacttcccgaatacatgaagccgagctacaaggctctattagatgtttacgaagaaatggtacaactggtgcctgagcatgggagacaatatcgtgtcgagtatgcgaagaatgcgatgatacgacttgctcaatcttaccttgtggaggccagatggactcttcaaaactacaaaccatcattcgaggagtttaaggctaatgcattgccacttgtggttatgccatgcttgctattacatctttcgtcgcatgggagatatcgtaacaccagagaacctttaatgggcagctagtgaccctaagatcattcagcgtcacaattatttgaggtttatggatattgtgctgaacacaagttcaagcatagagagagacgattgctagcaatcgatgtacatgaagaaatgcgtacagacaagagcctagagtttcaacaacctgtagaggcttgaagataaaacagagtttgaaccacgaatgtccacaagttaatgtgctaaccttcagggggagtgtgtcaggagcaggttcatgtgaaacccaagggaactttgttgaccatcttt

SEQ ID NO: 11335 - DNA, 1945 bp, Gossypium hirsutum
  Clone ID: GOSHI-09MAY01-C104_1
tcgcccccccctccccgccccaaatttcaagagcaaaccaaaaaaaggctgcaaattcagcttttcaatatctgcttttgatcaatcgaaatggcttcacaagtttctcaaatgccttcttcatcacccctttcttccaataaggatgaaatgcgtcccaaagccgattttcagcctagcatttggggagatttcttcctcaattgtcccgacaagaatattgatgctgaaactgaaaaacgccaccaacaattgaaagaagaagtgaggaagatgattgtggcaccaatggctaattcaacccaaaagttagccttcattgattcagtccaaagactgggtgtgagttaccatttcaccaaggagatcgaagatgaactagagaatatctaccataacaacaatgatgccgagaacgacctctacaccacatcccttcgattccgactactccgagagcatggatacaatgtttcatgcgacgtattcaacaagtttaaagacgagcaagggaatttcaagtcatccgtgacaagcgatgttcgaggattgttggaactttaccaagcttcctatttgagggttcatggggaagatatattggatgaagcaatttctttcaccagcaaccatttaagccttgcagtagcatctttggaccatcctttatccgaagaggtttctcatgctttgaaacaatcaattcgaagaggcttgccaagggttgaggcaagacactatctttcagtataccaagatattgagtcccataataaggttttgttggagtttgctaagatcgatttcaacatggtacaacttttgcatagaaaagagctaagtgagatttctaggtggtggaaggatttagactttcaaagaaagttgccatacgcaagagatagagtggttgaaggctatttttggatctcaggagtgtactttgagccccaatattctcttggtagaaagatgttgacaaaagtgatagcaatggcatctattgtagatgatacatatgactcatatgcaacatatgaagagctcattccctatacaaatgcaattgagaggtgggatatcaaatgcatagatgaacttcctgaatacatgaaaccgagctacaaggcactattagatgtttatgaagaaatggaacaactggtggctgagcatgggagacaatatcgtgtcgaatatgcgaaaaatgcgatgatacgacttgctcaatcttaccttgtggaggccagatggactcttcaaaactacaaaccatcattcgaggagtttaaggctaatgcattgccaacttgtggttatgccatgcttgctattacatctttcgtcggcatgggagatattgtaacaccagaaacctttaaatgggcagccaatgaccctaagatcattcaagcttccacaattatttgtaggtttatggatgatgttgctgaacacaagttcaaacataggagagaagacgattgctcagcaattgagtgttacatggaagaatatggtgtaacagcacaagaggcatatgatgtattcaacaagcatgttgagagtgcttggaaggatgtgaatcaagagtttctgaaaccaacagaaatgccaacagaagttttgaatcgtagcctaaaccttgcaagggtgatggatgtactctacagagaaggtgatggctacacatatgttggaaaagcggctaagggtggaatcacttcattgctcattgaaccaattgcactttgaaatcatgttaatttttcctctccaagcttgtttcttaagaaatagttattaagttctaattaataatgttttataatattcatatattataaaagaaagtccaaatcaactgtctttgtactcattgccttgtattgatccaataaagttctttccaagctttcctttgtgaaaaaaaaaaaaaaaaaaa

SEQ ID NO: 11336 - DNA, 438 bp, Gossypium hirsutum
  unsure (1)..(438): unsure at all n locations
  Clone ID: LIB3147-023-Q1-K1-C9
ggaanacccggggcgagcgacgcgtacgcccacgcgtccgcccacgcgtccgacgatgtattcaacaagcatgttgagagtgcctccccggattttaatggggagttggggaaaccaacataaatgccaacagaagttttaaatcgtagcctaaaccttgcaagggtgatggatgtactttacagggaaggagatggatatacatatgttggaaaagcggctaagggtggaatcacttcattgctcattgaaccaattgcactttaaaattatgttaatttttcctctccaagcttgtttcctaagaaatagttattaagttctaattaataatgttttataatattcatatattataaaagaaagtccaaatctattgtctntgaacttatcggctcatattaattcaataaagttctatccaaacttttcattgtg

SEQ ID NO: 11337 - DNA, 252 bp, Gossypium hirsutum
  Clone ID: uC-gsronu33B121a02b1
agcagtccagcttacagcttccagttagaaacaatcaattcgaagaggctggccttggtttagaggcaaggcactatctttcagtataccaagatattgagtcccataataaggctttgttggagtctgcttagatcgttttcaacatgttatcaattctgcttattatagatcttatttcgttctttttttatttatttactacaactcttcttttatttatttcttttattttattttctttcttattat

SEQ ID NO: 11338 - DNA, 1613 bp, Gossypium hirsutum
  Clone ID: GOSHI-09MAY01-C134_1
ccccgcgtccgggaggtgagccaattgtgttcacgtatgaagttgcctttgaggagagtgatatcaagtggccgtctcgttgggatgcttatttgaagatggaaggatcgaaagttcattggttttcgatcttgaattcccttatggtgatcactttccttgctggtatagttcttgtgatctttttaaggactgttaggcgggatctgactcggtatgaggagcttgacaaggaggctcaagcgcagatgaacgaggagttgtcggggtggaagttagttgtcggggatgttttccgtgccccgtcccatcctgctcttttgtgtattatggtcggtgatggagttcagatccttggtatgggagttgtgactatattgtttgccgctcttggattcatgtctccagcatcccgtggaactctcattacaggtatgctattcttctacatgattcttggaattgcagctggctatgttgcagttcggctttggaggactatcggctgcggtgatcacaagggatgggcttcggttgcatggaaagctgcttgctttttccctggtatcgcatttttaattctcaccattttgaatttcctgttgtggggaagtcacagcactggagctatcccattttcgctctttgtcattctactcctactatggttctgcatctcggttccactcaccttagtcggaggatacttcggagccaaggcacctcacattgaataccctgtccgaaccaaccagatccctcgagaaatcccagctcaaaaatacccatcatggctgttagttcttggtgctgggactctacctttcggtaccctttttatcgagcttttcttcatcatgtcaagcatatggatgggacgcgtgtactacgtcttcggctttcttctcatcgttatggtcctcctcgttgtggtttgtgccgaagtatcattggtgttaacttacatgcatctctgcgtagaagactggaaatggtggtggaaatccttcttcgcttctggttcagtcgccatctacatcttcttatactccgtaaactacctcatattcgatctcaagagtttgagtggaccggtctctgcaactctctacttggggtattctctcttcatggtcctcgcaatcatgttggccactggcacgatcgggttcctttcatctttctggttcgtgcattacttgttctcttccgtaaagctggattgaagaggtaaatcggtaacccgagaggcaggggaggaaagaattggaccttttacattacttgatcatatattacatgtgttatattgagctcatttactctgttaggggaactttagtaaaatgcaataacaataatatggcgcagtttcatttaaattctttattagttgttactatgatgcatggtactgcatttgcattatgaggctggtttttaggttgtgtttgtaacatttcttggtgctactttatactatttatttggggatctgtaatgcaagctgagcacagttcactttttttattgctctaaaacgtgttgaagtgtgatggtcaaattacagttttggaccttttactaaaaaaaaaaaaaaaaaactcgaaggg

SEQ ID NO: 11339 - DNA, 449 bp, Gossypium hirsutum
  Clone ID: uC-gsronu33B060b11b1
tcgatgcgtgcgcgtgcccaagctcgtacgcctgaccccattttaaatctttaccatgatgaatttcctatcgcgggtaagaaacaggactgaagcgataccactgtagatgtctcgcatgctactcatactacaggcctgcatgtagagttcactcacctgagcagcatgatgcatcttagcaccagcgccggagatggaggacccggtgctaaccatgcagaagcttcaagagatgctacctcagagattccgcatcatggctgttagctctaggtgctgggactctacctttcggtaccctttggatcgagctcttcttcatcatgttaagcatatggatgggacgcgtgtactacgtcttcggctttgttctcatcgctatggtcctcctcgttgtggtgtgtgcccgaagagtatcggggttaactcacatgcatctctgcgta

SEQ ID NO: 11340 - DNA, 303 bp, Gossypium hirsutum
  Clone ID: LIB3083-047-Q1-G1-F1
attggaccttttacatcactttatcatatattacaggtgttatattgagctcatttactttgttaggggaactttagtaaaatgcaataacaatagtatggcgcagtttcatttaaattctttagtagttgttactatcatgcatggtactgctggtttttacgttgtgtttgtaacatttcttggagctactttataccatttacttggggatttgtaatataatctatgcacagttcacatttttatttgctctaactttgtttaagtgtgttggtccaattacagtttttggtccttttt

SEQ ID NO: 11341 - DNA, 860 bp, Gossypium hirsutum
  Clone ID: GOSHI-09MAY01-C124_1
cccacgcgtccgcccacgcgtccgaaccagtgccataaacatgtttctcccaatctttttcattttctctttcctattttcctccaccaacgcagccgacttctgtgttggggacttgaatggccctgtaggccctgcaggctattcttgcaagaagacagccaccgaagatgacttctctttctccggcctcctccgtaccgcaggcaacacttcgaacctcgtaaaagctgcaataacaccagccttttcgactcaattcccgggtgttaacggactcggcatttcaatagctcgtttggatttagctgttggtggagtgatacctatgcatacacaccctagggcttctgaactcattcttgttatggatggcacactttttgctggtttcatatcctcagataacaaagtttactccaaatctctgaatgaaggagacattatgattttcccacaaggtttattacatttccaaatcaatacaggcaaaactcaatccgtggcatttgtatccttcaacagtgcagaccctggtgtccaaatcctggactttgccttgtttacaaatgacttgccgactgacattattgaaggaaccacttttctggatgctgctcagattaagaagctgaagggtgttcttggaggaactggttaatattatttgaacttgttgagagtccctttttttttcgtatgctttcacgtttgcttgtgtcttcttgtcagtggtagtttgttggaaattactagcaaaagagtgagtctctgttgtgtttctttgtgttccttcttcaggttctactgtgaaccaaaaatgtaataaaaaagaccatcgctttctcgaaaaaaaaaaa

SEQ ID NO: 11342 - DNA, 448 bp, Gossypium hirsutum
  Clone ID: LIB3189-008-P1-K1-A10
cttgaatggccctgtaggccctgcaggctattcttgcaagaagacagccaccgaagatgactggtctttctccggcctcctccgtgccgcaagcaacacttcgaacctcgtaaaagctgcaataacaccagccttttcgactcaattcccgggtgttaacggactcggcatttcaatacctcgtttggatttagctgttggtggagtgatacctatgcatacacaccctagggcttctgaactcattcttgtttacaaatgacttgccgactgacattattgaaggaaccacttttctggatgctgctcagattaagaaagctgagggggttcttggaggaactgggtaatattatttgaacttgttgagagtccctttttttttcgtatgctttaacggttgcttgtgtcttcttggcaagggaagttggtgggaattactagcaaa

SEQ ID NO: 11343 - DNA, 299 bp, Gossypium hirsutum
  Clone ID: GOSHI-09MAY01-C394_6
ggaaagtttaaaattttcaatacaaacaatttgtgggtaaacctgaatgctatcaagaggcttgtggaagctgatgcactcaagatggagatcattccaaacccgaaggaggtcaatggaatcaaggttcttcaactggaaattgcagctggtgcagcaattagggtataaaattgtaccaattatggttataatgtattaaaatgtaaaaagatcagtctaacccatgtgttttcccttacgtgattaagttctttgatcatgctattggtatcaacgtacctcgatcgcgattcttt

SEQ ID NO: 11344 - DNA, 396 bp, Gossypium hirsutum
  Clone ID: GOSHI-09MAY01-C394_5
ctcttcttcccttttcaaactcatttctttcgcctctttttttctttttctcggatcgtctttctccctctcagcaaagatctttgattctttctgtctctttttcgttcgctctctgaggctggaaacaggctcgtcaaacccccatcgtcagtcgctgagctcatccctttcctagacatgggccatgagttccttaactcttaaaggcaaagcttctgatcaagctccagccttggcaaatattcagacagctcagaagcgtcctgtttcgcaaccagtttcacagcctaaaccacaagcctctttgaatcttcggtactttttcacctttggtttgggaagcaatatttggatagaaaacctctcagaaagccttctaaggttttttttggt

SEQ ID NO: 11345 - DNA, 1824 bp, Gossypium hirsutum
  Clone ID: GOSHI-09MAY01-C394_1
aaaaaaaatggtttagatataaatttgtatatatgcgttatatccccgcgtccccccccccgccctcgcgtttggttttgaaggtgacaaacaacagcacaccacacagcagcgcattttcttgttcttgttcttcttctagttgtttccaatggaaaagctggaacacctcaaatctgccgtcgctgctctttctgaaatcagtgaaaatgagaaaaacggattcatcaaccttgtctcccgctatctcagtggagaagctcagcacatagagtggagtaagatccagactccaactgatgaagtggttgttccttatgacaccttgtctccctctcctgatgatcctgctgaaaccaagaagctcttggacaaacttgttgtcttaaagcttaatggaggtcttggaaccactatgggatgtactggtcccaaatccgtcattgaagttcgcaatggcttgacttttcttgacctaattgttattcagatcgagaatcttaattctaaatacggatgtaatgttccgttggttctgatgaactcattcaacacccatgatgacacattgaagattgtcgacaagtactcaaattcaaacattgagattcatactttcaatcagagccaatatcctcgtctggttgttgaagattttgctccattaccaagcaaaggccagcatggcaaggatggatggtatcctcctggtcatggtgatgtgttcccatctctaatgaacagtggcaagcttgatgctttcttatcacagggcaaggagtatgtcttcgttgcaaactcagacaatttgggtgctattgttgacttgaaaatcttaaaccatttggtccaaaacaagaatgaatattgtatggaggttacacccaaaaccctagctgatgtcaagggtggtactcttatttcttatgaaggaaaagttcagctccttgaaattgctcaagtccctgatgaacatgtcaatgagttcaagtctatagaaaagtttaaaattttcaatacaaacaatttgtgggtcaacctgaatgctatcaagaggcttgtggaagctgatgcactcaagatggagatcattccaaacccaaaggaggtcaatggaatcaaggttcttcaactggaaactgcagctggtgcagcaattaggttctttgatcatgctattggtatcaacgtacctcgatcgcgattccttccagtgaaggcaacttcagatttgcttcttgttcagtctgacctttacaccttagttgatggatttgttatccggaataaagatagagcgaatcctacaaacccatccatagaattggggcctgaattcaagaaggttggtaacttcttaagtcgattcaagtcgatcccgagcatcattgagcttgatagccttaaggtgactggtgatgtttggtttggtgctggcattgtgctcaaggggaaagtgagtatcgctgcaaaacccggggtgaagttggagattcccgatggagctgtaattgagaacaaggaaattaatggccccgaagacatctgagagaggcccgtctgccagcctaagtttccccgattttggtgtgttgcagtagataacgaacgcatcttttatataaataggaagtaaaataaaataaaaaaacctggaacagaagtagtatttgcgtttcatatcacatatatatgttgtatgtcttgcgggagtttcccttgaattactatttttcgaggtatgatgaaaaacagtgttctgaatgttgtatctactttttacaccaaacaacttagccccttttaaaaaaaaaaaaaaaaaaa

SEQ ID NO: 11346 - DNA, 540 bp, Gossypium hirsutum
  Clone ID: uC-gsronu33B130b01b1
ttgggattaaaaaattttccccacctccttaactctttcaaacctaattcctgccgcctcttctttctttttctcggatcttctttctccctttcagcaaagatctttgattttttccgtctccttttcgttcgctctctgaggctggaaacaggctcgtcgaaccccctttgtcagtcgctgagctcatccctttcctagacgttgatgaagaacctgcaattagaacaaataccaccatattatgaaattttaatgaaagtcgtgaatttcacagcttctttgaatcttcagtactttttcacctttggtttgggaagcaatatttgggaagaaaacctctcagaaagcattctaagtttttttttttgttaggcttctaaaatttgaggtcaatggaatcaaggttcttcaactggaaactgcaactggtgcagcaattagggtataaaattgtaccaattatgttatgatgtataaaaagtaaaaaagatatgtctaacatgtgttttcttacgtgattaatctttgatcatgcta

SEQ ID NO: 11347 - DNA, 471 bp, Gossypium hirsutum
  Clone ID: LIB3583-054-P1-K1-B2
gttttgaaggtgacaaacaacagcacaccacacagcagcgcatttttgtttccaatggaaaagctggaacacctcaaatctgccgtcgctgctctttctgaaatcagtgaaaatgagaaaaacggattcatcaaccttgtctcccgctatctcagtggagaagctcagcacatagagtggagtaagatccagactccaactgatgaagtggttgttccttatgacaccttgtctccctctcctgatgatcctgctgaaaccaagaagctcttggacaaacttgttgtcttaaagcttaatggaggtcttggaaccactatgggatgtactggtcccaaatccgtcattgaagttcgcaatggcttgacttttcttgacctaattgttattcagatcgagaatcttaattctaaatacggatgtaatgttccgttggttctgatgaactcattcaacacccatgatgacaca

SEQ ID NO: 11348 - DNA, 395 bp, Gossypium hirsutum
  unsure (1)..(395): unsure at all n locations
  Clone ID: LIB3083-004-Q1-L1-D2
ccggcctgaaggaattcncaccaaccaaatccaatctttgaaatcaatcctttaaataaaacccagttgcctcttttggttgtggaaaattttgctccattaccaagcaaaggccagcatggcaaggatggatggtaccctcctggtcatggtgatgtgttcccatctctaatgaacagtggcaagcttgatgctttcttatcacagggcaaggagtatgtcttcgttgcaaattcagacaatttgggtgctattgttgacttgaaaatcttaaaccatttggtccaaaacaagaatgaatattgtatggaggttacacccaaaaccctagctgatgtcaagggtggtactcttattttttaataaaggaaaagttcaactccttgaaattgctc

SEQ ID NO: 11349 - DNA, 282 bp, Gossypium hirsutum
  Clone ID: LIB3135-032-Q1-K1-G6
aggcatttgattaactgacatacatcagatattgctttatgaaggggccactccagactggcgtggtggtcattgtgacctgtccacctatcctctacggatggcgttatacaagttaaagatctagctaatcctacaaacccatacatagaattggggcctgaattcaagaatgtagggctcctgttatatagattcaagtaaaaaccgagcatcattgagcttgatagccttaaggcgactggagatgttcggttatggtgctggcattgtgctcaaggg

SEQ ID NO: 11350 - DNA, 515 bp, Gossypium hirsutum
  Clone ID: GOSHI-09MAY01-C384_1
cacgcgcccaggcggacgacgacgcatccgaacagagacaggaacaaaaacaaggttaattccctcaacaaacagacaatgcagatttaatttcagtggataagatttattaataggccgctgtctttcccttttctatcaaaattcccggctagaatcgacgcgtcggaagctcatagcccaagcttccatggggttagcttcggccgttcaccagggcggtggcattcgaatctctcttaatttccatctcagagttgcctcagtgtcgcctacggttcaattgcccagatggaccggattccgcttctcaaaccatcgtgtctcccttgtccattcagtaagtcataaacgccgcacgatatgtttcccagttgctcgctccaagggaatggacaggaggataatttgtctagagaagaggagaggagagcttcaaattcttatgctgattcccaggagaaacttcagaaaagtgaagcttatgcatcatctggttaaaactgttgcttttt

SEQ ID NO: 11351 - DNA, 2200 bp, Gossypium hirsutum
  Clone ID: GOSHI-09MAY01-C354_1
aagaaggagatggagatgaagatgaagggaaaagtgaggatcctaatgcgatttcgaggtttcggatttcggaagcgcttagggaaaagcttaagtccaaggggattgaggctttgttccctattcaagccatgacttttgatgtgattcttgatggcactgatttagttggccgcgcacgaaccggtcagggtaagacactggcctttgtgttgcctatattggagtccttaacaaatggccctggaaaatcgtcaaggacgtctggatatggaagggcaccaagtgttctagtacttttaccaaccagggaattggctaaacaggtttttgaggactttgaagtttatggtgaggcagtggggttgacatcatgttgtttatatggaggtgctccttaccacacccaagagatgaaactgaagagaggggttgacatagttgttgggactcctggacgtgtaaaggatcacatagagaggggcaatattcacttaggttcattgacattccgagttcttgatgaagcagatgaaatgttgagaatgggatttgttgatgatgttgaacttatattaggcaaggtagcggatgcaagtaaagttcagacagttctttttagtgccaccttgccagactgggtgaagggtattgcttcaaggtttcttaaaccaagtaagaagactgttgatctagttggtaatgagaagatgaaggctagtaccaatgttaggcatattgttttgccctgttctaagtctgcaaggtcacagttgatcccagatattatacgttgttatagcagtggtggacgaactattatattcactgagacaaaagattctgcctctgagcttgctggcttattgcctggatcccgggctttgcatggtgacatacagcaggcccaacgtgaggtcactcttaatgggttccgctcagggaagttcatgacattagtggctaccaatgtggcagctaggggattagatatcaatgatgtgcagttaatcatccagtgtgagcctccacgtgatgtagaagcatacattcataggtctggacgaacaggcagagcaggcaatactggagttgctgtcatgctttatgatcctaaaaggtcaagcgtatcaaagatagaaagagaatccggtgtaaaatttgagcacatatctgctcctcagcctgttgatattgcgaaatctgctggtgtagaagcagcaaaaataataacccaagtctctgacagtgtaatccctgccttcaaggacgttgctcaggagcttttggaaacttctggcctatcagcacaagatctgctcgccaaagcacttgccaaggctgcaggttactctgagataaagagtagatcccttctaacgtctatggagaaccatgttactttacttcttccggctggaaaacctatttacacactttcatttgtttttggtgtcttgaaaagattcttgcccgaggaaaaggttcagtcagtgcaaggtctgacccttaccgctgatggaatgggtgcagtttttgatgttgcagaagatgatgtggaagcatttcttactggtgctgaaaatgcagctaatgttaacttagaggtgttgaagaatgcgttgccacccttgcaacagagggacatgtcaagaggaagatttggtggtggacggggtggttttggtgatagaaatggtggtggtagcaggttctctggcggcagaggtggtggccgaggtgggttttccgatagaaggaatggaggtgggcgaggtcattataatagtaagagatggtgagtgaactctttgacttcagccaatgtaataagagtactcgagggaagtggcaccacctgaagatgaagaagaagatatgaacccttgcaacattttatctacttgtgttaatctgtatttttttatttttatttttcgtttttaaattgtatgataatccctgggggttttgccttcctccccagttttatttcttatgttttgctagaaatgtaagaaaaatacatttaatatgtaatccttgcctgcgaccaaaaacattagcaggagaaaagaattataaaaaatatttaagcaaaatgtactgtgtatttatgttaattaaaaattaaaaggttttgtgtctatctgtttatatttttctatctcacgttctccttctatctaatccttttttt

SEQ ID NO: 11352 - DNA, 804 bp, Gossypium hirsutum
  Clone ID: GOSHI-09MAY01-C314_2
gttttcaccgaaataaaaggacctttgcccctcccccccgtcttccccccccccgctccggaagagctgtcctttttctctctctatattttctcatctccttttccaccgccgtcgatctcgatccgtatccccgttttcaaaaaagctccaaaaagatggccaatgctgcatcgggaatggctgtgcatgatgattgcaagttgaagttcctggaacttaaggcaaaaagaacccaccgctttattgttttcaaaatcgaggagaagcagaagcaagttattgtggagaagcttggtgagccaaccgagagctatgaggattttactaaatgtcttcccgctgatgaatgtcgttatgctgtgtacgattttgattttctaacggccgagaacgtcccaaagagcagaatctttttcattgcatggtctcccgatacatcaaggatcaggagcaaaatgatatacgctagctccaaagacagattcaagcgagaactggatggaatccaagtggaattgcaagcaacagatccaaccgagatgggtctcgatgtcttcaaaagccgtgctaactgaatacagttcttttaggcttttgcaacggggaagcttccttccttcctacagtatgtcttttacttaagtgaaatgtttataggtttcgaaatggcaaaacttggacaattaccgatttccaagtttttccataaagacttttatcagtctcgatgatgataaacccgtagtttcgggtatatgtgatttgttatctatagtacctatgctttgagtgcctttctgt

SEQ ID NO: 11353 - DNA, 1018 bp, Gossypium hirsutum
  Clone ID: GOSHI-09MAY01-C314_1
tttcaccgaaataaaaggacctccgcgcctccccccccccttccccctccgcgccccggaagagcttcctttttttttttctctccttttccaccgccgtcgatctcgatccttatcctcgttttcaaacaagctcgaaaaagatggccaacgctgcatcgggaatggctgtgcatgatgattgcaagttgaagttcttggagctcaaggcaaaaagaacccaccgcttcattgttttcaaaatcgaggagaagcaaaagcaagttattgtggagaagcttggtgaaccaaccgaaagctatgaggattttactaaatgtctccccgctgatgaatgtcgatatgctgtgtacgattttgattttctaacggccgagaacgtcccgaagagcagaatctttttcatcgcatggtctcccgacacgtcaaggatcaggagcaagatgatttacgccagctccaaagacagattcaagcgagaactggatggaattcaggtggaattgcaagcaacagatccaactgagatgggtctcgatgtgttcaaaagccgtgctaactgaatacggttcttttaggcatttgcaaccgggaagcttccttccttcctacctacagtatgtctttacttaagtgaaatgtttataggtttcgaaacggcaaactcgggatttccgagttatgccataagacttttatcagtctcgatgatgataaacccgtagtttcgggtatatgtgatttgttatctatagaacctatgtgttgagtgcctttgtgtagtctttatctctttcaacgctaaatgcaactgtttgtgagggttagacaacacatttagttcgttttcaagttttttttttctttaattttctttgaatattgacccttgtttattgtttcggagtgttaaaaagggcatgcttttatgtctttcgagtcactgattctttttgccattatttatggacactggattcgattgcaaatttatttgtacaatatcttttgctggttg

SEQ ID NO: 11354 - DNA, 457 bp, Gossypium hirsutum
  unsure (1)..(457): unsure at all n locations
  Clone ID: LIB3272-019-P1-K1-E6
tacgcccgnacggaccgggactgcccggctggacccacgcgtgcgtttttttttctcctgttccaccgccgtcaatctcgaaccttatcctcgttttcaaacatgctcaaaaaagatggccaacgctgcatcgggaatggctgtgcatgatgattgcaagttgaagttcttggagctcaagacaaaaagaacccaccgcttcattgttttcaaaatcgaggagaagcaaaagcaagttattgtggagaagcttggtgaaccaaccgaaagctacgaggattttactaaatgtctccccgctgatgaatgtcgatatgctgtgtacgattttgattttctaacggccgagaacgtcccgaagagcagaatctttttcatcgcatggtctcccgacacgtcaaggatcaggagcaagatgatttacgccagctccaaagacagattcaagcgagaactg

SEQ ID NO: 11355 - DNA, 481 bp, Gossypium hirsutum
  Clone ID: uC-gsronu33B081h01b1
tcctctctttcgtccacgcgtccaaccggaaccggggaagaagggatgggtgtgattacaaaagcttaaaaaacaatggccaccgctcctttggaaatggttttccatattaatcgcaggtggaggtcctggagcttaagacaaaaagaacccaacggttcaatggtttcaaaatcgaggagaagcaaaagcaaggtattgtggagaagcttggtgaaccaaccgaaagctacgaggattttactaaatgtcttcccgctgatgaatgtcgatatgctgtgtacgattttgattttctaacggtcgagaacgtcccgaagagcagaatctttttcattgcattggtctcccgactccgtcaaggatcaggagccagatgatttacgccagcttcaaagacagattcatgcgagaactggacggatttaagtggaatttgcagcaacaatcccacttgaatgggttctgatgttttaaaagc

SEQ ID NO: 11356 - DNA, 430 bp, Gossypium hirsutum
  unsure (1)..(430): unsure at all n locations
  Clone ID: LIB3148-039-Q1-K1-G4
cccacgcgtccgcgtgtgttgattaatagtggtttcattgtcacgggattggtttacagcattggcgcaatggtgcatggctgctggactctttgtttttttatagttcataattgttgtaattagaccatggatatattttctgacattcatctattgtttgtgtagctggtggtgaagttattctatttgtccctgaaattgattctacttgtcatgacgcctatcctattgaaagaagatgagtgcaataagggtctgcttgtctacccgctgatgaatgtcgatatgctgtgtacgaatttgattttctaacggccgagaacgtaccgaagagcagaatctttttcatagcatggtctcccgacacgtcaaggatcangagcaagatgatttaccccagctccaaaaatagattcaagcgagaact

SEQ ID NO: 11357 - DNA, 374 bp, Gossypium hirsutum
  Clone ID: LIB3147-023-Q1-K1-E7
agttcttggagctcaagacaaaaagaacccaccgcttcattgttttcaaaatcgaggagaagcaaaagcaagttattgtggagaagcttggtgaaccaaccgaaagctacgaggattttactaaatgtctccccgctgatgaatgtcgatatgctgtgtacgattttgattttctaacggccgagaacgtcccgaagagcagaatctttttcatcgcatggtactgcaaagtttcttaatcgtggtgttaaattgtttccttttattacttactatatgttgttgtcgtcctatgaaggtctcccgacacgtcaaggatcaggagcaagatgatttacgccagctccaaagacagattcaagcgagaactggac

SEQ ID NO: 11358 - DNA, 353 bp, Gossypium hirsutum
  Clone ID: LIB3149-055-Q1-K1-B5
tcgatctcgatccttatcctcgttttcaaacaagctcgaaaaagatggccaacgctgcatcgggaatggctgtgcatgatgattgcaagttgaagttcttggagctcaaggcaaaaagaacccaccgcttcattgtttcaaaattgggagaacaaaacaagtattgggaaagctgggaacaccaaagttgagttactaagttccgtgtaatgcattctggacattgatttacgcgacgccaacaattttatatgctcacctagtagaaagaacccctcaatatacaactgtgataggatgagacacactgatgctaggtaacgcacgacgcttagtcacgagtctctctcgtg

SEQ ID NO: 11359 - DNA, 204 bp, Gossypium hirsutum
  Clone ID: LIB3166-043-P1-K1-E12
acttaaggcaaaaagaacccaccgctttattgttttcaaaatcgaggagaagcagaagcaagttattgtgcataagcttggttagccaaccaagagctatgaggatactactaaatgtctttccactgatgcaatccaaaaagtctacctaccatttttgattatctaacggccgataacgtcccaaagagcataatctttttc

SEQ ID NO: 11360 - DNA, 488 bp, Gossypium hirsutum
  Clone ID: GOSHI-09MAY01-C304_1
cccacgcgtccgcgggcctggaaactcttcttctctgtcgtttgaattgtgtatcagctactcaaagagatcgattatcacccaaaatcaaatctttgaagccttattcttggtcaagatcacgagttcattgggcagaaaaaatgtcgcaaagtccggactctatttttccatctatccttcgtctccgtcgcttctcttagcgcgattcaccagcccttccaccgcgtacaggacctcctctatttagtattgggggttttcatgccgacatccttctattgccatcccgtgagccgctttgttggcttcccttgagtttaatttgcgtattatggttaacgtatctccttcaacacaaatatcctggaaacccatttcctctgccatagtaatggcctgcaaacacgcccttgcctcgaccataaccggatctgcgatattctcccatgggaagagattcaaaaaatgaaagattctggcttggg

SEQ ID NO: 11361 - DNA, 1151 bp, Gossypium hirsutum
  Clone ID: GOSHI-09MAY01-C334_1
gtccacttatttatcttcttatccacttccctctggtatttcatttatccctcgcccgtattctctttcactgcaaactgtgagcgagtgagtgagatggcttgctcagctacttcatcggccgcggctctcatctcctctaagccaagggctttctcctccaattccaagcccttctcccaatccctttctctccccaatcccttcactggtctccctgcccctctcctttctcgtcccgcctccttttccctctcccgcacctccccttctcgcaagtctttcgtcgtcaaagccaccagtgagcttccattggtgggaaatcctgcccctgattttgaggctgaggccgtctttgaccaggagttcattaaggtcaagctctccgaatacattgggaagaaatatgtgattctcttcttttacccgctggacttcacatttgtttgccccacagagattactgctttcagtgaccgctatgaagaatttgagaagctaaacaccgaaatattaggtgtttctattgacagtgtgttctctcaccttgcctgggttcaaacagatagaaagtcaggtggtcttggtgatttgaagtatcctctcatatctgatgtcacaaagacaattgccaaagcctatggagtgttgattcctgatcagggaattgcattgagagggcttttcattatagataaagagggaattatccagcactccaccatcaacaatcttgctattggacggagcgttgatgaaacaatgaggactctccaggccttgcagtatgtgcaggaaaatccagatgaagtatgcccagctgggtggaaacccggagagaaatccatgaaacctgaccctaagctcagcaaggattactttgcagcaatttgaggtatagcctagaaagcagaaggtatgtgttgcgtccattaggattgactaaatgagtttttgtttttcaatgtatcttttttgttttaaagaattgcttagccttggatggtaatataaaagtatggggaaataatcaaatattaatgtttggattgtgtcttttgtttaaacaatggctgtagcgtaataatcttactgtctggactgcctgcatgatgatttttctactattttttgttaaaaaaaaaaatact

SEQ ID NO: 11362 - DNA, 570 bp, Gossypium hirsutum
  Clone ID: GOSHI-09MAY01-C294_2
aaaagaaggctcaattcacattcacatgagccccatttgtttagcatcaccgtttacgacacccccggggatagaatgcaaaaccctgtcgccaaggttgccgtggtgggaagcggaatttcagggtctgtttgtgccgctactttggcaaggaatggaatttcagtgaccctttttgactctgccaggggtcctggtggccgcatgtctcaaagaagagagataagtgaagatgggagagagctgttattcgatcatggtgctccttacttcacagtgacaaatcccgatgtgttgagtgttgttactgagtgggaatcaagaggccttgttgcggaatggaaatcgaattttgggtcttttgattgtttcaccaacaaatttgtcaacactgaacaccaggaaagagaaagcaagaagtatgttggtgtgcctggaatgaattccatttgcaaagcattgtgccacgagcctggagtagacagtaagtttaatatgggcatcgggaagtttgaatggttagaacacgagaatctatggtcattgataggtttggacggacagcatctt

SEQ ID NO: 11363 - DNA, 1339 bp, Gossypium hirsutum
  Clone ID: GOSHI-09MAY01-C294_1
tcgcccagctccggaggtcattcaatcccggcccattgttgcatacgttcgacactaccggatagatgcaaaacatgtcgccaggttgccgtggtgggaagcggaatttcagggtctgtttgtgccgctactttggcaaggaatggaatttcagtgatcctttttgactctgccaggggtcctgggggccgcatgtctcaaagaagagagataagtgaagatgggagagagctgttattcgatcatggtgctccttatttcacagtgacaaatcccgatgtgttgagtgttgttactgagtgggaatcaagaggccttgttgcggaatggaaatcgaattttgggtcttttgattgtttcaccaacaaatttgtcaacactgaacaccaggaaagagaaagcaagaagtatgttggtgtgcctggaatgaattccatttgcaaagcattgtgccacgagcctggagtagacagtaagtttaatatgggcatcgggaagtttgaatggttagaacacgagaatctatggtcattgataggtttggacggacagcatcttggacattttaagggagtggtggcatcagacaaaaacattgctttgccaaggtttacagcgataacaggacaaccaccccctcttgatttgagtttggctccggagttagtgaaactgcacgatattcccatttatccttgttttgctctaatgctagcattcaatgaacctttgtctttggtacccgcaaaagggttgtcattcgccaattctaaggttttaagccgtgcacaatgtgaaagcagcaagccagggcgctcttccacaagtgaacgatgggtattgcattcaacaacggagtatgccaaggatgtgattgctcaatctggccttgagaaaccttcgaaagaaacattatcgaaagtggggaatgagatgctccaagaattcctcagcacaggtctcagtattccacacccacgcgtccggaaagctcatagatggggaagtgccttcccagcagcaagcatagccaaggaagagaaatgtgtgtggagtgaaaagaagaaactggcaatctgtggggatttctgtttgagtccaaatgttgaaggtgcaattcttagtggcttggctgctgcttctaagcttaaaggcttaatcagtaccctatactataacctttgatttgctttcccttgatgttggctgcatgacatgtttaaacatgatgtaggaagggcaagattttaatattaccagcaagggctttgggatttattccaagcgtttcaccattttgggaaaaaagaataaaaaaaagaagcttggtaaaaggggg

SEQ ID NO: 11364 - DNA, 537 bp, Gossypium hirsutum
  Clone ID: LIB3582-024-P1-K1-A11
caaaattttatttaattgtactcccaacaaaacattatatatatattatgagattaaacaaatatatagtttgggaatctttctgtttttatatttatttatcattttaaaggtaaaagagacacaaagaagaatggaatatgctattgacaagttattatcctcaccttcgtctgctgtgttccatacagatttgagtttggctccggagttagtgaaactgcacgatattcccattgatccttgttttgctctaatgctaggattcaatgaacctttgtctttggtacctgcaaatgggttgtcgttcaccaattctaaggttttaagccgggcacactgtgaaagcagcaagccagggcgctcttccacaagtgaacgatgggtattgcattcaacaacggagtatgccaaggatgtgattgctcaatcaggccttgagaaaccttctaaagaaacgttgtcgaaagtggggaatgagatgcttcaagagttcctcggcacaggtctcactatttcgcaaccatttttcatgaa

SEQ ID NO: 11365 - DNA, 945 bp, Gossypium hirsutum
  Clone ID: GOSHI-09MAY01-C284_1
cccacgcgtcccctcccatccagctgtttttggttctttgggctttgggttgtttttgttgtttcagtgttgcagttccaatggggttcgaaaggtatcttgctagtgtgttgatagtgataatgctgtcttttatcacttcatcacagggttataagttctatgttggtggtagagacggttgggttgttagtccttctgagaactacaatcattgggctgaaaggaatagattccaagtcaatgatactctctttttcaagtacaagaaagggtcagactcggtgctgttggtaacaagagaagattacttctcatgcaacaccaagaacccaattcagtctttaacagaaggtgattcactctttacatttgatcggtcgggtcccttctttttcatcaccggtaacgctgataattgcaagaaagggcaaaagctgatcgtcgtggtcatggctgtaagacacaaaccccagcaacaacctccttcaccttctccctcatctgctgtgacaacagcgccggtttctccaccaacattacccattcctgagactaaccctcctgttgagtcaccaaagagcagtgaggctccatctgatgctgtggaaccatctccgccggagcacggatcgggttcattcaaactagtatgttctacctggctggtgttgggtttcggcatttgggtcagcatggccttggggctcgaaaatgtagtttgtttttggtgctgaattattgaggggtttggttaaatggaagaaacaaaagtagaagggaatcagctcagcttgttatattattttgttctttattgtttttcataatttctttcgtcattaatatatatatatatatagtgtgtgtgccttgctttcatctttattgttgattattattactaattactataataagctgtggaagcttgcttcgatactc

SEQ ID NO: 11366 - DNA, 561 bp, Gossypium hirsutum
  unsure (1)..(561): unsure at all n locations
  Clone ID: LIB3582-023-P1-K1-H10
attgaaatgatgcagtactctttttggttatcttggttttaaattttgcagttttcaagtacaagaaagggtcagactcggtgctgttggtaacaagagaagattacttctcatgcaacaccaagaacccaattcagtctttaacagaaggtgattcactctttacatttgatcggtcgggtcccttctttttcatcaccggtaacgctgataattgcaagaaagggcaaaagctgatcgtcgtggtcatggctgtaagacacaaaccccagcaacaacctccttcaccttctccctcatctgctgtgacaacagcgccggtttctccaccaacattacccattcctgagactaaccctcctgtagagtcaccaaagagcagtgaggctccatctcatgatgctgtggaaccagctccgccggagcacagatcgggttcattcaaactagtatgttctacctggctggtgttgggtttcggcatttgngtcagcatggccttggngatcgaaaatgtagtttgtttttggtgctgaattataaggggtttggttaaatgga

SEQ ID NO: 11367 - DNA, 892 bp, Gossypium hirsutum
  Clone ID: GOSHI-09MAY01-C254_1
cccacgcgtccgcccacgcgtccgcccacgcgtccgcccacgcgtccgcccacgcgtccgtcttcctgttcggcttcctcttctttcccaacactcaaaaaagtacaaaaaatatagattatattaaaaaaattctgatttcccttttccaaagcttctccaatgcttgcagatcacattcaggagcttgtttgaggtttatctttgttttgtgttagcttaatcgttaaggtagtgcctgtaccatcttattgaagtagtctcggaattgtggtaaatataatggcactttttgcatcagaaagtgttgcctatggtggcatcaaggcagcgtcaccatcgcaagcaccgcgatcgccgcagcagcagcaacaacgccaggaattaactcgggatcaatctgtttcttccttgaacaaacagggttcgattttctccctcaccctcgacgagattcaactgaagagcgggaaggcttttgggtccatgaacatggatgaattccttgccaacttgtggaatgttgaggaaaaccaagcgccaccacagctcgaccagaacgaggctcgcgatgacaaagacaagggcaacggaggtcaaccaaccctggcccgacaaggctctttctccatccccaccccactttgcaagaaaactgtggatgaggtatggtttgagattcagaaagagctaccgcagcagcggaaggctaacaacatcgctgatcacgaacctctcagcgccaacaaacattcggagagatgactttggaggattttctcatcaaagccggagttgttcaagaaccatcatcagcatcttcccaacaaaggaaggtggcagctacccggccgaatggcacaagtctagaagcaacctacggaatggggca

SEQ ID NO: 11368 - DNA, 435 bp, Gossypium hirsutum
  Clone ID: LIB3582-041-P1-K1-A9
ctccaatgcttgcagatcacattcaggagcttgtttgaggtttatctttgttttgtgttagcttaatcgttaagaaagtgttgcctatggtggcatcaaggcagcgtcaccatcgcaagcaccgcgatcgccgcagcagcagcaacaacgccaggaattaactcgggatcaatctgtttcttccttgaacaaacagggttcgattttctccctcaccctcgacgagattcaactgaagagcgggaaggcttttgggtccatgaacatggatgaattccttgccaacttgtggaatgttgaggaaaaccaagcgccaccacagctcgaccagaacgaggctcgcgatgacaaagacaagggcaacggaggtcaaccaaccttggcccgacaaggctctttctccatccccaccccactttgtaagaaaactgtgga

SEQ ID NO: 11369 - DNA, 785 bp, Gossypium hirsutum
  Clone ID: GOSHI-09MAY01-C244_1
acgcccacgcgtgcgcccacgcgtccgtgagaaggagctcgaagagatgaacaacatgactaggcaagagttcgctgcttatctccgaaggaaaagtagtggattttctaggggtgcttcaatttacagaggagtgacaaggcatcatcaacatgcccgcgcgcccgcaagaattggaagagttgcaggcaacaaagatctctatcttggcacatttagcacccaagaagaagcagctgaagcctatgatattgcagcaatcaagtttagaggcttaaacgcggttacaaattttgatatgagccgctacgatgtaaacagcattgcaaacagcaatcttcccattggaggactgaacaacaaatccaaaaactgcaatgattcaacttctgataggagcaccgatgaggagcgagatcactctggatcatcgggcatgacctttacatctcagcccgctgcaagctccacagtaggctttgcaattaacatcaagcaagacccatccgattattggtcaaacgttctcggatacaatgatactggtgcttccttaagcagtgccaagaaccctatatttcatcactcaccaaatggatccggtttccaaagtccaagtggattctgtaccggcaatggtgggaattctgcagtcaacggaagcattaacaatgggttattcaatcgaggtggttatgttgggcaggagcaacaagagagcagtgctgctactaattcccacccattggcaacgccaattgtcttaaataatagcgataattatg

SEQ ID NO: 11370 - DNA, 563 bp, Gossypium hirsutum
  Clone ID: LIB3582-023-P1-K1-C6
cccacgcgtccgcccacgcgtccgggcatgtacatgacaatgattacttgctcaaattcttcatcgttgtccttccagtttatttgggtggctatgacaaggaagataaagctgcaagagcttatgatcttgcggctctcaagtactggggtccgaccactactaccaactttccgatttccaactatgagaaggagctcgaagagatgaagaacatgactaggcaagagttcgttgcttctctccgaaggaaaagtagtggattttctaggggtgcttcaatttacagaggagtgacaaggcatcatcaacatggtaggtggcaagcaagaattggaagagttgcaggcaacaaagatctttatcttggcacatttagtgggttttttttttcccatttaattcatttccaaataaagattgctaaacaagtacattagtttgtcttatttctagctgtctatttaaaaaatggtaaaatgtggacatatttgttctacaggcacccaagaagaagcagccgaagcctatgatattgcagcaatcaagtttagaggcttaaa

SEQ ID NO: 11371 - DNA, 2046 bp, Gossypium hirsutum
  Clone ID: GOSHI-09MAY01-C264_1
gtctttttatcatcagtgtcaagaaacataacatacatacacgccacggaaacagatatatggatttgtgttcgttttcattttcatttttatacgcttttcagtaccagaaagtgtcttaagcttgtcaaagcgcataaggctgggaaacttccttcctttggccttttagttttatatatatggatttgttttcattctcatttttatatttttagcttacttatcgtaagcgagtggtctcagctttgtcttcacatatctcaaattctacccttttatccgacactttactggatcttcaagaaaattgcttcccttttctttttttttttttttacattgtcgtatctctcaacattcagctctttctttcctttttctaactttttaaggttcaaacatttcagtcactgctactccgtgcttatctggttgttagcggattactgaactttcatcgaaattgttcatccggatcatggtgttgggtgccgatttggttttgttagtgagcttttcaggaaagggtagtcttagttttgttatataagggcgattgctgttattggagatctgggttttcttttattgatttgaagatggggatatcagatgagaaagtggttgctgtgatcatggtgggtggacccacgaaaggcactcggtttcgtccattgtcattgaacattccaaagcctttgtttcctttggctggacaacctatggttcatcaccccatttctgcttgtaaaaggattccaaatctagcacagatttatctagtcggtttctatgaagagcgtgaattcgctatgtatgtctcatcaatctctactgagttaagagttccagtccgatacttaagggaagacaaaccacatggttcagctggtgggctttacaacttcagagatctgatcatggaagataatccgtctcatatcttcttgctgaattgtgatgtttgctgcagttttccactcccagaaatgcttgaggctcacaaaagatatggtggtatgggaactatcctagtaatcaaggtttcagctgaatcagccagtgagtttggggagttggtagcagatcccgtcaccaatgaactgttacattatacagagaaacctgaaactttcgtaagtgaccgaatcaactgtggtgtctatgtgtttacaccggatatttttactgctatccaaggtgtttcctctcgacggaaagacagagccaatctgagacgtctttccagctttgaagccctccagtctgctacaagcgatcctccatcagattttgtaaggttggatcaagacatccttaccccttttgcggggaagaagaagttgtatacatatgagaccatggatttctgggaacaaatcaaaacaccaggaaagtccttaaagtgttctggcctacatcttgcacaatttcggttcacctctcccaatcttttggctagtggggatggtacaaaaactgccaccattattggcgaggttaatattcatccatcagcaaaagtacatccaagtgccaagatcggtcccaatgtctcaatatctgctaatgcgcgtataggagcaggtgtaaggctcattagttgtatcattcttgatggcgttgaaatcatggaaaatgctgttgtttttcatgcaattgtagggtggaagtcttctatcgggaaatggtcccgtgttcaggctgaaggagactataaagcaaaactcggaatcacaattcttggagaagcagtgactgttgaagatgaagtcgtggtcaccaatagcattgttctttccgcacaggacgttaaacgtcagtgttcaagacgaaatactattatgatatttgtatccgctcccgtttgccgcctctaggctccctcctatttcgcagcccctttatctaccctagttgtgatgtaatggttactgtgcattttgtgaactagggaaatcagtagtatttcttaatttttactcgtatgtatattgagatgctcaaattagaataaaatttcaactgaccgatgtttgtttt

SEQ ID NO: 11372 - DNA, 573 bp, Gossypium hirsutum
  unsure (1)..(573): unsure at all n locations
  Clone ID: LIB3582-023-P1-K1-E6
gtttgaggtatgatcggaaaaacttagaaaattgagcatatcctttttggattcaaagctgcattcaacactcactcccgagtctaggtaacctaggccgaatgttcttcagactgattatgaataccagcctccataaatttcctctcaagattgtctcctgccgaatgactctntcttgctctaccacctgccatttttacgctaaattcaaatcgactcgactcattgcaggctgaaggagactataaagcaaaactcggaatcacaattcttggagaagcagtgactgttgaagatgaagtcgtggtcaccaatagcattgttcttccgcacaagacgttaaacgtcagtgttcaagacgaaatactattatgatatttgtatccgctcccgtttgccgcctctaggctccctcctatttcgcagcccctttatctaccctagttgtgatgtaatggttactgtgcattttgtgaactagggaaatcagtagtatttcttaatntttactcgtatgtatattgagatgctcaaattagaataaaatttcaactgaccgatgtttgtttt

SEQ ID NO: 11373 - DNA, 593 bp, Gossypium hirsutum
  Clone ID: GOSHI-09MAY01-C204_1
cgtaaggttagcttcatgtactacatgcatcaacctcttactattgcaattaactctcttttatcttcccctctctctctctctctctctcacacacacattcaaaaacattcttaagaatattgaacccccaaagaaacacagagaagggataataaaaataaaaataaaaatacataatgttttgtttcagatcaaacccttatgcattgttttttcttttctttttttctttgtttctttttggacatgaaacaggttctcaagctttaaatgtccagactttgaatatttcagggtattgtagaagttttgtgtttggggagagagagcagagtgaagtgttagcatggaggaagacagaaaggaggaaccttgcagagggaagtgaaggagacaacaactcgtctttgattttggctgaaaaaaggacttacaggagagaccctcttaatgactttcacaagtacactggtggctggaatatcagcaatgaacactactgggcttctgtgggttttacggcggctcctttctttgtcattgctgcagtctggtttgtgatattcgcactatgcttgtcatcatatgca

SEQ ID NO: 11374 - DNA, 942 bp, Gossypium hirsutum
  Clone ID: GOSHI-09MAY01-C224_2
ccgggtcgcccagcgtcgaaagctttgcgcgctgccggagggggttcttgagctcccagaaggggctgggtccggcctgacttctttgagaagaaacgccagaaggagcttgtgaagtcaccagcgttcaacttaaggtcaaaagggcctgggtattaaaggttagatgattgcgaagaaaaattatgcgggaaagggcctcattaaaaaaacattggctctgcctgaggaatcatcaactatgcgtaaggtggatgatgaagtccgagatggagctattcctgcctatcttatggatcgtgaaaaaccacacgtgctaaggttgtcagcaataccatcaagcaaaagaggaaagagaaagccggcaaatgggaggtccctattcccaaggtcaggccagtcgcagaagatgagatgtttaaggtgctcagaactggtcaaagaaaaacaaagcaatggaagagaatggttacgaagtgcacatttgtatgacctggttttcaagaaaacctcaaaatatgagcgttcatccgtccttccgattgcgatttctaaagctatgttcacatcctgagctcagtgcaccttcaatctcgacatcattggggtgaagaaaaatcccaatggtccaatgtatacctctcttggtgttatgaccaaaggaacaatcatcgaggtgaatgtaagtgaattgggtctggtcacaccggctgggaaagttgtttggggaaaatatgctcaagtaacaaataacccatagaatgatggttgtataaatgcagttttgcttgtgtaagaggtttacaacagacatttcaaatttgataatccaattcatatcaagtctgctaactttctctctttatcatttttttcagtgttatatttaaatttaagatatttcaatgctttttgaaccaaattctgtttatttattaaatt

SEQ ID NO: 11375 - DNA, 1356 bp, Gossypium hirsutum
  Clone ID: GOSHI-09MAY01-C224_1
cttttcttttctctccgctcccccgggtgaagatcaaagctttgtcgccgccatgccgcaaggtgattacatagagctacacaggaagaggcatggttaccgccatgacttcttcgagaagaagcgcaagaaggaagctcgtcaagtacacgagcgttcagctaaggctcaaaaggcgctgggtattaagggtaagatgattgcgaagaaaaattatgctgaaaaggccctcatgaaaaaaacattggctatgcatgaggaatcatcaactaggcgtaaggttgatgacgaagtccaagatggagctattcctgcctatcttatggatcgtgaaaataccacacgtgctaaggttcttagcaataccataaagcaaaagaggaaagagaaagccggaaaatgggaggtccctattcccaaggtcaggccggtcgcagaagatgagatgtttaaggtgctcagaactggtaaaagaaaaacaaagcaatggaagagaatggttacaaagtgcacatttgtaggacctggttttacaagaaagcctccaaaatatgagcgtttcatccgtccttcaggattgcgatttactaaagctgatgttacacatcctgagctcaagtgcaccttcaatctcgacattattggggtaaagaaaaatcctaatggtccaatgtatacatctcttggtgtcatgaccaaaggaacaatcatcgaggtgaatgtaagtgaattgggtttggtcacgccagctgggaaagttgtttggggaaaatatgctcaagtaacaaataacccagaaaatgacgggtgtataaatgcagttttgcttgtctaagaggtttacaccccatgtgttgggttgagtctgctaactttgcttgattgtcatttcatttcatgttgtttagtatgttacgtgtttcaaattttgagtagtcataaagggtaatttgaaaagtggaatgttttaagtggtaaagaaacatgtggatcgtgatttgcatgatgggtggatgaaggtcaaaaactgacaaccttggtgggatcacattggcagctgcccacaattgctatcgggactccgatggccactcatctcccgtatggcatttgggatagcccttcccagttgcttgctttctatatagttgtccgcttcttaaaatctaaaatttcagaaaaatgtaattcagaattagagacgctaaagttttccagattgatctcagatagacctgttcaactgttacagttagtgttaaatttagcctttaacatttatttttttattaatgctaaaatatttaatgttgaaggttcaatttgaaattatagttaatataatgtctctggttt

SEQ ID NO: 11376 - DNA, 241 bp, Gossypium hirsutum
  Clone ID: GOSHI-09MAY01-C38757_1
cccacgcgtccgcccacgcgtccgcccacgcgtccgcccacgcgtccgcgttgtcgtccacgcctcctgattggatcggatcccatccccttctttacacaatttctttctttctgttgttaatttcgtttatgaatttgtgtgctgctcctcgtcgctgtcttacccaacattcttgtacttttataacccagtaatattacgatgaaattaattttacgaagaacaaagagattgacac

SEQ ID NO: 11377 - DNA, 633 bp, Gossypium hirsutum
  Clone ID: GOSHI-09MAY01-C38647_1
gcaaagtttaaagagaaaaacatgaatgggatgcttcaacatttcacagtttcaatgtcttgtggtgggttttcatcatcatcttcatcagatgaggaatattcatcatcttcaatggcggctcaagtttcaccatttccaaggcctggaaggataagtagatcaatgagttattcagccaggatggtgaggagatcagaggcaattgtttgtcatccaaagagttcactagttgcagtgatgattcaagctattgctcatagggtgaactatgtttgggttatagaagaagattgtagcttggttgggattgttactttttctgatatgttaaaagttgtccgggaaagttttgaaaccatggcctgaaaaggaaaatgagatgagaaagtttttttgtttttttaataatttttggttgatcatctctgtcgatgctaacaatgctgagagaactcacttgaggctggtaggagaagaataaaaaaatgaaaaagatttgtgtgaatattggaatttttttgttttgtttgttactgtcatgtgagaattgagatgatttggagtttggtatttcatttctggtagcatatttatatatatttgtgagcttatctcaacttacaacagcga

SEQ ID NO: 11378 - DNA, 367 bp, Gossypium hirsutum
  Clone ID: GOSHI-09MAY01-C38627_1
ccaacccgtccggccagcctccgtagaagaacactacacgagtggttttgaactgcaaaaggagatcgatttcgaagccttttcaccatgagagctaagtggaagaagaagcgtatgaggaggttgaagaggaagagaagaaagatgaggcaaagatctaagtagtctaattttatcttaaagctagcaattcggtctatgtttctttagattttctgttgtttgatggatactttactttaaaaggatttaagttatctttatcgaaaccttttgaatattctggaaacttgttattgtgttttctattaaaagcttatggctttggatgttaattttctgatatttttggctcaaagttgcactt

SEQ ID NO: 11379 - DNA, 1645 bp, Gossypium hirsutum
  Clone ID: GOSHI-09MAY01-C38197_1
cttggtgatgtctgcaccaggacctcgaggcgccttgaaaatagtctcttttaattttgcgaggagccgaatccaaacccaaacaaaaagtgcttaacatggatgccgccggcaatcgaagttgtaagttactattatttttctttgctgccataatcccagccctgcaaggtcacatcggagaatatgatgagtattggaaacaacgtgaattggaagctaaagaaaacaccgagcaggcatataaccccaatcctgaggaagttacccagcatgtcaaccaccttgtttccaggtcgctgatgaggctaaatagcacaagacgacatttgagggcaagaaaaaaaggcggtccctgcgatccaaccagccccattgaccagtgctggcgctgtgatcgtaactgggagaaaaacaggcagagactggctgattgcgccattggattcgcacgtggtactattggtggaaagtacggaagaatttacgtagtgaccgatccttcagatgatgattttttaaatcctaaacctggaaccctacgtcatgctgtgatccagaaggaacctctttggatcatctttgcacgagctatgatcatcaggctaaaagaggagctcattatgtcgggtaacaaaacaatcgacgctaggggagccaatgtgcatgtggcttatggggctggtattactatccagtatgtgaggaacgttattatccatggcctccatattcaccacattgttcccggcaatggcggcatgatcagggattccgtaaaccactatgggttcaggacaaagagcgatggtgatgggatttctctttttggagcaacgaacgtttggcttgatcacctttcaatgtataagtgtagggatggtctcattgatgcccattcagggatcaactgccataacaatctccaactgccatttcactcatcacgaccaggtgatgttgtttggagcaaatgacaaccacaaaatggatgagaagatgcagatcactcttgctttcaaccacttcggtaaaggattggtacaaaggatgccgaggtgtcgatgggggtttatccacgtggtcaacaatgactatactcattggctcatgtatgccattggaggtagtagccaccctaccgtcatcagccaaggcaaccgatatattgctcgacctcacgtggcatccaaggaggtgaccaagagggactatgcaccaccagaagtatggaagacgtggaattggagatcagaaggggacctgctgctgaatggggcttttttctctcaatccggtgatccaaaagccagctcgaaattcaaaggcgacactaaggtttctgctaagcctgcttataaggtggacttacttacaaaagattctggaacacttatatgtatccgtggccgagcttgctaacaatcatcaatgcacccaaggaaaaacatggtcagggagtttgtcggaattattatgataagaaagaatcgcagacaaaaaacaattgaattgcaacaaaattgtctgcaatagttttatatatttcacgcaccccgttttgaacaatgaaacatgagtgcttcttataaaactattgcagacaattttgttgcaattcaattgtttttctctgctctttttc

SEQ ID NO: 11380 - DNA, 873 bp, Gossypium hirsutum
  Clone ID: GOSHI-09MAY01-C38117_1
gctgatttcgtccgtggatatccattcagtctccgtgagggtgtcccaactgctggggcgcatggcctgtggctaaacatcccagattatgatgcaccaacccaacttgtgaagcctcttgagaggaacactaggtttgttgatgcggttctcaccatcccaaagggcaccttgttccccatgtgtggtatgaatctggctttcgaccgtgacttgatcggccctgccatgtactttggactcatgggagatggccagccaattggtcgctacgatgatatgtgggctggctggtgcatcaaggtgatatgtgaccatttgggattgggggtgaaaacgggtctaccatacatctatcacagcaaagccagcaacccctttgtgaatctgacgaaggaatacaagggtatattctggcaagaagagatcatcccattcttccaacaagctgtgcttccaaaagactgcaccactgttcaaaagtgctatgttgaactggctaagcaggtgaaagaaaagcttagcaaagttgatccctactttgacaaactggctgatgcaatggttacttggattaaagcctgggatgagctcaaccctcctactgcaggatctgttccaaatgggaaagcggcttagacaattttctatcacatcacatttattatatatattattctattcaacacaaagctgcaccattatttccctacagtttaattgaactttaataatttttgtttgtttttttattatttatttatcttcttcctcactagattttggcgggatatattatgtaattttatcaactttatgttataaagttgcagacatgaataacatgtgttagttgaattagcagtttcttcc

SEQ ID NO: 11381 - DNA, 334 bp, Gossypium hirsutum
  Clone ID: LIB3135-042-Q1-K1-A9
gaaaacgggtctaccatacatctatcacagcaaagccagcaacccctttgtgaatctaaggaaagaataccagggtatatcctggcacgatgagatcatgcctttcttccaacaagctgtgcttgcaaaagactgcaccactgttcaaaagtgctatgttgaacaggcttagcacgtgaaagaaaagcttatcaaagctagatcctcctatttggggcatgctcatgcacaaactgctcgcatgtttgcctgtcctggctcgaccctaactctgctgtagccgctgctcgtgatctagagtgtttaacggtattcaacaacctctcatgaacgc

SEQ ID NO: 11382 - DNA, 790 bp, Gossypium hirsutum
  Clone ID: GOSHI-09MAY01-C38027_1
tttgacttagtttggcatgctgattgagtttctatttgaaaagtttcctaactttgaagatgctactgaaactgccattggagatctacaggcattctataaagcttcaaagcagagatttgattctgatcctgcatttaaggagagagctcaacaggcagtggtgcggcttcagggtggagaagaaaagtatcgcagggcatgggcacaaatatgtgaaatcagccggactgaatttcacaaggtctatcaacgacttggagttcatttagaggaaaaaggagagagcttttataatccttatattcctggggttatagaagggttgaccaaacaaggattagttgaggaaagtcagggagctcgtgtgatctttattgaaggcattaatatacctcttaccctcgcgtccggtgatggtggtttcaactatgcatcaactgacctggctgctcttcggtatcgcctcaatgaagagaaagctgagtggattatatatgttactgatgtaggccaacaacagcattttgatatggtgttcaaagctgccaaacgtgcagggtggcttcctcaaggtgataattatcccaaagctagccatgttggttttggacttgttcttggagaagatggcaagcgttttcgaacccgtaacactgaagtagttcgtttagttgatctacttgatgaagccaagaaccgaagtaaagcagcacttatcgagcgtggtaagggtgaagaatggaccgaggaggagattgagagtactgcagatgcagttggttatggt

SEQ ID NO: 11383 - DNA, 375 bp, Gossypium hirsutum
  Clone ID: uC-gsronu33B099e05b1
cccacgtgtctttaaaaatataatggttggttttttttcttcaattgtttacttagcattagttagttcacattagcagctacttaattgttattatttttcttacctaataaacaattttacagttaatatggaatagaactttaggaggtccattaaggttgtctctgctatcattggcttgccatgtttttattctatattattaatgaaaagcttgagttgaattcgctgctggatggctccaggtctatcaacgacttggagttcattttagaggaaaaaggagagagcttttataatccttatattcctggggttatagaaggggttgaccaaacaaggtttagttgaggaaagtcagggagcttgtgt

SEQ ID NO: 11384 - DNA, 406 bp, Gossypium hirsutum
  Clone ID: GOSHI-09MAY01-C38357_1
cttgtatggatagagagaggatggctgtgctggaccaagcagagcctatcaacggatactaattgataaggtggaattttggtgaccactttgcttgtatggatagagagatatgcaacactttttctgcccccctactttcttagctttccttgtttaatgcctctgtagttgaagtataatctgtgaggtttcaaattcttaatataagcctccaagtttttctgttctgtataatgcggttcggaggctggttccctataagtctaagaagatggggttcatttctctattttactgttaatgtttatggcaatctgggttttgtccccccgcgggcatgtacgtcattatggtattatttgtaaatatttatgtaagataagaaaaaaatggaggcttttgt

SEQ ID NO: 11385 - DNA, 672 bp, Gossypium hirsutum
  Clone ID: GOSHI-09MAY01-C38207_1
gacccacgcgtatcgtgcatctatgtgtgtgaacaagattgatcagattacactcgaagagctggaaatattggataaacttcctcattactgcccaatcagtgctcacctggagtggaacctcgatggtctcctggataagatatgggagtatcttgatttaactcgcatatacacaaaaccaaaagggatgaacccagactatgaagatcctgttatcctgtcatcgaagagaaggacagttgaggacttctgcactcgaattcataaagacatgcttaaacaatttaagtatgcacttgtatggggatcaagcgtaaaacacaagcctcaaagagttggcaaggatcatgaacttgaggatgaagatgttgttcagattatcaagaaagtgtgatttgaggatattggaatttatgccttcatgttttaggaatcccatgaatcatattgctcaacattgtaagctgctgccatttaggttgtggagctggaaattaggtgaaaaacgtgacagcttgaatgtgtaattaaccaccattttgttgccaagctcttgtgatctgataaccgggtcccccttttgctttgttgcgatcccctactaaaaaactatagaactagttggaaactttcatcttttttaagttatgaaagaaatggcattagtcc

SEQ ID NO: 11386 - DNA, 651 bp, Gossypium hirsutum
  Clone ID: GOSHI-09MAY01-C39957_1
cccacgcgtccgggccagcaccagaggcagctccaaaatggttcagcggctcacttaccgcacgcgtcacagctacgccaccaagtccaaccagcaccgcgtcgtcaaaaccccaggagggaagcttgtttatcaaacgacaaagaaaagagctagtggacctaaatgtcctgttaccggcaagaggattcaaggaattcctcatttgaggcctgctgagtataaaaggtctaggttgcctagaaaccgtaggactgtgaaccgtgcttatggtggagttctatctggaagtgctgttcgagaaaggatcataagggccttcttggtggaagagcaaaagattgtgaagaaggtactgaagattcagaagacaaaggaaaagcaatcatccaagtgagagctaggatttgctaatggattgatagtgaatcttggaatagtagtttgaggggatttaagatttggatttatgtttttacatttgttatgaatcatgttctactttttcatctcgtcgacaaatcaactttcatgtcaaaattttgtttttggaacactcactttgtttgctcttctccaaatttggtatttccactgaatgtgcaatgttgcctggttatgcgattgcccccaaaaaaaaaaaacactttt

SEQ ID NO: 11387 - DNA, 341 bp, Gossypium hirsutum
  Clone ID: uC-gsronu33B164e10b2
ttcattcgtccggccacgcgtccgaggaagataaaaagtggttaataagagataaattaccgaacgcgtaacagatacaacaccaagtacaaccagcaccgtgttggcggaacccctggagggaagcttgtttatcaaacgacaaagatatgagttggtggacctaattgtcctgttaccggcaagaggtttaaaggaattccttatttgaagcctggtgagtataaaaggtctaggttgcctagaaaccgtttgactgtgaaccgtgcttatggtggaggtctatctggaagtgctgttcctgaaaggatcataagggtcttgtgggtggtagagctaaa

SEQ ID NO: 11388 - DNA, 911 bp, Gossypium hirsutum
  Clone ID: GOSHI-09MAY01-C39947_1
gtacttctgcaacaggtagctgcagatttattgaagcaatacaaggacaagttccaaggtggtgctctttctgtcacatggaactacttgagagaatctatgaacacatacttgtctcagccaaatcctgtaactgcccgttgggaaagtgaagatcacttgcgagaccctaaatttcagttggatgctttccggtaccgaacgtcaagacttcttcaaagtgtagcagcacgacttcaaaagcacaccaaaactcttggcagctttggtgcttggaataggtgtctgaatcaccttctcacacttgcagagtctcatattgaatctgcattctcgcaaaatttattgaagctgttcagaactgtcctgatgcaagcagtcaagctgctctaaaactcttatgcgatctgtatgccctggatcggatctggaaagacatacgaacataccgtaatgttgattatgttgcaccaaacaaagctaaggcaatcaacaagctcacacagtacttgagtttccaagttcgaaatattgccggggaatttattgatgcatttgatcttccgccttatattttaagggccccgatcgcaatgcagtcagaagcatattctcagtacacacagcttgtggggttctaattgagacccaaaaataggaggaacaaacaagtggttcccacaattagatagaattttttaatatatttgattcttttgccagattaaattaagggttaaggttaatgcagttgttgaaacccaggttgatagcctaggttggaaagaacaatacgtgaaacttgaaagaacaatatgctgaagcttgaactctgatttgtttgtaactgtattatgaaccatacaatttttcttttcttgaataaaagaatagcaacctatgttagattt

SEQ ID NO: 11389 - DNA, 514 bp, Gossypium hirsutum
  Clone ID: GOSHI-09MAY01-C39887_1
ctgacgcgtccgcccacgcgtacggcttctgcaccttctccttcaatcgcttcccctccaggtcctaccccatcaagtggacctgctccagcctccgagcccactgccgaccaaggccctcctccctctgccgcctccaccaacggtgtttccattggtgcaatcgctcttgccgccactttacttcgctgccgcttgggcttaagaaagcgaagtgaagtccagcttttttgggttgtggatcatgattcttgagaatctttactttcatgctctcttttgttctttcgagtagtgtttttttctcttgctttatatttttcattgcaccctactttttggtttttggttaatttatttgttatgtatgtttgatgatgacgattctattattttgggttcggatggttgattgtattgggggtgtgacacgcgtaaagaccggatggttgtagagattggactgttgtacatctaattacactggaataaaaacagctgtgttattctttat

SEQ ID NO: 11390 - DNA, 602 bp, Gossypium hirsutum
  Clone ID: GOSHI-09MAY01-C39867_1
gatctgcttatgtagaagaaagagtggtaaaaaaatggaggaaagggatgttgcccctccaaaacagtctgtggttgaaattccaagagataaaccagcaggggagagtgataatagaagcagcgggttatctggggtagtcaataaggaagctaagagtagtgggactaagaatctggtgtttttcgggaaggcgtcgatggcttttgatctggaggatttgttaagggcatctgctgaggtatcggggaagggaacattcgggaccacgtataaggccactttggaaatgggagtggttgtcgcagtgaaaaggttaaaggatgtgacagcgtccgaaaaggaattcaaggagaagatggaggtagttggctccatggatcaccagaacttggtcccattaagggcctactactttagtgcagatgagaaacttctagtttatgattacatgcctgtgggcagcttgtcttcacttttacatggtaacagaagatctggaaggactccattgaattgggacacaaggtccggcattgccctcggagctgccaaaagcattgcatacctccattccaagggccctggaatctcccatggac

SEQ ID NO: 11391 - DNA, 406 bp, Gossypium hirsutum
  Clone ID: GOSHI-09MAY01-C39837_1
caaaaaaaacagatagaatagtagttttcccctctccccttttgcgccgttctcgggggagaaccattcatggttcttccggtggccgcgacaccacccagaacgacggctgggtcatcgaggcaggtactgtgtgcagaggttgcggatgtggcatgtacggaggcgaaggcacgcgtacgaggctcgtgcgagcggtgctacgtgcgaggggatgtctgttgcggcgctggttggggctaacgctagggcttcccatcctattgtaatcgggtctgggctaggctgatttggactagttatattgggtttagtttgtatttcgggcctttgtattattttggtaactggtttgggccaatttgtaaatggacccttttggactgactctaatattttctttttg

SEQ ID NO: 11392 - DNA, 422 bp, Gossypium hirsutum
  Clone ID: GOSHI-09MAY01-C39537_1
cccacgcgtccgcctcgctaaaagacttttcagatgtctaacccaaggttggaaggtaaggtggctcttatcactggtggagccagcggtatcggtgaggagacggcgaggttctttgtacaacatggggctttggttgttattgttgatgtccaggatgatctggggaatcaagtcgctgcatcgatcggccttgacaaggttagttaccggcactgcgatgtacgagaggagaagcaggttgaggaagcagtaagtttcacagtggagaaatatgggaagctggatatcttattcagcaatgcgggtaccctaggctcgttaaccggaatcttagaaattgacctggatgactttgacaacaccatagccacgaacgttcgaggggtggccgccacgatcaagcatgccgctcgagctat

SEQ ID NO: 11393 - DNA, 683 bp, Gossypium hirsutum
  Clone ID: GOSHI-09MAY01-C39747_1
cccacgcgtccgatccaatcttaatgatttcctcctttattgccccagtgctggatcagatgcactaagtccatgggagacaattggatcacaaggggcaaggaatttcatgctgtgcaagaagccaaggactgagaaagtgaaagacgacgggaaggcagctgaatcaattaataggaaggcaagtgggaattggaaggcatggtttaataaatccctcaatctcaagatttcctcccattaattaaacaattcccaaccctttatgatcctttatttcttgggttagctttacttataaataaagccttggaagttagtctattatcattgatggccatggtagagtgttgcttatgtttttcaccttatttctcatttaggtgagaaaagacctgcaggaataaattggaacttgtttttcagtattttgccttatgcgataagaatgaagagaacattcattgtgtgcttgattttccatttctgtctttgaaagtgttgcgttctattgttgaatggcttttgatggatgattctattaatctcatactctacgtaaggtttggcttacacccagtgttcaaaaagttgttctgaattgtccataaacatgtattttcagtagcttatatccattgcttgaaatgttcttctgacttgcccttaatattgcaagttgc

SEQ ID NO: 11394 - DNA, 559 bp, Gossypium hirsutum
  Clone ID: LIB3825-016-Q1-N6-G10
caaataacataaattattactaagaattttgaaagaaattatggaatcttttttctgctacaaaatacaagaataattggaaagccttcaaagtaaaaagaccctcccaaaactttgtttttttaacttttcttccccccacccatttatcatgaacataaacccctaaacacgtgatcacagattatctgtacacatgcctattctaatctctacttttctagattgcataagatcctacttccaccgccatccattcccatctgcaatattatcaatttcaatttttcaattcgttatttaatctatgcgcaacccttctcagttacactcattgactttcagtctcctgtaaccctgaaacgcagctcaccatcatcgttttgacttccaacaatatacccctttttatttcatttttttcccctctaaaatggcttctgcaggtacatgaacatgtcctggagcggggacagctgattattactctggaaatgggcaggaaacccgttatcaacagtggcatccatgtaattataagggaagtcaagggcattgg

SEQ ID NO: 11395 - DNA, 393 bp, Gossypium hirsutum
  Clone ID: LIB3147-015-Q1-K1-F11
tgccactgttgataacgggtttcctgcccatttccagagtaataatcagctgtccccgctccaggacatgttcatgtacctgcagaagccattttagacggggaaaaaataaaataaaaaggggttatattgttggaagtcaaaacggtgatggtgaactgcgtttcaaggttacacgagactgaaagtctatgagtgtaactgagaaaggttgcgcatagattaaataacgaattgaaaaattgaaattgataatattgcactaaggtagggggagctgttggatttttgcagatgggaatggatggacggtggaagttggatcttatgcaatctagaaaagtagagattagaataggcatgtgtacagataatctgtgatcacgtgtttag

SEQ ID NO: 11396 - DNA, 361 bp, Gossypium hirsutum
  Clone ID: GOSHI-09MAY01-C39707_1
atatccatccgcgcgttaccctagcatccatcttatgggactctacctccttaacctcatacacataaccacaccctataactctccccacccttttcccttcaccggttcctcctcaccggcgacaaatctacttccctctcaccgcaccggagccgaatcatataaatagcaattcaacaagcggcggatggaactttcagtttcgtgaatcgggctccattcaacgtcatatccctcgagttcagacttcagaccgactcagtcttcttataaggcaaaaggggaagggaagagattgaggaattagagtgatagaagacgatgaggggcggtttacctattaaccgtcgatcgggtt

SEQ ID NO: 11397 - DNA, 204 bp, Gossypium hirsutum
  unsure (1)..(204): unsure at all n locations
  Clone ID: LIB3147-013-Q1-K1-H7
taacttttcccacccctatcccttcacccnattcttcttacccaaaaaaaatatactttccttttaccccaccctaacccaattatataaatagcaattcaacaagccgccgatggaactttcaacttcgtgaatcgggctccattcaacgtcatatccctcgagttcagacttcagaccgactcagtcttcttataaagcaaa

SEQ ID NO: 11398 - DNA, 512 bp, Gossypium hirsutum
  Clone ID: GOSHI-09MAY01-C39697_1
cttatttattctcaaaaaaaaagcattctgtttagcggccggttcatcatctgctggtccacactttcgctcagccccttcatcgtcaactccgagaaaaggtccctcaaattggaggccagggccgacagagcaagcctaaaagggagaaaacacaggacgagaaatcttttaagaggagggcgtaatattttctagctgcacagctactcgcggttctgcttttcctctccgtgatgggcggttatgattcatggcgacctggagctcgaccacgaacatgaacgcatctctttcaattgaaacaaatctctcagctaccgggtactcattactgacatttttcccattattagtgacaatgttaggggtctgtcgaggttgagctattagtatttgcattaacattgtggtaaaaaataagaacatacatttaaagatatgatttatacaatatttaggcagcattttttggtttgaaccttttgtacttcatgtgttggatttttttt

SEQ ID NO: 11399 - DNA, 424 bp, Gossypium hirsutum
  Clone ID: GOSHI-09MAY01-C39657_1
gttacggtcgaggtgattatttcctcgtcgttcatgatttcccagattacatggatgctcgagcccgagtagatgaagcttacaaggatcgcaagaagtggctaaagatgtctatactaagcactgctggcagcggcaagttcagcagcgatcggactatagcccagtatgctaaggaaatttggaatatcgaggaatgccgcgtgccgtaattccgacccaatctattttggcaatcaggttctagttttatgataatgaaaagcatatatatatataagaatgagtaataggatttgcattccaaaaccatatggcgttggcaaaaacaaaaaataagcgagaaaccctgcatctcgatttcacctttaaatgtaataaacaaagtaacgtgttttactgaattgcctttactagtttgtgg

SEQ ID NO: 11400 - DNA, 519 bp, Gossypium hirsutum
  Clone ID: GOSHI-09MAY01-C39117_1
gggaactcaagattgagcaggtggccgtgacccgtgatgaaatggaaatgtatgttgatttacatcctctcaccaacacaacccctttcactgtggtggaaagcttgtcagtggctaaagccttggtgctgttcaggcaagtcggactccggcatttgctcatcgtgccaaagtatcaaggtgcaggggtggctcctgtagttgggatcttgaccaggcaagacttgcgggcttacaacattttgagtgcctttcctcatctagaaagacccaagctttcttaagggaaaaataaaccaaaagtccaatagcagatttgtttgaaccacccatattttgtttttttgttttcacctttctaagttcagtcttccacagttgcactcattttttgcagttttttttccccccccgcatagatcaaagagaatagattcaccacccgtgtacacccttgttaagttgccccaatctttttcattaagtttcagttaaataatgaagatttttcatttgatt

SEQ ID NO: 11401 - DNA, 676 bp, Gossypium hirsutum
  Clone ID: GOSHI-09MAY01-C39077_1
attttattgggttgtggagaaacagaaagaaacgagttgctgaggagaatcagccaggatgttccggaggcagccgcgaccgatcttttgtttcgtgctgcatctgaagaagcagcaatattcgatgtcgatatagatcataacttagtcgccgggctaatgacccacatttatcgaaccgaccctgttaagaaagaattgctggagaggactaaaaggcccaagtttggaccggatgcttctaaagcggtggtagcgaagctaattgacggctacctagctgaaatggctcgagatccgtatttaccgggtgcaaattgccgttaaccttgctgaaatatgtatcaagcgtctcgagaccttgtcatgacggactttaccgtggcatagacatgtatctgaaggaacacccgggaatcagcataagtgagagaaagagaatatgcaggctaatggactgcaagaagctatcggctgaggcctgcatgcatgctgcgcaaaacgagaggctgccattacgtgtcgtcgtgcaggttcttttcttcgagcaagccagagccacaacgtcctcggcagtagcacccccgatcttccggggtccattagagcccttcctcccggaaggtctcaccgtagctcaaggtccacaacaaccaacactgaagaggattgggat

SEQ ID NO: 11402 - DNA, 432 bp, Gossypium hirsutum
  Clone ID: GOSHI-09MAY01-C39347_1
aagccctcaaggtcctcttgagcaggcaacgaatggaggtgaaatcctctccgaaggagatatggaagaacaatcattagctactgattctaccaacaaatgatacaccatagatttacacattttgattatgctatcccaatttttgtgtaaataaaccacatattgcttctcatagctcgcgggagaacatttagatgtttgaaaattttctgttacaacttacaagcactttagaggtaaagctaaaagaaaacgtacaatagagatgagttatacaggcaaggaagcactgattttagcgatttaccttacacaacactagaatcaatgagtattaactatgaacaattctttttggtaaaaaaaaaataaaaaaaaaaaaaaaaaaaaaaaaaaaaaaaaaaaagaaaaagcgcatatagatataag

SEQ ID NO: 11403 - DNA, 723 bp, Gossypium hirsutum
  Clone ID: GOSHI-09MAY01-C39297_1
tgttacgcgtacgaacctacaaaatcatggctggtgctccacagaattaacagtgacaccccagcacataactccaccacctgtacacctgataattccttcatgctttgccaaaagcgctaccctttaacatgcaatatgcccgtccctgacaccgttgctcgccaccacacccacccagttggtcccaaccagtgctgctctgccgttgtccaacagatcgccgtccccgtctccaccgtctggtctgttgtacagcgattcgataatgcccaggcttacaagcacttcgtcaaaagctgtcacgtcatcgttggggatggtgaagttggtacccttcgtgaagtcagcgtcatctcgggcctccccgctgccaggagcacagagcgcctcgagatccttgacgacgagcgtcatgttatcagcttcagcgtcgttggcggagaccataggctagctaactacaggtcggtgacgaccctccacccttccacttctgggaacggaacggtggtggtggaatcctacctggtggacgtgccgctgggtaacaccaaagatgacacctgtgtgttcgtcgacacaattgttcggtgcaacctccagtcactggctcagatcgcagagaatctctccaggcgcaaatagcaaacaacgaaaccaagtcattttcgtgagtagattcagaaccctcatcaaaatagattaatttctctccgtctc

SEQ ID NO: 11404 - DNA, 380 bp, Gossypium hirsutum
  Clone ID: LIB3147-039-Q1-K1-C12
gctattcttcacaaaaaagaaaagaaaaaattcagtgaaaatggcaacctccagtcactggctcagatcgcagagaatctctccaggcgcaaatagcaaacaacgaaaccaagtcattttcgtgagtagattcagaaccctccatcaaaatagattaatttctctctctctctctctctctttggtgatacgccgtcgattttgtgagtatccgatgtttgggttgccgatggaacatctcatcactgcaaagttcatgtttatcatttcacctgtgtatgtgtatcagcttcttttggttattttgtttctctttttctttacttgtttaatctgtgaaatactattatactaataataaatacggacacttgattgtt

SEQ ID NO: 11405 - DNA, 502 bp, Gossypium hirsutum
  Clone ID: GOSHI-09MAY01-C39247_1
aatttttagacaagaatgagcatgaaatctggtgcggtcatttttcatctccttcttcttctcctacttgtcatggtaatatatttatccattaaaatttaaggagtttaagatgttttatgtttagaacttactccgttgacctttctcctgcatggcgatggaagtggaaccgaggagatggctgatgatttaatctccaaagggaccagtgttctgaggctccatagcatggatcatgatcggcaaactgaagatgatggcactacagttcaatcaagggtagatccattatctcacatggatcacatggatctatcagtgatggtgtttctcaccttgaaagatctcaaagttgggaactcaatgccgatctattttcgtaagaaagactcttcaaaatcccctcggtttttgcctaaacaagaagccgacttcattggtttctcattgaaagaacttcctaacctgcttcgattatttcttttctcgcgagactctc

SEQ ID NO: 11406 - DNA, 1014 bp, Gossypium hirsutum
  Clone ID: GOSHI-09MAY01-C39217_1
cccacgcgtccgtatgaagccttacaacatgacaatgaagctcttctcaaagaggtaataattaataattaataacccaaagtgttcaattttcctacatctagtttgaacatgaaatgatttgttgcagataagagagttgcaggcaaagcatagtggagaaagcactgagacagagagcaatgtttcagtgaaagaagaagtgattgtatctgaaaatactgataacaaaacacttgaacaaagtgaaccagctgcagatctcaactacggatcagttgttcttggtgcaaccctttttccagacatgaaagatggatcatcggacagtgattccagtgctatcttaaatgaagacatcatcctcaacaccaacaccaacaaggacaatagccctaacaacgcagctttttcatcatctggggtgttagagctagacagccaacaccaccttttgatatcatcttcttcgtcaccaacatcctccatggattgcttcaatttcacaaaaacaagctatcaaccccaccagtacgtgaagatggaagaacataatttcttcactgcagatgaagcttgtaatttcttttcagatgaacaagctccaagtcttcattggtattctcctgaacaatggaactaaaatgaagctccaagatttttgtaagatgggaattatgtaagaagttaaaaactagtacccaataccatgatcttcagcctgtgatggaagtcaataatgcagaaaagaaaagaagggaatatggagaagaagaagaagagggggggggggttcacgtgggatgggggcaaaaggtgacaaacaccaaaaagaaggggcgtgcgggaatgattagatcgtaattgggaccttttaatttatctcttctgctgtaaatggaaaattctccataatccattggtggaaagtgaaacttcctttaatggagagaagctgaacccataataataatattattattaataatgaacattaatcatcattgttccttt

SEQ ID NO: 11407 - DNA, 493 bp, Gossypium hirsutum
  Clone ID: GOSHI-09MAY01-C34927_4
ctagggcgcaacgcccatcatcgcagcgcttcccctcccctccgcgctcatcggcgaccatcggaaaccaggtgttgttgcggatatctcggaagcatgaggcgtgacaaagagggattgctggtagcgcacgtctcgaaggtacggtggatggtggagtgggacgctggtgagaggcgtgcggcgcgagggctcaagcaacagctttaggtttctgtttgtttgggccttgtttgggtttatttttgggcctgtgttttaaatgtaaatgggtcttgggagctttgggcctgggcataaatttagtcctacagctgaaatttttgacttttcaaaaccaaaagcacttttgaaatggataagctaaaatttttagcttttcctctctgaaaagcacttttagtgcttaattactttttgacctctccaaaaaaaaaaaaaaaaaaaaaaaaaaaaaaaaaaaaaaaaaaaaaaaaaaaaaaaaaaaaaaaaa

SEQ ID NO: 11408 - DNA, 670 bp, Gossypium hirsutum
  Clone ID: GOSHI-09MAY01-C34927_2
gatataaagtaggaaccttttatggcccaaaatatcctcatttatttccacactttccaatggggcaagaacattacaaaacatctaccactataaatggttcatctctacaaaagttcacttcaatactcggtactcaatcatcatattattaagaggaactaaaaggaacccatggtcttccagaaattgaagctaggcaaaccaacagtaaacttattcccatatctaaattcaaaagactttacaaacttactcaactgaaaactcaaacaacatggtgtgctggtacttgctaccaggttgaacaacgactgatgggaagtttggttggtttatcgcatttggaaatccctgcgtttccaagcataaccctgcatgcttattataaacagcacctcctttcccgactactccattcacgtgattaccagtgtaaaattgcatcccaggtgcatcggtccatacgttaaggaccctcgagctggatgggtccttcaatttggcagcacgtttcaaacccaatttttcttccccaccgccaagaacatagttatggtcataacccaaacctacctcatggacttgaaggcccgccttcttctcagcagtcaagcctaaaggagtccctttaactggcttgatttctccagttggaactgtgttctcg

SEQ ID NO: 11409 - DNA, 873 bp, Gossypium hirsutum
  Clone ID: GOSHI-09MAY01-C34927_1
ttttttttttggcccaaaatatcctcatttatttccacactttccaatggggcaagaacattacaaaacatctaccactataaatagttcatctctacaaaagttcacttcaatactcggaactcatcatcatattattaagaggaactaaaaggaacccatggtcttccagaaattgaagctaggcaaaccaacagtaaacttattcccatatctaaattcaaaagacttcagaaacttactcaactgaaaactcaaacaacatagtgtgctggtacttgctaccaggttgaacaacgactgatgggaagtttgattggtttatggcatttggaaatccctgcgtttccaagcataaccctgcatgcttattataaacagcacctcctttcccgactaccaaggggttcggccccctttctctttctgctagggcgcagcgcccatcatcgtagcgcttcccctcccctgcgtgctcatcggcgaccgtcggaaaccaggtgttgttgcggatatctcggaagcacgaggcgtgacaaagagggactgctggtagcgcacgtctcggaggtgcggtggatggtggagtgggacgctggtgagaggcgtgcggcgcaagggctcaagcaacagctttaggtttctgtttgtttgggccttgtttgggtttatttttgggcctgtgttttagatgtaaatgagtcttggatttgggagctttgagcccgggcattaatttggtcctacagctattaataatgaatcattatcatctccatggatgtattatacatccatccctacccatactgttccatttcaatttaaatttggctatttatctttaatatttttaatttttttaagtcaaaa

SEQ ID NO: 11410 - DNA, 525 bp, Gossypium hirsutum
  Clone ID: LIB3825-026-Q6-K6-E4
ttcaaaaaaaaaacaagggttcggccccctttctccttctgctagggcgcagcgcccatcgtcgcagcgcttctcctcccctgcgcgctcatcggcgaccgtcggaaaccaggtaaggccttcctaaaatctttttattttttaaactctgtttttcaaaaatacaagatagatccacaaaaagctctaaagattaaaaaactaaaagaaaagattgtaaccaccttattctattcgaatgtatgaaagcttttactcaaaacttgctgttttcgtatatttctctctgatttttgtagtaaaaaaaaaccgatcgctttacattgtttagaatggcttttatagcatagaaaagcaaataaaatcttctattggttgctatctgtttggttcctgttacaggtgttgttgcggatatctcggaggcacgaggcgtgacaaagagggactgctggtagcgcacgtctcggaggtgcggtggatggtggagtgggacgctggtgagaggcgtgcgacgcgagggct

SEQ ID NO: 11411 - DNA, 475 bp, Gossypium hirsutum
  Clone ID: GOSHI-09MAY01-C34817_1
ccggcccgaattcccggtcgcccccccttccggggaatccaatctcctttttaagccctccccaattcctatctcgaagttgattttggatggggagtcttccgaggaggcgatggcggctttgtctaaccttctcagtgagaaagctgatctcggaagtgttgccgctgaaaaaatcaaccaaataccacccgccttagaggcacctggcagttgcgacaccgccaaccggatcaaaaccggtttccttcatttcaagtcagaaaaattcgagaaatatcctgatttgtacggtccacttgccaaaggccaatgccccaagtatttgatatttgcatgctcggactctcgagtgtgtccgtcccacatcctggatttccaaccaggggaagcttttatggttcgaaacattgccagcatggtcccgccatatgacaagaataaatactgcggagttggtgcggctattgaatat

SEQ ID NO: 11412 - DNA, 637 bp, Gossypium hirsutum
  Clone ID: GOSHI-09MAY01-C34517_1
gattttcgtggcatggctggatgtggtgacttaccttcaccaccacggatacgagcagaagcttccttggtatcgtggcaaggaatggagttacctgagaggagggcttacaacaatagaccgtgattatggtatattcaatggtatccaccatgacattggcacccatgtcattcatcatctctttcctcagatcccccattatcacttagtcgaagctacaaaagcagcgaaaccggtgataggaaaatactaccgggagccgaagaaatcagggccgattccgtttcacttaatagagaatctagtgtcgagcatgaaacaagatcattacgtgagcaacagcggagagattgtattttatcagacggatcccaacctgttttcgcctcccaaatccgcatgagccattttatttagagatcatagagctgaaacaaacaagggccttcattcttttcgcttttagaagggactttgtatttgttttggttttgttttgttttttttttctttttgtgtcttcaaaataattaaggttgaagttcctgtagtctcatcaaaaacatgattattgttaccaaacatacacacggtactgtaggagaatgacatccaaattttattattatttttt

SEQ ID NO: 11413 - DNA, 405 bp, Gossypium hirsutum
  unsure (1)..(405): unsure at all n locations
  Clone ID: LIB3135-022-Q1-K1-E2
cccacgcgtccgataactgctgtgcaactggagtggtcattgtggactagagatgctggggcggacataattactgcttgtcatgaacctttgcttagaacccccattatcacttactcgaagctgtaagtattctcaatttttgggctaattttagattactcctcaaaatgtttccatcacctagcagtaagcttgaaaacggcgtgtggtgcagacaaaagcagcgaaaccggtgataggaaaatactaccgggagccgaagaaatcagggccgattccgtttcacttaatagagaatctagtgtcgagcatganacacgatcattacgtgagcaacagcggagagnatgtatttatcagacggatcccaacctgtttctcctccaatccgatgaccattta

SEQ ID NO: 11414 - DNA, 386 bp, Gossypium hirsutum
  unsure (1)..(386): unsure at all n locations
  Clone ID: LIB3135-022-Q1-K1-E6
cccacgcgtccgaacaatagaccgtgattatggtatattcaatggtatccaccatgacattggcacccatgtcattcatcatctctttcctcagatcccccattatcacttagtcgaagctgtaagtattctcaatttttgggttaattttagattactcctcaaaatgtttccatcacctagcagtaagcttgaaaacggcgtgtggtgcagacaaaagcagcgaaaccggtgataggaaaatactaccgggagccgaagaaatcagggccgattccgtttcacttaatagagaatctagtgtcgagcatgaaacangatcattacgtgagcaacagcggagagattgtattttatcagacggaatcccaacctgttttctcctc

SEQ ID NO: 11415 - DNA, 755 bp, Gossypium hirsutum
  Clone ID: GOSHI-09MAY01-C34507_1
ctcggggttctctcacggatcacaaaaattttcttcgtcatgccaaattcaaactctatgggttggtctatacaagctttgccttgcgcagcctgaacattgggagcgcgtactaggctacccatcggaccacactcgacctttggagaatgacttgactcacaggctacacttactccagcaatctttccaaaccgacactttgggttatcatctctcagtattgaagccaatttatcctggagggttaacaatgttatctgttttcagtggcattggtggggctgcaatttctctacatcggcttggcattcacttaaaaggtgttgtggctgtagagacttcggaagctaagcaaaagattcttctgaattggtggcaaaacacgggacaaactggtgagttggtgatcatagaagacatccagaagctaacaagtaaaagactggagagcttgatagataagttaggtagtattgacttcgtaatttgtcaaaactcaaacatgaagagtacagaagaggatacactgccaggttttgacttctctttgtttaatgaatttgttcgtgtgctgcaacgtgtaagaagtatgatgcagaggagaggacagctctcttcatgtctgatcccctgtacttgcttttttgttcaatggttccgtgtacttgttatcatcttaatatgttagtaaccgtaagggaacgaaaaaagaaagaagaaaaacgaggagagagaaagaaggagaaaagaat

SEQ ID NO: 11416 - DNA, 591 bp, Gossypium hirsutum
  Clone ID: GOSHI-09MAY01-C34457_1
gtaccgaattgcaaggtcggcccacgcgtacgcccacgcgttcgtggaaatcagtactgataatagtcagcaatatttatcttcagaaaatcacaatggtataaataactctaatgcggagcattcagaggttgcaacagaaatattatctgattgctcaggtgacggaggtaacagggagaagattttgtgtgatcttgcagttgaagaagtgaaagacatatccacaaagatagaggagcacgtgcagggaagggcatcaactgaaactggaaatagcgtagatgctgaaggatcaatcgatgtcgcaggggatgatgtgccgcataaggagagttcacataatacagtcgttactgctttagtattagatactctgcctcatgtagggctttccgatactgaacataatatggatcaggaacagcattgaaagctggggagggacattgatgattggaagataagtttttttttttttcttcctcgtgaagttttgtatgttttggctgccaactgttttgagagagagagagccagagagagagttgctgatagccatagaaaggtttgaaatcacattgaacgcct

SEQ ID NO: 11417 - DNA, 416 bp, Gossypium hirsutum
  Clone ID: LIB3146-046-Q1-K1-B1
cccacgcgtccgcccacgcgtccgctgaaactggacataatgaagatgctgaaggatcaatcaatgtagcaggggatgatgagcagcaaaaggagagttcagataataaagtcgatactgatttagtatcagatactctgcctcatgtagggctttccgaaactgaaaccgaagaggaagctgaacataatatggatcaggaacagcattgaaagccggggagggacattgatgattggaagataagttttttttttttcctcatgaagttttgtatgttttgataagagagagagagagagagagagttgctgatagccatagaaaggtttgaaatcacattgaacgccttattgcaggatgttggcccgtgacttttagagttgtttattataaaaccatgacgtttttttaaa

SEQ ID NO: 11418 - DNA, 370 bp, Gossypium hirsutum
  Clone ID: LIB3146-046-Q1-K1-H10
gggatgccttccagtcttttccagccacaattaatgcagctgaaactgattctgtagttgagaggacagtaaaagaatcggaccatgatgagtccatctcttctgctttggaaatcagtactgataatagtcagcaatatttatcttcagaaaatcacaatagtataaataactctaatgcggagcattcagaggttgcaacagaaatattatctgattgctcaggtgacggaggtaacagggagaagattttgtgtgatcttgcagttgaagaagtgaaagaaatatccacaaagatagaggagcacgtgcaaagaagggcatcaactgaaactggaaatagtgaagatgctgaaagatcaatcgatgt

SEQ ID NO: 11419 - DNA, 590 bp, Gossypium hirsutum
  Clone ID: GOSHI-09MAY01-C34417_1
attctactgatctagtcgctttgtccggtgttcacacattcggaagggctcgatgtgcggcgttcatggaccgactctacaacttcaataacataacggggaaaaccgatcctaccctcaacgcgacatatgcaaacacactcaaacaacgatgtcctaaaggcggagacactaaaagtttgatcgatctcgatgaacaaagttcgcttacgttcgacaacaagtacttttcgaacctacaaaaccgaagggggttgcttcaaacagaccaagaattgttttccaactaatggggctgaaacaagtggccattgttaacagatttgcaagcagtcaaagccagttctttagtagctttgcgaaggccatgataaagatggggaacttaaaccctttgactggtaccaatggagaaataaggctcgattgcaaaaaggtcaattagagattatgtgaaatgggttttaacttttaaatcaagtttagagcttgggttttttttttttagtgatgggctgtttctttaaagtatgcaaaaaagtattatcctatgatgttttggaataataatattgaaatttttagttatt

SEQ ID NO: 11420 - DNA, 1055 bp, Gossypium hirsutum
  Clone ID: GOSHI-09MAY01-C34777_1
ccaaactcctagccaaaatccgggggggcgctctttccctcttatttataatccctttctttcctcccaaagttctctcaaacccaatcacaatcccaatcccatttcctttcatttccttccaaatcccttcctttctatcctccttctctcttccccaacaaaagccctttccttgcactccctcctttcaaaacccccaccatttctctcccaacaaaatccatgatttccagctccaaactctctaatcacatcgacccattgttgttgaacgacacccaactcgaccgttttgcggaagtgggcaataagctagctgatgccgctggcgaagtcatccgcggttactttaggaagaaattcgagattcttgataaagaagatttgagtccagtgacgattgctgaccaagctgctgaagaatctatggtttcgattatattggagaattttccttctcatgctgtttatggagaagaaaaaggatggaggtgtaaggaggaatctgcagattatgtttgggttttagaccctatagatggcacaaaaagtttcataactggaaaaccagtgtttggtactctcattgctttgttgaagaaaggtaaacctattcttggtataattgatcagcctgttcttagagaaagatggatcggaataagtggaaggatatctacattgaatggacaagaagtggctacacgagcttgtacagaactgtcacgaccatatttgtacactacaagtccacatctgttcagcggagatgctaatgaggcatttgcccgtgttagagataaggtcaaagtgccactatatggctgtgactgctacgcttatgccctcttggcttctggttatgtggatcttgtcgttgagtccggcctccggccatacgatttccttgcacttatacctgttatagaaggtgctgggggtgttgttactgactggaaaggcaatcatcttcattgggaagcttcttcaacttcacgtgcaacaagctttaatgtagtggctgctggagataaacaaattcatcaacaagc

SEQ ID NO: 11421 - DNA, 446 bp, Gossypium hirsutum
  Clone ID: GOSHI-09MAY01-C34647_1
caaaatctgagtttttattatttctacgtttataaaacattgtataattttctttgttagttgtctgagatgccgaaagtttgcttctctaaagacattatgatcatgtttgtggctcttgtgctctccgtcgccaccattgtatcagctcaggacagtgcaatggcgcccgcaccgtcaatggacactggatctgccttctcaacgccgattactggtgttgccgttacgttgtctcttattatttcccttcttgctcttttgaagcactgagttacataatttgagtggttggatgtctagtgtattgtcatattttgaatctattattattattattattattattattggatcaataattttttatttggaattaattattattccaacggtttggaattttctgcctaaaattgacaacaccgtcggtcgctctataagat

SEQ ID NO: 11422 - DNA, 458 bp, Gossypium hirsutum
  Clone ID: LIB3147-028-Q1-K1-D7
cccacgcgtccggaaaaacattgtataattttctttgttagttttcagagatggcgaaagggtgcttctctaaagatattttgatcatgtttatggctgttgtactctccgtcgccaccattgtatcagctcaggacagtgcaatggcgcctgcaccgtcaatggacactggatctgccttctcaatgccggttactggtgttaccgttactttgtctcttattatttcccttcttgctcttttgaagtcagtgagttacataatttgagtggttggttgtgtattgtattgtaatatatgggatttatttctattatattattatcattatattttttttgtatcaataatttcttaatttgaattaataattataataaggttttggaattttctgcatatggtatctctaggtttacaggttgctgcgccctggtaaacccttttaatgcctctt

SEQ ID NO: 11423 - DNA, 673 bp, Gossypium hirsutum
  Clone ID: GOSHI-09MAY01-C34617_2
cccacgcgtccgctttcaggccaagttctacggatccaagctctagacctgcttccatcgatcctaattatagagcggatccaagctccagatctgcttccattgatcccagacccgcttccattgatcccaactatagagcggatccgggctctagagctgctcccattgatcccaattatagagtggatccgagctctagagttgcttccattgatcccaattatagagcggatccaagcgctagaggtgcttccattgagcccaattatagagcggatccgagtgctagaggtgctccgattgatcccaattatagagctgctccagagctgaagtataggggtccaaccctggaatctgctgggttttctaaacgaagagaaagtttatttgtgaacagccaggttgtggatgacaacagttaactgttaaaaaccagtttccattaacttacatttcaaggtgggttgcttttaagttgtcctttgcccttccataagatattatgaaagccatttgagcttgccatgttgtatttttaatttttagcaacataaacgaagaataattgcagaagtttttagcttaaaaaaaaaaaaaaaaaaaaaaaaaaaaaaaaaaaatggcatcacatttaaaagaatccaagtttacattctttgccttgcta

SEQ ID NO: 11424 - DNA, 1031 bp, Gossypium hirsutum
  Clone ID: GOSHI-09MAY01-C34617_1
ggaacggtctaaagcatatggtttcacatcggatggtgatttgattcatgttttgctgttgggtgatagtatgaacttcaagtgcagggttaggtccaagaaaaagttggaaatgaatgagcctcttgcttttctggctattaagggatatttgcttatcgttgatctggaaaagatttttgtgtataatgtttctacgctgcattatgttagggctggtgcgccaaggtttcttttctctgccggcttggatgagatcaggtcttcgtttttaactcaccaagtggtggatacaaataaagagagaagacacgtgacacccttaatagcgagtgaccgtgaaaagctcactgttcttggccttggaggtgattacattggaatgtatcgctctaaccttccagttttgaaaggggaatctaatacgatgctgtggaccagccccgtgctattcttcatacttttcctatttggggcttggcaattctttgcaaagaggaaagaggcacttacatcatggggaccagatgacccttttagctctacatcagctacaaattctgctccactaggatccaacactggagacaggtcttttatagattcttcttcaagaggggcggatatggccgacctgagaagctccgctcttcgaagtagaaggtatggatccccttctcggtatcaaggcggagcaactggttctttcaggccaagttctacggatccaagctctagacctgcttccatcgatcctaattatagagcggatccaagctccagatctgcttccattgatcccagacccgcttccattgatcccaactatagagcggatccgggctctagagctgctcccattgatcccaattatagagtggatccgagctctagagtggcttccattgaccccaattatagagcggatccaagcgctagagctgctcccattgagcccaattatagagcggctccggggctgaagtataggggtccaaccctggaatctggtgggttttctaaacgaagag

SEQ ID NO: 11425 - DNA, 599 bp, Gossypium hirsutum
  Clone ID: GOSHI-09MAY01-C34107_1
aatccaactagtttccatcaaatcttttagctttttcaagaaaaaaaattaaaacccagtttttttttttcttttttctgaatcacccatcaccatgaatggtgaaaaaaacagttcaaacaatagggtacttaaattgaagtacgttaaacttggttaccattatctcataactcaccttttaaagctttgtttagtccctttaatggctgctatcatcgtccaagcatcgaggttaagccttaatgacatccaccaaacatggcttcaccttgaacataaccttgtctatgtcgtcgtgttgtcggctttcgttttggtcgggtcgaccgcttactttatgacccgaaaaagatccgcttatttgggggattatgcctgttatctccctccttcgaagctaaaagtggaacacgaccggttcatgaaacattgtaagctaatgggttgttttgatgagacctctttggtgtttttagacaagattttgggaagatcaggcttggagaaaaaacatgtgcacaaaagcaatgcattgtcttccaccaaaaccatcaatggaggctgcagacagagacagaacaggtgatgtttggtgt

SEQ ID NO: 11426 - DNA, 564 bp, Gossypium hirsutum
  Clone ID: GOSHI-09MAY01-C34127_1
acgcccacgcgtgcggacacgcgttcgggttgtgcattgaacatggattgtcaattagcacttctttataataggaaatgcatccccttcaataataatgtttgaccattgcatgtccctgcctatttgagttgctgttcgacacgctattgcttctgcggcaaaggctgatgccacatgatgatgaatctctgtacatgataaaagtgtgtttccgtcactatccctggccacgatacccgctgctgattgccgtgagttcccatcaaatgctgcatcgaagttaaccttcacaaactggaccgatctattagtcttttcatgcacctctcctattcctttctccccatattgcccaaagagcacaacaaaagatccgtcgccgattggtggaattctgttcaaaaacccaggacattctcggaatatatgatttgcagactctgctgcactgccacacccgacgcatgtcacattgtttaacagccttctgcagttcaaggtgactcgagtcgggatataattccaagttattttccagactgaaatttttaccttaagagg

SEQ ID NO: 11427 - DNA, 1410 bp, Gossypium hirsutum
  Clone ID: GOSHI-09MAY01-C34397_1
gtttgaattgaatttaacaagtcaaatatttaagttggagttaaaattaactagtctatctaatgtcaattttacctaaattagtggaaaaaatgagattgaaaattcttttagaagggaaatgagttgaagattatataatctaggtccacacaagcaatgtattgatggcctataaatagtgttccaagtccccccgtccgccccccgtccgcccgcgccccggcaattccagtgatagatcttgctgagctccatggtgacaaaaggagcaaaacaatgacttctcttcatgaagcttgtgagaaatggggcttctttcaggttgataaccatggagttgataagaagttaatggagaaggtgaaagagatggtgaatgattactatgatgagaatttgaaagaaaagttttatgaatcggagatgactaaaagtttgaacaagaatgagaaaatctccgacatggattgggaaagtactttcttcatttggcaccgtccaaattctaacatcaatcaaatcccaaacataactaagcaactatgtgaaacaatggaggaatacatagcacaattgattaaactagctgaaaccctatcggagctgatatgcgaaaatctaggactagaccacaaccacataaagcaaacattctgcggcaccaaaggcccctccatcggcaccaaagtggctatatacccacaatgtcctaacccagacctcgtccgaggtcctccgagagcacaccgacgccggtggcataatcttacttctccaagacgaccaagtcccgggcctcgaattcctcaaagacggtcaatggtttagaatcccaccgtcgaaaaacaacaccatattcgtcaacaccggcgaccaaatcgaagtgattagcaatgggaagtacaagagtgtgttgcatcgtgtaatggctgagaaacaagggaataggctttccattgctacgttttataaccctggtaatgatgctgtgatttcgccggcaccggaattgttgtacccgggcaattaccagtttggggattacttgaaactatattcgactactaagtttttggagaaaggaccaaggtttgaatcgatgaagacgacgatggttaatggtcaccatggttgaaaaaagcagtgatttgcatggcctcaaagtgggtttttttttttaaatacagttttatatatgttcttatgagttatgttgctttggttcctatctaaaaatatttgtatttgtattctcttttttttttaatggaaacagcttttttttgtatcttatagatagaaacattaaaaacaaatgaatgatgatgattttgctattgacaaggtaaattataatagatgcgtggtttaaatgctttaacatgaaatttactgatgaagtggggg

SEQ ID NO: 11428 - DNA, 581 bp, Gossypium hirsutum
  Clone ID: LIB3828-014-Q1-N6-G8
gcaaattgaaacatgatatcttcagtccagttttgacattaactaaatcagaatcaggaattcaaattttccaatcaaatgtcttgtaacagcaagtcgaacaagctgcttgaataagaaatagcccagttttttaagaattcagatgagttgaatgagagattccagggactaaagaatgtacaattggaatttgaccagcatttttgattatttaatcaaacatcatctgcatcacttccaccaacatgtgtttcatggctaacccaataatggcttccatcaggaccagacaccttaaaccgttcaagtacggattttccttctttgtacttctggctcttctcatgggcaaattcatatttccatcccacaattgatccacacccaatgcagaagatatctgctacagtgtgcaaccctgtaatcatcagtctatcttctttttccccgacagaaacattcaccaccttactgaagagatatgcttttccatgcctggactggaaggacttggaaagaatatcatcaacaagagcaagatggattttgcagtgcttgcagctataaactttcccttc

SEQ ID NO: 11429 - DNA, 389 bp, Gossypium hirsutum
  Clone ID: LIB3146-053-Q1-K1-C11
cccacgcgtccgcccacgcgtccgattctttcgttatttcgtagggtgaatgtttctgggggggaaaaagaagatagactgatgattacagggttgcacactgtagcagatatcttctgcattgggtgtggatcaattgtgggatggaaatatgaatttgcccatgagaagagccagaagtacaaagaaggaaaatccgtacttgaacggtttaaggtgtctggtcctgatggaagccattattgggttagccatgaaacacatgttggtggaagtgatgcagatgatgtttgattaaataatcaaaaatgctggtcaaattccaattgtacattctttagtccctggaatctctcattcaactcatctgaattcttaaaaaactgggc

SEQ ID NO: 11430 - DNA, 338 bp, Gossypium hirsutum
  Clone ID: LIB3135-019-Q1-K1-D3
gctttccattttccctttttgatatccaaaaatacattctttcttttttatttcttttcttagttttggaaagatctggtaggtggtggatagatggggaggttatttgtggtgaaccttgaagggaaagtttatagctgcaagcactgcaaaatccatcttgctcttgttgatgatattctttccaagggtgaatgtttctgttggggagaaagaagatagactgatgattacagggttgcacactgtagcagatatcttctgcattgggtgtggatcaattgtgggatggaaatatgaatttgcccatgagaaaagccagaagtacaaaaaaggaa

SEQ ID NO: 11431 - DNA, 445 bp, Gossypium hirsutum
  Clone ID: GOSHI-09MAY01-C34337_1
cttcgattatattccttaaaaccatgggaggaaactcaccttgtgcttcttgcaagttgcttcgtcgccgttgtgccaaagactgcatctttgcaccttatttcccttccgacgatccccacaaattcgccatcgttcacaaggtttttggtgccagcaatgtcagcaaaacgttacaggttcattaacaaccccctcatctaatacgttcattaacattttgggtaaattgcaatagtagccacccaactattagtaatttcttttttggtcactcaactatttagttttgtcttttttgatcacccaactatcttggattgtaacttagattgttgggtgtttctattttttagttagtgatgacaaaaaagaagaagacaaaattgaatagttgagggctattttgcaactttttatggttgggcgaccaaaaaaagatact

SEQ ID NO: 11432 - DNA, 412 bp, Gossypium hirsutum
  Clone ID: GOSHI-09MAY01-C34277_1
cccacgcgtccgctcttaccacctgtaatcagagtccagtaagagaagcgacgacaatcacaaatgggttaggttcacggatcgttggcacgtgccgggaaagtgagagggcaaactccaaaggtagccaagcaagacaagaagaagaagcccagaggtcgtgcctataagcggatgcaatacaatcgccgtttcgtcactgccgttgttggctttgggaagaagcgcggacccaactcgtcagagaagtgaggccggacatgtaggagtcttacattatattgataattttctagcttcattagcattacattgttatgatttagtttggagtctttctttgctttaagaaaactataacatccgtatctgttgttttgaaatatttactaaggccctccatttctgatcc

SEQ ID NO: 11433 - DNA, 456 bp, Gossypium hirsutum
  Clone ID: GOSHI-09MAY01-C34207_1
cccacgcgtccgggaaaaaaaaggggggttgctctgttagggtttcaaccctagcaccccccacgtcgccgccgtcaaagatccaccgccaccaggtcgtcccttggcctccgacgacgctccggcaacaccaggtgtgggcgttggagaatgtgggttgtgcgaggtgataaccgctggaggaagaacgtgtgcggcactggggaggctacttgctgctgtagcactgatgcgaagagggttctttgatgggtttattgggctaggttaaatttggttttaggctaatgtaattgggttacaatttgggcttgtaacatttgtgattgggccacgtgaattaagtttttaaatggactgggcacctttgtttatttaggcgtgggctaaaattgggtattatagttataaaatacataaattatttttataataattttttttgtgatttataat

SEQ ID NO: 11434 - DNA, 469 bp, Gossypium hirsutum
  Clone ID: GOSHI-09MAY01-C34237_1
aatttgtagcagaaattgtgagtattggtcgtctgcgacaccggaatttagtccaactcttgggatattgccggcgcaaagatgagctgctgggggtctatgactacatgcctaatggaagtcttgataagtatttgcatgaccagccaaaagtcaccctaaattggagacaaagattcagagtcatcaaaggtgtagcatcaggattgttctatttacatggagaatgggatcaaggtgtggttcatagagatgttaaagccagcaatggtttactggatggcgaattaaatggaagattgggagattttgggcttgctagattatatgaccatggaacggatccccaaacaactcacgttgtgggaactcttggttatttggctcccgagcatactcgaaccgggaaagccacgccgtccaccgatgtgtttgctttcggggcatttttgcttgaagttgcgtgtgg

SEQ ID NO: 11435 - DNA, 440 bp, Gossypium hirsutum
  Clone ID: GOSHI-09MAY01-C35957_1
cccacgcgtccgagcagatgcctgtaacggctagcaagttgcgccgattgttgaaatctgaacacccatatgtggagcgaaatattggtacagttgttagcatcatcaggcaatctatgcagaattctgttgtgttctgaagctgctgcccaacaacttagaatggggcacctgctaaatgcatctggagaacatgtagcagctaatgagggagcggaagccttacctcctgagactcctaccgactcaaaaattgcaatcgatacgacagaaatcatagatggtggcatgtgggggccggataagagaactgcacatcctgcttctactcaacatagagctgaattgttaaaaattggaagcagtatttctggaccggcctgagttaaaaaccaaacaagattgtcttttgagccacacatcatgttgatgtccgcaag

SEQ ID NO: 11436 - DNA, 768 bp, Gossypium hirsutum
  Clone ID: GOSHI-09MAY01-C35967_1
gaagcagaagaatatcttcatgtctcagcctctgtaactgcggccggatggaagcagtgaaggttgaaggttttggccctgattcaggggtggaggatttagggcgatgcgttgatgaaatttccaccactgtcagtcggctcgagcaaagagttaacgatgtcgagcagttctacttgactacagataatatggagttgactattaccaaatctgcttcagcttttaaggaaaaagtcaaggaaaaacagcttactggccttgaaaagcagcagcaagaagcatcacaaagagaagctgctgctctgaagagaatgcaggaacttatgcgccaatttgccacaattttacgtcagatcactcagcacaaatgggcacatccctttatgcatccggttgatgttgaaggtcttggtttgcatgactattatgagattgttcagaagcctatggactttggtacaataaaaagcaagatggaagctaaggatggtactgggtacaagaatgtacgcgaaatttattctgatgttaggttggtttttaagaatgccatgaaatacaatgatgaaagacatgatgtccatataatggccaaaactttattggaaaaatttgaggagaagtggctgcaacttttgcctaaagttgctgaagaggagaaaagacagcctgaggaggaagcaaaagcagagctagatgtgaagctggcacaagaggcagttcatgctaacatggccaaagagttgagcaatgaactgtgtgacg

SEQ ID NO: 11437 - DNA, 580 bp, Gossypium hirsutum
  Clone ID: LIB3825-028-Q6-K6-E6
ctaactttcttaaggcttttctgcttcgcatgtatttatgtatatatatccaaaagaatctttatgtatatatttatgtaaccctagcaatccatgcaaatggaatcacagatggaagcagtgaaggttgaaggttttggccctgattcagaagtggaggatttaggacgatgcgttgatgaaatttccaccactgtcagtcggctcgagcaaagagttaacgatgtcgagcagttctacttgactacagataatatggagttgactattgccaaatctgcttcagcttttaaggaaaaagtcaaggaaaaacagcttactggccttgaaaagcagcagcaagaagcatcacaaagagaagctgctgctctgaagagaatgcaggaacttatgcgccaatttgccacaattttacgtcagatcactcagcacaaatgggcacatccctttatgcatccggttgatgttgaaggtcttggtttgcatgactattatgagattgttcagaagcctatggactttggtacaataaaaagcaagatggaagctaaggatggtactgggtacaagaatgtacgcg

SEQ ID NO: 11438 - DNA, 533 bp, Gossypium hirsutum
  Clone ID: GOSHI-09MAY01-C35917_1
aaacatatgagcctgctccatcgtcttcgtcgttttcatttgccagattttggaaactgatcatggctggaggaggaaatttcatgcacagagttatatcttatgtcgtcaatgagcttgtcgttgacagacttgcaaacagtcctgcattccaaagatttgctgtgaggacatcaaagaggatagaagatatctccagtatggctgagaagaagaggcaagaacttgctgaacaaatgaaagaaatctcctaaaacatggagtctaaaaaccaatgatcgtattcgtacgactgctctgaccctctcgtacttgtggtcatccctaccttatgtatcgctatctgaattcattccctgaaatagaggggtgtaatctggcacctctcatccactggttatggtactgctgcatgtatttcaacggcgacttattcttttccaactggataatgtaggacaagttatctatttgaatatgctcagatacatatatatatatcccatttataatgaaagatattgacacgctgg

SEQ ID NO: 11439 - DNA, 567 bp, Gossypium hirsutum
  Clone ID: GOSHI-09MAY01-C35937_2
cggggacttattactggtcttaagcagctcggtgctgatgttgattgcattcttggcacgaattgtccccctgttcgtatagaaggaaagggtggtcttcccgggggaaaggtgaaactctctgggtctattatagtcaatacttgacagctttactcatggcggctccgttggctcttggggatgtggaaattgagataattgataaacttatttccatcccatatgtggaaatgacggcggacccgcgcgtccggtttggggtcaccgtggagcacactgattgctgggatcgattctttatccgaggagggcaaaagtatatgtcgccgtgcaattgcttatgttgaaggcgatgcttcgagtgccagttacttccttgcgggtgcagcagtcacgggtgggactgtcacagtagaaggatgtggaacaagtggtttacacggtgatgtaaaatttgccgaggttcttgagatgatgggtgccaaagtcacctgtaccgagaatagcgtaactgtcaccggacccccaataaatttcctcgtggaggaaacacttgcgtgctat

SEQ ID NO: 11440 - DNA, 1057 bp, Gossypium hirsutum
  Clone ID: GOSHI-09MAY01-C35937_1
ctttttcgtccggtttggggtcactgtggagcacacgcccagcggccgcccacgcgtgcgccggggggggcagaagtatatgtctcctcggaaatgcttacgttgaaggtgatgcttcgagtgccagttacttccttgcgggtgcagcagtcacgggtgggactgtcacggtagaaggatgcggaacaagtagtttacagggtgatgtaaaatttgccgaggttcttgagatgatgggtgctaaagtcacctggaccaagaatagtgtaactgtcaccggacccccaagaaatccctcagggaggaaacacttgcgtgctattgatgtcaacatgaacaaaatgccagacgttgctatgactctcgctgttgttgccctttacgccgatggtccaactgccataagagatgtggcaagttggagagtgaaggagaccgaaaggatgattgctatatgcacagaactccggaagctcggagcaacagtcgaagaagggccggatttttgcgtgatcacaccaccagagaaattaaacgtgacagcaatcgatacttacgatgatcaccgaatggccatggcattctctctagccgcatgtgctgaggttccagttaccatcaaggatcctggttgtacccggaaaaccttccctgattactttgaagttctcgctagagttacgaagcattgaatgacttactttagagaaagcaagaaaagcccgagagagagaggtttgtacccccgtccttaaaaatcataggacgaaaggcaatcaaacctcgtcttcgatgttccatctcgtaatctaataattccgcaatcggcagctcgggtttattaccgtttcttcctagataatttatttttctacttgtaatgagtgagtagttggtctttggtcgctgtcatgaagactgttatgttaaacaatatttgctcaattaaggtttgattcttttttgctaaaaaaaaaattcataaaaaaaaattatatttaataattaatttaaataaataataaaaaaaaataaataaaaacataaaaaaatatgg

SEQ ID NO: 11441 - DNA, 336 bp, Gossypium hirsutum
  Clone ID: LIB3146-044-Q1-K1-E2
cccacgcgtccgctgataattccgcaatcggcagctcgggtttattaccatttcctcgataatttatttttctacttgtaatgggtgagtagttggtctttggtcgctgtcatgaagactgttatgttaaacaatatttgctcaattaaggattgattcttttttggtaaaaaaaaatcaatccttaattgggcgaatattgttttactctaacaggcttcatgacagcgaccaaagcacctactactcacccattacaagtagcataaatatattatcgaggaaatggtaataaacccgagctgccgattggggcgttctttgcggacgcgtagg

SEQ ID NO: 11442 - DNA, 675 bp, Gossypium hirsutum
  Clone ID: GOSHI-09MAY01-C35847_3
cccacgcgtccgctttcattctctttgggttcattaagtagccacccaaaccaccatcaatttgatggctgacggtgcacgaatggagatcggatcttgctgaagaaagcctcacccacgaagatccgtgtgcgtggcgcgtggaggtgcacggcgtacagaggtgctggaggcttgaacggcgctggaggttagggctgcgacactccttactactagggtttggctatttggctaaacttagtttaggttttgggccattgggccccattgtaaatgggtatctgggtttgattttttgttatgggcccccggcgcgtccggcccattacagagctgttttcagcatttcctcacgggctggccacacgcccatgtgcgcagcccgtgtcgatttcgcaacctgcttccttaacacgtggaaaaacccaatttttaggctttcttagcattctaaagtctataaataacaataaaaagaagacctaatggagcatgtagagaagattgaagaaattactcgaagtacactatcagagccaactcagaagcacatctccttcaaaattgaatatctcattttaactcttttcgaagtttatttgaatttctttatatcttgtaccttttctgactttgagatgtttttttttttaaattatgaactaaattccc

SEQ ID NO: 11443 - DNA, 440 bp, Gossypium hirsutum
  Clone ID: GOSHI-09MAY01-C35847_2
cccacgcgtccgcccacgcgtccgtggcctggggtttaaaaaaagaaacagaacccttcattctctttgggttcattaagcagccgcccaaaccaccatcaatttgatggctgacggtgcacgaatggagatcggatcttgctgaggaaggcctcgcccacgaagatccggtaagagtgctcctttccccttttttttttaaaaaaaaaactttaaaatcctgtactattctgtcaataccaaggcgagatccgacgaaaaagaagagaaaaaccaaccccagcccgaatcaccatattcctgagacgtgagggctttcatcggtggtggttcaagcatcctttttcatcttctatgttaaaataatgcaagcaaatcaacaagaaagaggggaaaatttgaaatcacctttagatcactcttttgaattctttctacta

SEQ ID NO: 11444 - DNA, 535 bp, Gossypium hirsutum
  Clone ID: GOSHI-09MAY01-C35847_1
gtctatttgcaagtgtgcgtggcgcgtggaggtgcacggcgtacagaggtgctggaggcttgaacggcgctggaggttttcttagcattctaaagtctataaataacaataaaaagaagacctaatggagcatgtagagaagattgaagaaattactcgaagtacactatcagagccaactcagaagcagatctctttcaaaattgaatatctcattttaacttttttcgaagtttatttgaatttctttatgtcttatagtttttctgactttgagatgttttttttttcaaattatgaactaaattccctagatacctagggaaaatgaaacctatgatgaattttattatttgatttctgaattacatgataaatacttgattcttgttctcaaaaaaaaaaaaaaaaaaaaaaaaaaaaaaaaaaaaaaaaaaaaaagggcggacgatttaaaggatccaagcttgggggcccgtgcatgcgacgccatacctcttctatagggttaccaaaatttaattctctggtcggg

SEQ ID NO: 11445 - DNA, 522 bp, Gossypium hirsutum
  Clone ID: LIB3829-010-Q6-N6-G2
aaaggacttgtcaatgttgtcttttgctaaatgaaatggtaagagatacagatcagtgcaagaagacaccaaactatacaactacgataggcatcgtaaacatacgcatgtaataagccgctagacgcgggtttgaaagaaggtcttagttgttgcaaactttcattcattgaaaaaggaagtttactggatttagatgttctaacatcttcacggtaggaactgtgtagttgcaaataaacaaagggagaaattgtagaagtaggtggttgttatgaatcaacctgcctttggctttcacttaatcttctccaaaccatcctcccgcagtgcatcacggtcaagattgccattaagaagagaagaggaatcccaataacgcagccaccgtatgcaaaatttatcaaagtcatcattccagcagcaagatgaaccgagggaacaaagagttggtccactttattcccttcagcatagccattaaacgcaataaccattgagaaagtgtgggaccgttacgaa

SEQ ID NO: 11446 - DNA, 416 bp, Gossypium hirsutum
  Clone ID: LIB3145-016-Q1-K1-B4
gccacgcgtacgcttctattaaaaatttcatccattttcactgttaaaacccggtctctgtgcatgagcatgccgtacacgcagcacaccatgtcattgtttggttattccatcaggcacgccataaatgaattttttacagaatggactaatttgcgcatcttttgagtagagagagcaaaatgcaatcttgtacagggggtctctatgatatttttaccaacttttgcaagttgtgaatgattcttactgacatctttcctccagactttgataaattttgcatacggcggctgcgttattgggattcctcttctcttcttaatggcaatcttgaccgtgatgcactgcgggaagatggtttggaaaaaatttagtgaaagccaaaggcaggttgatttataacaaccacctac

SEQ ID NO: 11447 - DNA, 660 bp, Gossypium hirsutum
  Clone ID: GOSHI-09MAY01-C35527_1
gaatgaaaacggtgtggatgtaactgtcttgctagacgtgatgcctggatcatcggcttaacgacaagtcatcttatttttatggcaagtgatgcaagagcacaaggtggctttgattgctgaagaactgtgctttcttgatgtgattccagctataagaaagttcttgaaggatacaattgagccatggctggatgggacttttaatgggaacggtttcctgtgtgaatcgaaatggggtggaattgtgactaaacaagggtcaacggattcaggggcagatttcgggtttggagtttacaatgaccaccattatcatattggttacttcctttatggaatagctgtcttgaccaagattgaccctgcatggggaaggaggtataagccccaagcttattcacttgtggctgattttatgaacttcggcaggagatcgaattcaaattatccacgagtgagggtgtttcgatttctacaagctccattcttgggctggagggttgactgaatttgcagatggaaagaatcaagaaagcactagtgaagctgtgaatgcatattacgctgctgcactaatggggttagcctatggagacacccatcttgttgcaactggttcaacacttacagcactggagattcaagcagcacaaacat

SEQ ID NO: 11448 - DNA, 572 bp, Gossypium hirsutum
  Clone ID: LIB3582-013-P1-K1-G5
ctgaaatcaacaaaaactaaaaaacaggaaacccagtagaaaaacttcagaacacccttgaatcttttttgttgaactgaatcatagcctacaatgtaagaatcaggctaatccgaatgaacccatccaaatcagtcatccgtttgggaagcctctctcatctcttctgcaaccaccatgtaccttactgtcgacggggaatcctccatccaaaagaatccaagtatgctcgaccaaacccttcctggttaattttctcaattaccgttctagaatctccttcaacctccactgtggtaaaccccgtctctttggcaaaaagaagcccttgaaagcaagcaacagcttctgccatgaatgcatctgagacattgccatgatgagctgcatcaaagttcagtttaacccacggctcttgaggtggtctccaacagtctgaacccactgcctttattacagggaggagaattctactcaagagcagcagcaacgctcaaatgcaaaccacacgccgaggcctaaccttaatgtgctccttcaacaataccgactccccattaataggcctgatg

SEQ ID NO: 11449 - DNA, 441 bp, Gossypium hirsutum
  Clone ID: LIB3145-015-Q1-K1-D3
cttgaatcttttcgttgaactgaatcatagcctacaatgtaagaatcaggccagtccgaatgaacccatccaaatcagtcatccgtttgggaagcctctctcatctcttctgcaaccaccatgtcccttactgccgacggggaatcctccatccaaaaggtattttccgatctgcaactccccttccttgcaataaagtgtgccacccgattagcttcccttcttacatgtttaaatctaagttgatgaaaaaatcgccccatcgatttgatatctaagatgacagaatccaagtctgctcgaccaaacccttcctggttaattttctcaattaccgttctcgaatctccttcaacctccactgtggtaaaccccgtctctttggcaaaaagaagcccttgaaagcaagcaacagcttctgccatgaatgcatctgagaca

SEQ ID NO: 11450 - DNA, 561 bp, Gossypium hirsutum
  Clone ID: GOSHI-09MAY01-C35757_1
gtggtttactaggaggcaggggtttgcggaggcttttcactgttatctgggttccaaacagcaaagaaatggcagctacaattgcatcgagatcttcttttcttcgtccaattctccgaacagcaacaacatcgacaaaagcaagaaccaaaatcccattttcagctccaagttcttcacttcgatccaatttcagtcttcatcagacccggatttctcctccctctctttctcggttcgttcgacgagaactcagcactcttcaaccacttcacagtgcggttgcatcggcttgccttgtttccaagcttccttccgatgctaatagttgtgctgaaggtcgatttgctaactatatcagtcccatctagtagcaagcgcttgtagaggttgagtttacttctttcagagtggcagtgatgcttacttcattctataattcagaactcagcttttcagggaatcaattggctgaatgtgttttattgacctacatttaattaggtggtgggtgtaagtgactcttgtaatcttctcagtttttaatgattttaatttaca

SEQ ID NO: 11451 - DNA, 661 bp, Gossypium hirsutum
  Clone ID: GOSHI-09MAY01-C35747_1
ggaactttcgagctcctctggtcatcagattcgggaaaagagagagaaaaaagaagtccctttgactgttgtctctcaatcaaatgggccttcacatcctcaaaacgacgcctttttcgtcttcctactccaaagctttactcctcgccaccgccgcaaaaccctccgctttagctgctgctgttcttccttgtaatccccgcttgagatttccattttcttcgccaaaggccattacttcatctgggtatgggagtttccttcatctgaggaagcgtgggtttcgtgggagtgtcgtcttaaccatggctgcttctggttcggtccacaagtctgaggaagagtggagtgctattctttccccagagcaagttccgaattttgagacaaaagggcaccgagtatccacgcaccggagaatatgataagttcttcgaagaaggtatctataaatgtgcaggatgtgggacttctctttacaagtccactacaaaatttaattcaggttgtgggtggccagctttctatgagggtctccctggagccataaatcgccatccggacccggatgggatgaggactgaaatcacttgtgcaggcttgtggtggccatttgggccatgtattttaaaggtgaagggtttccaacacccaccgatga

SEQ ID NO: 11452 - DNA, 1111 bp, Gossypium hirsutum
  Clone ID: GOSHI-09MAY01-C35707_1
gaataccactgcaagattagcaagtcattaagctattttgcattcaattccctgacttcagttttacttgttatttagtgatctatatgaaggggctaggatggctatggtgactgatcttgctggaatcaggcaaatcatacaacctttagaagagtctggcacattggttcgcaggagtgatgaagaggtctatactattttagacttttgtttgatcaatctcgatctcttttatgtgtatactttttcaatgaggtgcctgttgtaaaattagcttttgtttcaaatctcaccaaaagaaaaacaaaatggaaggtgaaaaatgctttcattcttttgagtcagagccaggtagaatctgaaaattaaattcttgtctcctttttattcgcacagctacttaaggccctagattcatttgttgttatggaaagggaaggtcaaatcattgcttgtgctgctctttttccattcttcaaggaaaagtgtggagaagttgcttgtattgcagtttctcctgactgtcgaggacaaggacaaggagataaattgctcgattacgtcgagaagaaggcatcctctctcggattggatatgcttttcttgttgacaactcgcactgctgactggtttgttaggcgcggctttactgaatgtacgatcaacatgataccggaagaaaggaggaaaaagataaacctatcccgtaaatccaagtattacatgaagaaactcataccagatcgaagtggaataacagctgataaagcatttaagtaaagcttacagccgatggaccggagctacggagaagacgatgctacctcattggtccgatttggcttagagaaaccatttacttccaagttaaatgtttagcagggattggatttgattttctatgcatctggtttttgttacgaactgtaattttattattaccacaaaaatagtagtagttgacatattttttaggcgaattgtaattatgtagtagtgcttcaaaatatggtaaataaatttcctttaggagtgttctaatttgttattattattattgaattattttgcaattttcataagctaatgagatcttggtttaatggct

SEQ ID NO: 11453 - DNA, 618 bp, Gossypium hirsutum
  unsure (1)..(618): unsure at all n locations
  Clone ID: LIB3583-046-P1-K1-E8
ccccgcgtccgattgaagcattgcagcagtcaattttagagaaagatcagatgttggaagacttgcaaggactactacaacttgcagatgaaaaaggcaagcttcactggcagaggcagctgctaaacatcagaagaatatagagagcttggaagcacaacttgctgatgctttatccgatagatctaaggccactgaaacaatttcttccatgcaggtgctcttggcagagaaagagtctaaaattgctgagatggatgcagcttcaactggtgaagctgcacgattaagagctattgtagaatctattaaaggagagcttgcccatctgaaacatgagcacgaaaaggaaaaggaaagctgggaagctgcctctctggcatttaaaacaaaactggaagttgctgagagtaactgcattcgtgctgaaatagaagctgctaaaatgagaagtcagctggagctagaggcatctctgcaaacccagatgctaagtactagagaagctgagctagcagctgccaaagaagaggttagccgtcttgaaagggaattttcctnctataaaattcgtgcacatgcactncttcanaaaaggatgcagagctagcagcagct

SEQ ID NO: 11454 - DNA, 434 bp, Gossypium hirsutum
  Clone ID: LIB3145-018-Q1-K1-C3
atgaccttgaggccaggcttcgtgaagttaatgaaacacttgagcaagcatcatcccaacagtcaggtctgcagcaagagcttgagcgcacacatcaacaagcaaatgaagcattgaaagcaatggatgcagagaggcagcaattacgaagtgcaaacaataagtataaccactgttgaactacatgattctagcaatgaagttgaacaaaaaaaagtgcttatccctcataatgaatctcattgtgttaacactgattgatatagtggttaacatttgttttccttattatcaaacaaaccatgtgatattttcaggaaaaggaaaaggagagctgggaagctgcctctctggcatttaaaacaaaactggaagttgctgagagtaactgcattcgtgctgaaatagaagctgctaaaatgagaagtataaaa

SEQ ID NO: 11455 - DNA, 1216 bp, Gossypium hirsutum
  Clone ID: GOSHI-09MAY01-C35617_1
ttttatgaacaaggatttggcagtactgttggacaaagtagtcgggaaggaattagccggagttggaccagctgttattcgtaccattactccagcaatagagaaaaccgtaacttcagtgatcaatgagtccttccagagaggggttggagataaagcagtgaatcaactagaaacccccgcgtccgcgaaactcgaagctatagttgccaggcaaattcaagcccagtttcaaacttctggcaagcaagcactccaggaggctttgaggactagtgtggaagctctagtggtccctgcttttgagatttcatgcaaagccctgtttgagcaagtagattctgcgtttcagaaagggatggttgagcataccaatgctgctcagcagcagttagagtctgcaagttcttctttggcaattactttaagggatgccataaactccgcttcatcaatcgctaaagccttaagtggggaatttgctgaagggcaacggaaacttttagcaattgcagctgctggagctaactcaaatgctgcaacttcattttcttcccaacttagcaatggacctttaggtggtctgcatgacaaggttgttgtgcccatggatcccacaaaagagctatcaaagttgttatctgaaggcaaatacgaagaagcgttcacaattgcgctgcaaagaagtgacctctctattgtttcttggttatgttcacaggttgatctacgtacgattctgtcaactgcaccttttcctttgagccaaggagtgctgctctccctcttgcagcagttggcatgcgacatcaacaaggacactccacgaaaactcacatggatggtggacgtggccacagctatcaacccaggtgaccacccgcgcgcccggcatgtgcgaccaatctttcaggaggtctacaagagagtgcatgaaataagtagctcgccattgcttacaggtgcagaccatgcgagtatccgtgctctcatttatgtcatcaactatgttttaatgacttgtaaatgaagaaaacacatgaggattttgggagtcacagttaagtttgtacaagtttctggttgttttcatgtaaggaccctctcctctgctttgctttgcattatcaggacagttggggagagggggtcctggttttgttatccatagatattttgaaactgtacgaattaatgaagtttttcccggaaaaaa

SEQ ID NO: 11456 - DNA, 747 bp, Gossypium hirsutum
  Clone ID: GOSHI-09MAY01-C35127_1
gcaaattgtgcggagatctggtaggcgtaagaagcacatttcaggaaggtgaatttaagtgatgaggaggaccttggtagccttccaaaaaagactaaaacaagtggaccaccctgtgccaatgaagaaactaaaggaatgcctaatgaagacgagtctaaacagaaaaatcgagctggtgaagtgaaatatcagaatgcaagggaccgtagagaaggtaagggttttaagtcaagctttttaaaggaaatgagtgacggagatgatcttaggaaacctgggaaagcttatgctgatggccttaaggaaaatttaaaccccattgttgatgattctgtgtcagatttgagccaaaaagaaacaaaggagcccctggtttttgcatgcgccaatccagagttttatgactttgacaatgataagaaagaaagctgtttttcagtaggtcagatttgggctttgtatgatacgttggatgccatgcctagattctatgctcggatcagaaaaatcttctcttctgggttcaagctaaaaataacctggctagaaccagatccagatgatgcaaatgaaatagaatgggtcggagaaggtttaccggtttcttgtggtaagttcaaacatggggcctctgaaaacactgaagatcgtcttatgttttcccatttgctatattgggaaaaaggaacttgtagagatacctacaagatatttccaagaaagggagaaacttgggcccctttt

SEQ ID NO: 11457 - DNA, 1123 bp, Gossypium hirsutum
  Clone ID: GOSHI-09MAY01-C35007_1
atcttcataaaatctttagattctgctatatgtatccaaggccaaatcctatcatcagtctgaacatctttgccttaacctctccatctcttgttgaacctgctctgaaatgtcgttctccaagtaataacccacatcttccttcaacgattcctttgctataagatgcgcaagaacattttctatttttggggtaaaatgaaagcctatttcttgaaaaaatggcttcgcatcttgaatatctcttacaatccctcctataatcgatttgtccctttccgtgctctgacattttttaataacggtccttgaatctccaaatataccacatgcatggaggctcaatgaaatccctaatcttactacttctaatccggcatatgcctccgccgcaaacggtgaggcaacatttgagtgaatgaccaactttaacgccaaaatttcccctcgcctatctctaaccaccagccctgtggcagatttggaagaatactggtcaaaagccgtattgaagtgaatgcttacgtttgtccttcggtcatcgtgattatgaagtctgcctgattcacagatacatagttttccctctaacccatgcacttctgagttatagcttattatttgtcttgaaatgtctctgttgtttgagattttattttcataaataaatttgtttctgtttgaccagagaagctagagccaacagcagaaaaggcgacatactcatttgtcccctgagtaaagacccatgacactgtcgaaaaacatgggtgctatcttcctctggttggttgcatctaggtcacccagcttcagtaatcactctcttcagtttgagattagcaaaagtagggatattgttccaagagatcttccatactgtaattttaatttttgaggggatatgtaaattccataattttctgtagaaatttttgttttcagcatgtataatttcgtcattaggaattcgagtagacttatgtaataggttgtaggcactttgagcagaaaagatgcctgatggttctcctccccatgcttggaaaccgtcatgtatcgatcttgccaaagggatctgtataatatttttcgcaatatcagcactaaaggttttaactag

SEQ ID NO: 11458 - DNA, 354 bp, Gossypium hirsutum
  Clone ID: LIB3145-044-Q1-K1-B12
gaagaatactggtcaaaagccgtattgaagtgaatgcttacgtttgtccttcggtcatcgtgattatgaagtctgcctgattcacagatacataagaagctagagccaacagcagaaaaggcgacatactcatttgtcccctgagtaaagacccatgacactgtcgaaaaacatggttgctatcttcctctgtttgtttgcatctaggtcacccagcttcagtaatcactctcttcagtttgagattagcaaaagtagggatattgttccaagagatcttccatactgtaattttaatttttgaggggatatgtaaattccataattttctgtagaaatttttggtttcagcat

SEQ ID NO: 11459 - DNA, 496 bp, Gossypium hirsutum
  Clone ID: uC-gsronu33B157c12b1
cggatttctaccgacgattaaagaaccctctcccgatctaattacactgcatttaaatcggatagagagaaagagaaaacaacatgaagagaaaagatacagtcaaactcatcagcgctgaggagatggaatttattattgacaaggacgctgccatggtttctcagaccatcggaggttttgcggagatggagcttggagaagtgacttttccggagataagcgctgtgattcttgagaagatctgtcagtatttttattgggctcttcaatattcaagttattaaagctgcatggtgaggctggaatgactttgcgtgaaggacaagtaggggcatattcttgtttttgaatcttttgcagtgactattgttcgaggacatcagcagcatcccggataacatctgaagatgttattttcttgtattattggctatgaactgcaagaaacgttctggtgtttgaaatttagaaacaggcagatacttgaattgaa

SEQ ID NO: 11460 - DNA, 417 bp, Gossypium hirsutum
  unsure (1)..(417): unsure at all n locations
  Clone ID: LIB3145-009-Q1-K1-E3
ggagacggagcttggagaagtgacttccggagataagcgctgtgattcttgagaagatctggcggtgtttttattgggctcttcaatattcaaggtaattgtcttttctcattaatatctatcttgcataattactccggggatagtattcatgcctaagaggagaatctgcgacgtgcattttacgtctgctgcattgcataatggtgtacttacagttatcttatgtgattgttttgacttagaaagcagacttatataggtaaatgaatgcagtaactacactatgtatgattgctgctatataataaaacaacagcagtacaatcgtgaaactcgactgtatatagactaattgtaatgtatgcaaaattggatttgtttcctttanaaaaaaaaaaaaaaaaaaannnnnaa

SEQ ID NO: 11461 - DNA, 421 bp, Gossypium hirsutum
  Clone ID: LIB3145-009-Q1-K1-D12
aaaagagataaaaagaaaaagaaaatgtcgggaatagtttaaaaactgaaggacatgatgggtcgacgtgtactaggacgacaagaaggacaagaaggacaaaaaggacaagaaagacaaagatcacaagaaaggtaaagatcataaagaagacaaagatgaagggatgatggataaaatcaaggacatgatcacgggtgataaagatgacgataagcataagaaagatgaccataagcacaaggaccgcaaagagcacaaggatgaagggatgatggataaaatcaaggacatgatcactggtgataaagatgacgataagcacaagaaagatgaccataagcacaaggaacgcaaagaacacaaggatgaagggatgctagataagatcaaagacaagatccacggggatgacgatcgt

SEQ ID NO: 11462 - DNA, 294 bp, Gossypium hirsutum
  Clone ID: LIB3148-041-Q1-K1-H12
ataagcacaaggacagttaagaccacaaggatgaagggatgatggataaaatcaaggacatgatcactggtgataaagatgacgatcgtggccgcgaccgtcgtcgcgataatagccgtggtcgcgatagcagtcgtgatcgtgagcaccatcgtgatcggaaccgtgatagtgatcgtgaaagcgaccgtgatagcgatggtggtagtgatgacgagaagaagaaaaagaagaagaaaggaaaaaagaagaaacacgatggcagcggtagtgatgatgaccctctccatgtat

SEQ ID NO: 11463 - DNA, 793 bp, Gossypium hirsutum
  Clone ID: GOSHI-09MAY01-C35357_1
cccacgcgtccgcggacgcgtgggtaaatttgtagagcagagacaatgagaggaacattgacgttgacttggattctgatggtctgcctctcccaagtagcggtgcagagccaatactactcggagagcttaccatatgatcccaggccggttaaggtcactaatctttacttctttttgcatgaaactctccgcggtaagaacccaacagtagtcatggtagcccaagctaacaacacaagcaacgacaactactcatcagtgccatttggcaccctatatgccattgatgatcccctcaagataggtcctggggacaactcagaggtgattgggaatgctctgggacttgggatcttgtccggcaaaaattcaacgaccgtggtgatgtacttagattttggatttactgccggaaagtttaagggcagctctattagcatattttcaaggaatccgttaataaagatggaacgtgagctttcggtggtgggaggaagaggagaattcaggatggcagaagggtatgcacgactcaagaattactttttcgatggcaccactgttattattgaatataacgtgaccgtaattcattactaagaggacattctcttggactgtgcaaaattcacatggttttgcagcacttgattagaataaatgtatgagaaatttagtaaatttcatcatacttttaaatgaatcaacttaaaataatattcccttgccttgccaaaataaaatatttatatttctatttaataaaatatttatatttctatttttgaat

SEQ ID NO: 11464 - DNA, 555 bp, Gossypium hirsutum
  Clone ID: LIB3828-023-Q6-K6-C2
ccaatactactcggagagcttaccatatgatcccaggccggttaaggtcactaatctttacttctttttgcatgaaactctccgcggtaagaacctttcttttttcatggtagcccaagctaacaggggggggggggacaactactcatcagtgccatttggcaccctatatgccattgatgatcccctcaagataggtcctggggacaactcagaggtgattgggaatgctctgggacttgggatcttgtccggcaaaaattcaacgaccgtggtgatgtacttagattttggatttactgccggaaagtttaagggcagctctattagcatattttcaaggaatccgttaataaagatggaacgtgagctttcggtggtgggaggaagaggagaattcaggatggcagaagggtatgcacgactcaagaattactttttcgatggcaccactgttattattgaatataacgtgaccgtaattcattactaagaggacattctcttggactgtgcaaaattcacatggttttgcagcacttgattaggataaat

SEQ ID NO: 11465 - DNA, 405 bp, Gossypium hirsutum
  unsure (1)..(405): unsure at all n locations
  Clone ID: LIB3493-003-P1-M1-E8
cggacgcgtgggcggacgcgtgggcggacgcgtgggcggacgcgtgggctgggacttgngatcttgtgcggcaaaaattcaacgaccgtggtgatgtacttagattttggatttactgccggaaagtttaagggcagctctattagcatattttcaaggaatccgttaataaagatggaacgtgagctttcggtggtgggaggaagaggagaattcatgatggcagaagggtatgcacgactcaagaattactttttcgatggcaccactgttattattgaatataacgtgagcgctattcattactaagaggacattctcttggactgtgcaaaattcacatggctttgcagcacttgattagaataaatgtttgagaaatttagtaaatttcatcatactttt

SEQ ID NO: 11466 - DNA, 757 bp, Gossypium hirsutum
  Clone ID: GOSHI-09MAY01-C35337_1
aatatatgtccctgttcctgtggtccctcagaatgaaagattctttttcaggcgagtctgccccaaaagttaccatctgtttcggtgtattgctaggtatggttacaaggatgtccgtaaggaaaatcaccaggcatttgagcagctgctgatcgagagtcttgagaagctcattcgtcgggaagctcagcaaaggcaattggaaagtgatggtgacgaagatgcagattccgaggaggatacatctttctcaagagttctcatagatcctaacggaggtgtttactcacttggtgttcctctgctggctgagtttaggggctccagcaattccatttcagaagcaagcatttctgaggagctaaaccccaactcccctgcaagtccatcgatatctgatgccgagcatagtctagaaagggagctatcttttatacgacaggctaaggaatctggggtagtttatcttctcggacacggagacattagggctagaaaagattcttggtttataaagaaactggttataaattacttctatgctttcttgagaaagaactgcaggaggggtattgcaaatttgagcgtgccgcattcacatcttattcaggtgggcatgacttacatggtttaagaaccgatgtgtactgaaatcacggaggagtggttaacaaaggccggcgctcaaataccatgctacaagagatgcaaattcaccattgtgttgagcaaaactgggcgcttgaatcagctaatt

SEQ ID NO: 11467 - DNA, 331 bp, Gossypium hirsutum
  Clone ID: LIB3145-013-Q1-K1-D1
gcgggattaccccgcttggtttaaacctattaataaaccgggaccttaaggcttaaaaaggatcttgggttattaaaaaaccgggtattaaatacctctattccttctttaaaaaaaacctccagaaggggattggcaaattgaaccggcccgattcaccttttatttaggtgggcatgacttacatggtttaagaaccgatgtgtactgaaatcaaggaggagtggttaagaaaggcccgcgctcaaatagcatgctacaagagatgcaaattcaccattgtgttgagcaaagctgggcgcttgaatcaacaaattttagaatcatgtat

SEQ ID NO: 11468 - DNA, 359 bp, Gossypium hirsutum
  Clone ID: GOSHI-09MAY01-C35297_1
cccacgcgtccgctctgcgttacttaaatctcttctttctttgctgatagatacaaagttctcaagttgactactgctccatcatcgaagagctgggtgaggagaagagagaagatagcataggcaatcaagatgaaacgaacaagggagaagagcctgcacagattgtactcaaagttgacatgcactgtgaagcttgtgccagaaaggttgctagagccctcaaaggatttcaaggagtggaggacgttgccacagatagcatggcaaataaagtagtggtgaagggtaagtctgttgaccccatcacggtttgtgaaaggctacgaaagaagagtggaagaattgtggaattaatt

SEQ ID NO: 11469 - DNA, 611 bp, Gossypium hirsutum
  Clone ID: GOSHI-09MAY01-C35237_2
aatccgggcgggacccacgcgtccctcctctcctctcctctcctctctctatcactagggtttttcgtctgctcatttgtaagcagatatcctagttttcacaaaaagagaaaaaaactcaaaagagttattgtttcttggcttcttgctacaatgggagatgcagaaaatgcccttccaccttcaaagaagagggctgctggaagagaaatttctcgggataaccctggactcgatgatgaggaagattcttctgaacaagagactggaacttttaagagggctagtgaagaagtgttggcaaatagaagaattgtcaaagttcggagaaatcaaaccacttcaactgcctcagcgaatcccttctctgggattcgcttggtcccccttactgaaccaactgctactcctgctgcacctagttcagcccctgaatctggcacaatcaccactcaggttacagctgatgcaccaatttctagtgagaaagaaatttcagaagatgggaaaaataatgttaacgaatctgaaaagagtgaggaaggaaatgacctggagccagagaaaaatagcgatgaaactgagcctgataatgcaaagagtgaaagtga

SEQ ID NO: 11470 - DNA, 1747 bp, Gossypium hirsutum
  Clone ID: GOSHI-09MAY01-C35237_1
ccccgcgtccgccccgcgtccgcccacgcgtccgcccacgcgtccggagaaatcaaaccacttcaactgcctcagcgaatcccttctctgggattcgcttggtcccccttactgaaccaactgctactcctgctgcacctagttcagcccctgaatctggcacaatcaccactcaggttacagctgatgcaccaatttctagtgagaaagaaatttcagaagatgggaaaaataatgttaacgaatctgaaaagagtgaggaaggaaatgccctcgcgcccgagaaaaatagcgatgaaactgagcctgataatgcaaagagtgaaagtgagaatattaagcagtctgaaagtaagaaggatgagccagtttctgatgctgttgctgataaggaaagtgctgagcataagagcagtgttgctgtaaatgaagaaactcaaaaggaggccaatgatgaaaaactggcgggagttgaggccaaggatgaagataagaaaggtgacgagactgcaaatgctgataacaaagataagagtagtgaaaatgccgattcaactgcagaaggtgcatcattgagttcattccaacagctttcaagtagccagaatgccttcacaggactcgctggcactggattttctacttcttcattctcctttggatctgcaacaaaggatggtcctacaggtgcttttggttttggtctttcaacaaatggaaattcatccctcttcaacacatcagggacttcaattgtttctaagagtgagggaagtggttttcctgccttgcaggaggttccagttgagacaggagaagagaacgagaaagttgtattctctgctgattctgtgctgtttgaattcatagatgggggttggaaagagcgtgggaagggagaacttaaggtgaatgtctcaacagctggggctgaaagagccaggttgctcatgagagctagaggaaattacaggttgattctgaacgcaagtctttacccagatatgaagctgacaaatatggacaagagaggtatcacttttgtctgcatgaatagtactggtgaagacaaagagggtctgtctacattggctttgaagttcaaggacgcttccatagtcgaagagttccgtgttgctgtaatggcacacaaaggtaacacagctactgttctgaagacacctgaacattccccttaagctgcagaagcttgaaaggtatctccgttagatctgatctatcctgaacttgccatttccagtagtcctctttcgttattgaggaagtatcgttgcttgggcatatgcttttataatgcctatgctcttgtatgtagcagagtccgagtcaaccgagaccagttcaatctgtttttgattgttataaatcgtgtatgttggagagtcggtcaatagagaccgatcaaatcttttatcggtttgttataaactatgtagcctgcgggagaatgtttcaacctctcttgtttttcatggttcccgtcatggaattaaacaacttcatgagctgccaagctatcaagatatgctatgtttactgtttactatatctgtgccattggtatgggattaatatgtggaatttcagtgtcatttatgtgggggttgggaggtttatagtatgataggattaagtatagatatgtagctatgatgatatttcaattttttcagctcattcggcactggtttcggtgtgtgacccagtgtatgaaaaaacagaactt

SEQ ID NO: 11471 - DNA, 331 bp, Gossypium hirsutum
  Clone ID: LIB3148-021-Q1-K1-H10
ccgagaccagttcaatctgtttttgattgttataaatcgtgtatgttggagagtcggtcaatagagaccgatcaaatcttttatcggtttgttataaactatgtagcctgcgggagaatgtttcaacctctcttgtttttcatggttcccgtcatggaattaaacaacttcatgagctgccaagctatcaagatatgctatttactgtttaaaaaaaaaaaacaagatctaaaccagaaaaaataaagcccttttataatgaaatgaaacagaaactcttaaaggccaacaacaaactcaaagggaaaaaaaatcagcaaacactattcct

SEQ ID NO: 11472 - DNA, 1049 bp, Gossypium hirsutum
  Clone ID: GOSHI-09MAY01-C35227_1
gctatagctcagttaaacataagatgtgtcctataagaggggaaaatgtacaaacacaggctcctgctcgaagtacgcctgataaatcacacaagcctgaagatggccttagtaaagacattgaaattaatttttttgagaacaaggataccaccacttcttttcaagatgaggcgtttaacacctttgttgctgaatttgatagtaataagatcagttctggaattattaataaaaatactggaaaagaaaaagcattggaggctgaaatagtgaggctgaaagaacagctaaaacaatccaacttggagaaggctgagatgacttccaaatttgaaaagttatctgcaatttgtcggtttcagcggcaggaaatacaggagctcaagcaaactctagctgctagaactccatctcctaataaaagtacttcaagatatcataactcaccaggaagtctgggagagaaggttgaaggaacattttcggaatttgcacaagaaaaagctggtaactggaaaactgctagcccagaagcaaagccatggcaggcttttccagaggatgccaaaccgcagcagcagcaacctctttcaaaggataatgtccagtcagttagaactagaaatggtcactcaaacatgcatgctgctcaagcaacttttggtatggaaacatggggttttggtgcagataactttacagctgcccctacggccagctcccagagattaaaatcaatgataaatgaaggaagtagttcccaacgcgaatcaaaaataaaggagagtaatccagtttcccagcctgctgggtgggctggtttctgatgtagtcactatgtggagttaaatatatgaggaatagtctgtcctcacattgacaaatttaatacttgtggttgggaaatatgagaggaaagaagagagattgaataattacgtgacttgccaggcttgtttcctgctattgtttgtcttgtctgtgtgcagttgaacatttgcactttctctgggctaagcagcaaatacaaaatgtatacttgtttt

SEQ ID NO: 11473 - DNA, 882 bp, Gossypium hirsutum
  Clone ID: GOSHI-09MAY01-C36997_1
aacggctacgccgagttcaccgaaccaaaggtcgtgagcgcaaatgcaaaattcgaagtggagtttgctaaagatgggctggtgcacataaggagttgtaccaacaacaagtacttgaagcgaactcataatccttatatcaccgaaaaaccaaatgaggagtattggattactgtaaccgccgataagccggaagaagaccaatccaaggagtcatgcacattgttcaagcctatcttggtccgccctcgcgtccgaaattttcgatttgtccatgctcaatctggatgctatttatgcttatggccattggctaaatcggaactcggtcgtggcgtgttggcaaacaacaaaaatgttgcggataatggcaatgatatcttcaaagttattgattgggagtcgttggtgattctgcctcggtacgttgctttcaaaggaaacaatgatatgttcctgcgtcttacccaggtcgagggtcacccatatttagaattctcgagtgcggatgtcggtgctggatctgtgccaatggaggttttttatatgaagaatggagacatccggttcaagccggtttcttccgataagttctggaggcgtagcccgaattggatttgggtggattctaatgacactaaaggcaccgataaggacactcggtttcgtgccttcaaagtcgacaacaagacaatagctctgctcaacttgggcaataataagttctgcaagcgcctcacgatcgagggaaagacaaattgccttaatgcagcagtcccttctattaccagagaggccttcttaatggttcaagagcctgtgttgtcaagccagatttataatctccgatacgatattgaatatgctcgagtctataacaag

SEQ ID NO: 11474 - DNA, 426 bp, Gossypium hirsutum
  unsure (1)..(426): unsure at all n locations
  Clone ID: LIB3828-018-Q1-K6-D1
ggagcgaactcataatccttccatcaccagaaaaccagntgaggagtattggattactatnaccgcggataagtcggaagaagaccgatccaaggagtcatgcacattgttcgagcctatcttgaatgactctgtatataaaaattttcgatttgtccatgttcaatctggatgctatttatgcttctggccattggctaaatcggaactcagtcgtggcgtgttggcaaacaacaaaaatgttgcggataatggcaatgatatcttcaaagttattgactgggagtcgttggtgattctgcctcggtacgttgctttcaaaggaaacaatgatatgttccttcgtcttacccaggtcgatggtcacccatatttaaaattctccagtgcggatgttgatgctggatctgtgccaatggaggttgt

SEQ ID NO: 11475 - DNA, 862 bp, Gossypium hirsutum
  Clone ID: GOSHI-09MAY01-C36957_1
cacagtgttcgccgatcgcttcgcctctctctccatctttgactctaatttctataatgtcggggaatgcattaagagatctcaatactttacctacacctgagaggaagaatgacagctccagtaaagggaatttttctaagccttgcaatgggaagacaattgataatgttgaagagcggctgaagaaaagcctgtcttctgttcaaataaatggacgtgaaactttaaatgtgcagcacaataagagctccgcttctgttcaaataaatggaggtgaaactgtaaatgttggagtggaggtagctaattcggaagtagaatacattgaatctgagaacttgagtgatctagaagatgttgatacatgtcttaagaagctcttacctggacttgactctaaagattggattctggttgttgaaacactcaataatgtccgtcgattatcagtattccataacgaaagaatgcatagtatgctgggtgattcgatccctcttgtagttaagtccttgaagaaccctaggagtgctgtttgtaaaactgcaattgtgacatctgctaatattttcagtgcgtataatgatgatttgattgattccctggatcccctgcttgtacagcttcttcttaaggcttcacaagacaaaagattcgtatgtgaggcagctgagagggccttagaggctatgactacttcagtttcccctatgttgttgttgcccaagttgcaaccctatctgaagaacagaaacccacgaattcgagcaagggcatcaatgtgctttagtcatagtgttccacgtctgggtgttgagggaattaaagaatatggaattgacaaattgatacaagtagc

SEQ ID NO: 11476 - DNA, 639 bp, Gossypium hirsutum
  Clone ID: GOSHI-09MAY01-C36807_1
tggagaacggtttcttcttcactgctgcggaattttctttctccttttccacctcagaaacaaaatatccgcagtagcgtttaagaagttttctctttaagcttatattattaaaaaaaaaacaaaagaaaaagagagaagaaaaatggctcgctctttctcgaacgtgaaggttttctctacattcgttgtcgatggaatatctaacgcaatctcaagacggggatacgctgcaacatcacaaggagtagcgtcaaacggagtaaaggaagcagcaagaaacgctgcggtgttgaagaaaacaggggaagacatggcaacagcaactaaagacaaggttaactgggttccggaccctgttaccggattctatagacccgaaaacactgtgaatgagatctgccccgcagaactcagagccacgctcttgaagaagaactaaatatacatgcatgcatatgatgtgagatgagattggtttcaaatgttatgtggtgcaagcacagggaagattttggtttttggtttttttgttcaagggctgaaatcgcttctttctttgtccttggtaaacgaaatgctaataaattgtaggaaggccctttttatttatataaattaagagttttcttttctttt

SEQ ID NO: 11477 - DNA, 607 bp, Gossypium hirsutum
  Clone ID: GOSHI-09MAY01-C36837_1
caacatatggaaggagcaactctgattttaacgaccacgaaaaccaagaaaatcagcttccccctatgaataatgtcgataaatcagagttgagcaagagtttcagtaaaggacatagggttgcctgagaagcctaaagttgaaacaggtttcaaagaaaacatggttcctttgaaggaagaagttcataactggactgcaactgcggagtgtaatccacttttggggagtgaaaacaatgaacccaagccaccaatcaccatagaaggtgatcaccctttcaacaacaatgggaatcaagcttcttcaccgatgcttcgatgttgagaggtacactatgcagattctgttcttattatacactctttgagtgctatcttttaagcagctatatggtgttttgagcatcttatgcgcaagtaaaaaacttaattacttgttcttgagattatatatatatatatatatataaactgaaagttgtttgtttattagttcatcaaatctacttgacaagaatgtctgtggtatgtagagattaaatggtggcttgtagcatatgatatatatatatgatttatatatctacattagcatcttttgtttc

SEQ ID NO: 11478 - DNA, 660 bp, Gossypium hirsutum
  Clone ID: GOSHI-09MAY01-C36587_1
cccacgcgtccgcttttcaatcttttctttcgtttcaaatcttggaaatcaaaattcctatggcaccaaaggccgagaagaagcctgctgagaaaaaaccagcggaagacaaaaaagccgagaaggcaccaaccgagaaaaagcccagagccgagaagaagctccccaaggaagccggcgacaagaagaagaagcgaccaaagaagagcgtcgaaacctacaagatctacatctttaaggttctgaagcaagtgcaccctgatatcgggatttcgagcaaggccatggggattatgaacagtttcattaatgacattttcgagaagcttgctcaggaagcttcgaggctcgctcgttacaacaagaagcccacaattacatctcgggagattcaaacagctgtgaggctggttctgcccggggagttggctaagcatgctgtttctgaagggactaaggctgtcactaagtttactagttcttaggttttggaaattatgatttggttgtaaagattagtagcttttaaggatgattaatcggtgggtcttttggtatttcttgagctcaaattgaagtcttattatccttttttattattttctattttttaatttcgtttaatattttttatattttattatatttttatattttttt

SEQ ID NO: 11479 - DNA, 341 bp, Gossypium hirsutum
  Clone ID: GOSHI-09MAY01-C36517_1
cttccacaggatctgtttgaagctttggggttttgctttcgagtctttaaagaaggggggaaagggtcttgaagtaatgaagtcaacctcaatgaatgcaagagtttcttgatcgcagagtccctgctaatgcctacccagttgatggggtcttctcgttctgctgttctcattgatcgaggtacgagcctactgagtcggatttatacgccaactacagctgaagagcctcaaccgaatattgctgaactcgagaaacctgttacagcggccgtggtccctgttattattttctttcatggtggaagctttgcacattcctcagcttatagtgctatata

SEQ ID NO: 11480 - DNA, 887 bp, Gossypium hirsutum
  Clone ID: GOSHI-09MAY01-C36527_1
cagccatgcaacaggagattcagctcctcctattatcacccttcaaaccctaacacctccaacccatcccaatttcatcaatcaccttacgcatcagcaccgcctttttccccttccgattaccaaaatcctgatccctcttatgctcctccgccgccaactaccctgaattcgcaaccgtctttcaatcagcatccgatcgcgccaaagtcggctcccgctgccccttctttcccgccttatgattcacctgtctcccagccaccttattaccagccttatgatcagtatcctagctatgtacctcctccaccagactccaaccccaaccctattccgccatactattcaaccccatataatcaaataggatcatcacaatcctctgtccctcctgcttatgacaacccctacgataattccatgaaattggatcaaagcagtagcagttatttcgacgataaattcggagcacgatataaccagagcagatacgatatgggatccgatctctatggtaagcgatatgatagctattcacacttcggtgatgatggtggatacggtgatggggtttatgcttatgaaggaggaaaggtggagccttatggggcaagtggcacatccccaaaatatcgacttgggtcaattcgacgattatgggcgggccatcaatttcccttctgggaaggactcgtcaggttcatcttctgggtagattgtgaaggcggggcctaaagcggagaccctggaagccgtaagagtcgggtcagaagttcgggttaagttgtgaatgaagtggagagaaggcccgtgatggaattgccgatggctagatggattcgatgctgcactgcccagcgacttggaatttccatggaactcca

SEQ ID NO: 11481 - DNA, 424 bp, Gossypium hirsutum
  Clone ID: GOSHI-09MAY01-C36457_1
cccttttattctctttttaacgtcttttttacttctctctgttaatttccccaaaacagtagttgtgatttaaagaaggttttaattaccattaatgttaccgttgcattattcgtaatctgaacttgcttttatgttatttggacatcatgctttcgatttttttgtttagttgtaaagaattttttatccggtacagatttttaacctgaataacttcttcagtagttgctttttttttgtctggataatagttagatagaattatactttgttcctttctttgttgcccgcaataggacgacattttttgggaattaattaactatcccgatttttttttattgtttttaatttttgaggtctgggttttattctgcggtatttttttttgtttcgcagtcacagctcttacattatattt

SEQ ID NO: 11482 - DNA, 1107 bp, Gossypium hirsutum
  Clone ID: GOSHI-09MAY01-C36447_1
tcgcccacctccggagcctgtgttctgtgccaagacaaaactatgctaacgcttctgacaaaattgtccaacggcctccagaagtgcttgttgagcacaatttaaatgatctactattgttttctcctgaactgttggtcttaaagcagacagaccattattgtcttcaagcacactggctccaagaaatcagggtttggcttctgaatgcttttcgggaaatgcatgcataattgtcagctctcctactccgcagataaagaacagtgaaagccagtcaatttcatcagcaaccttggagaatttggctgataatgctgggaatggtgctgctattgaaaattacaatatctctcctactccgcagataaagaacagtgaaagccagtcaatttcatcagcaaccttggagaacttggctgataatgctgggaatggtgctgctattgaaaattgtaatatgttcagtgaaactccattaaaaagaagtatcccaccccccccagcatggaagtctccttggtttatcaactcttttgttccaggcccaaggattgatacagaaataacaattgaggacattggatacctgatgagccctccagatagaagctacgatgccatcgggttgatgaaacaattaagtgagcatactgcagctacttatgctgatgctttggaagttttgggaaatgaaactccagaatcaattgtgaagggaagacgctccaacaattccaaaatggacaaagagaataatcaaatggagactcaatcacatttggcttcagatatcttggtggagcgtcgcatccttgactttagcgaatgtggaacgcctggaaagggtaccgaaaatagaaagtcctcaactgccgtgagtttctcaagccctacctcttcctacctcttgaaaggctgcaggtaatggtttatcaagggtactgaaaaggcttgcatgtttgtagtttacatcgaatatacgccccccatctttttttccccttttttcttttcaaaatccatcaatttcttgtcgaacgagaatggatctaattaagttaattgatgataaaaaaagaattgtgcaagcgcatcagattctcc

SEQ ID NO: 11483 - DNA, 618 bp, Gossypium hirsutum
  Clone ID: GOSHI-09MAY01-C36477_1
aaaaaaaaaacaaaaacaaaaaatctgaaaaaaaatcctaacagcgacaacataaactagtgtttctgtttttctcaaaaagaacattggttttttttcctaacctgttgttcctgtttctaagatctcattaaagttatggtttttgtatagtttgtctttttcttaagagctaaaagattttggacggctaagatggaccgggaaggaggatcccacggcggatcttgttactacactattctcgggattcgcaaggacgcctccttctccgatatccgtactgcttaccgtaagcttgctctgaaatggcacccggacagatacgtcacaaatccggcggtagccggcgaagcgaaactcaggtttcagcaaatccaagaagcttattccgttctctcaaacgggtccaagagatcaatgtatgacgccagtctctacgatccctcggcagatgatgaccaagaattctgtgactttatgcagagatgatatcgatgatgaacaatgtgaaagacgaaggggatagtttcgaagatctgcaagatgttcgccgatatggtcggcagtggagattgtatgagcttcaacgtcacactgatcccacggagaacaaaa

SEQ ID NO: 11484 - DNA, 762 bp, Gossypium hirsutum
  Clone ID: GOSHI-09MAY01-C36407_1
tttgtagtgcacaggggttagagtggtcataccctgaaacaggggagactttaactaataaactgtactaattggcccaaccaaaaattctagaaaaaaataagtagacatatgagtttagtttcaagataaatagacgagaacattatttgagtcttgtactatgagataattgaactttagtatagaagggtcggaactgtcagacagtgaatcaggggtatctttgaggaataaactgtactatttggcttaaccaaaaattctggaaattttatggaagaaaggaaaacaagtctagtttcagggaaaattaacggaacttaattcggagtttcgtagctccagatataaataatttagtgaccgttgctcagaaagacagcttgtagtgaacttgagaatatgttgtaaacattgataaaacaagttaatgagttgcttattgttttcatatgaacttactaagcgaaagcttaccccccctcttctttcccatgttttctagagtttccaggttagctcgggttggaggccgtcagagatattatcacactgtcaagctaacgctattggtgtagtgatttcaagtactttgagcctatggcatgtataggagtttaaatattagagtatgtgatatggctttaaccatatgtgttggcctattttgattatggggttgtaaatctattttaattatgcatgcatgtgctatggtattatgtgatgagtttataatgattatagtatgaatgtggt

SEQ ID NO: 11485 - DNA, 1047 bp, Gossypium hirsutum
  Clone ID: GOSHI-09MAY01-C36747_1
ctagaagaggctgatcttcactccatttcgaacactttagacaggctagttggggaaaatcgacgccaatggccatcagagacaccgtgaaaagggcggagcagctggtggagacgtcgatgaaagggaacgacgcctcccatgatgcctcgcacgtgtggagggtcagagaccttgccctctccctcgcacgagaggaaggcctctcctccaaccctgactccatggaaatcgtggagctagctgcacttcttcatgatgtaggtgattacaaatacttgagggatccgtccgaggagaagctagttgagaattttctagaggaagaaggcatagctgagagcaaaaagataaaaatattaagcatcataaagggaatgggttttaaagatgaacttgctggtgtgggaaaccaggaatttccccctgaatttggggttgtgcaagatgctgatcgtctcgatgcaattggtgccataggaatcgctcgctgctttacatttggtggaaacagaaacagagtgcttcacgatcctgctatccagtcacgattggacttatccaaggaacattacatgaagaaagaggagcagactactgtgaaccatttccatgagaagcttcttaagttaaaggatttgatgaaaactaaggctggactaaggagggccgagaaaaggcataaggtcatggaggaattccttaaacagttttaccccgagtgggatggggaaggcctgaaatgaggtgattttccttcccctagatatatactaagcaatccccgttcaaactctggttctgattatgaaacaatgttttgttgggaataatttcaattttcaaatggagatactgttgaggacatgttgttggctaagttacttctgcgtactatttccgtattttctacgatctatacctggactaagatttgtgttactatgtctattatgacaagtctcatgtttctatagaatatgtatcataactctgcactgtgctttgttacgattaagatttaagttggtttacagcacccccctt

SEQ ID NO: 11486 - DNA, 607 bp, Gossypium hirsutum
  Clone ID: GOSHI-09MAY01-C36707_1
cattcttccaatgcgaagaacctgacttttctctcatggaaatctattgcggccttgcaaaggaatattactttttggtcctcctggaaccgggaaaacccttcttgctaaggcactggcaacagaagcgggagccaactttatcagcataactggttctgctcttacatcgaagtggtttggagacgctgaaaagctcaccaaggcccttttctcttttgctagcaagctggcgccagtcattatttttgttgacgaggttgatagtttgctgggtgctcgtggtggtggttttgagcatgaggcaactaggagaatgagaaacgagttcatggcagcttgggatggattaaggtcaaaagatagccaaagaatcctcatccttggtgccacaaataggccctttgatcttgatgatgctgttattcgtcgcttaccaagaaggatatatgttgacttaccagatgctggaaaccgcatgaagatactgaaaatatttcttgcacaagagaatataggctgtaatttttcatttgaagaacttgcaaatgcaactgaggggtattctggcagtgatttgaagaacctctgtatagctgcagcgtac

SEQ ID NO: 11487 - DNA, 1202 bp, Gossypium hirsutum
  Clone ID: GOSHI-09MAY01-C36197_1
cggacgcgtgggttgtgatcccaaggtcgttggtaccaagcagatgctggattagctcctggggatatgttgctcattactggcaaggcgcttagccatgccaccgctggtcttcgtcctgctgccacctatagagctgctcccgagtacctatcaggcattaataatggtggcaggacatcacttgcattcaggctcatgccgcaaggcaatgctatattagattgctctccagttgcagctgctggtcatgtcattccacaaagctatgtaccaatatctgttagccagtttatggatgaactttctgctgaagaagatgtagtgtgcaatcgttctgataatacttgtgtagctcgaaacaatttgaataagcagccttcattgagaagcgttctatcagaccccttgtctggtgcattccttgaagatgctgtggttgtttcttgtggacattcatttggtggtctcatgttgaggagagtcctggatatgtcaagatgtacactctgcagtgcagacatcgactctggatcattgatccctaataaagctctaagagctgctgctttagctgtgaagcaagaggataatcggaggctattccataatgccgctcttcgtaaacgacggacaagaaatgggtgaccaaattgatttatcaaagagatcaagcagggagaatggagaggatggtgctgaggatgggttgcataggggcgtgcaatatccattttcagtgaatgagaaggtgttgattaagggaaacaggaggacaccagaaaagtctgttggaaaggaagccgttattacatcccaatgcctcaatggctgggaatttgcttaagataattggaagtggtgagaatgttcgtctacaatatcgatctctttgtaagatcatgaacccgcaatccaccattgaagaagatagatgtccttcacaaccgattcagaacagtagctcatagttatagctgtaattaccttttactcacggcataaagaaaacctcaaatacctagaggaatagtgaacttgtccggctgtcatagatatgtaatttccttctcctttgtttctttggttatactgttgttgtatttgaatgttgtttttatccaggaaaagtaagttatttgactcccaatatcatgtaagaaactctgcttagaaaaaaggagctatggaatatgtataat

SEQ ID NO: 11488 - DNA, 909 bp, Gossypium hirsutum
  Clone ID: GOSHI-09MAY01-C36067_1
cacacctctctcaaagccccctcctccccctctcctttccctctctctcattggtggcaagggggcgaactcagcatcgggcatggcagtaaacgatgaatgtaaaaccaagttcttggagctaaaagcgaagcgaaactacaggttcatcgtcttcaaaatagaggaaaacctccaacagattgtagtggagaaagtaggtgcacccaaagacagctatgagaaattatgttccagtttgccgtccgatgagtgtcgttacgctgtctacgatttcgatttcaccaccgatgagaattgccaaaagagcaagattttcttcatcgcatggtcaccagacacatcgagggtgaggagcaaaatgttgtacgcaagttccaaagataggttcagaagagaactggatggtgttcaagttgaattgcaagccaccgatcccagtgaaatgagctttgatatcgtcaaagaaagagccttctaaaataatgcttatattgccaaaaaatggggggcattaaatatttttctttttaaattttcctataatcataaatattattggaaatttaggaactgatcatattatgtgttatggtgtcaaagatggactcggcatcatcggcttggattcatggggttgttgaaaggttaagaaaaaactatgaatccaagccaccgatcccagtgaaatgagctttgatatcgtcaaagaaagagccttctaaaataatgcttatattgccaaaaaatggggggcattaaatatttttctttttaaattttcctataatcataaatattattggaaatttaggaactgatcatattatgtgttatggtgtcaaagatggactcggcatcatcggcttggattcatggggttgttgaaaggttaagaaaaaactatga

SEQ ID NO: 11489 - DNA, 560 bp, Gossypium hirsutum
  Clone ID: LIB3828-027-Q6-N6-A11
cacttaaaaacacatatataaagataattacacaaaattaaaataaaagaaaatgattgatcccccgttcatagttttttcttaacctttcaacaaccccatgaatccaagccgatgatgccgagtccatctttgacaccataacacataatatgatcagttcctaaatttccaataatatttatgattataggaaaatttaaaaagaaaaatatttaatgccccccattttttggcaatataagcattattttagaaggctctttctttgacgatatcaaagctcatttcactgggatcggtggcttgcaattcaacttgaacaccatccagttctcttctgaacctatctttggaacttgcgtacaacattttgctcctcaccctcgatgtgtctggtgaccatgcgatgaagaaaatcttgctcttttggcaattctcatcggtggtgaaatcgaaatcgtagacagcgtaacgacactcatcggacggcaaactggaacataatttctcatagctgtctttgggtgcacctactttctccactacaatctgttgga

SEQ ID NO: 11490 - DNA, 446 bp, Gossypium hirsutum
  Clone ID: GOSHI-09MAY01-C36357_1
ggccacgcgtacgctctgaagcttttattttcttcctataaacagttctaaagcacttgttcttctttttcttttcgttggagatctcggcggagatggggaaacgacgctgtgttgtggcggcattagcagcgataatgttgatgatggagttagcggcgttgacagtagcagaacacagaagaagtatgttgagtaatggtcttggaatgactcctcccatgggttggaacagctggaatcactttggatgcaatattgatgaaaaaatgatcaaagaaactgctgatgctctagtttcaaccgggctctccaagcttggatatgaatatgttaatatagatgattgctgggctgaaatttcccgtgatgacaagggtaatctagtgcctaagaagtcaacatttccatctggaataaaggctcttgcagattatgttaacaag

SEQ ID NO: 11491 - DNA, 495 bp, Gossypium hirsutum
  Clone ID: GOSHI-09MAY01-C36307_1
ccaatatatcatctaaacactttcgacattctctggcgttttctcaaaaaaaaaaaattctgacaaaattttttctttaattttcagctttcttccttttacattcttcgtaattccaatctatcatcacataaacaaagaaaaaaaaattctgggtttcttatcgaatctccaaatctttctctttcattgaagaaaaaaattgaaaaacatgtgtcctatgaggttcttgttggtgtttttctcggcgattttagctgggtatttcgcttggagaacggcggtgggttcatcggttgatgccgatgatggggtttctgaagtttcaaggacaattgttgccaaaaatgaacaagatttcagtttcaaaatgatggttaagaatggattctgggtattggttgatatggctagtggaaggtatttggggaggaatttaaggcattgaagaataatgagaaattaaagagctcttaacagtttttgattggattg

SEQ ID NO: 11492 - DNA, 468 bp, Gossypium hirsutum
  Clone ID: GOSHI-09MAY01-C36277_1
cccacgctttcgcccacgcgtccgctctctccccatcttgaatccaaacaaattaaaagtaaaacacctctttcattctcatatctttaattgtttgaccagatggctcttctaattaacgaagtcgactcccttactaaccagatcttctccatccttgaaaacaaatttcttttcggtgatcacgagaataatgctgctgcaaaaacccatgaagaagatcacttgaaatctggaaatcagatttccgggaaagtaagaatcctatccattgacagtgggagcttttccgatggtatattggccgcccaatccctccttaccctccagacttttctccgtcaaaagtcggggaatcccaatgctgtcattgcccagtatttcgacgttgttgcaggctctggtgctggtgcgattctcgccgcattgttgtttactcgcgctgaaaacggcgctcccatttttact

SEQ ID NO: 11493 - DNA, 698 bp, Gossypium hirsutum
  Clone ID: GOSHI-09MAY01-C36227_1
gggtagctcagtgtccggagttggagtcccctcaggtaactttgaagtaaatatcgagagggttgggtccaagaagaagaacctgcaatcaactgcgaaaaacagtggcagtcttgacacagtggttgaagtgttccatgaagctgatactgattaccagttatcaaggccgaaaaggaaaaacttagaacctgatcatgatttcttggtggaaactcaacttacaatggaaactcctgcggatgatcctcctgacatgatgactgagaacatcaagaagcatatgaaaacacattttgaaactccaggagctcctcaagtagaatctttacagaacttagcggccggattgaacaagaaaggagcagctcagctcttctatcggacatgtgtccttgcttctcaaggtttcttgaaagtgcaacaaaaggtggcgtttggagacattttcatctctaaaggagcaaagatgtgacggatgtaagcaactggtagttttaaggaaaggttattagtgatgttgtagtgtcgtggggcattaactttatttttgtacaacctcctgtttgatgctataacttgcaggtttaattctagatagaatctgttaggaaaatcattttgtttgcaaagattgctttagtttgctcttggactattatcaatatataaatatataaaaaatatatttgctgttg

SEQ ID NO: 11494 - DNA, 388 bp, Gossypium hirsutum
  Clone ID: GOSHI-09MAY01-C37907_1
gcgcttttattcactccgtaagagccttggaattgctgaagaatggatatatgtaattaagagagatcgagatggaaaaatttcttggcatgcctttgatcctgtataccagctctggcagccacttcctcctgtccctaaggagtattctgaagcctttggctttggatgtgctgtactcagtggttgccacctttatctattcggtggtaaggatccattaaaaggatcaatgcgacgagttatattttatagtgctaggacaaacaaatggcaccgtgccccagatatgcttcgtcgaagacatttctttggttcgtgtgttataaacaattgcttgtatgttgctggtggagagaatgaaggggtacatcgatcattgaggtct

SEQ ID NO: 11495 - DNA, 495 bp, Gossypium hirsutum
  Clone ID: GOSHI-09MAY01-C37937_1
ctcaaagttgctggaatcaagcaactacattacgagacgacaagctatcaagttgttgggagatattttgttggaccgctcaaatgcagctgtcatgaccagatatgtgagctcaaaggataacttaaggattcttatgaatcttctaagggaatcaagcaagagcattcaaatagaagcttttcatgttttcaagttgtttgctgcaaagcagaataagcctccagacattgttagcatactcgttgccaataaaagcaagcttctacgattgtttgcggatttcaagactaataaagaggatgaacagtttgaggcggacaaggctcaggttgtgagagaaatcgctgcccttgagcttagagacggcccatagtgaactctagtgtactgtaatctctttttgtttttgtttttttcttctttttttaaaaaataactaacacaagttgactgcaccatatagtgatctcgtggtcctttcagaaggacgtg

SEQ ID NO: 11496 - DNA, 400 bp, Gossypium hirsutum
  Clone ID: GOSHI-09MAY01-C37897_1
ggtcgagcacgcgccacgcagaattctaaaaattgctaaagaattattagaaaaaaagacagaattgaacaaccgggcaggcgttgtttgtgcattgcatacggctttacaatggaattctcttttttctttcatcgaaaaaagaaaaagagaaaatgtagagagcgtctattagacccagatcactaaataatccaattaccacccttcttttttttttcggaaaagttcaaaaatactatgatggctccggtgctttatatatttatttcgtctgtgattcagcattcccaaagtttctttttttttcaaaaaaaagaacgaaaaaaaatagtcgcggtttttccgacccttttattttataacataaatattgttataaatattgttaatagcctct

SEQ ID NO: 11497 - DNA, 486 bp, Gossypium hirsutum
  unsure (1)..(486): unsure at all n locations
  Clone ID: LIB3585-010-P1-K1-C8
cggacgcgtggggttctatgaagaaacgcaaagcactactaatagagcatgataaaagttccaatgttaatgcatcagatgcccaaagatcagtgccaagagaccttcctttcacagtaagtttagtgaagcacagcaatctttatgcgactacaaatatgttgaatgctaatgttcatttactgcacaaggatgatggagatgcagaggtggatgctaagtttctaaatcataaaaagaacgatgttcgtggaagtgctgaacaacttggtgcagaggaaacaagaggctccgcttttctgattcaggtaaaatgcatctttttcttccaaaatttcttataaatgccagcaattgaaaattntaattgctttgatatttgctttgattctatgtgaatattggaatgaagtttgggttttaagttgagaaacttatctttggaacctctagagaaataaagtgaaaagacttgtttgacatgca

SEQ ID NO: 11498 - DNA, 348 bp, Gossypium hirsutum
  Clone ID: LIB3145-047-Q1-K1-D1
aaaattgaagcgatcaaatggtccaatgagcaaagagaaaaagttgttaattactgggaggggaaaaatgcaatatcaaaatcatgatgttattggtttgactggtcatcttccatcagataaacaacaaagtaaagagcaacaactatgttctatgaagaaacgcaaagcactacttatagagcatgataaaagttccaacgttaatgcatcagatccccaaagatcagtgccaagagaccttcctttcacagatgatggaagtgcagaggtggatgccaagtttctcaatcataaaaagaactatgtttgtggaagtgctgaacaacttggtgcagaggaaacaaa

SEQ ID NO: 11499 - DNA, 704 bp, Gossypium hirsutum
  Clone ID: GOSHI-09MAY01-C37867_1
aattgatccaaaagatttttccaattcctttttggtagaattttttatttctcgattcgatttcgtctgtgtttcttggtatggtttattgagactgcagtccttggatggtacattgagaaatcataagcagagcatgagcactcttgagattagggggccttctcttaggggatatcgaaggagaaaggcagtgcttgatctgaatgttccacccagtgaaatcagggagcaggagggtacatctcaacaggctgggtatgaggatcaaacgaatcaatccgtacagactggtccacctgcaaccattgatgttgaggctattgatgatgatgtaattgaatcttctgctagagcttttgcagaggctcagaacaattctaggaggagccgtggaaggactgtggttgatgttgattcaggctggtcagcgaggtcaagtaataacaatcagaataggcacagaagacttcctccgagctcaagcattatcaatttggaaatctcgccacagtcaattcaggttcaggaatcacaaagccacagccacctccaaaggaacccaccttcaattgtcccatttgcatgggtcctttaacagaagagatgtcacaagatgtgggcatatttctgcaaggcatgcattaaagctgcaatagctacacaggcaaaatgcccaacttgcaggaaaagagtcactgtgt

SEQ ID NO: 11500 - DNA, 707 bp, Gossypium hirsutum
  Clone ID: AW561915.1
gatttttccaattcctttttggtagaattttttatttctcgattcgatttcgtctgtgcttcttggtttattgagactgcagtccttggatggtacattgagaaatcataagcagagcatgagcactcttgagataagggggccttctcttaggggatatcgaaggagaaaggcagtgcttgatctgaatgctccacccagtgaaatcagggagcaggagggtacatctcaacaggctgggtatgaggatcaaacgaatcaatctgtacagtctggtccacctgcaaccattgatgttgaggctattgatgatgatgtaattgaatcttctgctagagcttttgcagaggctcagaacaattctaggaggagccgtggaaggactgtggttgatgttgattcagctcacatttctgcccttccaggctggtcagcgaggtcaagtaataacaatcagaatatgcacagaagacttcctccgagctcaagcattattaatttggaaatctcgccacagtcaattcaggttgaggaaatcacaaagccacagccacctccaaaggaaccaaccttcaattgtccaatttgcatgggtccattaacagaggagatgtcaacaagaatgtgggcatattttctgcaaggcatgcattaaactgcaataactacacaggcaaaatgcccaacttgcaggaaaagagtcacag

SEQ ID NO: 11501 - DNA, 742 bp, Gossypium hirsutum
  Clone ID: GOSHI-09MAY01-C37807_1
cccacgcgtccggggaaagtgaagatcaaagaaattaaaaaatgcgattcagcagggcgttgaaggttgctccgattctgcttcttctgctgatcctttttacatttgcgaatgccaagaagtcagccgatgtgacccagctacagatcggagtcaagcataagcccaaatcatgcgagttccaagctcacaaaggtgatagaatcaaagtgcactatcgggggaaactcactgatggaactgtattcgattcaagttttgaaaggggtgacccaattgaatttgagcttggtagtggtcaagtaatcaaaggatgggaccaaggactactaggaatgtgtgtcggtgagaagcggaagttgaaaatacccgcaaagcttggttatggtgaccatggttcaccacccaaaatcccaggtggagcaacactagtatttgacacggagcttgttgcagtcaatgggaagccatccagcggaggggataatacaagtgaagatgagctataataactgatgataggcactcgtctgagcagctttatccttttactacgtttgttttcctttaaaaatgctagcaatggtaaacctcaccagcctttctggctgggatttagaaaacaaattctggtgccatttttccataagcaaaaaactatttattgatacttagttggagaagctaatatttaatttagaatgtttttttttaataaaaataaaaaaaagatagtatggtt

SEQ ID NO: 11502 - DNA, 275 bp, Gossypium hirsutum
  Clone ID: uC-gsflnu33B002h12b1
tccacgcgtccgccaatgcctccattgcccttctctgaggcatcagcttgttgcagtcaatgggaagccatccagcggtggggataatacaagtgaagatgagctataataactgatgataggcacttgtctgagcagctttatccttttactacgtttgttttcctttaaaaatgctagcaatggtaaacctcaccagcctttctggctgggatttagaaaataaattctggtgccattttttccaaaagcaaaaaattattttattgattctt

SEQ ID NO: 11503 - DNA, 1087 bp, Gossypium hirsutum
  Clone ID: GOSHI-09MAY01-C37827_2
gttgaagaaagatagggaaagagatagtgagaggataattgtcgatagggatgattcggctaattttgtgtcgagatctgatagaattgatagaattggaggggtatcgggctttgtttcgaacccgaatgtaccaccaccacagatgcacttgcaggcgccggcaagggtgccttcacctgtaaggccaccacctgtgaagtcattgaagcagccgaagccaaaggctaaggatccgaacaagagggaaatgagcatggaagagaagcaaaagttggggattggattacagagcttaccacaagagaagatggataatgtggttcagatcataaggaaaaggaatgggcatttgaggcaagatggagatgagatcgaactcgacattgaggcaatggataccgagacgttgtgggagttagatcggtttgtcactaattacaagaagatggtcagcaagataaagcggcaagcattgatggcgaacaacgccgtatccaatgacagccatagggaagaggcaaccgtggagaagattgaggtttccaatggagatgaagaaaccgaaaaaaggcgatgctggagaggaagatgtagatattggggacgaaatgccgatgagcagtttcccacccgtggagattgacggggataacgatcgagctagtagcagctctagcagctccagtagttcaagcagcgattcttcgtcttcgagtgattcagattctgggagctcatccggaagtgattccgatgcagacgatgcgcggtcttgaaggcatgagctattcgattttggggcaaatccagttggaaaattgggtggtggggatgtagatgagaggtagattttgctaacatctgctaacaaactggaaaaaaaattagggatattagtaagtattaaatgctgaagatatgaacatttttttttcctcttttttttggttgatgtacagggtggtggtggtgggttgtttaaatgttgtgtgaaattgtaatggttgctcactttggaggaaagaaatgtatgaaaatggaaaacgggagggcagctttgggaagagagaatggggatttaaag

SEQ ID NO: 11504 - DNA, 719 bp, Gossypium hirsutum
  Clone ID: GOSHI-09MAY01-C37827_1
cggccgcgtggggatggatctgggcactggaaacgagtgtcgaagaatttctacgggtctcccttggaatttgcggcggatgtaaggctcacttttaataacgccatgttgtataaccctaaggggcatgaggtttatgtgttggccgagcaatttcttgcaaaattcgaggaactgttccggccgttgagcttgaaactggaggagcaagatgagcctcccgaaaggggttattacgaggaagagttgcaggcgagttcttgggatcacggtgaacctgataggttgaagaaagatagggaaagagatagtgagaggataattgtcgatagggatgattcgggtaattttgtgtcgagatctgatagaattgatagaattggaggggtatcgggctttgtttcgaacccgaatgtaccaccaccacagatgcacttgcaggcgccggcaagggtgccttcacctgtaaggccaccacctgtgaagtcattgaagcagccgaagccaaaggctaaggatccgaacaagagggaaatgagtatggaagagaagcaaaagttggggattggattgcagagcttacctcaagagaagatggataatgtggttcagattgaaggataagaaaggtgggggggatacttttgtattgcatttacccttaaaataaattacttaaatgattttcagaacatcaatagaggtgtttttacagattg

SEQ ID NO: 11505 - DNA, 636 bp, Gossypium hirsutum
  Clone ID: GOSHI-09MAY01-C37517_1
ggcctcgattttcgagagggagatgaaaggtaaggctaaaggaggagagactgcaatgaggacagagtttgttaggatgtacggttatgaagagttagggcagaggttgaaggaattacggccgccggagaaggagggtgggttttcattgcaggagttgaatgaaaggttgaaaaagttaagggcaatcgaagagaaggaaaccgatgtgcagatcagtggggttaacttcgcggctataagggatggcttgaccgctttgaagacgtctgacgaagaaaaacagaaaaataaattagcccagaaagttgatatattggacctctttggtagaactccagagtttatgttgcaccctccaaaggaacatttagttgaaaagtatttccatccagataacatgtcttctgctgaaaaaatgaaaatcgagcttgcaaaagttagagatgagtttaagatgtcagaatctgattgtggatctgcacgtgttcaagtggcacaactcactaccaagaatcaaacatctatcatcagttctgcataaaaaggataagcactctcgaaaagggcctctagccatggggccaaaaaggaagagttgttgattatctcccgagaaccaacttggattcatcg

SEQ ID NO: 11506 - DNA, 486 bp, Gossypium hirsutum
  Clone ID: GOSHI-09MAY01-C37467_1
tttgtttgatcatgaggaaaagcaaaaaggtaaagtaaaagagaagcttgacaagtacaataaagagaagttattggagttttgtgacgtgcttgacataccagttataaaggctactacaaggaaggaagatatcattataaagctgatggactgtttgatggctcctcatgctacaaccactgttctacttgctgaacaagaaaagtcaagtaagggtaaaaagcgcaaaagggctacgatgtctgggaccacagttaaacgatcaacaaagagtccaagaaagagtgaggatactccaaaatctacgacaaagagtgtgcctgattctgaggatgagtctgaacaagaggaacaggaggtagaagaagattaggaagatgatgaggaggatgaggaacagaatgaagaagagaaaaatgaaaatggagttgcagaaaaatctgaggacgagatgcctgaggattcttgaagtgaagagaaaaa

SEQ ID NO: 11507 - DNA, 450 bp, Gossypium hirsutum
  Clone ID: GOSHI-09MAY01-C37797_1
agggtatgtaataccaacaccagtcatccagcattttatccaagactatgagaagaatgaagcctatactggattccctattttggggattgagtggcaaaaaatggaaaacccagatttgcgtaaagcaatgggcatgaaacctgaacagaaaggtgttcgaatcagaagagttgatcccacagctccagaatctggggttttgaagtcatcagatattgtgctcagctttgatggggttgatattgccaatgatggaacggtatgggaaggattatgaatatgaagctccagtgaagctattggacaaactcttgcattcaatgctgcagtcacccgatgaacagcttgttgtggtgtctcaggttcttgtgtctgatatcaatattggatatgaggacattgttaacactcaggtccttgctcttaatggtaagccagtgaagaatt

SEQ ID NO: 11508 - DNA, 1007 bp, Gossypium hirsutum
  Clone ID: GOSHI-09MAY01-C37787_1
aagaattacccaaaactcaatcccatgatcctgtcccaccttcacatgatgagatggatcagttacaggaacgtaattgtagtagctccttttctcctgcttctctagatcctccatcctcaggtcagaagttcgtatctcccatggcaaaagtttgtatttgctgctccaaagaattacccaaaactcaatcccatgatcctgtgccaccttcacatgttgagatggatcagttacgggatcgtaattgtagcagctccctttctcctgcttctctagatcctacatcctcaggtcaaaagtttgtatctcccatagcaaaggaaaatcatgaccaggagagtctgcagagcaaccattctccgttacctagctctcatcaattcgcacatgcacatgattcccctgggaagcaggcagtgcagcactattcatctgatatgagcagtagttcaatcatggagccttcaggaaacaaaaatgagctttatgccttgcgcccgcgtgaagcacctggcacgtttaccaatgttctggatgctcttaaacaagccaggatgtctttacaacagaaaatccatacattgccactaatagagggtgcatctggaggaaaagctattgaaccttctgttcatggaagacaaattggggagagagtagagattcctgttggatgctctggactcttcagggttcctaccgacttttcagcagaggcctctaaagtgaactttcggggttcaggtttgcaggtaagtttggcaaactatttccccgaagcagtagttgcaccttcttctagcaaccatcttcttaccacttcttatatgaacactcagtcaagtagttctagtaactatcagccagttagtagtgatcggttttacagtaacccttacaggatgttagatcaagttattctgcagtcccaactgcatctggttacataaatgatgatcaacatttcacaggtcgatatgcagagacagggtcaagatccactc

SEQ ID NO: 11509 - DNA, 724 bp, Gossypium hirsutum
  Clone ID: GOSHI-09MAY01-C37747_1
cgaagagggaccaaattgaaaaaagaaaagaaaaaggaaagcaagtaagcaactaagagctaagctcactggtttgattttggtctggggttggttggctgtcatggttgtcatggttttcagagttgtctgttactgttggaaattgttgatcatcgtcgtcgtcgtcgtcgtcgtcgccactcatctctcctttcactttctcgccactttcgtctttctttgatccttccttgtcatcatcaaccttgccatttatattaccaccgaaagaggaagctttagtgcaaacaattacaggggtagccaagaacgtgggtttctcttcaccggccattatcaccagaatcttctcctcataaaccttcacctgcttggttgagtcgccctcattttcaccactttcgacatccctttcgacatcacctccttcactgttgttgtccaaacgaccagaaagccgccagtaggaacaagctaagatcaagagagcaaaagcaatgaggcccagcatcgctgctaggccaccaaagaggtaaggcacgggagagtgccatggagagcgtggatgcaccattgctggtggtgacattgagggcatagctgctgtttctactgtgttaacgctgctaattggtctcatttttagtgtttctttatagacctcgatttcttcttgttaacagagaaggtggtagtttggttgaggtagcggacgcgaggg

SEQ ID NO: 11510 - DNA, 386 bp, Gossypium hirsutum
  Clone ID: LIB3145-046-Q1-K1-A11
cccacgcgtccgcccacgcgtccgttccacgcgtccgcccacgcgtccggttgatcatcagcgtcgtcgtcatcgtcatcaccactcatctctcctttaactttctcgccactttcatctttctttgatccatccttgacatcatcaaccttgccatttttattatcaccgaaagaggaagctttagtgcatacaattacaggggtagccaagaacgtaggtttctcttcaccggccattatcaccagaatcttctcctcataaactttcacctgcttggttgagtcgccctcattttcaccactttcgacatccctttcgacatcacctccttcactgtttgtgtccaaacgaccataaagccgccagtttgaacaagctaagat

SEQ ID NO: 11511 - DNA, 728 bp, Gossypium hirsutum
  Clone ID: GOSHI-09MAY01-C37777_2
atggaatgtaaaattgatccaaagcttccatatactgatttatcaactatgattcgacgccagaggcaggcaattgatgaaaagattagagagctctcgaactgtcaaatagtttatccgggacttgattttcagaagaaagaagctggtattcctaaaaaagtcgtcaaagttgaggatatccatggcttgaaggaagctggttggactcctgatcaatggggtcatactcgatttagagccttaattgtttttgcagacaacgcgacatatcataaacatttaactggtttcatgcgctcacttttgaagtcaatgcatgaccatgttgatgcttggccattcaaggaaccagttgatgcccgtgatgtccctgattatgatgacattatcaaagaccccatggatctgaagacgatgtcaaaaagagttgaatcagagcaatattatgtcacactcgagatgttcgtagctgatgtcaagaggatgtttgccaatgcacgcacgtataattctcctgataccatatactataaatgtgcaaccagattggaagcacatttccagagcaaagttcaatcaggtcttcaatctaacaccaaaattcagtagggtcttcaatcaggtcttatgatccctgaagatcagatttcagcgattccagctgtcccatttcaacaatatgtaacaggagtcttcatatactgtctataatttgcagatttttc

SEQ ID NO: 11512 - DNA, 534 bp, Gossypium hirsutum
  Clone ID: uC-gsronu33B099h09b1
tcaggttattgatgaaaagattagagagctctcaaactgtcaaatagtttatcccggaattgattttcagaaggaagctggtattcctaaaaaagtcgtcaaagttgaggatatccctggcttgaaggaagctggttggactcctgatcaatggggtcatactcgatttagagccttaattgtttctgcagacaacgcgacaaatcagaaacatttaactggtttcatgcgctcacttttgaaggcttgtaaaaaaagcatgcttgtccccctcttctcgcaatcaaacaccttgtctaagatgcaggggaagctaatttccactttcaggattcttgcaatggcctaattacagtataattataaatgttaataagtcattgtccttttgcttttactcttgataacttgattctctccaagtgtttatttgacattagatgtctatatgagagcatctcctgccatgatttttcttagattctaagcaaaatggttttgttcaagcagtcaatgcatgaccatgttgatgct

SEQ ID NO: 11513 - DNA, 222 bp, Gossypium hirsutum
  Clone ID: uC-gsronu33B156h11b1
ccctcgcgtacgcccacgcgtccgatttaactggtttcatgcgctcacttttgaagtcaatgcatgaccatgttgatgcttggccattcaaggtaccagttgatgttcgtgaatttcttgtctattatactttatcatcgtcctcatgtttctttttttctatctctatattttgttgtatttgttctatttttatctttctattttattattcatctatat

SEQ ID NO: 11514 - DNA, 429 bp, Gossypium hirsutum
  Clone ID: GOSHI-09MAY01-C37767_1
cacaaatggctgtttcattttaccatgtcctcgctttcttcatttcatgcttgattttgtttttttcatgcaaatcaaaagccaaacgacgcttcaatctccctccagggcctcctggttggcctgttgttggtaatcttttccaggttgctcgctctgggaaaccattctttgaatacgttgatgatcttcgtcatcaatatggacccattttcactctcaagatggggactcgaaccatgattatacttggcgacgccaaactctgccatgaagcgtttatcgaaaaaggtgttgttttcgctagccggcccgagggaaaaccccactcgggaatatctttagctgcaacaagttcaccgtaaacgccgccgtttacggtcctgtgtggaggtctctgaggcgaaacatggttcaaaacatgttgag

SEQ ID NO: 11515 - DNA, 474 bp, Gossypium hirsutum
  Clone ID: GOSHI-09MAY01-C37677_1
gaagtcaagtgtaaagggatctttttttttacagaaatacaatacggatactaaatgaaatacaagaataattagaaaatcaatattattcgaaggtgatttattatatttcaatttttttcgttgcttttttgctttcattttcgcatctactataaacaaaaaagaagaggataaaggataagggctcaccagaatcgttggaatatcgtcagagtttctcctccgttaaaactgaatccaaccaaggttgagacgttcttttgattctttgtggttgaaggtgttagattcttaaatgtttttctaaatgaggttagaaagggaagatttactcaccgtcggccactgttagaggcgagggtacggcgtctgagggtagagatttgggattgattgaggaagaatcaaggaaagggggctagggttattttagagatggccgattgttttctttggtcttcgaaggaaatg

SEQ ID NO: 11516 - DNA, 505 bp, Gossypium hirsutum
  Clone ID: GOSHI-09MAY01-C37127_1
ttttcgaacaagccatacgtttgtccaaaatcatacaacgttgcggacttgaactacccttccataacagtccctgaactcaatggcacaaccatcattacaaggaaagttaagaatgtgggcaccccagggacatataaagctcatgttcgatccccggtcggagttatggttacggtccatccatcaacattgaaatttacaaagatcggtgaagagaagaaattcgaagtgaggttaagaccgagtagtaaaaaagtggatgcggagggaggtgtagggtatgtatttggggtattgagatggtgtgatgggtatcattacgtgggaagtccattggtagtgaaacgtaagtagaaattttttgttgtaatttttaattgggggtttgattttatcgttattattattagcattcctttcttttgggggggaaaaatttagaacagtaaatgccaaatgtaataacgttgcaaataagaaactacatacaagcatgattcat

SEQ ID NO: 11517 - DNA, 625 bp, Gossypium hirsutum
  Clone ID: GOSHI-09MAY01-C37077_1
cggacgcgtgggcaacaccaaaattacatcagggaataaattcataggccaccatgactcgctcgttcaactttctacccatgctcctcttgcttactttatcagccctgactgtccaagaaatttcagctgcaccttcctgcactgaagttgccatagaattactcccatgcctcagcttcctgtctggcaacggtgctgcagatgttccatcgcgggcatgttgtttgggtgctcaaactattgcttacgaagcacagaccaaagatgaccgacgggctatctgcgagtgccttgttaatgcattagcaaatattggcacatctgactccttcactgcgcggatacctttaattgctacccaatgcggtgttgatgtttctcttccgccaattaccagcgacaaagattattgttccaagctcttcccttgacttcgtttgatataccatcgtgttgtgccacactagggaagatattaattatatctagctcaatccatcatcctttaaatttctttaagtaatttacattgtacttagtgaataacaaatcctagttgtggacaaataagatcatacatgacgttaatgtgaaatcatactttcttcgttgctcttttttc

SEQ ID NO: 11518 - DNA, 390 bp, Gossypium hirsutum
  Clone ID: LIB3146-033-Q1-K1-D8
aagcagcggtgctgcatgcttaattgtttaggaaaatgtaataacgccatgtaatatggataccgccctgtatttatataccatttataatgggtaatatataatggagtgcgtaaaatgtaaactaataaatatcagcacatctgactatatatactgcgcacatacctttaattgctacccaatgcggtgttgatgtttctcttccgccaattaccagcgacaaaaattgttggtccaatctcttgacttgacttcacttgatataccatgcgattgtgccacactatggaagatattaattatatatagctcaatccatcattctctaaatttgtttaagtaattcacattgtacttagagaataacaaattctagttgtagacaaa

SEQ ID NO: 11519 - DNA, 655 bp, Gossypium hirsutum
  Clone ID: GOSHI-09MAY01-C37027_1
ctgttgctgagacctctgcattactagagcagaaatgggataagatcttttttacaggtggcgcaagagttgggcgcattgtgatggctgcagcagcaaagaaccttacaccagtaactcttgaacttggaggaaagtgcccggctgttgttgattccaatgttaatttacaagttacgtcaaggaggattgtagccggcaagtgggtatgcaacaacggacaagcttgcatcagtgttgattatatcataacaacaaaagaacttgccccaaagttgatagcaactctagtgagtgtagtggaggaaatctgcggaggagatctaatggaatcgaaggaacgatcccgcattataaactcattccacttcaaacgtctagtaaatctcttggaagaggataaggtctccagcaaaattgttttcggaggccaaagggaggagagccaattacaaatagctccaacaatattgttggatgttcccgaggactcgatgatcatgcaagaagaaatatttggaccattacttacaataattactgttgaaaggttggaagatagctttgctatgataaacagaaagccaaaacctcttgctgcatatctcttcagtgatgatgaacagattaaaaggaagtttgtacaaaatattta

SEQ ID NO: 11520 - DNA, 401 bp, Gossypium hirsutum
  Clone ID: GOSHI-09MAY01-C37337_1
gagcaagcccagagatgataaaatggttgacaaaagcacaaattcttttatatgattggcttgcatgcccctccctaatttagcttgacaatgaaagatgatgccaagatgtagatttttaacatattttgtgagatacattgtctttaaggtaaatggcatagtagtgttttcttttgccctttttttgaagggaaaaattatgtgtaaaaggaggaatgattttctgttctattgtagttgtttatcttcatatattacccccttttttcttttttctttttttctcataaattaagaatgttctttttatgtatcagatttacattttcttctttcagaaaccttttcttcttctctgtcatcaactttaactgatggacatatatacttgtatcttt

SEQ ID NO: 11521 - DNA, 1043 bp, Gossypium hirsutum
  Clone ID: GOSHI-09MAY01-C30567_1
ggtggctcaagttctggtgccgatgcagcatctgcttccacatgggttcctcatcccaacccttcaccacaatacccacggagattgtcagaacttgttcgtcgatcattgatgtcttccgctggtgctgaatctggaggtcatgtcaatcattctccactttcttcaggacttcctacttccccagaagagatgctgctttcctccggtgtacctaatcagcgcccccctcgtcaataccctaggtcagtctcatggttggagagacaagatgctggcttcctcgcagtaccccattcattacgaaatttagctgctgccactgaaggaagaagcaggctcctcgtacctgagattcgcaatgtcttggatctcatgcgtaggggtgagaacttgcgtttcgaggatgttgtgatcctcgatcaatcagcattttttggggtagctgatattcatgaccggcatagggatatgcggctcgatgttgattacatgtcatacgaagagttactggctctagaagagcgcattgggaacgtaaacacgggggtgagtgaagaaatgatatcaaaccagttgaagcgaccaaagtactcttgtgtaccaggaactcagttagagacagaaccatgctgtgtttgtcaggaagaatacaaccaccgtgaagatctcgggacactcggatgcggccatgactttcacgccgattgcattaaacaatggttgatgcacaaaaacttgtgccccatttgtaaaacaacgggtctgaataaatgagatgaaccgtttggttttttaggctgattagttcttgccttcaggtccgacatccaaaggttgcggcttggcatttttctttcataactcgcacttataaagcaatgttcttggtggatgatgacacaaatgtttgaagcactgggaacatgaaactacatatcctgcatctttagttcttaatcattgcggtattagagatttctttttttatgtatggattctcagcccattggcgacataaattattgaatctctctttacat

SEQ ID NO: 11522 - DNA, 826 bp, Gossypium hirsutum
  Clone ID: GOSHI-09MAY01-C30777_1
ctatgttgcaggggatagagtcataacagatcctctttgcaagcctttcagcatgggaagaaaccttatatgcgtgtactccaaaaagcacatgtatgatgttcctgagcttgctgatatgaaaagaaaagccaacatacgaagtttaaaagagatggctttgctgctaaggactggctcgaaattagtatggattgcaccaagtggcggccgggaccgtccaaatcctgttacaggagaatggaatccagcaccctttgattcttcatcagtggacatatatgagaaggctgatagaaagttcaggtgctccagggcacatgtatcccttggctctattgtgctatgacattatgccccctccatccaaggtggaaaaagaaattggagaaagaagaatcataagctttcatggggccggattatcagtagctccagaagttgctgctaattgtgaaaagtctgaagaggttaaggatgtatttacacaagctctatacaagtctgtgacagagcaatacaatgtcctcaaatctgccatacatggaaaacaagggttagaggcatccactgcaggtatagctttgtctcagccatggaactagtttatagttgaaaccatgtcaagttatcaacgtaactgcacccaaagaggtagccataggcaattcttacattacgtgtgtatcatgtttgacctccgtgcctattcaaatttgatgttttacgtcatgacatattttggagtgacgaggtccaataattattcattttcttttaaaaaatagaaaatttaaaggctatgatttttatattacaaacttag

SEQ ID NO: 11523 - DNA, 325 bp, Gossypium hirsutum
  Clone ID: LIB3828-014-Q1-K6-C7
gtttgatctacgtgcctattcaaatttgatgttttatgtcatgacatattttggagtgaagaggtccaataattattcattttcttttaatcattatggctcttttcaatgtgagaagagagatggattaaaattgtgttaatagtcttggatttagtgttaaacgaagaaaaaaaaaaaaaaaaaaaaaaaaaaaaaaaaaaaaaaaaaaaaaaaaaaaaaaaaaaaaaaaaaaaaaaaaaaaaaaaaaaaaaaaaaaaaaaaaaaaaaaaaaaaaaaaaaaaaaaaaaaaaaaaaaaaaaaaaaaaaaacggtggacttccct

SEQ ID NO: 11524 - DNA, 644 bp, Gossypium hirsutum
  Clone ID: LIB3543-054-Q1-K6-H4
cccagcgtccgcccagcgtccgcaggcatgccaccgccttatagagggctgaatatggtacttatggatcattcatcaaatgagactcatggtgcgacttgaactctgatgcttgccagggtgctaactgaaccaactcatattcacacaggacaaaaagttgttatttccatatgtagaatccattatacaagttttctttgtatctctgcaatttaatcagtaagcaatttttcatcaggttactaatcttcacttcagaggtgcaagcgtctggcttgctgtcatggaggatctattgagcaaaggaatgagaaatgctgaaaatgtaagattgttttgcctttcttgtatctttttatgtttttgagctaatggtttttccaatgaaattactctgtgtaggctattctttcgggatgttcagcaggtggattggcatcgatattgcattgcgatagcttccgagccctcctacctatgggtactaaagtaaaatgtatttcagatgctggttattttatcaatacgtaagctcatttataggaccttctgccaagaatcttgtgttgaagtatacatggtagttcacatattcgtttcatgcaaatacttattaattcctttgtaaatgttgttttgca

SEQ ID NO: 11525 - DNA, 428 bp, Gossypium hirsutum
  Clone ID: LIB3120-010-Q1-K1-D8
ctttctctggcatcctgaacaagaaacgtatattcaatccagacgtttacaattggaacagaatcaaagtcaggtattgtgatggatcatctttcaccggcgatgttgcagcagtcaatccagttgctaatcttcacttcagaggtgcaagggtctggcttgctgtcatggaggatctattgagcaaaggaatgagaaatgctgaaaatgctattctttcgggatgttcagcaggtggattggcatcaatattgcattgcgatagcttccgagccctcctacctatgggtactaaagtaaaatgtatttcagatgctggttattttatcaatacgagagatgtgtctggaggacattatattcaaaccttctttgatcaattagttgcgacacatgggtctgcatagaatttgctttcatcatgtact

SEQ ID NO: 11526 - DNA, 453 bp, Gossypium hirsutum
  Clone ID: GOSHI-09MAY01-C30197_1
cccacgcgtccgctcaaatcttcaatcattagttcatctcttcaaaaaaatggcaggttccaacgttttcattttattagcttgtttcattttgttgggtttttcaagcatggaggtcagcctagcagctcgaaatcttcagcaagtaccattaccttcacttcctaatcctatcgttgttcttccaccacttcctaaccttccgccacttcctaatcttccaccacttcctaatcttccgccacttcctaatcttccaccacttcctaatcttccgccactttctaatcttccgccacttcccagattaccaattccaccgctttctaaccctaccattgttctttcgccactccccagattaccaattccaccactttctaaccctaccaccgttcttccaccactttccattgtaccaattccaccactttctaacccttaacaacgttc

SEQ ID NO: 11527 - DNA, 646 bp, Gossypium hirsutum
  Clone ID: GOSHI-09MAY01-C30187_1
gtgagtggcaatggcaaccgctacagttacagcagcgtctacactttcatggcttcacagctttggaggaacacaaaacgagacagcaaaagtagcagacaaaaacagggtcttcgtggttttcgcccagaagaaagctaaaaagactcgaaagataatactgaaggaggatgtggaatacctggggaaaaagggacagcttttggatgtgaaagctgggtatttcaggaattatcttttgcctacgggaaaagcccagattatcacttcttctttgcttaaggaaatgaaaatggaggaggaaagaattgaagcggagaagcaacgggtgaaagaagaggcacagcaacttgctctaatattcgaaacagttggagcttttaaggtgaagagaaaaggtggaaaaggaaagcaaatttttggaagtgttactgctcaagatcttgtaaacattatcaaggcacaacttcaaagggatgtggacaaaagaattgtttttcttccaaagatcaggaaacaggagaatatgtagcagagctgaagctccaccctgaagttactgcccgagtccgagttaatgtttatgctaactgaggacacttcctctccaaatgtgcagctttgtcagccatttgcatctgtctaa

SEQ ID NO: 11528 - DNA, 442 bp, Gossypium hirsutum
  Clone ID: GOSHI-09MAY01-C30087_1
cttttcctccgactttcattccatggattgtgctttatctcctcagatcttcataaacacaagatttgctaggtgtgtggccatcagactaggagttgaaatcaggctatacagaaaaagatggttgagttctacttgctgtgctgtgggggtgtctgagatgggtgctggcaacctgtttgatgatgggtccttgaaagggtctgaaaatgggtcattgttgggtgcacttggtgactcagttttaccaccatttggaacagtggatgctgaaattaccccagaaaccgttgatttctttgttagtgatgcagaaggtgatcctgactgcccttctaaaggattctcttccattgaccaagcattgaatacaatacgccaaggaaagtttgtgattgttgtagatgatgaaaatgatgattttaaagaacccttatcattg

SEQ ID NO: 11529 - DNA, 525 bp, Gossypium hirsutum
  Clone ID: LIB3828-032-Q6-K6-D2
gttcactttcatgtctggctgttgaaagcatgaagtagatgaatcgagagatttatcttcatactggttttcttcctagttcattcggtatatatgctatgagcctctcatcagggttatttctacttgagaaacctgcatgggctgttgctgttgcagctgtgggtgtaatcctaggggggccattttcaatcttggcatttcttccactgaccttctactctttagataaacaattcaaacaagcatttctttctggtgctgtcacctcaatagctcttcttgcactctccatactcgttgatcactgctactaccaacgctggacatcatctgtttttaatctcttagtatataatgtattaggaggtggcgagagccatttgtatgggactgaggggccacttttttatataaggaatgggtttaacaacttcaacttctgtttcatccttgctttgcttttcctgggaattctgccaaattgcaagaaaaaagtatgcccctgacttgtttatcgtaatc

SEQ ID NO: 11530 - DNA, 393 bp, Gossypium hirsutum
  Clone ID: LIB3048-055-Q1-L1-C3
ccgacctgcttcctggctgtttgctgaagaaaaagtgggagggttctatgcggtgagactctttcttggttttctatctcttatttcagatgctactctagtggtagcactttccagaaaatatggaaagcggcttgcatcttatgcacttgcaatgctctgcttggctactggttgtttctttgcgagcacaagttttcttcctagttcattctctatgtatgctatgagcctctcatcagggttatttttacttgagaaacctgcatgggctgttgctgttgcagctgtcggtgtaatcctaggttggccattttcaatcttggcatttcttccactgaccttctactctttagctaaacaattcaaacaagcatttctttctggtgctgt

SEQ ID NO: 11531 - DNA, 693 bp, Gossypium hirsutum
  Clone ID: GOSHI-09MAY01-C30307_1
caaaatgttattcatggctactttatctacactccatactactttcacttgtcattccttgcggtatcagaaatcctttaacacccccttttgccttaacaaaaatcccatttggaagaaaacaatcaaaactccaacactaaccgcttcggttgccacggaagctgtcactgagactgaaacaccatccgacttcatcattcctcagaaacctgaggaggtggtcaagcaagttggaaagccaagactggttttgaaattcatatggatggaaaagaacatcgggcttgcccttgatcaagtcataccgggccacggcactgttcctctaagtccatatttcttctggccaaggaaagatgcctgggaagagctcaaggccactctagaaagtaagccttggatttctcagaagaagatgattatccttctcaatcaggccactgatatcatcaatctatggcagcaaagtggtggcaacctttcccagagctagatgtgcattttttttatataattttttttgtcttagctatgcaaaaaggcctcggttaattcactgatattgagaatgtctggtttgaaacctcttatctcttaactaagatatgaattgatggttttaataggataacaaacactgctgaattgttggtatttcccttaaaatccacatatttgtttatttatcat

SEQ ID NO: 11532 - DNA, 437 bp, Gossypium hirsutum
  Clone ID: GOSHI-09MAY01-C30277_1
cccacgcgtccgcccacgcgtccgcccacgcgtccgggtgggatagtgtctgatgatgataatgggaatgctgttgtcactgcacggcttcttgttccaaataatatgggaggatgtctcttagggagagggggtgatgccattcaaagactgcgaagtggcacaggtgctactatacgtgttcttccagctgatcatcttcctgcttgtccagtggcaacagatgaattagtgcacacatccggaaaacgagatgtcacatagagagctctatatgaactttccactctttcgcatcaacatccacggaaagacaagcctcctcttgagcttctactgtgccacattcaagccagaatttccctcctagggctcttccaccgtgccattcaatgtgggcgcatcgaaatttttctcctcatgatagtccaccaatg

SEQ ID NO: 11533 - DNA, 445 bp, Gossypium hirsutum
  Clone ID: GOSHI-09MAY01-C31907_1
agagacatggcaatgccaagagatcggccccttcatctctgtctactcatcttgggcagcgacaccactccttccataggacgcctcaatggcaccgagctcctcaaggccgcctgcaaccaaacgtccgactacgcattctgccatgctactttaactgccgaccccaacgcaggtggcccacaagcccttgccggcgaccttgctaatgctgctttacgcttagctcaaaccaaggccacccacgcgcaatccctcatacctctcctccttcaaaatgccaccacctctttggaccacaaccgtctccaaatgtgccaaagtagcaacaacaaggccatttctcagctctcagcggctaacaatgacttcaactccgactcactcgacaccatggtggaagagaataaacactgctgctcgtgctactaatgactgcttgact

SEQ ID NO: 11534 - DNA, 591 bp, Gossypium hirsutum
  Clone ID: GOSHI-09MAY01-C31937_1
caagaaaatccaaagggaattgaaaatgaatctccaaatccaaactcagtctttgtcaacacactttccccttccacccttccctccaaaacccaaattccttcaagcaaaacccaaaccctccttcaaattatggtcctcgctctccactgtttcagtcccaccaacaaaaaccagccacaagccatttcccgccgaggtttccaggaccataatggaattgtcttctatggggacccttgccactctagctcaagatgggtggcccttgggcgttggtgtaaggtttgctgtcgatgctgagggcacccctgttttgtgcttgcctcaaccttctcctgataaccgctccacccttcatgttcagttagatcaatgtgggttacggactcctcagtgtacaatacagggcagtcttaccaaaccagctgatgcaaccattttgaggtggtttgattcagtatggaagaagaggtttggagaatccgccgatgtagacaatctatatactgttgacgtacaaagagtacttcaaatggaagacttaaatgaggatggtgtatgggtcacttcatcagattataaaaatgc

SEQ ID NO: 11535 - DNA, 440 bp, Gossypium hirsutum
  Clone ID: GOSHI-09MAY01-C31877_1
cccacgcgtccgcgaaaccaaatcttctctttctttttcttctgggagtgaagctgaaacgtcttgttggtgcggaggaggggtgagagatctgcgtgatgggaggaggcaatggccagaaatcaaggatggctcgtgagaaacacgtggagaagtacaaggccgctaaaggtagtcaagctggaatcaaaataagaaagccatgacgatccaatgcaaggtttgcatgcagacattcatatgcaccacatcagaggtgaagtgcagagaacatgctgaatcaaagcacccaaaatctgacatctatgcttgtttccctcaccttaagaaatgaatgaaattatccattaaggaaaaaataacaataatagaagtagcaggttggacttgaggttccattcttgtatttatgtcattacgtcccgcaatcgtattggatc

SEQ ID NO: 11536 - DNA, 1078 bp, Gossypium hirsutum
  Clone ID: GOSHI-09MAY01-C31867_1
tgccgtccgaaaaaaaatggccactgttgaagcaatagcagcactctccttttcatgttacccttcttcttctgcctctaaattcctcttatatgccaaacccagtagactctcttccctaacttcccacattcccaagtctactcctttactttcccacaatatctccatctcgccattaatcagcacccaaaagaaattgagttttcaactctgctctacactgcaagaggtgagcttagaagctgaaacagataaaacccagaaatcaaatgtgaaaaggaagctttttgtgttgaatttgccttggtcttatacggttgctgatatcaaagacctctttggccaatgtgggactgttaaagatgttgagatcataaagcaaaaagatgggagaagtaggaacttcgcatttgtgacaatggcttctggtgaagcagctcaggctgctatcgataaactcgattctcatgaagtgtcggggagaattattagggtagagttttcaaggagactgaagaaaccttcgccgccttctttggagccaatggttccttcccgtgagacacgccataagctttatgtctctaaccttgcttggaaagctaggtctactcacctcagagaatttttctctgcctttaatccggcttcagttaggcgtgttttttctaacccgtcgggacagtctgctcggtatggctttgtttcctttgccacactggaggaagctgaagctgctgcttctactctagatgggaaggaattgatggaccgaccaatacgtttaaaattcactgaaaggaaagatgatgaatctggaggtgaaaagaaagaggcaaaggatgagcctgatgatcaaaatgaagaggcttagatcatcattgagttcacttggacctcatctttccatcattctgagattagtgtacaaaaatgagactttaagctagaaagttttgtcacatgcttatacaggtggtctttaaatgtttacattttctttttgttttgtgtcttgataaattttcgtgtaacttattatctatattacatgcattcaattcatttggatggg

SEQ ID NO: 11537 - DNA, 419 bp, Gossypium hirsutum
  Clone ID: LIB3120-025-Q1-K1-A7
cgattcccggattcgcgccacggccccacgcgtgacggccacacgtacgaacttgccatctgcgacactggcttatggtgaagcagctggggctgctatcgataaactcgattctcatgaagtgtcggggagaattattagggtagagtttttacggagactgaagaaaccttcgccgccttctttggagccaatggttgcttcccgtgagacacgctataagctttatgtctctaaccttgcttggaaagctaggtctactcacctcagaaaatttttctctgcctttaatccaggttcaggtagggttgttgattctaaccggtccgaacagtctgctgggtatggctctgatttctttgccacaatggatgaagctgaacctgctgtttctactctagatgggaaggaattgatgg

SEQ ID NO: 11538 - DNA, 613 bp, Gossypium hirsutum
  Clone ID: GOSHI-09MAY01-C31457_1
caagctaaaagaaaaaacttcaaataaaaaaaaaccctcgaaatttctcgttctttctcggtcgatcctcaatactaatccaatcatgttgacagtgagtgtgaaatggcaaaaggaactcttgaaggctgtggaaattgacaccagtcagcctccatatgttttcaagtgccagttgtacgatctgactggagtacctcctgaaaggcagaaaattatggttaaaggtggcttgttgaaggatgatgcagattggtcaacagttggtctgaagcagggtcaaaagttgatgatgatgggaactgctgatgaggttgttaaagccccagaaaagggccctgtttttatggaagatcttccggaagaagaacaagtggtatctttgggtcatagtgctggtctatttaatctgggaaatacctgctacatgaattctactgtacaatgcctccattctgttccagagttgaagtcttctttagtaaaatattcacattcaggaagaaacaatgacgtggatcagacttctcatatgttgacaattgccgcacgtgatttatttggtgaacttgataaaagtgtcaagccagttgcacctatgcaattttggagg

SEQ ID NO: 11539 - DNA, 671 bp, Gossypium hirsutum
  Clone ID: GOSHI-09MAY01-C31467_1
cccacgcgtccgcccacgcgtccgaacgcttttgccaaaaaaaaaaaaaaacctccattgaatatggctttatccatggcttccacttcattttcaagcttctcaataatcaggattcatcccaaaaaattattttcgagaaaagttacgacattgttacgaggggaaactcgtacgaaagcaacgaaaggtggagtctcgagtgtttgtgaaccactgcctcctgatagacctttgtggttccctggtagcacacctcctgaatggcttgatggcagccttcctggagattttggtttcgatccacttggattaggttccgatccagaaaccctaaaatggttcgcacaagccgaactaatgcacgcaaggtgggcaatgctggccgtggccggaatcctcatacccgaactactcgaatccttgggcttcatcgacaacttctcatggtatgacgccggctctaaacaatacttcgccgaccccacgaccttgttcgtggttcaaacggcattgatgggatgggtcgaaggccgaaggtgggctgacataattaagcctgggagtgtcgacattgaacccaaccttcccaacaagaagaaacccactcccgacgttgggtaccctggtgggttatggtttgatcctttgatgtggggaagagggtcacc

SEQ ID NO: 11540 - DNA, 743 bp, Gossypium hirsutum
  Clone ID: GOSHI-09MAY01-C31407_1
cccacgcgtccgatcgagctgatgaagcatttagtatgcggtgaggttgtcgacattcgagatatcatcaatgtgagaaacttggatggaagaactgctttgcatatggccgtaactgagaatgttcagtctagtctggtggaactactcatgtccgtgccatctattgacctgaatgtttgtgatgttgatggcttgaccccgttagatctcctcaagagaaggcctaaatctgcatcttcggaaattttaatcaaagaactacttgcagctggaggaatctctaggggtcaagacaatgtagcaaggagtgctcttgtttctcatctgaaggagcacggtgtaggtgctagtcctggaacatcattcagagtccctgatgcagagatatttttgtacaccggtgtggagaatacatacgatgcacgttgtgataaagaaagcgtggaatatagctcgtgcctgagtgaactaagcgacttgaacttgagtacttcgtttgatactaagaagtcgagctccgtaaatcatactgcgagacgactgaagaattttctccattggcctatgaagaaggaaagaaaagctactagcacggaatcgggagacactgatgatcctgtggaggttacgagtgcttgtcgaaactggccagacattcatattccgcttcgtgaaaagtacacgaaatctgtatctcttccaaataacaaaaggacccttgctcttcacaatgatctttc

SEQ ID NO: 11541 - DNA, 857 bp, Gossypium hirsutum
  Clone ID: GOSHI-09MAY01-C31647_1
cccacgcgtccgcccacgcgtccgaaaatggaggtccaccccaaaaacgttagtggaaaattttacggcaagaaggtgaggacggaaatttggcggagatataacggtgaccggcggttttacttacaaagacagagattcgccggttaccaatcagaaatcgtacggtcggttttttgtttgtgcccactcgggtgggctccatggagtccaaggcttgtcgagtccgtggcattgggttgcgtgccggtgataatagccgatggtatccaattgccatttccctccgccgtgaagtggtcggagatttccttcacggtggcggaaagggacgtagggaagctagggaggatcctggaacacgtggcgaagaccaatttgtcaaccatccagaaaaacctgtgggaccctgctgtcagcaaggccctactgttcaatgatcacatgcaagaaggagatgccacgtggcaggttctcgagtcactctacaagaaactggaccggtcgtacaagagatcgagggtttcaagccaatagggagcgaacacgtggaactgtgttgtgtggcgccagctaaggtttgtttccttcccaacgtggaagacagctaggaatggtgtttgaatcctcaaaaagaaaaaaaaagagagatgggaatttttatttttatacggtgggtcggtgagcccacattaaccccattccttttttttgtttttgttttttttagatatttagaggcagaaaaaaagcagtatagttagttaattatatgaaaatgggctctatttgtttgtttgtacatggaaaaaaaaagacaataactgtttttttggtaaataatacaaatgaaatag

SEQ ID NO: 11542 - DNA, 720 bp, Gossypium hirsutum
  Clone ID: GOSHI-09MAY01-C31677_1
tcactcgtggggaaaatatgcggtttataacgtgaattatatacttaatatatgatatacctaatgtcatattcccatattctcgggaagtggcgacatacgagcccttgattcgatttatctctttatctccccgtgaattgtatgtttgtaacaatattgacagaatttcttcaattccaatcgactgggcgtattgtgtcgatttttttgagtaatatacctggaaatacccgttgattccttattaacgccgtttcgaacacaactggtacattccaaaataatcgttactcggacatctttactcttggccatgaacctcctttgagtttttaattcacccaacttttctattttccgatcaaaagcgaagaagaaaggaatgaaaaaaaaaagaaataaaagttgctaactcaaaaccaaatcttgaaagattttgttgcaatcaatatagtaaatcaatatagatttatagtaatagtaaataataagaataagaataagtaatacaacgatttcgaactctatttagaatcaaaccaccgtacggtattttctttaagtatcttgtaggatactgttgttccagccacatttctcttttcgctctactagtaatttaattggagcttgaacccgagtttcggtgaggttgaatccacttttttcgttctaccttccttatttattttatctaattcttatctaattctaaaa

SEQ ID NO: 11543 - DNA, 771 bp, Gossypium hirsutum
  Clone ID: GOSHI-09MAY01-C31607_1
aaatttatatccctgtgataaattggtttttgatgatcatgtgtgtagttgttgtttccatcttccgcagtaccactgatatcgccaatgcatatggcatagccgaagttggtgttatgttggtcacgaccacattggtgacacttgtaatgcttttaatatggcagaccaatttgtttatggctttgtgctttccgctcgtattcgggtcgatagagctgatctacttctctgctgttctttccaaggtcttggagggaggttggcttccactcgtttttgctactttctttctctctgtcatgtacatttggcactatggcagtgtgttgaagtaccagagtgaggtcagagagaaaatatccatggacttcatgcttgaactcggctctacgcttgggactgtgagagctccggggatcgatttattatacaacgagcttgtccatggcattccttcaatttttgggcagtttctacttagcttaccttccatccattctactatcatttttgtatgcatcaaatatgtacctgttcctgtggtaccccaggaagagaggtttcttttctgtagagttggcccgaaagactaccatattttcaagtgtattgctcgatatggttacaaagatgtctgaaaggaggatcaccatgcatttgaacaacttgttcaaatcctagaaaatttcttgctgaaagaagctcaagatctagcattagaaagcaggttgcacgagatggatatcgatagtgtttttgtgagctcaa

SEQ ID NO: 11544 - DNA, 769 bp, Gossypium hirsutum
  Clone ID: GOSHI-09MAY01-C31627_1
gacatcgtttcggctttcgaagggaactccaatctgttctgggcggaacggtttggaaaacagtttttggggatgaacgatttgtgggttaaacactgtggaatcagccacactggcagtttcaaggatctgggtatgactgttttggtcagtcaagttaatcgactccgaaaactgaaacgacccgtcgttggagtcggctgcgcttccactggtgacacatcagctgccttatccgcttattgcgctgccgcgggtattccttccattgtctttttacctgcgaataagatctccattgcacaattagttcaaccaattgcgaacggcgcgttcgttttgagcattgacaccgatttcgacggttgcatgaagttaatccgggaagttaccgccgagctaccaatttaccttgccaattcattgaacagtttaagactcgaagggcagaaaacggctgcgattgagattttacagcagtttgattgggaagttccagattgggttattgttcctggtggtaatttgggtaatatttatgctttttacaaagggtttaaaatgtgtcaagaactagggcttgttgataggatacctagattggtttgtgcccaagcagccaatgccaatccactttatctgtattataaatctgagtggaatgagttcaaggcagtcaaggcaaatactacatttgcctcagctattcaaattggtgaccctgtttctattgatagagccgtgtatgctttgaaaaattcaaatggga

SEQ ID NO: 11545 - DNA, 421 bp, Gossypium hirsutum
  Clone ID: GOSHI-09MAY01-C31177_2
gcgaccggtcgcttattgcatctcatccctacaagtttttttgggttacctattatgaacttaaatggaatgtaaatagatattaatggccccgactagtataaattgatttacttgtataaagcccaatacttgcttttgtgttttttacttagttttttgcacttaaatctcttttgatggcagatgctattcgattattatcatcgccgtcgtcttctttaattcattcgctgcgtttctcttcgccttcactgctcaccactttccacttcgcttcgaattatccactatcgtctcttggaccaaccaatcagaatgcggataagattttttcttattcttcttctattgggcttgctccccttgctctgattcccagaaaaccatcgctctctttcaaggtgcttgcaacagtcga

SEQ ID NO: 11546 - DNA, 686 bp, Gossypium hirsutum
  Clone ID: GOSHI-09MAY01-C31177_1
tccacgcgtccgctcttacctgttgctcggggcggattttatataagccttactgtgtttttccgggctacctattatgaagttaaataaaaaataaatagatattaataaccccactttgatggcagatgctattcgattattatcatcgccgtcgtcgtctttaattcattcgctgcgcttctcttcgccttcactgctcaccactttccacttcgcttcgaattctccactatcgtctcttggaccaaccaatcagaattcggataagattttttcttattcttcttctattggtcttgctccgcttgctctgattcccagaaaaccatcgctctctttcaaggtgcatgcaacagtcgaagaaactgagcagccaaaatggtgggaaaggaatgcgggaccaaatatgattgatattcattctacaaaagaatttatcagtgccttaagtgaagctggggatagattagttattggagaattttatggaacttggtgtgcttcctgcagagcattatttcccaagctctgcagaacggcgcaagaacatccggaaattatattcctcaaagtaaattttgatgagaataaacctatgtgtaaaagtttgaatgttaaggtgcttccttatttccacttctatcgcggagcagacggacagctagagtcctttttttgttcac

SEQ ID NO: 11547 - DNA, 435 bp, Gossypium hirsutum
  Clone ID: GOSHI-09MAY01-C31117_1
cttctctacattccctccaaaactttctatcaactgaaaacaaccgtaacaacgcacgacagtcgcggccattccacccttatccaccgctacatcggttaccgacctctccgttttggatagcaccactgttgctctcataggtggaggttcagtcgctgccttagcagcggttctctccttcactgacccggaacgccgacgtcgtcttcaggcggaaggtggccgggcgcgcgggaaggaagtcgttaggaattacttcaatagttccggtttccaaaggtggaagaagatttatggagagaccgatgatgtgaataaagtccagcttgatattaggttagggcattccaaaacccctgaaaatgtgatgaaaatgttgaccgatgatggctcactgaatggcgtcactgtttgcgatgctggctgtggcac

SEQ ID NO: 11548 - DNA, 564 bp, Gossypium hirsutum
  Clone ID: GOSHI-09MAY01-C31057_1
cgtcgttttacttgctttcaaactgggtgtgccagatgaatattttggggatgcaaaattccatggtttctaagttggacaaagtccttgtggacactgatgcagcatttgaagtcgttatttcatcttgtggtgagcaagggcatactccagcaataatgttgagtgcaggtttcaagcctcagacagaacctcatttacgaggaatgttgacttgtgtgagagcatctcaactttggggccttagggaaaaatctaggatttttattcattcaggcagatggttaatgggcgttttggatgaactaggtgtacttgaacaaggtcagtgctttatccaagtgtcaaatccatctctacaaaactgcttcctcaaacatggttctaggtttgctgaaacaaagaaaaattttgaagtaattaaggggctggttgtcatagctaagaatccttgtcttcaccctggagatataagaattctagaagcagttgatgcccctggtttacaccatttgtatgactgtctggtcttccctcaaaaggtgagagaccccatacgaatga

SEQ ID NO: 11549 - DNA, 544 bp, Gossypium hirsutum
  Clone ID: GOSHI-09MAY01-C31077_1
cccacgcgtccggacatccttgactgtagatggaattttttacgttattgatactggttttggtaaaatgaaagtctataaccctaagatgggtatggatgctcttcaagttttccctgttagtcgtgctgctgctgaccagcgcgcaggtcgtgctggtagaactgggccaggcacatgttataggttgtatacagagagtgcatacttaaatgagatgctgccagctcctgtgcccgagatacaaaggaccaaccttggcaatgtggtgttgctgctcaagtctcttaaaatagagaacttgctagattttgatttcatggatccaccaccacaggaaaatatccttaattctatgtaccagctatgggtcctgggtgcgcttaataatgttgggggcttgactgacattggatggaaaatggtggagttcccattggatccgccgcttgccaagatgcttttgatgggtgaacagctagaatgcttagatgaggttttgaccattgtttcaatgctttcagttccatctgtattttttcga

SEQ ID NO: 11550 - DNA, 428 bp, Gossypium hirsutum
  Clone ID: GOSHI-09MAY01-C31027_1
tcgcccacgcgttcgcccacgcgtccgcaacatcagtatacccatcagattagcttagcagtagcgggttcatggctctccaagcagcttcattgctcccacccaccatctccattcacaaagaggccaaatccaatgcttgtcttaaagagacaactctgtttggtgttccattttcaacccatttcagctttcctcttcatttaactcaggaactcaggaaaaagggagtagctgccggaattgttcgagcacaaacagctgctacaacaccggcagtcgatcgggctgctccacaagggaagaagaccttgagaaagggtactgtgataataaccggtgcgtcgtccggtttaggcctagcgacggccaagggctcttgccgagacaggggaatggcatgtaatcatggcgtgtagaaattttct

SEQ ID NO: 11551 - DNA, 289 bp, Gossypium hirsutum
  Clone ID: GOSHI-09MAY01-C31267_1
cataggcttactgccatggagcttctaagagtcccttttcttcacatcgatgattatgggtgggatttgagactaattgagtaccaaagggacagctatgacgctggacctctcatgagacaacctctttatgatgttcatgttagtaacaagagttctttggtcaatggatacagcaattatctcggttatggacatgagagcaatatcggctataactcgcatgaatacgaaacaagtgaattacatctcgaagatggtcatttgggagatgttggaccttttattc

SEQ ID NO: 11552 - DNA, 367 bp, Gossypium hirsutum
  Clone ID: GOSHI-09MAY01-C32917_1
caaagccatggggagttgagtctgcaaggagtgcttacgccaagctaggtgacgatgccactgctcagttgctggacataaggcctctcaaggagtctagagatgttggtagccctgacattaagggatttgggaagaaaccggtgtcaattgcctacaatggtgaagataaaccagggttcttgacaaaactgtctttgaaattcaaggaacctgaaaatactaccttattcattatggacaaatttgatgggaattccgaactggttgcggagttggtcactgcaaatggattcaaagctgcttatgcagtcaaagatggtgctgaaggaccacggggatgggtgaacagtggtcttcctggata

SEQ ID NO: 11553 - DNA, 1213 bp, Gossypium hirsutum
  Clone ID: GOSHI-09MAY01-C32597_1
ggaaaaacaacgctggaaatgaaattttattgagaaaaagaaaagagagagagttattgagattgaagaattttgttcttcttgaggatggtttgtttgagtcgagtgttgacgatttcttgtacggtaaagccttcgcctccatacaagcctccttctttgagctctagatttgttcatacgaaatgcgaattgaaatcgagttggcgatctatggctaccgagccggattcatcttcctccgcgccgtctgttgaatccgattctcccgccgataaaactgccgccggattttgcatcatagaagggcctgaaacagtccaggatttcgctaagatggaactgcaagaaattgaggataatattcgaagtcggcgtaacaaaatctttctccaaatggaagaggttcggaggctaaggatacaacagagaattaaaagtgctgaactaggtatttccaaggaagagcaagaaagtgaacttcctaattttccatcattcatcccattcctgcctccattgacctcagcaaatctcaaggtttattatgtgacttgttattctcttattgctggaattattatttttggtggacttctagcacccactctggagcttgagctaggactggggggcacatcatatgcagatttcatccgtagtgtacatctgccaatgcagttgagtcaggttgatcctatagtggcatccttctctggaggagcagtaggggttatctcagccttgatggtagtcgaaataaacaatgttaaacagcaagagcataaacgatgcaagtattgtcttggaacaggatatcttgcttgtgctcgctgctcaagtaccggatcacttgttcttactgaaccagtctcgacactaaatggtggagaccgtcctttatcaacccccagaacggaaagatgttcaaactgtttgggatccggaaaggtgatgtgccctacgtgtctttgcaccggaatggcaatggcaagcgaacacgacccacgaattgatccatttgattagaggtgacattctcattctctttattattggttttcaaatgtagatacaaacaagataacccatcctttatatatatacaaacatcctaatagttttcccttgctgcaacaaaaatcgtatttgtatttgtactattttccaaaataatcctgtttttgaaatgaaaaacttcaatcctcctttc

SEQ ID NO: 11554 - DNA, 556 bp, Gossypium hirsutum
  Clone ID: GOSHI-09MAY01-C32557_1
cccacgcgttcgcccacgcgtccgcccacgcgtccgcccacgcgtccggtgttagtcaagtaggatcaagggcgctggagcatggtatgacaaataaactaacaagaccttcgaaactgctggatgtatcttctgactttgcacttacttacaaggacaaagagggtgactggatgcttgttggagatgttccttgggagctgttcgttatttccgtgaagaggcttagaatcatgaggacatcagaggcaaccggattggctccaatgttacaaggaaggaaccagaggcaaagaagcaagcccaactagaatactattctctcaaagccgaccataacacgaataagacatgctatccaaagcagaaaagaaatacaacatagttaaaagcattttgactttagcaaagtttgaacccttcgagctcttctgtttgctcgtattatctgatcacatgctaggaatagtcaccataggttttcaaagtctttagtttctcaatgcaacatttatctctgaaatcaactattcaaacataaagggtggtccacttc

SEQ ID NO: 11555 - DNA, 448 bp, Gossypium hirsutum
  Clone ID: GOSHI-09MAY01-C32537_1
cccacgcgtccgatcatcaactcggtgctgtaatctctgtttctcagctcactgaatctaatggctttcactcattatttgtttgcagttccaatggacacttcaattcaccccaaaatttcaattcccccttcgttttgttccactgaatccccatcttccttacctttcccttctttttcttccccttttcctccattgtctaaagctcgaaatctctctattttccccagaatcaacagagtgggacacaaagcaaaagctgagcctcgagaatctgaagtgaatatagaagctgatgcgttttctcatttcaagcatttgcttcttccaataactgatagaaatccttatctttctgaaggaactagacaggctgctgcaactactgctgctttggctgagaagaatggagctgcaattactgtcgtggttattgatgaaaagc

SEQ ID NO: 11556 - DNA, 401 bp, Gossypium hirsutum
  Clone ID: LIB3145-052-Q1-K1-B8
gttttgttccattgaatccccatcttccttacccttcccatctttttcttccccttttcctacattgtctaaagctcgaaccagaatcaacagagtgggacacaaagcaaaagctgagcctcgagaatctgaagtgaatatagaagctgatgcgttttctcatttcaagcatttgctgcttccaataactgatagaaatccttatctttctgaaggaactagacaggctgctgcaactactgctgctttggcaaagaagaatggagctgacattactgttgtggttatcgatgaaaagcagaaagagtcattaccggagcatgaaactcaattggcaagtgttcgctggcatctctctgaaagtggatttaaggaattcaagttggtggagcgactcgggg

SEQ ID NO: 11557 - DNA, 781 bp, Gossypium hirsutum
  Clone ID: GOSHI-09MAY01-C32747_1
caccaacaaaaactcaccaaaatgaactctaaacactcatttaactgttaacagcactcaacaatggcgaccacccttttcttcctcctatttttcacccccttcctctactccgccaccgcaccaaatcataatgcaccgcaagatctggtccgttcatcatgcatcaacgccagctacccctcactctgcctccgcacactatcatcctactctggccccaccggcaccccacgcgacttagcccaagccgccgttaaagtcagcctcgcccgcgcccgcaaagcttcgacctacttaaaaaccagcctcacggggaaaagcgaaagggaacgagcggctctaagcgactgcgtggaacaaatggctgagtcggtggatgagttaagcaaaacgttgagtgagttgaagcatttgagaggcgaaacgttcgagttccagatgagtaatgcacggacgtgggtgagtgcggcgctgacgtatgaggacacgtgtattgatgggttcgaaggggttgatcggaaggtgaaaggtgatgtgaagaagaagatcacaaatgtggctatggttacaagtaatgctttgtatctgattcgtaggcttgacgaaagtggtggtctgaaccgttgatcatgatgaattggacggttgtgattttatctggcttattgatggttatcgtggtcttttttttttttatcttatttccggagaagttgtatgtaactgtaatgtaatattattttcggtggtaaatacattcaatactttttctcctggt

SEQ ID NO: 11558 - DNA, 684 bp, Gossypium hirsutum
  Clone ID: GOSHI-09MAY01-C32137_1
tcgagcaacacataatagtcaaattagcgagcaagatgagtaagggtacgaagagagcagttctggtgggatgcaactaccccaagacccaattcagcttgcatggatgcatcaatgatgtgaaagccataagaggtgtgatcctggacattgggtttaaggaaagcgatgttaatgtcctcaccgatgcgccagggtcgccggttctgcctacgggtgtaaacattaaggatgcactcaatagaatggtgaacaaggctaaagcaggagatattctatttttctacttcagtggacatggaacacgcgttccaatctttcaacctggccagcctttcaagcaagatgaagcaatcgtggcttgtgatttaaatcttgtcaccgatgtggacttcagacgtttagttaatcggctaccagaaggagcaagcttcacaatcctatcagattcgtgccacagtgggggtctcattgaaaaagagaaagaacaatttggtggtcagcatatgacgacaacagtaaataccgacaagcctaaaccgtctaaggctaaggctaagagtcttacttttgatatcatacatagtgcgatagatacagcagcaggcatcctacacgacgcagcaaatgttggccaaaagattttcggaatcttcgggaaagatgtagtctcaaattccaccc

SEQ ID NO: 11559 - DNA, 651 bp, Gossypium hirsutum
  Clone ID: GOSHI-09MAY01-C32027_1
ctctttcattcaatacccaccctctgatcattaccggaagccctcttgtactacccgcgggcccaaccttggttactctccctccctctccctctttttcaagttcaacacttttcaactggttcggttttgtaagtaagagggaaggaaaggaagaagagttttctttttatttatgattttcctgtatttgtttgtaattattaaaacttagattcagatgacagttttttccacttatagaagttaaagcttcttcagatctatgaagaaaattcccactgattttcttcctttattttctttgctccgttaaactgtagtgtaaattctatttctttgggtttttgaagatgatccttgaaaagaatccatttttctctttcattttcactccaaaaatatctctgtttttctcgagagaattcgagttccttttcactctctttcacttgggttcttgagagagatttcgaaacattttaaagaaaaaaaactttcctttttttttttgaatctcctcaccccactatgggtcttagttaaaatcttcagatctggtcttcattcttctagttttttcttatcaaaggtgtcttcctttttctcttggggagttaccttgagaaaaaacaataaacatgaattatt

SEQ ID NO: 11560 - DNA, 617 bp, Gossypium hirsutum
  Clone ID: GOSHI-09MAY01-C32287_1
cggacgcgtgggatttcagattattgggaaatcaatggaagcagaggtgataaaagcagagttggtattgccaacgcatatgagtttcaagaggattcaaatgtatgagaaatacccaaagggccaatcgaaagtgagatggaaacagctcaagcaaatccttcaagctgaaaattgccagaattactctcctgatgaacccaattatgttaatatcgaatcaccgccttcgatgcaaccgtgcaaaagaatttgtgatataacgggatttgaggcaccgtaccacgatccgaggacgaatctccgctatgcaaatgccgatgttttcaagcttgtgagatctcttcccaatgagtatgtgcaaaggtatctagctctaaggaaagcggcagtggttttgaggtgaagtttgcaaacctggggacagactctggtcttggatcgaacatttagtttacaattagatcagtctttacttatatgaatcatcatagagattctcatgatgtttaatctacaattagatcacgtcttttgttccgttttcatccctagaaacctctgcaaagctgaaattcgttggatagctttagggttagttgtagcataagctaaac

SEQ ID NO: 11561 - DNA, 373 bp, Gossypium hirsutum
  Clone ID: GOSHI-09MAY01-C33997_1
tgcatatctagttatatgtatatgaattttttctacttttcgcttatcttgtctgttctttattttatagtcttagggtgttctcatttttttcttcgctgtttattactggcagttttaactttaggatgcttgcgtgttgatgttcatggataggcttagaatagttgcctttaaggttttcaatagtgcagccgcctcacaccatagggaggcagaatgtcttcttttttggtttattgtggagccttagcttatatgttttgaacaattgtaaacagaaattgtttcccttttataacttgctctagagcttgcttcttgcaaaaaaagccacgtgtcgattgttttctataaaatatttataaaatat

SEQ ID NO: 11562 - DNA, 843 bp, Gossypium hirsutum
  Clone ID: GOSHI-09MAY01-C33927_1
aagtaaaagatcactagaagcttgtgaacttcccattaattcaagtacaacaaaaagcacaaacatggccactactcaactaggtggtacgatctttattaacatgactacagttaaaccggcggtggctgtgaactcctgtaccggctgggtcatggggatgggtcaatggcatcgccattgacatcagctctagtgaaattcttgaggggtgtcccagctttaggtttcccgaggaatggaaacagacctccgcagcatggtcctccatgcccgagacatgggggtggtttaaagaagggaagtggcaaaccaaataaaggaaggccccaaagaccaaggaggccctggggattgtaaacttggtctttcagtggcatatcccttgctccttcagtcaggataatggccataagaaagaggagtgttgttgccttggccattttccccgtgttactcactgttcctggggtgccttgttccattccgaacccgttttatagtgaaattctgacgttctgcttactctttttgagaggtatatttgctgcattatgcaacggaaagattggttcttttggaatgggttatccattgttcatgcctggcggccctgctgattatctatcttacccaattttaaatcaatgttaagagaatagatatattttgatattatatttttaattttttaaaacaatttaaatatatatactcattttttgaatataagtgtaaaaaacatgaatacttgaaacataaaaaatagaacaaatgtttgtttcaaaaaaattgggcatactggttctattgggacatcaagatcaaattattcaaaaaaga

SEQ ID NO: 11563 - DNA, 436 bp, Gossypium hirsutum
  Clone ID: GOSHI-09MAY01-C33887_1
cccactcgtccgcttgccaactgtgatttctcccagtgtttatattaaaagattcagaaagttccggtcaacgtactttttgagtgtccctgatcactggtgttcacagggatcctctgacccttgccaactattgtggcactccaaatgatgcctcgtctcaacccgagtccctaaatggtatttctgcctagttcttgtattccttgtttcccatttattctttgaatcagccctcattttttatagccagttgaaaaatgctgtgtgtatatatatacccaaccccattataatgcaatttttagcaaatttgtggggatagtttcaactagcattcgtcttatgttcataattttgtatggtcgagtgagaatgtaaagacccgatgttattggaagattggtaatgtaaaatcaatttaaagtttcagctt

SEQ ID NO: 11564 - DNA, 458 bp, Gossypium hirsutum
  Clone ID: GOSHI-09MAY01-C33867_1
gacccacgcgtacggcacagaaattgcttgaactacacttggcttttggttttagaaaatacttcatttgcttcggaggtaagcggcaaggcagccatgttgctttgattcaagaagggaaggacctggttaactatgcattgattaatgccgtggcgattcgtaaaatactgaaaaaatacgataaggttcatttctccaaacaagggcaagctttcaagtcacaagcacaaagtatgcacattgaaatccttcaatcgccgtggctatgcgagcttatggctttccatattaatttgagggaaaccaaggtgaaatcagggatgacccttgcatcgtttgaaggatgttacctcacatttaatgatgggaaaccattcctttcttgtgaactctttgattctgtcaagcttgatattgacttgacttgttctatatgcttggacacagtatttgat

SEQ ID NO: 11565 - DNA, 1101 bp, Gossypium hirsutum
  Clone ID: GOSHI-09MAY01-C33547_2
cccacgcgcccgcttttaaattttattcaaattttgtttttaggtcaaataatcaatcgattggaggaaaaataaataaacaaaagaaatgtcgaaatcggtgatcgaaacgcctccgaagggcggttttagcttcgatctttgtaaaagaaacgagatgcttgcaaagaaaggcgctaatccgccttcgtttcggaaaactggtaccacaattgttggcttgattttccaggatggtgttattcttggagcagacacgagagcaactggagggcctatagtttgtgataagaattgtgagaaaattcattacatggcaccaaacatttattgctgtggagctggaaccgctgctgacacagaggcagtgactgacatggtcagctcacagctccaattacatcgctatcatactggtagagagtctagggttgttacagcattgacccttctcaagagacaccttttcaactatcaaggctatgtttcggctgctctggtacttggtggtgttgatgtcaccggaccccatttacatactatatacccccatggatctactgacacgttgccatttgctacgatgggttctggttctctggcagcaatggcagtttttgaatcaaattacagagaaggccttaccagagatgaaggaataaaacttgtaactgaggccatatgctctggtatcttcaatgacctaggaagtggaagcaatgtcgatatttgtgtaattaccaagggcggcaaagaatacttgaggaaccatcttcaacctaaccctcgcacttacaccagttccaagggctattcgtttccaaagaagacagaggtcctcttgacaaaaatcacgccattgaaggagaaagttgagatcatcgaaggaggaggagatgtgatggaagagtgacacgcttatttatgttactacatcatctttataccctcacttatgctctgtcaaagaagtgttaatcagtagttttctgaaattgtttgttttcacctaagattttgttggcttatgaatcttttgaggtgtttttgacattttagttaaatgattcaaatggaaacgttagtagtgaatttcagagc

SEQ ID NO: 11566 - DNA, 1135 bp, Gossypium hirsutum
  Clone ID: GOSHI-09MAY01-C33547_1
ccggctccgtttgcattctctctcagctttccggtcgaagaatcattcaatttaaggggaaaaagaaaaaaaaataccaaacatgtcgaaatcggtgattgaaacgcctccaaagggtgggtttagcttcgatctttgtaaaagaaacgagatgctttcaaagaaaggcgttaatccgccgtcatttcgtaaaacgggtaccacaattgtcggcttgatcttccaggatggtgtaattcttggagcagacactagagcaactgaaggacctatagtttgcgataaaaattgtgaaaaaattcattacatggccccgaacatttactgttgtggagctggaactgctgctgacacagaggctgtaactgacatggtcagttcacagctccagttacaccgctatcatactggtagagagtccagggttgtgacagcattgacccttctcaagagacaccttttcaactaccaaggctatgtttctgctgctttggtacttggtggtgtagatgtcactgggcctcatttgcatactatatatccccatgggtcaactgacacattgccatttgctacaatgggttctggttccctggcagcaatggctgtatttgaatcaaaatacagggaaggccttactagaaacgaaggaatagaacttgtcactgaggctatatgctctggtatcttcaatgacctcggtagtggaagcaatgttgatatttgtgtaataactaagggtggcaaagaatacttgaggaaccatctacaacctaatcctcgaacttacaccagctccaaaggctattcttttcccaagaagacagaggtcctcttgacaaaaatcataccccttaaggagaaagtggagatcatcgaaggaggcgacgccatggaagaatgaagcacttacgcaactgatgattagtatatcaactctctagcgttcatttatgctctatcaaagaactattttctgatcagtattgtgcaattgctcatctgtttgaccaaagattttgttggtaatcaaaccttttgagtttgttttaacattgcagtaatggtaatttaccctcaaaaaccttcattctatgcctaatatttcaatacataaaattccggattgtcattt

SEQ ID NO: 11567 - DNA, 565 bp, Gossypium hirsutum
  Clone ID: LIB3582-028-P1-K1-G11
tttaaattttattcaaattttatttttaggtcaaataatcaatcgatttgaggaaaaaaaataaacaaaagaaatgtcgaaatcggtgatcgaaacgcctccgaagggcggatttagcttcgatctttgtaaaagaaacgagatgcttgcaaagaaaggcgctaatccgccttcgtttcggaaaactggtaccacaattgttggcttgattttccaggtactattttggggaaaattgaattctgggctttaatctttgtgctcgttttacttgtatttagtgtactatttatatattcaatttgggtttttgattggttgatactgggcagtttaaactctttgttttcgattttattgttggtttttagatttaagagtagaaaggaagaattatactaatgaatcaatgttatagaaataaagaagctaaattttagaatgtcattagtcattaaccagttgttgattcttccaagagtgttatgtaaaggctgaagttggaaaaagttggttaaagtagtagtctttaagattttgctcaagtgactgctttcacgatttg

SEQ ID NO: 11568 - DNA, 702 bp, Gossypium hirsutum
  Clone ID: GOSHI-09MAY01-C33727_1
cccacgcgtccgggcctgggtgcatatctcggtataatgggatctcgacgagatgttgtgactgctgtgtggaagactggtcttgatccggtttggtacaagtgcatgagatgtttgcgacaaacttcagcttttgcttcggctgattcgacccaccaacctagtcaaaatgaacgggtgagttggtggatcagtcgttgggcctatggatgtccgatgtgcggcggaccttgggttcgagttgtatagaagccgccagggtgaatgtcgattatgtatttgttgtcaggggctcacttcggttcctcttttcgatgtacgggtatgtactttttggaagctttacaagttgctgcaggtttaaagcttaaacataggaaacaaatgattggcttttttaacactagaacctgtttctgtataaaatttgttgataaaataatttgttaggttacttttttattttaaccaacgttaactaagaacattgatttttaagggggtgagaaatgagaagaatatgggtaggtgtaatagtttccttttgttctagatgattgtagttgtaagacaggtacactgtgtgtggttgtcgagctgtgggctggtctaatttcatattgtacttttcttgtcaatatatgggtaggtgtaatagtttccttttgtttctgtttttattgaattttagtattggattct

SEQ ID NO: 11569 - DNA, 391 bp, Gossypium hirsutum
  Clone ID: LIB3135-008-Q1-K1-B12
ttttattttaacaaacgttaactaagaacattgatttttaagggggtgagaaatgagaatgatatgggtaggtgtaatagtttccttttgttctagatgattgtagttgtaagacaggtagacattgtatgaatgtagagcagtgttcaggtcttattaaattttacactataataactaattattttttatcttttttcataaaaactttgatagttgttttatttacctttatgagattattttttttttttattatttttttagattatttttgtttttttctctttttttatctaaatattattttttttttcttttttttttatctattttacttttttttttttgtgttatttttttatatcacccattttttgttttttttttt

SEQ ID NO: 11570 - DNA, 563 bp, Gossypium hirsutum
  Clone ID: GOSHI-09MAY01-C33667_2
acaatctgaaggatcttattataacattggctcgcctggaactaatgataattctgggatatctgtcaatacaaagaagtatcatagcttaccatccatatcagggctctctgttcctcatcgggacctcgcctgcgccgagaagaatgctccatgggacacttccaatggatatgggccggctgctggtcagcctatgttttcgatatgccgggtcaaggaccacagttccattggtctttgatgagctttctcaaccaaagggctatcaagatgcttttccagtacagttgagttcaagtccaggcagtggatccctttggtctcgacaaccttttgaacagtttggtgtagctgagaagaaacgaactgctggtagtgaagtacctggaagtgggttgaactcaatgtcatgggatacagcttctggcatggatttagagtccaagcttcttcaatctttccgacattgtatagtaaagctcttgaaattagacgggtccgactggttatttagacaaaatgatggagccgacgaggatttaatcgatccgtgtagctgc

SEQ ID NO: 11571 - DNA, 956 bp, Gossypium hirsutum
  Clone ID: GOSHI-09MAY01-C33667_1
gtttggtgtatctgagaagaaacaaactcccgcgcgtccgcccccgcgtccggggttgaactcgatgtcatgggatacggcttccggcatggatgtagaggccaagcttcttcaatctttccgacattgtatagtaaagctcttgaaattagacgggtccgactggttatttagacaaaatgatggagccgacgaggatttaatcgatcgtgtagccgcaagggagaggtttctttacgatgctgaagctaaacagatgaaccaggctctttgtacgggtgaatctcaatactcatctccagaaaggaagtacggttcaacactgaagagcaacgaggcaagtctcgccaacattttaatttcatctgttcctcagtgtggcgagggctgcatttggaaagccgatttaataataagctttggagtatggtgcattcatcggatccttgatctttcgctgatggaaagccgacccgagctgtggggaaaatacacttatgatcttaatcgtctccagggtatcatagatccggcattttcgaaacctcgttccccaatgttaccctgcttctgccttcaaatcccggcggattaccagcaaagatcgagtcctccagtttcaaacggaatgttgcccccaaccgcgaaacctggccggggcaagtgtacgaatgcagccacgctcttggatataatcaaggacgtggagatcgctatttcttgccggaaaggtcgatcgggcactgctgccggcgacgtagctttcccgaggggaaaagagaacttggcttctgttcttaaacgctacaaacgcagattgtccattctagttggcacacatgaaggcctcggttcacacaaggtcctgacatcagctcctctgtcggcttcttatggatcatagcttccgttctagtactactcactctgattcactagttgcaagctgttctgtt

SEQ ID NO: 11572 - DNA, 440 bp, Gossypium hirsutum
  Clone ID: GOSHI-09MAY01-C33637_1
tcgcccacgcgtccgcctggaaccactctgctgccgctgcccttcgggcacaccttcggcgcttaccagtcacctacgctcttgcagcatgcccccttcgggcaatactactttcgtaatacgcgaagcagctgagcgatagctcttcgatcgctatattctcgcgatggcgggggagcgaagatcttcgcgagacggcccatgaatcaatctcgagaatcgagcatggggcttgtagaccctaccgcattccggccccggggccttcaattgggcctttctctcttctcttttaccagggagtggggagcttccctgctagggaggtacctcttggattcggagtttggtccaacatctgccacacgtgagatcctgatcgtctttctcccagcgttgatgcctgctgggggaaggaaacaaaaaagcacataagctta

SEQ ID NO: 11573 - DNA, 713 bp, Gossypium hirsutum
  Clone ID: GOSHI-09MAY01-C33197_1
tcgcccacgcgtccgcccacgcgtaagctttttcccaaatagccatggctatggcgatggcgggaactgcaaccttcagtatctcatcagctacttcaatcttccggacttcatcttcacttaaattctcttcaaaaccagtgcttattccaatgcgtttttctccaaaaacccaatctcctcccagaactctccggatttacgctttgactagtaacgatatcaaagtgggtactaaccttgaagttgacggtgctccttggcgaattttggagtttcttcatgtgaaacctggaaaaggggctgcatttgtgaggaccaaaatgcgcaattatatcactggaaacactgtggagaaaacgtttcgagctggaagtacgattgaggaggcaaacgttttcaaggaatcgaagcagttcacatacaaagatggttcccagtttgtcttcatggacctgaacacattcgaagaatcccgtctaaatgaggcagatgtaggtgacaagacgaagtggttgaaagagggaatggactgcaatttgctcttctggaacggaaagattattgattttgggccccccatcacggttcagcttactgtggtcgacgtcgatccagtctcaaaggtgacactgcttcaagtggatcgaacctgcaactgttgatacaggcgcagtggttaatgttccgctattcgtaaacattggtgatga

SEQ ID NO: 11574 - DNA, 467 bp, Gossypium hirsutum
  Clone ID: GOSHI-09MAY01-C33057_1
ggtgattctgcacgagaattttggtttcaaacacctcctaagatcggtccagatgttccttacaaatttggaatcattggtgatttgggtcagacatataattcactgtccacccttgagcattacatgcagagtggagcacaaactgtcttgtttgtaggagatctttcttatgctgatagatatcagtataatgatgttggtataagatgggattcatggggtcgctttgttgagaaaagtactgcatatcatccttggatctggtctgctgggaatcatgaaatagaatacatgccttacatggatgaagttgtcccttttaagtcctatctccaacggtaccctacacctcatttgtcttgtaaaagcagcagcccaatgtggtatgctattagacgtgcatctgctcatatcattggctatcgagctactctccatttgtgaaatacacacctcaatatgag

SEQ ID NO: 11575 - DNA, 789 bp, Gossypium hirsutum
  Clone ID: GOSHI-09MAY01-C33077_1
ccggtcgacccactgcctgcgccagccctacagacccttttctcgttgtttcactcatgcgcttcgaaaatccattaccagcgaaccatatagagcatcagtggcggtggtgtgcagcgttggttgcggctgtggtagcgtcagttttcaacggtgcgagtctttaatgctctcgaatcctacatcttcaaaaccgagaacgtccaacatctttgcaacgacgccggcgccctcatctatgcccgttggcggtggcagtctccaatcattgcaaccagaacgatcatcgtcaaagaacaaacgcatggggattccgtacgagaaaatggacggctggatgagaagattcagtggctgagattgtaaaaaagttacccgaatcgccactcttgatccacgtctactctgaaaacgccacgatggaaacaacggcggtggaagaaaactgggtttcgatgaaacagaagtggcagaaaggggaaagagctatgcccgatggggtgatatttgttgatcaaatacaaggagttgaagaaggaacatggggcattgtggttcaaagtaaaagtgaagaagaagatgatgggtgtggatcaggaccaggatcagaaccagtaccgccagcttgctatctgttgaagacgactagtgaagtgggttcagggttggggttaaggtgcacccatttttgtttggtgaaggttagtagttttagagaaagtgctttctcacagctcaagaattgttggcttttgcagggaaattgaagaccttgtggggggaattgaa

SEQ ID NO: 11576 - DNA, 445 bp, Gossypium hirsutum
  Clone ID: GOSHI-09MAY01-C33377_1
aagtacgcgtgcgcagacacgtgggcgagcaggtcatgctgcgtttggtcctttggaagggggcatgttggcaggaagtatttctccccttttagatacctacaaaccaattcgcactgcatctacaaggttcagcggtgcttaccccaaaaatatcgacactttgaagatggagccattgtcccgtagctataatatatactctaaactatccattttcaataccaaacggttggtgaatgctcctatatccacacttggcggtgctgcgttgtctctccgttatgcaaacttgattattttgatagagaaactactttcatcgcctcacttcatcactctcgatgcatgagacgacctatacactatgctacctacacactatgagaaatgctcttcctgttaaactgaacacctccgcatagtctttatctttatcaatata

SEQ ID NO: 11577 - DNA, 661 bp, Gossypium hirsutum
  Clone ID: GOSHI-09MAY01-C33327_1
ctccaggcttaaggcaacagggagacaagcttgaaagccacacttgcacacgacacttgctcgtttctttctgacttggtgctttcagtccgtcctgtcgaaatttatttttcacttcttttgtttgtgtaagccttcaagccaagtgaaaatggagagcgtttttcactgatttgattggtggatcgggtctggttcttgctttagtttttttcttgcgcacttgaccatgggatggttgagtgccctattagagaaggccgatggatagacccaatatctatcagtactcgcgatctggggagtacctaggcaacttataaggcctctacattgagggaaaacctgctctacgtgaaaaaaaaagggaagttaacttttgcataacctctgttttattttccttgggcattggaacaatcacaagtgcaggaaataactggttgatataagaagatctctgaccatatggtcttaagttgagtatagtactcagcaacagtcatattcccctgactaagattgggactttctaatcaaacctggataatctaatagaaataaagggccgctctcaactaggcctaaactttggaaccacttgatccctatgcctttcctcattccttataaatggaaaagataattgctttgctttttt

SEQ ID NO: 11578 - DNA, 648 bp, Gossypium hirsutum
  Clone ID: GOSHI-09MAY01-C33267_1
cgtcgggactttcattcagatgtattctcaagacaaatctgctttgggcatgtcaaatggaaatcatctccatagaatgtattttaaaccacaagcaacaaaatctttctactccgattttgttgaaagcactgaacaacgagtatccatggacctgattaacagttattcttgcccagatgagttggttgatgttaaatgcaaaatttctaatgcatggggttcttcagttgaagcagtgggtgtcacccacagatgtagaactgaaatatgttgaaaattctagcatatcttctgcagaagagaaacttgtggatttgtcaaaccagtcggttgaaaatgtaaataattacacagggatggagggacctgaaaccatatcaactattgacacaatacctgaaactccaactgcagcatctagctccgtgaactttgataatgattcactatccagtgtgaaaactggtcttgatgattttctggctggggttaacaagtctgtcaactcttcgctagacaagggagagaatgctgtgaaaaacttattggaaaaaattacttcttctataacttctggtaagacgagtacttctgaagctgtagataatgctcaagttttagttaacaataagctttcaaacttgt

SEQ ID NO: 11579 - DNA, 406 bp, Gossypium hirsutum
  Clone ID: GOSHI-09MAY01-C28987_1
gcttcctgctgcaatcctgatatttctacctggatgcagaaccttgctccaattactcaatggagagctggttccatgtctatttttatatgttcttcaccaacttcatcccatccatcactcaacttctccggtaccaaatacctggaaaactcgtctctttcaatctccatatttgctgatttcaatctccccgttcctctttgggcttcaaaacccttaaccatcaactcaaaatcctcgaaattatttgctgaagcaaccatttcttgcctcacaatcaacgtcatcaaagatgttcttaactactgctcaaacaagaagaatccctcgattctattcccgaaactcgaatctatttcagctttcaaagacatcttctacctagcatctgtaacacttgcgc

SEQ ID NO: 11580 - DNA, 405 bp, Gossypium hirsutum
  Clone ID: GOSHI-09MAY01-C28957_1
ccacggtggagcaatgcggataaagctttgacaacgtgcaggaatggacctttaattgagtactcgaagaacagatgaaaagctgatcgtgcatcacctccatttctttccccccatttgcattttggggaggttagtgtccgaaaagtctttcatctcgtccgaatgaaccacgttttatgggctaatgaaggcaacaaagctgctgaagagagtgctaacttgtttctgaagtcgattggcttgagggaatactcaagatacttgagtcgtaaccatccttacagccatgaaaggcctcttctcggacatcttaagtccttcccttgggttgtcaatgatgggttatttcacggcatggagacatggaagaacacgttatccattgagggatgctggcatgag

SEQ ID NO: 11581 - DNA, 474 bp, Gossypium hirsutum
  Clone ID: GOSHI-09MAY01-C28977_1
aacaagcggaagccatggcaggtggtggaaataagagaagatcaaataacaacaagaataagaacagcggcagcggcagcaacagcaacagcagcagccaaaataaaacgaagagtggccgaggaagatccaaatcttcgtctactcgaatcaggaactctctttttgttgagggtggtcctttatccgattggcagttggattcccaaggaaggaataggtgctggaatcaatcgggaatcgaatttctgggttgggttctgatagggcaaaggcttctacttcaaagaatgggccatcaacaaagattggtggtagtgctataagatatgagtacccttctctcgatcttcaagatccagaatcagatattctggcccatgagggagataataaaaaggatgagctgcatcctattattttgctttcaaaggagagccaaatccttgcttacatggaccaaaccacaccttc

SEQ ID NO: 11582 - DNA, 632 bp, Gossypium hirsutum
  Clone ID: GOSHI-09MAY01-C28827_1
ctgattttgaagaagaacacttatttttaagatgaatgcttgttggagttcagcatccttcaaacaagattgattgtttagtttgtagttattgtttcaaatttattggatcaatagagaaacaaatagggcgaaaactgtatctgaaaacaataggaataggaaattcttcacgtaatggatgtcaaagcaattcatctgatgatgaagaagacaatcattatgttcaaaatcaccatagttctgaaaatggagcttctagcagttctggtagtactatgcctttgcctatgatggctgtcgagtcgctaatgaatggtgaattagcattgccttactccaacaagtttcccttaccttctgttgcttcatgccttggcggatgtgaagaagctttctattgtagtaaatcgtgtgcagaggctgattgggaatcgtctctttgcttactttgtactggggagaaatcagagtcttgttctagaacggcacttttaaaattcatacaacatgcccatgaaacaaatgatattttcctccttgctgccaaggcaatttctttcaccatattaaggcctggaagccaatatcaattggacataagagaaagtggtgggactgtattgccttgc

SEQ ID NO: 11583 - DNA, 453 bp, Gossypium hirsutum
  Clone ID: GOSHI-09MAY01-C28487_1
gcgtctagaatagggatcccggctgagaatggacgagctaatcggttatttggtcctgtctcctgcagtcgcgaacctctcctcgattcgtcatgttaacctcgagaacaactcatttcgcggaacgttacctaccgagctctttggtgcaactaggctgaagagcttggtagtttcaggtaattccttatacggaccgcttccgtcccaagtcgggaaccttaagaacctacaaacctttgatgtttcacggaatttattcaatggctccgtaccttcgtccatagttcaatgcaagaaattaactacacttgttctcagtcaaaattatttcaacggctcactccccgagggatttggaaacagtttggttagcctacagaagctcaatctttcttacaacagattcgacggttcaatccctggtgacattggaaacttgtcgaatttgca

SEQ ID NO: 11584 - DNA, 412 bp, Gossypium hirsutum
  Clone ID: GOSHI-09MAY01-C28467_1
agattctggttttgcttgcagggttgctcgagaacgccgaattggctttggattcactctccatttgcatgacgatatctggatgggtgtttatgatttcggtggggttcaatgccgcagcaagtgtaagagttgggaacgagctaggagcgggacatccaaaatcggcggcgttctcggtggtcatagtgacggtactttcattcataatctcggtggcggcggcaataataataatggttctacgtgatgtcattagctacgccttcacagagggtgaagtggtggcggaggctgtttcagatctctgtccgcttctagcattaacccttatccttaacggagttcagcctgttttgtccggggtggcacttgggtgtggatggcaaacttttgttgcatatgtcaacgt

SEQ ID NO: 11585 - DNA, 939 bp, Gossypium hirsutum
  Clone ID: GOSHI-09MAY01-C29797_2
ggccagccccatgtgcccatgggtttgacaacgatccgtccgccgcatccctaaaaagctctttcaccaggcctagtatacgacatctcgaccgaagaatacatcacattcttgtgctcactcggctacaccgtcgaccatgtcaagaccatagtgaaacgccccaacattacatgttcgacgaaattcaaggaccctggtgaactcaattacccatcgttttcagtcttgtttgggggcaaaagggttgttcgatacactcgtgaattaacaaacgtaggccctgcaaggtccatatacaaagtcacagtaaatggaccatcgacagtagggatctcagttaggcccaagacactcatctttagatccgtgggtgaaaagaagagatacacagtcacctttgtagctaaaagaggaacaagcccaatggctaaacctgaatttggttcaatagtatgggcaatgctcaaaaccaagttaaaagcccagtgtccttctcatggtcattgatgtgagagtgtcccacagtttatatataattctgggtattcttttggctcaatgaacctcacacgggacaagaaatctggtgcaaaaagggaccctcatccatggcggaaacctttttcattttgtggtttgtaatatttatttacatttggatttaagttaatgatggtataaaaatgatcaccttgttggctacacagatgcctttcaaatggagcccctccattgacaaagtacacttcaaggtcttttttataggcggattcgacaaaatagcacacaatacaaggaaaaaaagaaaaggggggacagatggacccctagcagatctttttcctctctttttctttttcaaatagtttcaatgttttttttcttcaggagaaaaattaaaaagcatagtttaattggaaagacccaagagcaaca

SEQ ID NO: 11586 - DNA, 1454 bp, Gossypium hirsutum
  Clone ID: GOSHI-09MAY01-C29797_1
cgctttacagcggtcgaggaatggggaaaaatccggttggtttggtttacagcaaaggtaacagctccggtagtaatttatgtttgaccggttcgctcgatccggctttggtacgtggcgggcgcgtgcgttgcgatagaggaacaaccgcccgagttgaaaaaggagccgtcgtgcgcgacgcaggcggcgtcgggatgatattagcgaacaccgaggctagcggtgaggaactggtggctgacagtcacttgttaccagccgtggcggttgggaggaaagtcggtgatttgatcagagaatacgcacggtccgatcccaatccaaccgccgcgcttgtcttcggtggtacggttttggatatcaaaccatcaccggttgttgcagcgtttagttcccggggacccaatatggtgacgccacagatcttgaaaccggacgtgattggacctggtgtcaacatattagctgcttggtcagaggctattggtcccactggtttggccaaggactcgaggaagaccatgttcaacatcatgtcaggtacatcaatgtcatgcccacacatcagtgggctagcagcgttgatcaaggctgctcatccagaatggagcccgagtgcaatcaaatcggctctaatgaccactgcctacacccaagacaacaccaactcgactcttagggatgcggcggacggatcgttgtcaaacccatgggcacatggggctggccacgtcgatccccaaaaagctctttcaccaggcctagtatacgacatctcgaccgaagaatacatcacattcttgtgctcactcggctacaccgtcgaccatgtcaagaccatagtgaaacgccccaacattacatgttcgacgaaattcaaggaccctggtgaactcaattacccatcgttttcagtcttgtttgggggcaaaagggttgttcgatacactcgtgaattaacaaacgtaggccctgcaaggtccatatacaaagtcacagtaaatggaccatcgacagtagggatctcagttaggcccaagacactcatctttagatccgtgggtgaaaagaagagatacacagtcccctttgtagctaaaagaggaacaagcccaatggctaaacctgaatttggttcaatagtatggggcaatgctcaaaaccaagttaaaagcccagtttccttctcatggtcattgatgtgagagtgtcccacagtttatatataattctgggtattctttccctcaatgaacctcacacaggacaagaaatctggtgcaaaaagggaccctcatccatggccgaaacctttttcattttgtggtttgtaatatttgtttacatttggatttaagttaatgatggtataaaaatgatcaccccgggggcgcttattattaaggtttaagcgccctatttccatggaattacttacctaataattcatg

SEQ ID NO: 11587 - DNA, 333 bp, Gossypium hirsutum
  Clone ID: LIB3149-016-Q1-K1-D9
cccacgcgtccgggtcccactggtttgtcttatgactcgaggaagaccatgttcaagatgatgtcttttacttccatgacggctatattcattgttatttgtgtgacatcacctcctttcaccacgcgcatcatctgcttgtctttatgtctagcagagcacatttcataacacaaccattggtttaaatatgcgtaggtacatcaatgtcatgtccacatatcagtgggctagcagcgttgatcaaggctgctcatccagaatggagcccaagtgcaatcaaatcggctctaatgaccactgcctacacccaagacaacaccaactcgactc

SEQ ID NO: 11588 - DNA, 386 bp, Gossypium hirsutum
  Clone ID: LIB3149-001-P1-K1-B6
ggttattgtaacaccattgaacatttcccatgttcaagcaacgatttattgctccaaaaagcatggcctagaaattagaactcgaagtggtggtcatgacttcgaaggtctttcctatgtctcccatgtcccatttgttgttatcgatttggttaatttgcgatcagtcgatgttgatgtcgaaaacgaagaggcgtgggttcaatcaggtgcaaccgtgggtgaagtatactacagaatcaatgaacgaagcacgaacctttccttcccagcacctgttttccgcactggatgaattggtgggtccattagcggtggatgcgtttgttcattggttcgaaattattgcctttccgctggttaacgtcattgatgctcatttggtc

SEQ ID NO: 11589 - DNA, 330 bp, Gossypium hirsutum
  Clone ID: LIB3048-015-Q1-L1-F2
cgatgtcgaaaacgaagaggtgtgggttcaatcaggtgcaatcgtgggtgaagtatactacagaatcaatgaaagaagcacgaaacttaccttcccaggggcttttggctacactgtaggaatgggtgggttcattagcggtggatgcgatggtttattgtcccgaacatacggtctcgccgctgataatgtaatcgatgcgcacgttggtcgatgctagtgggaaaagtctttattgaaaaaccattgggggagaattggtttgggccctttcaagaagccgaagttggaacctcgggaaccgtcttttatggaaaattaaacttggtc

SEQ ID NO: 11590 - DNA, 675 bp, Gossypium hirsutum
  Clone ID: GOSHI-09MAY01-C24977_1
cctacgtttccgaaaaaattccttttaaaaatttcccgacctactctaacctctcttaaaacacctccgtcgccgccagacaagcctctcgccaccacttccgacagtccgttttttggattttttgatttctgggtgaagtgcggaaagagttgctttcctaaagggtacagaaatcttaacacaaaggtgccagaactacctacaacatgtcaggcaggaaggaaacagtgttggatttggctaagtttgttgacaaaggtgttcaggtcaaactcaccggtggtagacaagtcacagggaccctaaaaggatacgaccagctactgaatcttgtcctggatgaagctgtagagtttcttcgagaccaggatgatccgttgaagactactgatcagactaggcgtcttggcttgatagtttgtaggggcacagcagtcatgctggtgtcacctaccgatggcacagatgagattgccaatcctttcatccagccagatggagcctgatctgatccgttttcaaaataggtggcatttcctttgctctactacttatatattctcttaacattttcaagtctgtatttctatgagcatgttggtatctctttgaaagctaccaaaaaaccaaaccatcaaggccttaaatcttaatatcacttggggtggaaaa

SEQ ID NO: 11591 - DNA, 443 bp, Gossypium hirsutum
  unsure (1)..(443): unsure at all n locations
  Clone ID: uC-gsflnu33B061c10b1
atatgtcaggcaggaaggaaacagtgttggatttggctaagtttgttgacaaaggtgttcaggtcaaactcaccggtggtagacaagtcacggggaccctaaaaggatacgaccagctactgaatcttgccctggatgaagcttaagatttttttagacacccagtgtccctctgaaaacactatgtccccttgtttttttttttgggggacaaaaaaaacccttgttttcttcccttgccccaacaaaaataaaaattttttttctccccaagggggcgggggggggcgggtttaaaaaagaaaaaaaaaaaaaattttgttcttcttttttttttttttagtaaaaaaaataaattntcaaaaatatagagggtgttttttttttggggggggggggccccccagaaacccacaaaccaccccannntaattttttttttt

SEQ ID NO: 11592 - DNA, 425 bp, Gossypium hirsutum
  Clone ID: LIB3272-008-P1-K1-A10
ggacctactctagcctctcttaaaacacctccgtcgccgccagacaagcctctcggcaccacttccgacagtccgttttttggattttttgatttctgggtgaagtgcggaaagagttgctttcctaaagggtacagaaatcttaacacacaggtgccagaactacctacaatatgtcaggcaggaaggaaacagtgttggatttggctaagtttgttgacaaaggtgttcaggtcaaactcaccggtggtagacaagtcacggggaccctaaaaggatacgaccagctactgaatcttgtcctggatgaagctgtagagtttcttcgagatatacaacttgttcatgtgtctgaactactggatgacaagattcatttgctgtttatggatactctacagaccaggatgatccgttgaagacta

SEQ ID NO: 11593 - DNA, 732 bp, Gossypium hirsutum
  Clone ID: GOSHI-09MAY01-C24887_1
cggacgcgtgggggagtttggaaatggtgagttcaccgaggctgaattgaagaaaattatggcaaatgagaagcttgctgagattgctatgactgatccaaagcgcgcaaagaggattttggccaatcgtcagtctgctgctcgttccaaagaacggaagatgcggtacatttcagagttggaacacaaggttcagactctgcagactgaagctaccacattgtctgctcagctaacacttttacagagagattctgttgggcttacaaatcagaacaatgagttgaagtttcgtcttcaagccatggagcaacaagcacaactccgtgatgctctaaatgaagcattaactgcggaggtccaacgattaaaacgtgctactcaacagctaggtggtgattccgacccttcaaaaggcatggtttccgagccgctttctgttaatcagcagatgttccagcttaacatatctcatcagatgcagcagcagtcacctccacagccccaacaacagaatgggaacacaactgcaaaaactgagttgaatcagtagcttggtctctgggaagctttggaaacccatgatatccccgtctctcttcacctcgggtattcattagttttcaatttcccgacttcggaggatttcaacctgcatcagatattctccatctttagatgatgggacgaagtaaaaacatacattagcttggataatcataatatcggtta

SEQ ID NO: 11594 - DNA, 453 bp, Gossypium hirsutum
  Clone ID: LIB3146-002-P1-K2-C10
gttgaatcatccaatgatcccgggaacctcactaacaattgcctatttgcgctcttggaagtggccggttctcattacgccgccatttgtgtagaaaatgatgaaattgttagaggtgaatcaaatacaccaatgaaattgaccgtacggaaaaccattccgtttgttgaagatgtttgcgtctccggaactgatgcagttctacccttacgtggcataattgaacaatagctgaaacttgggcggtatttatttttgatagattattgatatatgagatgcaattggcaaatttcgcaatgtgaatttagcataggcatgtctggatcttttttggttctaggcttcaaacattatctatgagactgaagcatttgttgcactccattgttaattgtgtaagtcttattggttttttttctttggcatctttattttttaaaattatcattc

SEQ ID NO: 11595 - DNA, 310 bp, Gossypium hirsutum
  Clone ID: LIB3147-005-Q1-K1-E10
cccacgcgtccggctgaaacttgggcggtatttatttttgatagattattgatatatgagatgcaattggcaaatttcgcaatgtgcatgtttggatcttttttggttctaggcttcaaacattatctagatttgatgaattaatcctcagagactgaagcatttgttgaagtccattgttaattgtgtatttcttattgtttttcttttttggcatttttatttttttaaattatcattcaattcgagagtgtcttgaatactcgacttgtatgaatatacatcatatttcagaagtttttttgattta

SEQ ID NO: 11596 - DNA, 687 bp, Gossypium hirsutum
  Clone ID: GOSHI-09MAY01-C24507_1
gaacaatggtatcaaatgaggatgaattcaacctgacaaatgagcaagagaggtgggttgttggcattatgcttggagtgactctgacaaagcttgtcctcatgttctattgccgcacatttacaaacgaaatcgttaaagcttatgctcaggatcacttctttgatgttatcacaaacatcattggccttgttgctgtgctacttgctaagtacatcgacgattggatggaccctgttggagctatcattctggctttgtacacaatacggacatggtcgatgacagtattagagaacgtgaactcattggttggaagatcagcagctccagaatatcttcagaaactgacctatctgtgttggaaccaccataaggccataaagaacatcgatacggtccgagcttacaccttcgggtctcactactttgtcgaagttgatattgtacttccggcaaacatggcattacaagaagctcatgacattggagaatccttgcaagagaaactggagttactgcccgacattgagcgagcgtttgttcatttggattatgaattcagtcacaaacctgaacatgcacaggcacatgctctgtaggtagccattaacctctggtttgtccggttgggctataagttaaaatgtttctacctacaaattctatggcctatgtatgttggat

SEQ ID NO: 11597 - DNA, 594 bp, Gossypium hirsutum
  Clone ID: GOSHI-09MAY01-C24527_1
gcgttttctgcgcgtgggcggacgcgtggggcaaaagctctctctctcaggcttgtaatccggccatggttaccggccgtagcgccaccgcggacggtggccggcgttgcgcgaaaggagcgtttcagccccgtttcaaagcacacacgaaggccaggccctcttagtccgaaaaaagcccaaaagaataaacccttcaccaccctttttaactcgattccggcgactaaaggggacttccggcgccgaggcctcgtgtgcctgcaggtggagcaggtaaggacggatgtgaccgtggcggtgcaagtggcggtggcagaggagttgatgagcggcagagggtaggtgcggcgctagggttaggtgcaatagaggctagggttttttgaaaatgttttagttttgggcttgttgggcctttagtttttttgggctgtaatttattattttgagttaggtctgttttagggtattgggtttgatttaaggtttgggtagctgggtttttggggccccgggcaaattggggcttgtacagtgtgtatatatatacaccatactaattttaaattatagttattgaatgtgatatca

SEQ ID NO: 11598 - DNA, 607 bp, Gossypium hirsutum
  Clone ID: GOSHI-09MAY01-C24477_1
cttcttttagaaaaaaagaaacaaaggtgggtggttaattcgaatctttatcgaattaggacactttgttaccccatttccgtttgaatcaatcaggttttttgtcatggaagataagcagtcggttgcaacactcatagactcaacaactactaagatacagcagcttcagagggcttttgctgaacttgaaagtcatcgtgctgtaacacttaatctgaaatggaaagaacttgaggaacatttccatgggcttgagaagtccttgaagagacgcttccatgaattagaagaccaagaaaaggagtttgagacaaaaactaggaaatctcgagaaatgttgaagaagcgtgaagctgctgttgttgctaaagaacaagcttcactagtgagggtacaagaaaagagagatgctgctgtttttgccattagtaatgctctagagaagcataggaaagtatcacctgaggagcctgctgatagctgtgatggagacagtggtgaactgtcagttgaggagaaaccccctgattctgtagcttccgaaagtaactcagaggatataaaatgttcttctgaaaatggaaatttcggggtgaaatcttat

SEQ ID NO: 11599 - DNA, 613 bp, Gossypium hirsutum
  Clone ID: GOSHI-09MAY01-C24787_1
cccacgcgttcgcccacgcgttcgcccacgcgttcgactggatcccggggcctggcaaaagcatcccaaacgagaaaggtcttattgtttcttcattggaaaatggcattcgccttgaataccaattagcatctgaaggtgttgagcaggctgagttggctggaaagttattcctcaaggaactgaaggaaaatgccgtcccccttgaaaatgtgcgcatgtgttactcaccatttgcaaggacaagacatacggcagaggttgttgcatccactttgaatcttccatttgagggccctcaatgcaaggtcatggaagatcttcgagaacgttactttggtccttcgtttgaacttctgtctcatgacaaatatacagatatatgggcaatggatgaaaaagatccattcacaaggccagaaggtggagaaagtgtcgatgatgtggcttctaaacttgcaagtgctatggctaccatggaatcagaataccaaggatgtacgatcttggttgtcagccatggcgatcccttgcaaatcttgcaaaccatactcaatgcagcttcaaaacagatggaaccaagctgcaatgacctagcatctataattcaagc

SEQ ID NO: 11600 - DNA, 965 bp, Gossypium hirsutum
  Clone ID: GOSHI-09MAY01-C24687_1
cattgctcctggtgttaatatcttggcaggatggactggtgccgctgcaccaactgatttagacattgatccaagaagagttgatttcaacataatttcaggcacttcaatgtcttgtcctcatgttagtggattggcagctctgcttaagaaagcataccccaattggtcacctgctgccataaaatctgctttgatgacaacagcttacaatttagataactcgggacacaccattaatgatcttgctactggggaagaagcatcaccatttatttttggagctggccatgtggatcccaacagagctctaaatccgggattggtatatgataccgatagtagcgactacatcgcgttcctttgctcaatcggctatgattcaaagaggattgaagtatttgtgagggaacctaatagttcagatgtatgtgctacaaaattggccacaccaggggatcttaattatccatcattttcagcagtttttaattctaatgatcatgtagttaagtacaggaggaaggtaaagaatgttgggacttcagctggtgcagtttatgaagctaaagtgaatgctccacctggtgtcaaaatcagtgtttcgccgagtaagctcctattcagtgctgtaaaccaaacgttgagctacgaggtttcattcgcaagtgacagtcttgggggtgtcttcagttcgagtcacaagggctcgggtcgactcgagtggagcgatggagtccatcttgcgaggagccccattgctgttcggcggacccagggagtgcaggatgagcccttttgattttcagactcaggtgaagcaagcaaattgttgcaatgcgtttctcaaccaacagagtaatcatgtgattgcttgaacataagcatgtttgtgataacattgcattgcacttgatgctcatatgccatcatcaatgaagaatgttcctgctgctctatgctgg

SEQ ID NO: 11601 - DNA, 400 bp, Gossypium hirsutum
  Clone ID: GOSHI-09MAY01-C24647_1
cctgttgaccctatgttgcttgggttcttcgttttcgttgtcattggatcatctcggttcgagattatgaggacagcgaccagtggaggcatggcataaggctgcagagagcccgtgttaaaaaaaaaaattgcagaagagacttgttatgttctttttctatagtgttgtagcgaactgatgatataatatgtttactagatatgcgttgtaactcatgttgtgaagatttcaaaaatttaattagatcagatgaaatgggccacaaaagcatgcctctcgtgatgttaaaacactgtagatacaccacatgatgtgcttgggtaatggggtttaaaaaagaaacgaatggctggggtaaaatagggacacatggctgatcgctaggcacccccaggtt

SEQ ID NO: 11602 - DNA, 1081 bp, Gossypium hirsutum
  Clone ID: GOSHI-09MAY01-C24617_1
gtttttgcaggtggaagggagacttactttgtcgatgagcactgatgtggcttctcggatgctcgatggagccgtgaaattgcccaagcagttatttggggaaagtactgcagtgatggcgccacacgaggtggtgcagcccgcgaaaggtgggagggatttgttgcgtttgtttaaggaattgagacagtctgttgcaaacgattggggtggttctaaaccacctgtagtggaggaggataaggtatttttggagaagaaagagtggattcatgatcttgagcagcaaataagcaatgcttctcagcaggctgagtctcttgttaaagcacagcaagatatgggagagacaatgggagaactaggattggcgtttattaagctgactaagtttgagaatgaggaggctatgtacaattctcagagagtgcgggctgctgacatgaaatgtttggcaactgcagcagtcaaagctagcagattttatcgagaattgaatgcgcagactgtcaagcatttggatacacttcacgaatatcttgggcttatgttagctgtgcatggtgcattttcggatcgatcaagtgctttattgacagttcaaactctcctatcagaactatctacacttcatgcaagagccgaaaaacttgaagctgcatcatcgaaaatatttggcggcgacaaatctaggattcacaagatagaggaactgaaagaaactataagggttactgaagacgcaaaaaatgttgccataagagaatatgagaggatcaaggaaaataacaagtgtgaacttgaaaggcttgacaaggaaagacgcgttgacttcttgaacatgttgaaggggtttgttgtaaatcaggtgggatatgccgagaaaatttcaaatgtgtgggcaaaggtggcagaagagacgagtggatatgctaaagatagctgctaaatgtttgaatgtatattcacttcctgtttttttggtcctttatactttttaatgattattgtccttgttaggtgacagttttaataagaataataaaaatgaagaaaacggaggaagaacttgggttagttt

SEQ ID NO: 11603 - DNA, 322 bp, Gossypium hirsutum
  Clone ID: GOSHI-09MAY01-C24167_1
tctgaaattcataaatgaagtaattaatcgtggggttaccattatcctgtttgtagtgacgaatcttgtctgtgttcctaagaaaagaaaagaaatttgtcaaaatttcggggtcttaaagggtcgtggaaacccataagaactcttgaatggaactggaaaagagatgtaactccagttccttcggaaatggtaagatctttggcgcaagaagaaggggctgatccgtatcatcttaaactagggtctgatttctctatttttttaaagataccgctttctcctacttcgttcgaatagaacatgctggggccaacctttt

SEQ ID NO: 11604 - DNA, 538 bp, Gossypium hirsutum
  Clone ID: GOSHI-09MAY01-C24047_1
gcttggaagtcctgaacaccgttcgatcagttggccaacctcttgtcgatgactggaaatgcctcaagaaaatggtgaggactttcgaaacacattgtggatcactagcccaatacgggatgaaacacatgcgatcccttgcaaacatctgcaatgccaggattcagacagaacagatggctgaggcatcggcacaagcttgtgtcagcgttcctactggtcgttggagctctcttcagaaagggttcagtgcataaaaataccactggaatcggcaaatattatcggccaaagcttggattatgtttggatttactgtgttttcttatatcccgaatagttcgaatggtgctgcattttgatgattattcatgcggtttcttatttctgaagttatgtcggagcaactctaataccagactgctaaatttatgtaaatatgctttaggatgtgttctataatacacgacgatgtttgtatataaatgatctatgatggaactatcataaatgaaaagaaatgcttgttttaattaac

SEQ ID NO: 11605 - DNA, 390 bp, Gossypium hirsutum
  Clone ID: GOSHI-09MAY01-C25997_1
gaaaaacagaaactactttgatacagttcaaacacgtaaagagaggagaaaaagaagggcgtttgacttaccagatcaaagttgataacaagattgatagtatgagtcgaaaaatagagcttctttgagtctgctgtgagtgtcaattgaagagcaggggttgaagagcagaaaacgagcaaagttttctacaaattgggaaagaaattaatttaattttcaaggataaaatggtaaaataataaataaaagtaagggtgtttttgtctgttacagtgccaacagctcagttaattcatccactgctactattttctctagctgaaaatcagctgatcagtgtggttgaaaagaaaccccactgcattgacacttgaaaccaaacaacac

SEQ ID NO: 11606 - DNA, 442 bp, Gossypium hirsutum
  Clone ID: GOSHI-09MAY01-C25987_1
cattgattattgttccaacctcaaaagcacaagcaatacagagaagtggacgtgcagggcgtgaaggacctgggaagtgtttccgtctctatcctgagagcgagtttgaaaagcttgaggattcaaccaagccagagattaagcgttgcaacctctcgaatgtcattttgcagctcaaggccctgggtgttgatgatatatttgggtttgacttcatagagaaaccctcaaggacagctattaaaaagtcattggaggagttgctcttgctaggtgctttaactgatgaattcaaactgtcagatccagttggtcgtcaaatggctcggctcccattagatcctgttcattctaaagctctcatcctagctagccagttcaagtgcctggatgaaatgttaattgctgctgcaatgctttcagtagaatctattttttatga

SEQ ID NO: 11607 - DNA, 315 bp, Gossypium hirsutum
  Clone ID: LIB3048-023-Q1-L1-C2
cattgattattgtttcaacctcaaaagcacaagcaatagagagaagtggacgtgcaaggcgtgaaggacctgggaagtgtttccgtctctatcctgagagctagtccgacacgcttgaggattcaaccaagcctgagattaagcgttgcagccttctagaatggcattctgcagctcaagggcctgagagttgaagatatatttgggaatgactatactacagaaaccctcatggacagctatatctacgatctcggatgagcagctccagctaggcactgtcactgactaaatgactcatggagattcagatta

SEQ ID NO: 11608 - DNA, 422 bp, Gossypium hirsutum
  Clone ID: GOSHI-09MAY01-C25897_1
gtttcatctgaatattttgacttcgatttcccccgaggaacatttgctcctgttgaggatgactattatttactcttggatcggtctcctcgaaaacaagttccacttgggccaaatcatcaagccaatgttccatcatggggtaggcacataaagaatattaagtttgcacagaatgaagcatctaaagctgcagatattgacaatgaagataataagatggggacatgtatcattccattgccagatttagatttgtctgctaacagcagtgataaagttggtgctggaagattcgactgtagttgcctggataggggctctttaagatgtgtgcaacagcatgttacggaggcacgaaaactactacgaaaatcccttgggcatgaaaaattcgtgaaacttgggttttataacatggg

SEQ ID NO: 11609 - DNA, 416 bp, Gossypium hirsutum
  Clone ID: GOSHI-09MAY01-C25857_2
gccgggattacatgggtcctcatttccaatttcaagctagctgacaatctacaacgccgtcctgatggaaccttcaaccgagatttatctgagttccttgaccgtagagtccctgccaatataaaccctgtcgatggggttttctccttcgaccatgtcgacggtgccaccggtcttctaaaccgggtttatcagccttcttcgttgaatgaggctcaatggggcatggtagaccttgagaaacctttgagcacaactgagattgttcctgtcatagtgttcttccacggtggaagcttcactcattcctccgctaatagtgctatctatgacaccttttgtagacgcctcgttagcctttgtaaggccgttgtggtgtctgtaaattatcgccgatcgcctgaacatagataccc

SEQ ID NO: 11610 - DNA, 721 bp, Gossypium hirsutum
  Clone ID: GOSHI-09MAY01-C25857_1
atttttctctctttctctcttccatttctctctctctatttagtggtgttgggttcttctgttcttcagaaaggaagcgtctcttcttgttcagaacaaaaaagaaaagccaaagaaaagagggagagtatagagactcaagtacaaaagagcaaaaaaaaaaaaaaacccaagaaaccaaataaataaaaggaagggtgggggcaaatagacaacgtacaaacactcttactttttagtgttttttttctttctttcttgttgttatgaggcttcctttgggaagataagtttcatttcctttcttgggggttttctttaaaaccttttgtttttgcttttccttcttggagttcttttccagtctggtttgttcggccatggccggtagcaatgaagtcaacctcaatgaatccaagagggttgttccattgaatacatgggtcctcatttccaatttcaagctagcttacaatctacaacgccgtcctgatggaaccttcaaccgagatttatctgagttccttgaccgtagagtccctgccaatataaaccctgtcgatggggttttctccttcgaccatgtctacggtgcaccggtcttctaacgggggttatcagccttctcgttgatgagctaatgggcatggagacttgagaaccttgacacactgaaatggtctgtctgggtcttcacgtgaagctcactatctcgtatagg

SEQ ID NO: 11611 - DNA, 382 bp, Gossypium hirsutum
  Clone ID: LIB3272-032-P1-K1-E7
ctttctcccttccatttctctccctctatttagtggtgttgggttctttttttcttcagaaaggaagtgtctcttcttgttcagaacaaaaaaaaaaaagccaaagaaaagagggagagtatagagactccagtacaaaagagcaaaaaaaaaaagaaaaagaaaaatccggaaccaaacaataatactcttactttttagtgttttttttctttctttcttcttgttatgaggctttctttgggaagataagtttcatttcctttcttgggggttttctttaaaaccttttgtttttgctttccttctgttcggccatggccggtagcaatgaagtcaacctcaatgaatccaagagggttgttccattgaatacatgggt

SEQ ID NO: 11612 - DNA, 413 bp, Gossypium hirsutum
  Clone ID: GOSHI-09MAY01-C25847_1
atgacaggtttgtcttcccattattgattatgttcttatatgataaattgcatttatcatgttcaagcctgttgcctcatgcgcattaaggcattagtaattcttaaacatgcttctaaatccatgttgtaagaattaaaatgtaatatgtagataatgcttgtagtaacaagacacttatttatctccaatttaatatgcatattggagtacgacttttcaaaatccataagattatttcatgatccgtttcatcttttgcttctctatcatgaaggcatttcatgcgctgtagctcaatatatgactacctaggaggcatggacacggacatgtttttggacataccagaatatgtatcagactgagtcggatacaaaaaatataaaataatattatttctaaacggagtc

SEQ ID NO: 11613 - DNA, 696 bp, Gossypium hirsutum
  Clone ID: GOSHI-09MAY01-C25877_1
cccagcgtccgcccagcgtccgctggagttgcgggaagttccattcagaaacagaaaagaaaatacagttgtagacattacttcgtgttttggaaaagccaacctatctgttttataagctgcctgcattggttccgtgctgaaattgttggctaaaaacttaaagttgatgactgaatggatagaaagcagcatatagcaatttttaccacagcaagtctgccatggatgaccggaactgcagttaaccctttgtttcgcgctgcttatcttgccaaagatggagagagaaaggtcacattggtgagcccttggctatccttaaaagatcaaaaactagtatacccaaacaacaccacctttggttcaccctcagagcaagaatcgtttattcgtcaatggctagaggagaggactgcatttatatctggtttcgtcatacggttttatcctggaaagtttgctgtagataaaagaagcattcttcctgtaggagacatctcagaaatcatccctgatgaagaggcagatattgctgtccttgaggaacctgagcaccttacatggtttcatcatgggaagagatggaaaactaaattccgccttgtcataggaataatacataccaattatttggagtattgtgaagagagaaaaaaatggacaattccaagcatttcttctgaaatatgtaaa

SEQ ID NO: 11614 - DNA, 634 bp, Gossypium hirsutum
  unsure (1)..(634): unsure at all n locations
  Clone ID: AI054570.1
ggaagttgcgggaagttccattcagaaacagaaaagaaaaatacagttgtagacattacttcgtgttttggaaaagccaacctatctgttttataagctgcctgcattggttccgtgctgaaattgttggctaaaaacttaaagttgatgactgaatggatagaaagcagcatatagcaatttttaccacagcaagtctgccatggatgaccggaactgcagttaaccctttgtttcgcgctgcttatcttgccaaagatggagagagaaaggtcacattggtgatcccttggctatccttaaaagatcaaaaactagtatacccaaacaacaccacctttggttcaccctcagagcaagaatcgtttattcgtcaatggctagaggagaggactgcattatatctggtttcgcatacggttttatctgnaaagtttgctgtagataaaagagcatcttcctgtagagactctcagaatcatcctgatgaagagcagattttgtgtcctgagaaacttgacacttacatgttcatcatggaagaattgaaactaaatcgcttgtataggaatatcatccattttggagttgtgagaagaaaatggacattcagcttctttgaattgtaaaatgg

SEQ ID NO: 11615 - DNA, 954 bp, Gossypium hirsutum
  Clone ID: GOSHI-09MAY01-C25807_1
ctttctgtttaaaatattatatcactggtagtaatagccatatgtcaagaataacatatttgatgacactaattctttcagatatctgatcataattgagtcccctacgccaaaacttcctaaaacatctcaagaatatggaatacacgtatagaccctgccagggtttaaacaactaacttgatttcataatatccttagtaatacctagtttagggtttagggacaagacattctcaggaaacaggttaaattcattatttgtaattacccaaaaattatctactgtaatcttgaaaacgccaatgttggtcttccataatctagattgcaagaagccagttgttgcggctattgaaggattggctcttggtggtggcttagaattggcaatgggttgccatgctcgtattgctgctccaaaaactcaattagggttgccagagttgacacttggggtgattcctggactcggaggtactcaaagtcttccaaggcttgttggggtatcaaaagctattgaaatgatgctggtaagactgttatgggtagagcagagacatatcatagtggttgaccatcatattaaaatatgtggtcttgattccttaattttgtctcattagtttcttttgcttggttagaggcatcatgcagtcctgtttctggttggtgataaaatctttgaactatcattcatttcccactggatttaactttgctcaatggttctgatagaatgattatagaaatcactgctgcaagtaagctttggaagtacaaaaccaccatcttttccttcttaatacgagaccccaaccatggttacttccttttgagatccatgcttctttcctggaactaattttgcatggttaaatgatttatctaggcaattttttttgccattaaatctaattcggcttaaacttactcctaacagttttctaagcc

SEQ ID NO: 11616 - DNA, 371 bp, Gossypium hirsutum
  Clone ID: LIB3196-003-P1-M1-G6
gttcggtgaggctactaggagaagagatgtcaaagctattgttttgactggcaagggtggaaggttttcagggggttttgacatcaatgcttttcagaatcccagcggtgatacttcggatcgaacaattgaatcaattgatcttgttctcaacactatagaggattgcaagaagccagttgttgcggctattgaaggattggctcttggtggtggcttagaattggcaatgggttgccatgctcgtattgctgctccaaaaactcaattagggttgccagagttgacacttggggtgattcctggactcggaggtactcaaagtcttccaaggcttgttggggtatcaaaggctattgaaatgatgctga

SEQ ID NO: 11617 - DNA, 726 bp, Gossypium hirsutum
  Clone ID: GOSHI-09MAY01-C25837_3
ccggcttgttggcttgctgcgtttggcttctgaatgcacaggtcacatgtccaaggttcgagggctggtgccagagagaagaagataatgggattgcgagaggttttctaccgaatgggattgaatgacaaggaaatagttgcattatctggtgcacacacgcttgggaggtccagaccagaacgtagtggttggggtaaaccagaaaccaagtatacgaaagatggaccaggagcaccaggaggacaatcctggacagtgcaatggttgaagtttgacaattcatacttcaaggatatcaaagctaaaagagatgaagatctgcttgtgttgccaactgatgctggtctttttgaagatccctctttcaaggtatatgctgagaaatatgctgaagatcaagagacattcttcaaggattatgcagaagcccatgccaaacttagcaaccttggggccaaatttaaccctccacaaggcattgttttaaatgatggtgctgcaccataaaagttggccgccaagtgctctgacatgaaaggattaaaaagaaagacaagtttcttggttattgaagtggggtcgtgtgttataataatacaaggtcacatgttacaacttttttcgaagtccaaaactgaaagaggaaagagaaaataaaattcaattcgagtgcttttgaattgaagagagagaagcagaagattggagtagtaaaggagtatt

SEQ ID NO: 11618 - DNA, 905 bp, Gossypium hirsutum
  Clone ID: GOSHI-09MAY01-C25837_2
cccacgcgtccggaaatatggaagagttgatgtctctggtcctaatgagtgtcctgaagagggcaggctacctgctgctggacccccttcgcctgccgatcatctgcgagaggttttctaccgaatgggattgaatgacaaggaaatagttgcattatctggtgcacacacgcttgggaggtccagaccagaacgtagtggttggggtaaaccagaaaccaagtatacgaaagatggaccaggagcaccaggaggacaatcctggacagtgcaatggttgaagtttgacaattcatacttcaaggatatcaaagctaaaagagatgaagagctgcttgtgttgccaactgatgctgttctttttgaagatccctctttcaaggtatatgctgagaaatatgctgaagatcaagagacattcttcaaggattatgcagaagctcatgccaaacttagcaaccttggggccaaatttaaccctccagaggattaaaaagaaagacaagtttcttggttattgaagtggggtcgtgtgttataataatacaaggtcacatgttacaacttttttcaaagtccaaaactgaaagaggaaagagaaaataaaattcaattcgagtgcttttgaattgaagagagggaagcagaagattggagtagtagaggaagcatttggtggaagccccgatgaggctctacctaccaactattggttatcatagacatttcttcttgcttcttattatcattgtcagcagtgtttgaaactgaactcatttaatggtggtaggagcattttgtttttaatttccttttttgctctcatgctgcttgtctaatatctatttggacgtttgttgaaattggttcatgagcatctaatgttatttctcccaggtttattt

SEQ ID NO: 11619 - DNA, 410 bp, Gossypium hirsutum
  Clone ID: GOSHI-09MAY01-C25837_1
taatagcaaaggcagtggtggggtgtacaagaaagctagggttcagacgtcttcaagccaaccacctttgaaagtgagaaaggagaagcttggagatagaataacagcacttcaccagttagtttccccatttggaaagactgacacagcatctgtgttgttagaagctattggttatatcagattccttcaaagtcaaattgaggctcttagctccccttacttgggtactgcatcaccaaacatgagaaaccaacaatctgttcaaggagaaaggaattgtgcatttcctgaagatgaaggacaggaaaagcaagagcctaagccaaaggacttaaggagtagagggctgtgcttggttcctgtatcatgcacccaacaagtcggaagtgaaaatggtgccgactact

SEQ ID NO: 11620 - DNA, 412 bp, Gossypium hirsutum
  Clone ID: LIB3145-021-Q1-K1-F2
cccacgcgtccgtgcttttcccccatgtaaaaagtatctctgctagaaggaagatgaaaagtatattcagtccagtttttgcttaagcagttatttctggggcataaaaaaaaaaaaaaaaaaaaaaaaaaaagaatgacaaagaaataattaaattaataaaaagcacacacacttgaaaagtacaaaacaaaaacgtaatgattgaaagtaaaaacaaaaaccaagtatacgaaaagatggaccaagagcaccaaggaggacaatcctggacagtgcaatggttgaaggttgacaattcatacttcaaggatatcaaagctaaaagagatgaagatctgcttgtgttgccaactgatgctgttctttttgaagatccctctttcaaggtatatgctgagaaatatgctga

SEQ ID NO: 11621 - DNA, 410 bp, Gossypium hirsutum
  Clone ID: LIB3149-020-Q1-K1-H11
ccggcttgttggcttgctgcgtttggcttcagaatgcacaggtcacatgtccaaggttcgagggctggtgccagagagaagaaggtgagaaaagagaagctaggagatagaataacagcacttcaccagttagtttccccatttggaaagactgacactgcttctgtgttgttagaagttattgggtatatcagattccttcaggatcaaattgaggctcttagctccccttacttgggtactgcatctccaggcgtgacaaaccaacaatctgaaaaaccaaaggacttgaggagtagagggctgtgcttggttccagtatctttcactcatccagttgaaagtgattgtaatggtgctgattactgggcaccggcattcgcaggcgccggcagcttttaaggagctgg

SEQ ID NO: 11622 - DNA, 710 bp, Gossypium hirsutum
  Clone ID: GOSHI-09MAY01-C25557_1
cccacgcgtccgcactattcattccaagacccttctttgttggtggaagcattaacccatggttcttatatgcttgctgaaattccaggatgttatcaggtgataatctgctatacgaatgacacattaaaattttttttttcatcatatgtatcttaatgtcttataatcatgggtagttggttcatttttctctctcaagtttaaattgaacataattaatactttttccttgcagcggctggaatttctaggggactccgttttagattatcttattactctgcatttatataataaatatcctgggatcacgccaggattattaacggatcttaagtcagcatctgttaacaacaattgctatgcattatcagctgtaaaggctggatttcttaagcacattctccaaagttcacagaagctttacaaggatataaaagaaaccgttgaaagttttcaggaattatcgttggaatacactttcggctgggaatctgaaaaatctttccccaaggtacttggtgacgtgatggagtcacttgctggagctatttttgttgattcaggatacaataaggaaatcgtattccagagtataaggccactgttggagcccatgattactccggagactctgacggttcaccctgtcaaagagctatatgagctgtgtcaaaaggagcattatgaactaaaaaaacccattg

SEQ ID NO: 11623 - DNA, 433 bp, Gossypium hirsutum
  Clone ID: LIB3146-055-Q1-K1-E8
cggacgcgtgggcggacgcgtgggcggacgcgtgggatctgtatcttaaatgtctggatggcatgggttccgttttctctttcaagtttaaattgacgataattaatactttttccttgcagcggttggaatttctaggggactccgttttagattatcttattactctgcatttatataataaatatcctgggatcacgccaaaattattaacggatcttaggtcagcatctgttaacaacaattgctatgcattatcagctgtaaaggctggatttcataagcacattctccaaagttcacagaagctttacaaggatataaaagaaaccgtcgaaagttttcaggaattatcattggaatacactttcggctgggaatctgaaaaatctttcccccaggtacttgctgacgtgatggagtcacttgctgg

SEQ ID NO: 11624 - DNA, 348 bp, Gossypium hirsutum
  unsure (1)..(348): unsure at all n locations
  Clone ID: LIB3493-024-P1-M1-H3
ctggattactatttttggattggatcggtataagtattaatttcacaaatataccatatgaaaggcattttaaagtgcgggccgagaagtttgttaatgtccagcactttgagtcccttctacactattcattccaagacccttctttgttggtggaagcattaacccatggttcttatatgcttgctgaaattccaggatgttatcagcggctggaatttctaggggactccgttttagattatcttattactctgcatttatataataaatatcctgngatcacgccaggattattaacggatcttaggtcagcatctgttaacaacaattgctatgcattatcag

SEQ ID NO: 11625 - DNA, 629 bp, Gossypium hirsutum
  Clone ID: GOSHI-09MAY01-C25547_1
agaaagcagaggaggagttaacagagatagagaaagaaatacacaatgcagaagcgaataagctccattatgaaaatattatgaacaacaaggttcttcctcaaatcaaggaggcagaggcaaaatatctggaacttgaaaaggatcgtaaggagagctataaaaaggcttctgttatttgccctgagagtgatattgaagctttaggagatagggatgaaaccacaactgagcaactggatgctaagctgaagagactgaatcagagccttttgcatgagagccaacaatattcggaatcgattgatgatcttaggatgttgcatcaggagaaagagcgtagaattttgagggaactgcatacttataaagcttttcgagaaagattagatgcttgtcaaaaagctctcgacttgcgttggaaaaaatttcaacgtagcgcatcacttctgagacgcgagttgacttggcaattcaatggccatttgggaaagaaaggtatcagtggacacattaatgttagttatgaagaaaagaccctttagtagaggttaaaagcctcagaagtttcagcccatcgtcgtgaacagaggctttaggagagacgatcctttaacatagtttggtgg

SEQ ID NO: 11626 - DNA, 1029 bp, Gossypium hirsutum
  Clone ID: GOSHI-09MAY01-C25527_1
cccccgcgtccggttttcccagaaacttttcctgggtttggctcttgatccaacccataagtctctaggtttcaaagatatggctggaaaggagttcactgttaatctgaacaaaccccttgtcttccaggttggtcaccttggagaagcttaccaggaatgggttcatacgcctattgtgacagatgaaagtcctcgctttttcaagagtgatttcatggagatcctgactcggacagtgtggtgggtagtaccattgatatgggtgccggttgcaatgtggttcatctcactctcttacacaatgggtcatacacttccccaagttgttttaatgtctgttgttggaagtttcatttggacattcttggaatactgtttccaccgcttccttttccacattgaaacagagagttactgggcaaacacttttcactatctaatccatggctgccaccataagcaccctatggatgggctaaggcttgtgattccacctgcagaagctgctatactagctataatgttttggaacttgtatgggattttattcactatctccacaagacctgcattatttggaggtggactaattggatatgtgatatatgatatgatacattactatgtgcaccatggccagcctaccaaacaatctatcaaaaaacttaagaaatatcacttgaaccatcactttaggattcaaaacaagggctttggcataactacaacattgtgggacagagtttttggaacccttccaaagaccaaagcagacaagagtggatagatgatgatgatgagtctgacaagcatcacatgattgcaccctgtgatggccttgtcaaccctcgcgtccggattttgccctctttacttttattttgctcaataatggtggttgggattgtgagggaggatcttagctaagcaactcacttcatgtctcctgttgtactgtgttttccctataaatagatgaaatggatagtgtagttgtaatggtttataaaactttatgaaggtaat

SEQ ID NO: 11627 - DNA, 453 bp, Gossypium hirsutum
  Clone ID: GOSHI-09MAY01-C25487_1
tcgcccacgcgtccgcccacgcgttcgcccacgcgtccgggaaactgaagtaaatatactgatggtgcggatgggcatgaaatgggtgcaaaccctcagcccataattgatcaaggcccttcattctatggaaactctccaggttcaagcttcatgtatactgcccctcctcctccttactcatatgttagccaacctccacctttccctgttgttcgacttcgtggtcttcccttcgattgcacacaaactgatgtggctgaattcttccatggtctggacatagtcgatgtcctttttgtccataaaaacagcaagttcactggtgaagctttttgtgttttgggttatcctcttcaggttgattttgcccttcagaagaataggcaaaacatgggcaggagatatgtagaggttttcagaagcaagagacaggaatattataaggcaata

SEQ ID NO: 11628 - DNA, 340 bp, Gossypium hirsutum
  Clone ID: LIB3493-026-P1-M1-B8
atttcgcacaaaaatgaaatactgaaatctcggacttgtttcaagcgcgcgcttctttccccattttccttcccatcattcttttttcttataattggacaaaacattgtcacactcttcttccttctccctttcacgtttccttaattaacggaatttttcaacatgttctacagaggtaaatatactgatggtgctgatgggcgtgaaaatgggtgcaaagcgtcagcggataattgatcaaggcccttcattctatggaaactctccaggttcaagcttcatgtatactgcccctcctcctccttactcatatgttagccaacctccacctttcctg

SEQ ID NO: 11629 - DNA, 391 bp, Gossypium hirsutum
  Clone ID: GOSHI-09MAY01-C25457_1
cagagttaatctagtaaacaatcaaattctcagccacttcgtcatcaaatccctgaatttcattggagaaagtaagaaaaatggcaatgatcccaagattctttggcaatcgaaggagcagcatcttcgatgatcccttctcctttgacatattggatcctttcaggggcttccctctgtcttcttcgtcactcaccaccacgcctgtcccagaaagcgctgcttttgctaacaccagaatcgactggaaggaaactccggaagctcatgtcttcaaagccgacctccctgggcttaaaaaagaggaagtgaaagtggagattgaagatgacaggatgcttcaaatcagcggagaaaggaaatttgagaaggaagacaagaacgacacttg

SEQ ID NO: 11630 - DNA, 794 bp, Gossypium hirsutum
  Clone ID: GOSHI-09MAY01-C25447_2
cccacgcgtccgcccacgcgtccgcccaaacgtcagctaagagatccctattagccatcttcctcctcctttccttcctctccatatcaaccgcaacatcaactcgaaaaacccgaacccgaaatccatgcaagagcatggtgttttatttccacgacataatctacaacggccataacgcaaagaacgcaacatcagccattgtaggttcaccacaatgggggaacaagaccattttaacaggaaaaaaccatttcggagacctggtcgtgttcgacgaccccattaccttagacaacaacttgcattcgaaaccagtgggtcgagcccaagggttttatatctacgacaagaaagacatattcacagcttggttgggtttctccttcgttttcaattctacccaaaataaaggaagtataaacttcgccggtgctgatccgttgatgaaccagacgagggatatatcagtgattggtggaacaggtgatttcttaatggctcgaggagtggctactttgatgactgatgcctttgaaggggaagtatattttcgtcttcgaactgatattaatttgtatgaatgttggtaaaccattgaaattttaattttcgatttgaaactttttttagttggttacatcttgaagagtgtcatctatgaacaagcaccgtttgagactgttatttgtggctaataaaggacccttaatgtttggcttctcattgatttgtgatatgcatcttgtggatgtcgaacacaagtttatatattgtacatctttattttatgg

SEQ ID NO: 11631 - DNA, 964 bp, Gossypium hirsutum
  Clone ID: GOSHI-09MAY01-C25447_1
gacatctgcaggcagtttgatgatagtttcaaacagttgactggttcagagacatctgagttggagtcaactgcaacatctagtgtcaagaggccaagaattgaggcaaatcatgcccttttggaagaaataagggaaataaatcaacggcttatagatacagtggttgatatcagtgatgaagatgttgatccgggtgcagcagctgcctccgccgaagggcggggcggtaccgtggtcaagtgctctttcagtgctgtggctctcagtgcaaccttgaaatcacagtacatgtcggcacaaatgtcaccaattcagcccttgcatttgctagtccccacaaattatccaaattgctctccaatcctattagacaagttcccagttgaagtcagcaaggagaatgaagacctttcagtgaaagcgaagtctaggtttagtatatcactgcgcaccctttcgcagcctatgtcacttggtgagatagcaaggacttgggatgtttgtgcccgagcagttatttctgatcacgcaaaactgagtgggggaggcagctttagttcaaaatacgggacttgggagaattgcttgagtgctgcatagtcatctatacagactctagtagaacacctagatcagctttattttgtcacagctgcgatcttgaggactgcataagcagttttcggatgcatatatttataataaagtcggttcaagggagcagcctcagttgatgtttgtcggcttgagagaactctccaggagagttcaaacttgtgtcattaggtaatatattgttatagacttgtagggtctggaacatgcttagcattttgataaattcttctgttcaaaacaaggctacatacattatcatatttctggagaaatgcggactcgaattatgatagttatcaaaacaagtttgttcctgttgtgggtaataaataaaaagtgcaga

SEQ ID NO: 11632 - DNA, 522 bp, Gossypium hirsutum
  unsure (1)..(522): unsure at all n locations
  Clone ID: LIB3829-008-Q6-N6-C9
gtcgtgaatctgcgctttttatttattaaccacaaacagagacaaacttgtgttgagaactatcataattcgagtgcgcatttctccagaaatatgagaatgtgtgtggccttgtgttgagcagaggaattgagcaaaatgcgaagcgatgtgccagaccctacaaggctataacattatattacctaatgagacaaggtatgaactctccttgggaggtctctcaaggcggcaaacatcacctgaggggtggcccttgaaccgactttattataaatatatgcgatccgaaaactggttatgcgcaaaacaaaggtgagctaggtgtgttactagaggctgtgtagaggagtatgcagcactcaagcaattctcccaaggcccatattttgaactaaaggtgcctcccccactcaggtttgcgtgagcagaaataactgcgcgggcacaaacatcccaaggccttgctatctcaccaagtgacataggctgcgaaagggggcgcantgatatactaaacct

SEQ ID NO: 11633 - DNA, 500 bp, Gossypium hirsutum
  Clone ID: uC-gsronu33B104h01b1
agctattgtaggttcaccacaatgggggaacaagaccattttaacaggacaaaaccatttcggagacctggtcgtgttcgacgaccccattaccttggacaacaacttgcattcgaaaccagtgggtcgggcccaagggttttatatctacgacaagaaagacatattcacagcttggttgggtttctccttcgttttcaattctacccaacataaaggaagtataaacttcgccggtgctgatccattgatgaacaagacgagggatatatcagtgattggtggaacaggtgatttcttcataacttgtgtcattaggtaatataatgttatagacttgtagggtctggaacatgcttagcattttgatcaattcttctgttcaaaacaaggctacatacattatcatatttctggagaaatgcggactcgaattatgatagttatcaaaacaagtttgttctgcttgtgtctataaataaaaagtgcagattcacgac

SEQ ID NO: 11634 - DNA, 486 bp, Gossypium hirsutum
  Clone ID: LIB3493-026-P1-M1-C2
gttgctatgacaaagtgtcgtctacaagcaagaaatttcatcactcaagatggaatgagcgggacaaagaaaatgaggcgccacaccagtgccatgcccctaaatgttgtatcatctgtgggtagcataaatgatagtttcaaacagttaaccggttcggagacatctgacttggagtcaacggcaacatctactgtcaagaagccaagaattgaggctaaccatgcccttttggaagaaataagggaaataaatcaacaacttatagacacagttgttgatatcagtgatgaagatgttgatccaggtacggtggcaacagctgctgaagggggtgaaggaactgttgtcaagtgctccttcaatgctgtggctcttagttcaaacttgaaatcacagtacatgtcagcccaaatgtcaccaattcagcccttgcgtctgctagtccccacaaattatccaaattgttcccccgtcctattagac

SEQ ID NO: 11635 - DNA, 433 bp, Gossypium hirsutum
  Clone ID: GOSHI-09MAY01-C25787_1
gaagagttcaaagaagcaccaaatttacagcaaggaattccaggctatgttagatggtttagatgaagaagacagcttagaagaaggtggtcaagcaacagagaagaaaaggcgtttatctatgcatcaagttaaggctttggagaagaatttcgatgtgggaaacaagttagaaccagagagaaaagtgaagttagctgaagaattggggttacagccaaggcaagtggctatttggttccaaaaccgacgtgctcgttggaagaccaaggtgttggagaaagattatgcaatgcttaaagctaattatgatgctcttaagcttgatcatgacaatcttgaaaaagaaaaactgggtctaattgcaaaggttagtgtttatatttcaaaccccattttttagttttttaagggtaaatgttatataagtgtt

SEQ ID NO: 11636 - DNA, 443 bp, Gossypium hirsutum
  Clone ID: GOSHI-09MAY01-C25767_1
caagaggctgtttcagcagtgagaaaaaacagaggaagaaagaaaagaaaaagaaatagagaaaaggagaacagaagggtcaaagtaactcagatatcaaccgttatttctcatattcatttctgattcctaccaaactgtttctggaggcttaacatctcatttgcaaattggatgtgactgcttcactgtagattgtcaggattaattgtcgatgtctttggagatttagcagtggtagcatcatctgctgcttgggttgagaaatacaaatcaaaagttaaagcatgcatcagtagcattgatgagattaatcatatacactggagaccttctgttgaaattttaaaagaagaaggaatggatgcagcagatctgaaagaattgcatccatccacttgtccccagagaactaaagttttagaaaatggaataatctatgc

SEQ ID NO: 11637 - DNA, 396 bp, Gossypium hirsutum
  Clone ID: GOSHI-09MAY01-C25717_1
caggaaaaagggtttggttttagccggtaacccccaatggcgggaaaaaggaaatgccaccttagttgccaattcctcattggttggttggtcaccatcattcatttggtcattggtatgggttattatttgggttccttccaaaccctcttctgaaaaccctaatttcaaaccaaggccgcgtccatggcggagaagcaatctcggaattgaccggaaaattcgatcccaaataccgccacagtttctctgatctcctcatgcactcttattctgagattggggcgttttcgcatttttatcacattgatggaaagccatgtcaaactcatattaacaatgctgtgaattcagatcgccagcttcagttccgaatgcaaggaatatctgcaattg

SEQ ID NO: 11638 - DNA, 542 bp, Gossypium hirsutum
  Clone ID: GOSHI-09MAY01-C25697_5
gcacggtgtttaagaccaatgaatattgttgcactcaagggtacgggacctgtggtccgacccgttattcaaggtttttcaaggaccggtgccgtgattcatacagttatcctcaagatgatccttcgagcacctttacttgccctgctggttccaattacagggtcgtgttttgcccccgaggctcacctcatatagagatggtcggaagtaagagccaagaaaaataaagggatcatctcttggtctagttaatctgcgccttggaactaaaaaataaaaaagtcatttggtcttccaaatgatatcaaacacgtggttctacttggtttattttacatatgttttgtttaataatattgtgcagtttcaacagcacaagacgtcacaagttgctatcatctttcatcaaaatttccaactcataaatacccatataaaaaagttatatgaacttatattatttctcctacgacacccccacctggtcgtaataaaaatatcttttttgtttttcaataaacaataaaatttttttttat

SEQ ID NO: 11639 - DNA, 967 bp, Gossypium hirsutum
  Clone ID: GOSHI-09MAY01-C25697_1
tcgttcacgcgtccggctaaccatgagctacttaaccatttcccaaatctcctccctcctcttctttagcgtccttttcatttccgctcatgcagcgcgctttgaaatccgcaatgagtgctcctacaccgtctgggcagcagcctctcctggtggtggccgtcgcctagaccctcggcaaagttggaccatcgatgtgcctgctggcactgctatggctcgtatttggggtcgaaccaattgcaatttcgatgccagtggtaggggtcattgccaaaccggtgattgtggtggactccttcaatgcaaaggttggggtgtacctccaaacaccctggctgaatatgcacttaaccaatttggaaacatggatttctacgacatttccttagttgatgggtttaacatccccatggtgtttggtccaactaatggcggttgtcacaacattcggtgcactgcagacatcaacggacaatgcccgaatgagttaagagctcctggtgggtgcaataacccatgcacggtgtttaagaccaatgaatattgttgcactcaagggtacgggacctgtggtccgacccgttattcaaggtttttcaaggaccggtgccgtgattcatacagttatcctcaagatgatccttcgagcacctttacttgccctgctggttccaattacagggtcgtgttttgcccccgaggctcacctcatatagagatggtcggaagtaagagccaagaaaaataaagggatcatctcttggtctagttaatctgcgccttggaactaaaaaataaaaaggtcttgtgctccaaatgattcatcacatgtgttacttgattatttactatggttgtacaaatttgttaaattatactctagacattccgtgttaatgtttatccaaatcacatttaatattcttcaacttccttacttatatatttatggttactagattag

SEQ ID NO: 11640 - DNA, 681 bp, Gossypium hirsutum
  unsure (1)..(681): unsure at all n locations
  Clone ID: AI055593.1
atttcccaaatctcctccctcctcttctttagcgtccttttcatttccgctcatgcagcgcgctttgaaatccgcaatgagtgctcctacaccgtctgggcagcagcctctcctggtggtggccgtcgcctagaccctcggcaaagttggaccatcgatgtgcctgctggcactgctatggctcgtatttggggtcgaaccaattgcaatttcgagccagtggtaggggtcattgccaaccgggattgtggtggactccttcatgaaaggtgggngtgtacctccaacaccctggctgaatatgcacttaaccaatttggaaacatggatttctacgacatttccttagttgatggggtttaacatcccatgggtgtnttggtccaactaaggcggggntgtcacaacatttcggtgcactggcagacatcaacggacaatgcccagatgagttaagactcctggtgggttgcataacccatcangnggtttaagaccaatgatatttgtgcactaagggtacgggacctgggtncgaccggtattcagtttttcaaagcccgtgcgtgattcatacagtatcctcagagatcctcggcaacttactgccctgtgggtcantaaagggtcgttgccccgagctactaaaataagagggcgatagaccagaaaattaaggtt

SEQ ID NO: 11641 - DNA, 601 bp, Gossypium hirsutum
  unsure (1)..(601): unsure at all n locations
  Clone ID: AI054908.1
aaccatttcccagatctcttccattctcttcttcagcgttcttttcatttccgcccatgcagcgcgctttgaaatccgcaatgagtgcccctacactgtttgggcggcagcctctcctggtggtggtcgtcgcctagacccttggcaaagttggaccatcgatgtgcctgctggcactgctatggctcgtatttggggtcgaaccaattgcaatttcatgccagtggagnggggtcattgccagaccgcgatntgtggtggactccttcatgtcaagttggngggtgtacctccaaacaccctggctgaatatgcacttaaccaatttggaaacatggatttctacgacattcncttagtgaatgnggtttaactcccattggtgttttggtccaatatgngcggggtgtcacacatttcggtgcactgcagacatcaacggacatgccgannatgagtaaaaccccgngntgggtgcaataaccatgcgccatgttttaagacaatgaataattgtgccttaagggtcggaactgtgtgtcgaccagtatcagggttttcaggacgtgcgtgatcatcagtatctcagagatcctcagcn

SEQ ID NO: 11642 - DNA, 455 bp, Gossypium hirsutum
  Clone ID: LIB3135-062-Q1-K1-H11
ccacgccgtccgctgtgattttatgagacacatggacctaccaacctcttcttatcatttgacaacctcttaccttcaaggaggctctgtgagctggagcagaacagatgtgcctcgttacacctttgccacactgacaatagttctctctttccgacacctgtttatccgtacattgtgccgacaaaatatgacgtgctgattgaggatgactttcctttgcttgattacacctgaatgctcacactcattatagagactggtcgcgaagtacagagccacataaaaataaaagggatcagtctcttggtctagttaaatctgcgcccttggaactcaaaaataaaaaagtcatttggtcttccaaatgatatcaaacacgtggttctacttggtttattttacatatgttttgtttaataatattgtgcagtttcaacagcacaagacgtcac

SEQ ID NO: 11643 - DNA, 202 bp, Gossypium hirsutum
  Clone ID: LIB3272-048-P1-K1-C2
acttaaccattttccaaaactcctcccttctcttctttagcggcctttttagttttgcccaatccagcggcgtcttaaaaacacaaaaaggggtcctacaacccctggggagcaaactctcctggtggtggccgtcgcctagaccctcggcaaagttggaccatcgatgtgcctgctggcactgctatggctcgtatttggg

SEQ ID NO: 11644 - DNA, 612 bp, Gossypium hirsutum
  Clone ID: GOSHI-09MAY01-C25657_1
ccctttgatcatcaccatgtggaacccaactcaacaaacccatctttatttccatcttctagacccagaaaaaccctatctttcaggatcagagatcatttatggaacttaatcagtgttgcgggtagcttttcctattatcttaaccaggtctcattctctattcacggtcaatcatttccatgcttttcctcggtcatctcggcgacatagaactcgccgccggttcattagccatagcatttgccaacattactggtttttcagttctatcaggtctcgcgttagggatggaaccactttgttcacaacctttcggtgctcaaaaacccaaacttttatcattaacccttcatcgtacattgggttttttattatttttttcgattttaatatcatttcttggggtgaacatggtttatatccttgtttatcttcatcaggatcctaatattactcgtaatggtcaaaatattttgttttttgccttaccggatttatttacacaatcattggttcatcccatcgcatttaccttgtgcacaaggaatacccatcgtaactttatcacactcatctcaccgtcctcattggccatcaattatactcgtg

SEQ ID NO: 11645 - DNA, 626 bp, Gossypium hirsutum
  Clone ID: GOSHI-09MAY01-C25677_2
gagccaaggaagtggccatctttgcctcagcttctgagtctttttccaagtcaaacataaattgcagcatcgaagatagtcttgctcgttttagagatgttgtttctgctgctagagagatctcacttccagttcgagggtaccgtcattccaatgctcgaaaatgttatgaattttgtcccaatcgataatcttgctgtccactttcatgacacttatgggcaagctctgtctaatatcttaacatcactccaaatggggatcagtaacgtggattcatcagtttcgggtctcggaggttgtccatatgctaagggtggttccggaaatgttgccaccgaggacgtggtttacatgctcaatggacttggaatagagacaaatgtcgatctcgaaaaactcttggtggcccgagattttatatgcaagcatttgaggcggccacctagttcgaagacagcacttgcgttgagcaatatgaaggctaactccaagctttaaggtacaaaccataaaatacttgtcatgctgtaaaaggccaagatatgcatctaatccttatacttcagtaaaattcgaaatttaatccttgtacttaaaatattaaaaattaacatttacttata

SEQ ID NO: 11646 - DNA, 906 bp, Gossypium hirsutum
  Clone ID: GOSHI-09MAY01-C25677_1
gggttgactgttgccgacgccacaagttttgcctcaccaaatgggttccactagctggcagatgcaaaggatgtaatggatgcaatccaaaatattcaggagcccgatttccagtgctaactccgaaccttaaaggtttcgaagctgctgtttcagctggagccaatgaagtggccatctttgcctcagcttctgagtctttttccaagtcaaacataaattgcagcatcgaagatagtcttgctcgttttagagatgttgtttctgctgctagagagatctcacttccagttcgaggatatgtatcatgtgtcgttggctgcccagtggaaggaatagtgcctccatcaaaagtagcatatgtggctaaacagctctttgatatgggttgctcagaaatttcccttggtgacacaattggtgttggtacacctggtaccgtcattccaatgctcgaaaatgttatgaattttgtcccaatcgataatcttgctgtccactttcatgacacttatgggcaagctctgtctaatatcttaacatcactccaaatggggatcagtaacgtggattcatcagtttcgggtctcggaggttgtccatatgctaagggtggttccggaaatgttgccaccgagcacgtggtttacatgctcaatgggcttggaatatagacaaatgtcgatctggaaaaactcttgttggccggagattttatatgcaagcatttgaggcggccacctagttatgaagacagcggttgctttgagcagtaataaggctaactcccagtctttaagcgtgcaatcagctatgaacccataaaagacttgttgtgctttaaaaggccataaatatgcatggaatccttacagtgtcaatgaaatgtaattatttgatccttgt

SEQ ID NO: 11647 - DNA, 420 bp, Gossypium hirsutum
  Clone ID: GOSHI-09MAY01-C25667_1
ttccggaccggcctaacctatcatttaatcacatgagttatggcatatctccaagactcgtgtttacagaaaagctgcttgtattggatttgagtttcaatgatttatcaggccctcttccggggaaaattgctgaggcaactgaaaaatcaggccttgttcttctcgacctctctcacaaccggttttctggtaaaatcccattgaagatcaccgagctgaaaagcttgcaagcattgtttctttctcataatcttcttacaggggaaatcccagcaaggattggaaatttaacttatctccaagtggtcgatctgtcgcataactccttatcaggttcaattccattagatattgctgggtgttttcagttacttgcattgatactcaacaacaacaatctttccggtgaaattcaac

SEQ ID NO: 11648 - DNA, 400 bp, Gossypium hirsutum
  Clone ID: LIB3048-001-Q1-L1-C10
tggagaattccggaccagcctaaccttttatttaattacctggggtattggataggtgcaaaacttgggtttaccggaaagcttgttggattggatttgaagttcaatggtttaataaggcctttttccggggaaattggctaaggaactggaaaatcaagccttggtcttctcgaactctctcacaaccggttttctggtaaaatcccattgaagatcaccgagctgaaaagcttgcaagcattgtttctttctcataatcttcttacaggggaaatcccagcaaggattggaaatttaacttatctccaagtggtcgatctgtcgcataactccttatcaggttcaattccattagaaattggtggggtgttttcagttacttgcattgatactcaac

SEQ ID NO: 11649 - DNA, 999 bp, Gossypium hirsutum
  Clone ID: GOSHI-09MAY01-C25637_1
cccccgccgccgcaactttccctgaaaaactagagataaaatcaatcatggctcgagggaagatccagatcaagctgatagagaactcgaccaacaggcaagtcacgtattcgaagagaagaaacggtcttttcaagaaagctaatgaacttacagttctttgcgatgctagagtttcgatcatcatgttttccactactggtaaactccatgagtttatcagcccttccaccacaacgaagcaagtaattgatcagtaccagaaaaccttggggatcgatatctggaacacccactatgagaaaatgcaagagcagttgaagcagctgaaagaggttaacaggaacctgcgcaaagagattaggagaaggatgggcgactgtttgaatgatttgagcattgaagatcttggtgctttggaacaagagatggagagctctgtcactcttattcgtgatagaaagtatcgtgttctctccaaccagatcgatacttccaggaaaaaggtgaggaatgtggaagagatacacaaaaatctcttacatgaactggaatccctgaaagaagatccatatggattagttgataatggaggggattatgataccctgatcgggtatcaaaatggaggtcctcgtatatttgctttacgcctgcagccaaaccatcctagccttcacagtggcggaggctccgatctcaccacctatcccttgcttgattaaaatatctatctcgtgatgatttccgtatccataagctaagttcatgctgttaatcatataatattgctgtgaaagcaaaattggtgtgtactgttacttttactttaaaaattatcgtcacttctattatgtgcctatgttgtatcgtatctgttggagattatgtatttgatgatgatggaacattttcctgtttgtcgttttctaaatttctgtatttaaatcttatgttaaagatatatttggatatgtgtatgctttgattgttggatac

SEQ ID NO: 11650 - DNA, 824 bp, Gossypium hirsutum
  Clone ID: GOSHI-09MAY01-C25197_1
ggtcgccgcgcacgcgtccgcccacgcgtccggttttaaccaaatagttctaaaaaaagaaagaagaagaagaaagcaaggaaggaagaagatgggtcttccatgcactatggctctttggtttcagcttctacttttgatgtgtggcagtgggatacatggtgtgaagaatttgagggaaaaacaaggggatgctcaacttgttagaaaggtggaggataaatattctcttgtttctaatatagcacatcctgcagctgaggagtcatcttctcaagttgctaagcaactgggggatatatattctagtttttctgtgttggtggacaaaagtactaagttgtcttctgatcaacttgctaaggagctggaggataaatattctagaattgctgcctggaaaccttttgttgacaaaactccccaatcatcttctcaacttgctaaggagctggaggataaatattctagaattgctgcctggaaaccttttgttgacaaaactccccaatcatctgctcaacttgctaaggagctggaggataaatattctgctctatctggctacaatattccttcttaaccctcctcttctccatatagttaattagttccttcataaatattctactattattggaatgtaatcccacttaataaagtgtgtgaatttgtatggtatctgttttactttcttccaactttgcatctatttagtaaatattaataaggttaaattttgctattagcccctatattctgcaaaaggtgtgaatctaatctttatgttctaattccgtaatttataaacattttactttttg

SEQ ID NO: 11651 - DNA, 296 bp, Gossypium hirsutum
  unsure (1)..(296): unsure at all n locations
  Clone ID: LIB3149-057-Q1-K1-F2
cgggattaaatattctgctctatcntggttacatatattccttcttaacccctcctcttctccatatgttaattagttccttcataaatattctactattattggaatgtaattccacttaataaagtgtgtgaatttgtatggtatcttttttactttctttcaactttgcatctatttagtaaatattaataaggttaaattttgttattagcccctaaaaaaaaaaaaaagataaaaaaaaaagacataagagagtaatattttatgatattatataaataaaaaatgggggc

SEQ ID NO: 11652 - DNA, 723 bp, Gossypium hirsutum
  Clone ID: GOSHI-09MAY01-C25117_1
cccacgcgtgcgctcacaccttaactcctcaactcccacacgtttacgagtgaatttggtagcagcatggctggttcaagtgccatgcttgtgcagctcactctgatgcttgctttactctcatgttcaatggctcaaagtccatcggcatcacccacaatgtcaccaagttcaagcaccaccccctctcccgttgccactccaccaccaaccaccatgacccctcccccagccatgactccaatgtcagcacccgcaccgtcaatccccatggctcctaccccttcaactactccaatggccccaaccccatcctctgtcccagaggcaccaaccccatcaatgaacagttcaccaccggcacctccacctgtgacgcctccatctatgacgcctaattcagaacctacagctacagctccacctccagccatgacccctggggagggcccaccaggttccgctgcttctacacgtgaatacaccatgtccttgttagcattgcttggaggagttgcactctttgtttaggacacttctttttttggtttcgtttactttgatgtagattaagctatttatttggtattcttttttccttggtccattttctctctcttctcgtcgattcttggagctgatgcttttgtgatttgtgagggctcttttgtagcatttttactttagcttaataaagagagactttgtgattcttggtgtgtt

SEQ ID NO: 11653 - DNA, 354 bp, Gossypium hirsutum
  Clone ID: LIB3149-004-P1-K1-B11
tccggatatgggtatatatatgttggacatgggtgagagcaagagggcccaccaggttccgctgcttctacacgtgaatacaccatgttcttgttagcattgcttggaggagttgcactctttgtttaggacacttctttttttggtttcgtttactttgatgtagattaagctatttatgagtgtattcttttttccttgttccattttatatctcttatcgtcgattcttggagctgatgcttttgtgagttgtgagggctcttttgtagcagttttactttagcttaataaagagagactttgtgattcttggttgtgttactgtaatctttagtccaattattttcttct

SEQ ID NO: 11654 - DNA, 437 bp, Gossypium hirsutum
  Clone ID: GOSHI-09MAY01-C25047_1
gaaattttctaaccgataccatgagagctgtaagggggggatgaatggttgttgagagcaagaggccaataaccataacagtgagtattaagataaataggtaagttagctgtgtggttgctgcttggttactgggaaaatgtagaaacaaacatggagttatcgacagtgtgtgtattctgttttaaaatgtagattctgaatctacaatatgtgcaagatgacccttgcacggtcagatggccagggtagtgcagggtctaggtgacacaattattcttgtattatcatcatttgtaaatgagtgacatcatcatcttcatcattatcataataatttataatgaaaaaaataaaaattagaaattttaatatactttggggcaaaattcttaagctataaatcttttttttttgggtttcgttagaatatcttt

SEQ ID NO: 11655 - DNA, 493 bp, Gossypium hirsutum
  Clone ID: GOSHI-09MAY01-C25077_4
gatttggaaagaaaggttgtgaattggagagatgatgatgacaacactgtgttgcacattgcagctacaaagcaacagcatcaggcagtacaactgttgttggattccttttatgggttagatgcaaacgctaagaactcggaaggcttgacagctcgagaaatcatagaaagggttgaaagacaggggttgaacatgagtggcgccgaagacgatgataccaccaccgtcaagattgagcgcattaagaaaagaaccagtaggtctgaaagagcattaataaagttgattcgtgcaaagaatgggttgttggagaacatgctcaacgcaacactgggggtagcggcgctggtcataacagcaatctaccagtcctctttaagcccaccaagaggtctttggcaagggggtatcctctttcccttctgctccgcgaaccttcaaggaaaactgaattcttctcatcccgctttattactattccgcttcttct

SEQ ID NO: 11656 - DNA, 758 bp, Gossypium hirsutum
  unsure (1)..(758): unsure at all n locations
  Clone ID: AI055156.1
gaggtttcaaataaggatagtcgttttgcaactctcctaatttcttcatcatttaaagaaagaaacaaaagcatggatccaagcttgagagaaatagctggaacaggaaatattgatgccttgtactctctaattggagaggatccatacatgttggagcatattgatcagattcctttcatcgatactccacttcacatagcagcaaataagggccaaattaagtttgcaatggagatgatgaacttgaagccttcgtttggtcggaagctaaaccaagatgggtttagccccatgcacttggccttcaaaatggggcataccaggctagtgcttcgactgttggagaccgataaagacctggntcgcgtcaaaggaagggaaggggatgacccctttccattgtgcagctgcagtggggaactctaatctttattccagtntcttgaaacttgccctgaatgcgttgaggatgtcacggttcgtaacgagactgcattacatcttgctctgaaaaatgaccacaccgacgcttttaatctcttacatggatggcttcgaaagaaccatcgtgangaaggcatggttggaaagaaagtgtgaattggagaaatgatatgaacatctgtgtggactatgcagttcaagaacaaccttagcattacaactgtgttgaatccttattggtagagtaaacttaaaactgaagcttgcaattggaaacttgaatgtggagcaggttacttttacgccaacaa

SEQ ID NO: 11657 - DNA, 662 bp, Gossypium hirsutum
  unsure (1)..(662): unsure at all n locations
  Clone ID: AI054990.1
agcaaatgaaggccaaattaagtttgcaatggagatgatcaacttgaagccttcgtttggtcggaagctaaacccagacgggtttagccccatgcacttggccctccaaacggggcataccaagctagtgcttcgactgttgaagaccgataaagacctggttcgcgtcaaaggaagggaagggatgacccctttccattgtgcagctgcagtggggaactctaatcttttattccacttccttgaaacttgccctgagtgcgttgaggatgtcacggttcgtaacgagactgcattacatcttgctctgaaaaacgaccacaccgacgcttttaatctcttacatggatggcttcgaaagaaccgttgtggaggaggcaaggatttggaaagaaggtttgtgaatttgagagatgatgatgacaacactgcgttgcacattgcagctacaaagcaacaacatcnggcagtacaactgggtgttggagtccctttatggggttagatgcanacgctaagactcggnaggtttgacagctcgagaaatatagaaaggttgaaagacagggctgacatgagtgcgccgagacgatgatccanncacgcagattgacgcataagacagactgtagtctgaagagcttataagtgatcgtgcagga

SEQ ID NO: 11658 - DNA, 499 bp, Gossypium hirsutum
  unsure (1)..(499): unsure at all n locations
  Clone ID: AI054715.1
ggatagtttgcaactctcctaatttcttcatcatttaaagaaagaaacaaaagcatggatccaagcttgagagaagtagctggaacaggagatactgatgccttgtacgctctaattcgaaaggatccgtacatgttggagcatattgatcagattcctttcaccgatactccacttcacatagcagcaaatgaaggccaaattaagtttgcaatggagatgatcaacttgaagccttcgtttggtcggaagctaaacccagacgggtttagccccatgcacttggccctccaaacggggcataccagnctagtgcttnactgttgaagaccgataaacnctgtnccgtcaaagagggaagggatgaccccttccatgtgcagtgcatggggaacttaactttattcacttcttgaactgcctaatgctgangattccggttcgtacgaactgataactctgcttgaaaacacaccgacctttaacctactgatgctcn

SEQ ID NO: 11659 - DNA, 774 bp, Gossypium hirsutum
  Clone ID: GOSHI-09MAY01-C25007_1
gtccctccaagcatcaagctgttgccctccgtgttggctctgatctctcagcattctacaattgtgacatgctagcataccaagacactctctacgtccactccaatcgtcaattttacgttaactgcctcgtagcaggaacagttgacttcatcttcggaaatgccgcagccgtgttccaaaactgcgacatccatgctcggaaaccaaactcagggcagaaaaacatggtgacagcccaaggcaggaccgaccctaaccaaaacacgggcattgtgatccagaaatgtaggataggtgccacttctgatttacagcctgttcgtaaaaacttcccaacatatcttggcaggccctggaaggagtactcgaggactgtggtaatgcaatcaacaatcagtgacgtgattcaacctgctggttggcacgagtggagcgggagtttcgccctgaaaacactgttttatgccgagtaccagaacaccggggctggtgcctcaacttctgcgagagtgaaatggggagggtacaaggtgatcactagtgcaagtgaagctcaggcttttactcctggcaggttcattgctggaggaagttggttaagctctacaggctttcctttcgctcttgggttgtaataattttaaagattgtattgtcaatgtagccacctgccgacttcattgtttggtttgagatttgctttgcggccatgtatctgttaaattattactaaattaatagtagtaataagcgaatgccaaggctttcttc

SEQ ID NO: 11660 - DNA, 609 bp, Gossypium hirsutum
  Clone ID: GOSHI-09MAY01-C25337_1
atacctagaattttcaattgagggttcgttcttcccacgaagccttaatcttctttcttttctgaactccaattctcaatttcccaaaacccacaactctaaaagaaggaaaccctaaagaggaagatggatggtattgaaccctactcttttaatcgccatccgcaataccctcgttcaaccagaactcgccatgtatacagttacggaccagacgaagagctcgacgatgaagaagaaatggaactagataacgaagatgtagatgacgataacgacgacgacccagatgtttattaccaccgcgtcaaagaaagcgagcgttttgaaaggtacccaaagcgtcaaaaggtgagaacatcagtccctagcttccaatatgcacctgaccatagagatagcttaaaaaatgcctatgattggacccaacaggagatttatgttctgttagagggttgggggaataggtttttgcaattagggaggaggagtttgagaggtgaaaattgggttgatatactgagaaagttagtgatgctttgaaaagtgtgaaaaatgaagctcagtgtaggcgtatgattgatgggttgaagaagaagtctaagacat

SEQ ID NO: 11661 - DNA, 396 bp, Gossypium hirsutum
  Clone ID: uC-gsflmaxxa064b07b1
tttgtattttcaattgagggttcgttcttcccacgaagccttaatcttctttcttttctgaactccaattctcaatttcccaaaacccacaactctaaaagaaggaaaccctaaagaggaagatggatggtattgaaccctactcttttaatcgccatccgcaataccctcgttcaaccagaactcgccatgtatacagttacggaccagacgaagagctcgacgatgaagaagaaatggaactagataacgaagatgtagatgacgataacgacgacgacccagatgtttattaccaccgcgtcaaagaaagcgagcgttttgaaaggtacccaaagcgtcaaaaggagatttatgttctgttagaggtttgggggaataggtttttgcaattag

SEQ ID NO: 11662 - DNA, 629 bp, Gossypium hirsutum
  Clone ID: GOSHI-09MAY01-C25217_1
ccctcatcttctaggacagatttttgtctaatattattattaataataaacgggcttggaaagagatatgtcggaaatggagaagaatgttgattggatgattcataatgatgataatagttctaatgattcgtcccctgatggtggtgcttcccacgatattctgggatctaaaagttttgcatttagagctccccaggagaatttctgtatccaggattttgatttgggtaaaatatatggtgttggttcttattcaaaggttgtgaaggcaaagaagaaggatacaggaatagtgtatgctttgaagatcatggacaaaaagttcatcaccaaggaaaataaaacagcttacgtaaaattggaacgtatcgtgcttgaccaactggaccatcctggtattatgcgactctattttacatttcaagataatttctcactatacatggcacttgaaccctgtgaaggtggagaactttttgaccaaataaacagaaaaggtcggttaccggaggatgaagctcggttctatgctgcaaaagttgtagatgctcttgaatatatacacagcatgggattgatacatagagatattaagccggagaacttgcttcttactaaagatgggc

SEQ ID NO: 11663 - DNA, 420 bp, Gossypium hirsutum
  Clone ID: GOSHI-09MAY01-C26947_1
gcaatgcaaaatggcgctttcaatcgcatcgggtcggagtagcaaggaatcatctttccaattaattggggatgctgcatacgaggctgatctgctctttaccaattgcttgcaaacccctgtcgaaacactcccctgttttcccttcatgggatacaccgttgccggagaagccacctttggtaactcacctgaggctgagagtgagacctttgccttgtcacttggaatgctgtttttggagacttttacgtactttattatattcaagtatttctgtatcagatctttcgaattgctcctttcttcatgctttggggtctccgtagaaataccgatcaattcttttctctggggagtacatgtattactggtatttgccattgacttggacttgttgagagtaaaagctcgaaattt

SEQ ID NO: 11664 - DNA, 428 bp, Gossypium hirsutum
  Clone ID: GOSHI-09MAY01-C26967_1
cgatcatatgccgtgcgaggatcctaggcgtaatagtcagctcagtagggagatgaatttctatagagaaaggcattgccctttgcctgatgaaacgcctctttgcttgatccctcctcctcttggctacaagattcccgttcagtggcctgaaagcttgcacaagatatggcattccaacatgccacacaacaaaattgctgataggaaaggtcaccaaggatggatgaaagaggaaggtccttactttattttccctggtggtggaacaatgttccctgatggagctgcatcgtatatagagaaacttggacagtacattcccataaccggtggaactcttaggacggccctcgatatgggctgtggggttgctagttttgggggttcaatgttaaaagaaggcattttgacactctcatttgctc

SEQ ID NO: 11665 - DNA, 340 bp, Gossypium hirsutum
  Clone ID: GOSHI-09MAY01-C26907_1
gtcatctgcatcttccgtcctttcaaaggttgatctgcagggtttgagcatcacggatctttctcttgctgtgatcgggcactatggcaagtctgcgactaatctaatgctgagtggtctacaaaatgtgagcgataagggattttgggtgatgggtaatgctcacggtctgcaaaagttggtctcttttacaattgcgtcttgctggggggtaactgatgtgagtcttgaagccattggaaagggatgcgctaacctgaagcagatgtgccttcgcaggtgttgcttcgtttctggcgatggattggtggcgcttgccaagtctgctggctcttgagtg

SEQ ID NO: 11666 - DNA, 453 bp, Gossypium hirsutum
  Clone ID: GOSHI-09MAY01-C26847_2
ccagctattggaattcagcacgagcctttctgtttttagcagagaaaaatttcaaaggaaaaggtgagcatcattcggtgtcgatcgaaccttcatacaaagaaatacgaaaatgtcttcaacacccattaagcgtccaaaatccaagcataattcatattcaaaaaattcttcactgaactccatactcgaaccaccccatagcttattcccttcaaaaggcgagttcttgcgtctcattaccgtacttgcaatcgcatccgctgtagctctctcctgtaattacttccttaccttatttaccttcacctctaaacccttttgtgatagtaacttagaccccatcgattcattctcagattcttgtgagccttgtccaagttatgggaaatgttatgaaggcaaattggaatgtatttatggttatagaagacatggaaagctgtgtataga

SEQ ID NO: 11667 - DNA, 638 bp, Gossypium hirsutum
  unsure (1)..(638): unsure at all n locations
  Clone ID: AW187183.1
gaactccatactcgaaccaccccaaagcttattcccttcaaaaggcgagttcttgcgtctcattaacgtacttgcaatcgcatccgctgtagctctctcctgtaattacttccttaccttctttacctccacctctaaacccttttgtgatagtaacttagaccccatcgattcattctcaggttcgagaaaatgatatttggaatgatttagacagacacaacttgatgcaaaatgttggttcagatataccacatatgtgtatatgaaaagaagggcaatggagacaatagataaattattggagacaagaacaaatctacatgggttacaggaattcaagtgtccagttgctctggcagagcattacaaacctttgacctgtcgttttcgtgaattggtctcccagcagtctctttttatcatgcctatttgtgccgggcttatagggtgtgcagtattgttcttgaaagtccgtcaaagaatgtatatttcggctagagcagaggagcttttcaatcaggctttgcatcatttgaggcagatttctcaggaaatatctcanccgaatgttactgtttgggggagaagaactgcanctctgcgttgcacttagtcacaattgagcaagggatttt

SEQ ID NO: 11668 - DNA, 644 bp, Gossypium hirsutum
  Clone ID: GOSHI-09MAY01-C26867_1
aggaagtcaagcaagtacccaaaccttgttcgctggtacaattctgtttctgcagaatacagcgatgccttgaatgaagttactgcatggtatgttggcaaaaaaggattgggaaagcaggtggcagctaaaccaaaagagcaaaagagtgcagatggaaatagttctgataaggtgaacttaggtagcaggccctcatctgaaatagatcttccttgtgctgaattgggaaaggtgcgattgagatttgctcctgaacctagtggttatctccatatagggcactctaaagcagccttattaaatcaatactttgttcaacggtaccaaggtgaagtaatcttgcgctttgatgataccaatcccaccaaagaaagcaatgaatttgtagaaaatcttataaaagatgttgagacattgggcatcaagtatcaaatgatcacctatacttcgattacttccccaagttaatggatatgggctgaaagttgataaaggaggggaaagcctatgtggatgatcaccacgtgaccaatgcagaagaaagatggatgcattgatcaatgtgagcacatgttaagagaattaagtatggaggaatgatgctgctctgaagaagtgcatgtgcttctggaacttgaatc

SEQ ID NO: 11669 - DNA, 783 bp, Gossypium hirsutum
  Clone ID: GOSHI-09MAY01-C26817_1
ctcaaggacactcctgctacttatgctatagtcgaattcttcgctcattggtgccctgcttgcagaaattacaagcaccattatgaaaatgttgcaaagcttttcaatggacccaatgctgtgcatcctggaattgtattgatgactagagtagactgcgcattaaagataaatagcaaactttgtgataagttttctgtgagtcactatcctatgctattttggggtcctcctacaaagtttcctgctggctggagctctaatcaagcgaaaagtaaattacatgtaattgatgatgggcggacagctgaacgcttgcttaattggatcaataagcaaataggcagttcatatggtctggaagatgaaaaatttgaaaacgagcatctttcatcaaatatttcggatcctggacagattgctcgagctgtgtatgacgtggaggaggcaactgcaactgcctttgacataattctagaacataagatgattaaatcagaaactcgagctccactcattaaattccttcaacttttagtggcccatcatccttccaggagagtgtcggaaaggaagcgcataagtacttgtcaacttgacgaccgggccccttgtatttttgtggtcattaaaccagccttatggttacccccagtacatgataagggtgcctcccaatttccatatttgtggaaagggtggtccccgtggatattggatggtttgtcgtggcaacaagaacgattcccggggctttaattggggtttatgggttttaatgca

SEQ ID NO: 11670 - DNA, 606 bp, Gossypium hirsutum
  Clone ID: GOSHI-09MAY01-C26837_1
gctttttcttgggaaaaattaaagaagtgagtacaaatgcttggtgggttgtacggagatctaccgccgccgtccgatgaggataaccaaccaagcagtaacgccacggtatggtcaagcagtacaaagatggctcctcccactctccgcaagcctttctccggctttgctccgccgcagactatcctcagatcccaaaacaaacccaaaaaccctattcccaaaacaacaacctcttcttccgtttccatctccgtgtcgccttcccccgtggcggttgcacccgacggaatggtgcaacatcagcctgcacttgtgggcgtcacttccagtgtaatcgaagagtatgacccagccaggcccaatgattacgaggaataccggagggagaggaagaggaaagctatggaagaggagatgaggagggaactggagagaaggcggagggaagaagacgaaagggagagggaaagagaagagagggaaagagagagagaaagggaaagggaaagggaaagagaaagagattcaatgatcaggctgaatatttaggcgaggaagctgggaaaaggcgtgctggtatgaagcgggggggtcaaggcccca

SEQ ID NO: 11671 - DNA, 226 bp, Gossypium hirsutum
  Clone ID: LIB3493-010-P1-M1-B3
gggaaaagtaaagaagtgagtacaaatgcttggtgggttgtatggagatctaccgccgccgtccgatgaggataaccaaccgagcagtaacgccacagtatggtcaagcagacaaagatggctctccactctcgagccttttcggttgctcgcgagactatctagacaaacaaccaaacctttcaaaaacactttttcgtcattcgttgctcccggggtgagcacg

SEQ ID NO: 11672 - DNA, 447 bp, Gossypium hirsutum
  Clone ID: GOSHI-09MAY01-C26597_1
aaacagcatctccaactctaagtttcaattgcattcctttgtttcttttttctagcttttctatcaatggaatttcgttatgttccaatcttcgctatggcgcttgttcttgctgttggagcaacgagacatgtcgctctaccagcagagatgtactggacgtctgtgttcccaaacactccaatgcccaaagccttgcaaaatcttttaatcccccctgctgctgctggtttgtttgcaattttcttttcttttccccaatgattgagtagacatatataattcaggtaagtcttctaatgctctagatatctctctgcaaatgagatgtacgaaatcacatgaaagctgctttggctaatatgatcaaaaggtataaaggaatattaatcccacgatacgtcacagcttataggatatatgaaaacgcagcaggcaattcaaagc

SEQ ID NO: 11673 - DNA, 637 bp, Gossypium hirsutum
  Clone ID: GOSHI-09MAY01-C26507_1
attgaatcctctttatgtatacttttttaacatccgcttagcttcccaacattttcaattttcaatttcctattttgttgttgaaaatctgaaaataaaaaaaatgtcggtatcaatgtcaaaaccttcaatctcagcttcaatccccattccaagacctcgtaaaccctcctcattttcacaactcaaaatccgatgcgaatctttagattcagcgtcgaatattgatgtcaaaagaccgcaatcctcttcgttatcggcggctgggaagctgatggattcggattccaaaaacggctcatacccggctgctatggccccttttacgggcagagaccctaacgtgaagaaaccggagtggctgaggcaaaaggctccgcaagggctgaggtttgacgaagttaaacaatctctctcgcgcttgaaactcaatactgtttgtgaggaaactcagtgccccaacattggagagtgttggaatggaggtggggatggcattgcaactgcaacgataatggtgcttggggacacttgcacccgaagttgtcggttctgtgcggttaaaaccacaggaaaccgccaccgcctgaccccatggagccagaaaatacagctcaggccattgccagttggggtc

SEQ ID NO: 11674 - DNA, 441 bp, Gossypium hirsutum
  Clone ID: GOSHI-09MAY01-C26487_3
atacctattattgtgtcgggaaatatgaaaaaaaaaaacctagttttgttaacttgctacttgaaaaaggtttaggccctactgaatttattaagttctttgatagaaaaccatgttatacattcctttgttctttatataaagtaatggaacctttttttctttcctaatatacacaaggaaaaaattttaaaaacacggatccttgtaagaactgttatgcagaatgttagcacttgagtaatgaatctcaatatgtgtaaattaaatttgtgttctctctggaacagaattttgaaagttatagactaccctttttcttgtccatcaaggggcctttatgaatgattccttgtttcctaaactagcatttggtctttctcatttctcctctcattgctttaattccacatggtttagattatcctttaactacttcct

SEQ ID NO: 11675 - DNA, 632 bp, Gossypium hirsutum
  Clone ID: GOSHI-09MAY01-C26487_1
gcagaggtacccaactatgggcggacttttctttctaccagttggtctatttgtttcgaattttgcgactggtttttcttctgttgaagttgccgcagctggagcagcaaccttagcatttgctacaattggactacttgatgatgccttgtgcgtcattaagcaacacagcaatggcttatctccatggttgaggctatttttggaggtttctgttgggatttggttttcgttttggttgaatgctacaaattggtcatcgccctatggcatgaaaatgctggttcctctacctgctccactgggccttgtgtgctttggaaaagtttacctattgttgacttcattttcttttgtttccatggggaatggggttaacttaacagatggtcttgatggtctggctggagggactgctgcattagcctttattggaatgtcaattgcagtgcttccagtatgccctgagcttgctatatttggagcatcaatggctggggcctgtgttggttttcttttgcacaaccgatacaaagcatctgtgtttatgggtgatactggatccttggccctcggtggcgcattacctgcaatggctccttgtactggaatgttctttcccttattccttt

SEQ ID NO: 11676 - DNA, 559 bp, Gossypium hirsutum
  Clone ID: AW187901.1
attcctttgttctttatataaagtaatggaagctttttttctttcctaaggtacacaaggaaaaaattttaaaaacacagatccttttaagaactgttttgcagaattttagcacttaggtaatgaatctcaatgtgtgtcaggccttttttcttttttaaattgatttcgtgttctctctggaacagaattttgaaagttatagactaccctttttcttgtccatcaagtggcctttatgaatgattccttgttttctaaactagcatttggtctttctcatttctcctcccattgctttaattccacctggtttagattatcctttaactacttcttgttatttttgctcaagtgtatatttggcattcgtcaaaccattttattaccttttaatgcaggaaaatgctggttcctctacctgctccactgggccttgtgtgctttggaaaagtttacctattgttgacttcattttcttttgtttccatggggaatggggttaacttaacaaatggtcttgatggtctggctggagggactgctgcattacccttta

SEQ ID NO: 11677 - DNA, 450 bp, Gossypium hirsutum
  Clone ID: GOSHI-09MAY01-C26427_1
caccaataagttttttagaaattaaaaacttgtctgggttgccaaattgcaaatcaaatttcgattgaatcagacacaatttcttttttcaattttataatgaagaacaaaagggcgagaacgagtgtggacaaggcggtggttgatgtttggcaacgggaagttggggaactctccactaggaatttcgcccaccggcttgccgcttctgaggatcttgtgctccgactcgagatttacaagaaactcaaaaagcaccgaggttgtgtgaacactgtgagctttaatgctgatggtaacattttagtatctggttctgacgataagagggttatactatgggattgggaaactgggaatgctaagcttactttccagtcaggccatgtcaacaatgttttccaagcaaaaatcatgccttactctgatgatcgcagcttggttacctgt

SEQ ID NO: 11678 - DNA, 722 bp, Gossypium hirsutum
  Clone ID: GOSHI-09MAY01-C26787_1
gaatctcttgccttatccagataaacataatgattcatactcagctacaaaggcgttgggagaggcattggtcgtcaagtcaaatggagttaacgggcttctaacttgttgcatacgtcctagcagtatttttggccctggagatgggttgttggttccatctttggttgcggcagccagagcagggaaatccaagttcataattggtgatggcaacaatgtatatgatttcacttatgttgagaatgtggctcatgctcatatttgtgctgaacgagctctagcatctggaggagaagttgcagaaaaagctgcagggaaggcatattttataaccaatttggagcctatcaagttttgggagtttgtttctctaatacttgaaggtcttggctatcagaggccaaaaataaagattcctgccattgttgtaatgccaattgcacatattgtggagtggacatatcggctattaggcccatatggtatgaaggttccacagttgacaccttcaagagttagaattctgacttgcagcagatcttttgattgttcgagagcaaaggatcagattggctatacaccaattgtcttactcgaggatggtctgcgtaagacaattgagtcgttctcacacttgagagctgaatgtcaacccaagaaaggagggccatctaaagcttcagtttatcttggacgggggagggttgctgacacactac

SEQ ID NO: 11679 - DNA, 693 bp, Gossypium hirsutum
  Clone ID: GOSHI-09MAY01-C26757_1
gcaggggcaagccacaaccttcgtttgagcagacaaagccagctttgccagctcttgagcgccttatcaattcaaatgatgaggaagtcttgacagatgcatgctgggctctgtcttatctctcagacggtactaatgacaaaatccaagctgttattgaggcaggtgtatgcccacgacttattgagctcttgcttcatccatccccaacggtcctcattcctgcccttcgcacagttggaaatattgttacaggggatgatatgcagactcagtgcattattggccaccaagctcttccctgcctcttgaacctgttgacaaatacctacaagaagagtatcaagaaggaagcttgctggaccatctcaaacatcaccgctggaaatgtagatcagatacaggctgtaattgaggctgggattattgcccctctagtccatctccttcaaaatgccgagtttgagatcaagaaagaagctgcttgggcaatttcaaatgctacatctggtggtacccatgaacaaataaagtttttggtgagccaaggttgcattaagccattatgtgatcttctgaactgtcctgacccaagaattgtcacggtttgtttagaaggtcttgaaaacattttgaaggttggtgaaacaaaaaaaaatctgggtcacactggagacgtcaatctctatgcct

SEQ ID NO: 11680 - DNA, 326 bp, Gossypium hirsutum
  Clone ID: GOSHI-09MAY01-C26737_1
cttctctcgtcttcaagttttttcgacggaccaggcgattaaataagatggtgaagaaaaaggaaagaactttaaatgagaccgaatcatcaattgatttgaagtcattgattcatgaaagtgctttgttctttgacaaattggttgagttaatccctgctaggttttatttacctgatgaaaaggataaaccttggtttcagggtcttagcaaggccgaaaaggcttctgctaagaaacaagctagagaaaacattaagaaagctaggagagataggttagatcctgagaaatcatcaaaaacgactctcgatttggtgaaagag

SEQ ID NO: 11681 - DNA, 442 bp, Gossypium hirsutum
  Clone ID: GOSHI-09MAY01-C26657_1
acaatgttgagaaggtattgtcagtcctaaaatctgaatttgctttctttgttgattttgatgtatcaaaacagcgaagcagtttcatagtcatttaggaaatcgttaaggaaaaagaaagatttatgaaaggttacatgctccctgtagcatactgggttctttatatggtttgttggtaaaatgttacttttttactatataaacgtgcatccaaggatcaaggagtctatacgtattgattttcaccctgcaaataggcaaatgtggaaattgggttactgattcagagagggatggactgggttgactttagttctttgattctctccctctcggaatggttttattgtgagtaaatctgacttaaaaaatgggaaacaagagaaagggctaagctactgaaatatagcttcttggtacattactgtgttgggatact

SEQ ID NO: 11682 - DNA, 840 bp, Gossypium hirsutum
  Clone ID: GOSHI-09MAY01-C26647_1
ctcaactccaccatcttcaccatttttctcacttttttgcccttttggtttcaccctcactgaccaatgggacaaaaatcgagaaacaaccgtctctttcactcctccattattcttctcctagtttctctctccgccgctttatcctctcctttccagctccaaaccctactcccccgccctctcccttcagcacccaccctctcatggcacgactccgaacccgaatctaattcccttcaagaaacctcccagctcgaccctcttagttccaacaccacattggaagtgcagctggaattgcaccatgtagacgctttatcttcggaagatactccggagctactcttcgacttacgactccaacgggacgcgctgcggtctggaactatatactctcttgtctccaaagctgttgcgcggaaccctccacgcgccgccggtaggcgttctgggttcagtagttctattatttctggactcgctcaaggtagtggagagtacttcacgcgcctaggtgtgggtactcctgcgaggaatctttatatggtgcttgacactggtaggcgacgtggtttgggtccagtgttcaccttgcaagagttgctactctcaatctgaccccaatttttgacccgtctaaatcagcttctttctcaagtattccttgtagatccgcactttgccgtagcttagattcatcgggatgtaatcaacgccggatgtgtctctatcaagtatcctacggcgacggttctgttactttcggcgacttcttcactgaaacactgacgtttagaagaacctcggtgggacgcgtggcactcggttgcggtcacg

SEQ ID NO: 11683 - DNA, 438 bp, Gossypium hirsutum
  Clone ID: GOSHI-09MAY01-C26627_1
attttgagaagataaaagcaaaagaaatcgacggattttggatcccattgtttgacgaatttgcaaattcctgaactgaattcattttgatatggtgatacggtttgaattagcatcaaatttgatgttacctaatgtttacataatatatcttaattttctccatttatatcgtcttctttttgttttggataaggccagttgaaattgtatatcggctttcagttgatttttcatatggggattaacttttatgcaactttactttcattcttatctgtcatttaagttttagggatctttggtacttgatgtactatttttgggttaaggaatttaaatcctaaaacgatataatgtttttgtttgttggctacaggagtgtataagaacaatggttatttgatggtttcatgtaatggaggtctcaatcaaatg

SEQ ID NO: 11684 - DNA, 365 bp, Gossypium hirsutum
  Clone ID: GOSHI-09MAY01-C26197_2
cggagaatgatagaggggaatatgtgcgttaattaatttaatcctgtaccaactgtcccggagacaatatgataggcaaaaatcagggcagatggtgctttgattgatgcaacatacacaaacatattactaaccaggttagtgacagtgtgttttagaagcttgtatgccatatggcatcgtcgccctccccgcatcgctgatgcacttcctgcatcctctccacggacttgcaaatgccactgcagctccaatcaaaagatgcaccacatggattccctgcttgagctttccactcgcaatccaagagagtaccacagcagaggcttcgttcgtcaatatgctcaacatcatgtccttttaac

SEQ ID NO: 11685 - DNA, 1087 bp, Gossypium hirsutum
  Clone ID: GOSHI-09MAY01-C26197_1
aattttgagagatgagttatcttgtcaaagatgtaaccatgaacccatgaacaacgaactatctgtgccatatggcgacttctaacaaccctttctgggtccgaccaatcaacagcttcaaatgacaagccgatatcagtccaccactcgtagatggtaaggataacattgtagcatataccaggatgtgctgtttaaatagttctcatctaaccttctaatgcttcaaccagtgtaaaacaatgggggaccgctttcggtgaatgataaatgagaatctgtgcgttaattaatttaatcctgtaccaacaggttagtgacagtgtgttttagaagcttgtatgccatatggcatcgtcgccctccccgcatcgctgatgcacttcctgcattctctccacggacttgcaaatgccactgcagctccaatcaaaagatgcaccacatggattccctgcttgagctttccactcgcaatccaagagagtaccacagcagaggcttcgttcgtcgatatgctcgacatcaagaccaataaaccaagaacctaaagagacgtcttcgtttgcatatctatgaagtatgtgccgattgacggagatgtaggttgccaagtctttggacactgcatatatttgtccggttgcatgcctgaagtatttgtttccctcctcaccaaatttccaatattctggctcatggtatttgacccctttctgtgctagaacaggtccagatttcatgcaaccaatataaacacggggttttgatctgtgacgggccaatgtagaacccaccatacccagatttacatgtacatcatcatcaactttaatataaaagtctgcatcccacttagcgacggctgtggaaaagtatatttgggttttcgatgataattcatggtaaccttctatgtgattcaggcgcagaaaatccttgtattgctcctcttcagcttcgatccctcgatccaaaataccacccggggttgcactgtgtcctatgacaaatcgcattataattcccttctctttctccaacctctttaattcctccccgtgaggcatgccagtttcaatgacga

SEQ ID NO: 11686 - DNA, 675 bp, Gossypium hirsutum
  Clone ID: GOSHI-09MAY01-C26187_1
gcaaaccagttaataattaaaaaactacttttttttagtgaaagaaaacacccagaaaaagcctttcttttttttttctttatcaggccataatcatttcacaaagactcctcctttaatatcataggaaggaagaaaaaaacactaaaaagtccgatccccttcggggggtcctcggttcattctccaatggcagactccaagatgtatatttctcaaacagagcttgaaaaccacaaaaaacccaggagatctatggatctctatacagggaaagatctacaacgtcactgaatggagtcgagaacaccctggaggagcacttcctttgctgaatctggctggccaagatgccaccgatgcctttgtagcctatcatcctggcttagcttggcaatatcttgacaagttctttactgggtattatctcaaagattactctgtctccgaggtatccaaagatttcagaaaacttgctgctgagttttcaaaaatgggtctctctgaaaagaaggaacacgggacaggcattctgctttgcatcatagcattgctgttttctatcagtgtttacggtgttttatgctctaacagcgctttggtgcatctactttcgggtgctttactgggattctcatggatacagagtgggtggattggacatgattccgggca

SEQ ID NO: 11687 - DNA, 1101 bp, Gossypium hirsutum
  Clone ID: GOSHI-09MAY01-C26147_1
tacaaattggtaaccagtagaccttggaaaccccaaattattgtcctcataatctccataattatatccttcaaccctgtccttgtagccggtgatatgatgggagtaaaggttttaagcttttaactggtttacatggaatctttgtggtgtgggaagccatagcttctatttttgcattctcactctctgttgtactatgaaagccttcccttttcctccaatcaccaaaaggagatgctttttaatggtgtctttatcttagttggaagttgctgacaggcacataaccctaactctaaagccccgtatctccctttagttaaaaagctgatctacaagaacccaatgaaagaaagcataagccctcactttctttatatatcagctgcagctgcgcccatctttgcttagccaaaccccaagtttcaagcaaacaagccaagggattttaattttgtttcattgatcagcagcaaatgagagaggtgaactttgagtaactctttttatataagcttttggtgatgatgcaagctaaaacagcaatggtgaccactctttaccatcgaccgcaccgccttctcctcgatacgcaaccgaacgcatcgccatcgctaccgaatggaagcaggacgcgcaatgctttcgccaatgaagccaactttgacaccaacatggtgatcatcctagcagctttgctttgtgcattgatatgtgctctaggactaaactccattatgcgttgcgctttccgttgcggcagaaggtttggtttggacgccacggaagagaccgcggcgcgtttggctgccgcgacgggcctgaagaagagcgcgttgcgtcggcttccggtggccgtgtatggttcagggaatggatatgaaaggctactgagtggtccaattggccttggagaattcatgggtggtgaaaaaggtaagggtgttgccaaaatgtaaccatggtttccatgtaaggtgtatagatacatggttgctgtcacactcatcttgcccaacttgcaggcagtcattggtggatcaggcaactagcagcagtgatggtgcagtggagatcgaaaacggaatccgaccacat

SEQ ID NO: 11688 - DNA, 937 bp, Gossypium hirsutum
  Clone ID: GOSHI-09MAY01-C26117_1
ctaagatattcaaccaccatgaatgattcttcactgttctgcagttcatcaaatcacgaagaagaagctgacgttttgcaagccatgcatttagcttccatttcatcactccctttcactttgaaagtcgccgtcgatctcggcttgttagatattatagccgaagccgccgacactcctcctggtatggtgtcggttgctgagatcgtctctaagcttcccaccaataatccaaacgccccttccattgttgatcgaatgctcaggcttttggccgctcactccatcttgacctgtgatcaaatcactggccaagatggcctgacccaaagatcgtatggtcttgcatcaatcggtaaatacttcgttcaaaatgaagatggagtctcctttgctgctttgcttcgtctccatctcgaaaaatacatcctcgaatgctggaaattcttgaaggatgtgacattggagggaggattctcatgcaagaaagcttttgggaagcatttgtttgagctgctggcggatgatgatgatatgtcgaaatctttcaatgaagcaatgtcaatttacacaactttaataatgaaccaagttcttgaaacttacagaggatttgagggtgtgagccaagtggtcgatgtgggaaggtggagttggtaccaaccttaagctcattgtttcaaagcatccacagattaggggcattaattttgacctaccccaagtcattaaagatgcagttccttgcccaggggttgagcatgtagcaggagatatgtttacggaaattcctaaagctgaagttatttcatgaagtcgatgcttcatgaatggggcgatgatagatgctgaagtactcaaagtatgtatgatgcattgcctgaaatggtaaatgtatcggtggaatccatataccggaatacagagacagacttat

SEQ ID NO: 11689 - DNA, 463 bp, Gossypium hirsutum
  Clone ID: GOSHI-09MAY01-C26017_1
ctcacgtttccgcccacgcgtccgcccacgcgtccgcccacgcgtccgggagaagtcataaactctcacactgccccctcctatataccttctttggcttttcctttttttccatctgatacaatacttttatcaaagtctgttctttttccattcttgagaaggagaaaacaaataaaggtgatagatcaactcaagcaaaggacactcttttaatcccactcattcttgggtcattgatagatctctgcttgattttctacaatcctttttttttctttacacgaaagagacaactcagaaacaagatctaccaggatttagacattggctttagagaaaaaccaagacaatgctgcctcagaagcaagctgaagaagcaatagtctcaaacttaaccgagatggagcttgaaaccagagaagaagagaaagatgaagatgaacaacaatcattgtttagt

SEQ ID NO: 11690 - DNA, 587 bp, Gossypium hirsutum
  Clone ID: GOSHI-09MAY01-C26027_2
gcttttattgctgtagagacagctcaacgtctgttccttggaatgataaaatctgttttccgggcaccaatttcattctttgactcaaatccctcaagtcgaatcctcaacaggtcatctacagatcaaagcacgttagacacagatattccttacagattagcggggctggcatttgctttaattcagttgttcagtatcatcatccttatgtcccatgttgcctggcaaatcttccttctcttccttgccatcctcagtatctccttctggtatcagaactattatattacgactgctagggagctagccaggatggttggaattagaaaggctcctattttacatcatttctcagaatctatcacaggcgcaacaacaattcgttgttttggccaggaagacaggttcatggagaaaaacttgagcttaatcgatgattactctcgtgtagccttccataactccagcacaatggaatggttgtgtgttcgaatcaattttcttttcaacttcgttttcttcctggtgttggtcatcctggttagcttgccgcggtctgctattgaccctagcttggcaggatt

SEQ ID NO: 11691 - DNA, 702 bp, Gossypium hirsutum
  Clone ID: GOSHI-09MAY01-C26027_1
ccagataagtcaaactgaagtcatagaagaaaaacatggagagcccaactgcaaggataagctctttgaaagtagccaagaacaagaaaccgaaaccggtcgtgtcaaatggagtgtttactcgacttttgttgcagcagcttataagggagcacttgttccagtcatcgttctctgtcaagttctcttccagggactacagatggggagcaattactggattgcttgggcaactgaggaaaatcgcaatgtatcaagagaacagttaataggcatatttattttgttgtctggtggaagctccatcttcatactgggaaaggccgttttgctggcaactattgctgtagagacagctcaacgtctgttccttggaatgataaaatctgttttccgggcaccaatttcattctttgactcaaatccctcaagtcgaatcctcaacaggtcatctaccgatcaaagccacctttgacacagatatttccttacagattagtcggggctgtgcattttgctttatttcagttggtcagtatcaatcattccttatgtcccatagttgcctggcaaaattttcctttttttctttggcatcctaatatctacctatggttttaaactatttttttcaactgtaggaactaccttatagttgtatttaaaagtccattttaatatttcttaaactttcaaggccag

SEQ ID NO: 11692 - DNA, 398 bp, Gossypium hirsutum
  Clone ID: GOSHI-09MAY01-C26397_2
gagaagatgagtcatgtgagaaagatgatgaaggaaaggggcatgaaggtagtgcctgggtgtgcatcaattgaaattgatggctttgttcatgagtttgtgatgggagattggcatcatcccgaggcaaaggagataagacaggctttgagggttattgctgagcgagttagtgatgctgggtatgaatctcaggtttctgatgtgttacacaatgttggtaatgaagagaaaggaatttatttgtgtgagcatagtgagaggcttgctattgcttatggaattttaaagacgaaagcaccagtgccaattagaatagtaaagaatctaagagtttgcatcgattgtcatgaagtgacaaagatcatcagtaaaatctatgagcgtgaaataattgt

SEQ ID NO: 11693 - DNA, 905 bp, Gossypium hirsutum
  Clone ID: GOSHI-09MAY01-C26397_1
cgttcgggggcatgaaggtagtgcctggggtgtgcgatcagatgtgaaattgatggcttttgttcattgagtttgtgatgggagattggcatcatcccccgaggcaaagggaaataagaacaggctttgagggggttattgggctgagccccagttagtgatgccctgggtatttgaatctcaggtttctgatgtgttacagcaggtgtggtgggtgaatgaagaagaaaggaatttatttgtgtgagccattagtgagaaaggcttgctattgcttatggaattttaaagaccgaaagcaccagtgccaattagaatagtaaagaatctaagagtttgcatttcgattggtcatgaagtgaccaaagaaaacatcagtaaaatctattgagcgtgaaataattgttagagaatcgtgttcggttccattaagtttgtagattggtaccttgctcttgcaaggattattggtgattctcaaatttattaagctaaatgcccaaacccatgatccagattcttattgacagtggtagcacagtgggagtgttgcattgcattatccggcttccaaacatatgagagttcctgaggctaagctaaggaaggggggccatatctccggcttcacaaatcaaccaattacagtggttagataaattaaactagcggtaaccatgacaacgatgagcaaacagtgacaatggaagcttaatttctaatagcttatcaatctttgggagacccctgatgaggaaggctaagttgattctagcaacttttagccagatagttaaatttccaaccccttgcggcacaaggtacatgaaggattgtaatattatcttgcataacttttttttattcataattttattttaataagaaaaatggagattatgaac

SEQ ID NO: 11694 - DNA, 418 bp, Gossypium hirsutum
  Clone ID: GOSHI-09MAY01-C26377_1
cgcaggtatttttcttttctttttatttggttgggaagttctcttatttcggcattcaattgatgaatcttctttttcctttttcatgtcggtttcctttgttgatagatagttcgaaaccatctgttaatgctaattatggtgttgttatctagaatttattagagaaataagaaaatttaagtgaaagaaaaattaaacatggggtggtcagtaatattccttgtgtttcgatatgtaaataagttgaatcaaattattatggcttgatcaccaagtttgtaaataagcatgcagggatggaaatggctcaactcatatgtggaggttgtcgaacatttctaatgtatacatgtggagcagcaagtataaaaatgttgcaccaggtacaatttaatgattttgtgcatgtgatata

SEQ ID NO: 11695 - DNA, 608 bp, Gossypium hirsutum
  unsure (1)..(608): unsure at all n locations
  Clone ID: LIB3825-021-Q1-K6-E8
cacatatcaaagagcaatggtggaagctatgcctaagaacaaatggagctcatttttgctgatgttatgtgttccattattaatccattagaagtcataggaagtccgacgaacttggatatttgggcagctgttcatctgttaacagtttaggtgtggcaactggtactaggtgtagtctaggaggcttgatatgggatctactagaaggacggagaatggaagattacttgcttttatggattgggcctgacaattcagctttttccaatgttgtgctgacatttaatggctgtgagatagtcagatatgatgcaacagaggatcaattagtgacagatgtttcacaacagaaaaggatccttaagcgtagatattatctagtggagagagcaaaagatgctaatatggttgggattttagtaggaactcttggtgtggctggctaccttcacatgattcgtcagatgaaggaactgatcatgcttgctgggaaaaaggcctacactcttgtcatgggaagaccgaaccctgccaaacttgctaattttcctgaatgtgatgttntcatctacgtctcatgtgcgcaaactgcacttttggatagc

SEQ ID NO: 11696 - DNA, 392 bp, Gossypium hirsutum
  Clone ID: LIB3048-009-Q1-L1-E9
catttaacaatgactgaagaatatgatgatgttatcgtattgggaagctatttgtttaaaatttgatgtttgtttttagtcagatatgatgcaacagaggatcaattagtgacagatgtttcacaacagaaaaggatccttaagcgtcggtgtgcatttcaacttttcgtgcttctgctcactactttcgttaccccttctcaaagtttgctgtttctcttcccgattcagcaacacccttatcaatacggtattgtgttactcgttttgcactatgtgactgccgtttcttgcagatattatctagtggagagagcaaaagatgctaatatggttgggattttggtaggaactcttggtgtggctggctaccttcacatgattcatcagat

SEQ ID NO: 11697 - DNA, 398 bp, Gossypium hirsutum
  Clone ID: GOSHI-09MAY01-C26337_1
gacggattccgcattttggctgcttcaccaccgatttctagtccattgcaaaagcaaagattaggtaatcggtgtctcatttaccctccccttgccgaaatcgactccagccgaccctttccctcccagcgaaccaaacctctagccgatcccgatttcaactttgcatctttctctgattcgacggtgtcagatcttcggacggcttgaattagtaaactccgccttctgagtaacctatttctttcctctctgcatgcgattggttcagttcttggcaaatcggcatttcggttcttgccggttatgggttttttttcattattttttttggggtggtgatcattgcaggttctttgctccagcaggtcttcatcgagctcctctccgatttcctc

SEQ ID NO: 11698 - DNA, 435 bp, Gossypium hirsutum
  Clone ID: GOSHI-09MAY01-C26327_1
agtaacactaatggttgtgatgatatcaacgaaaatgaaccagatgctaaaagatggtaagcttggatcatagccaaaaatgaaaaacagattctcccattaatgggttcttgttttagcttacgcttttgtgattttttttttttgcaggaaaggtgaaaatgagaatgagggtatggtaggttgtggtagcaaaactgtgaaagagcctagaatagtggtgcaaacaacaagtgatattgatattcttgatgatgggtatagatggaggaaatatggacagaaagtagtcaagggaaaccccaatccaaggttagtcattattctccacctaattgtctactaataggaagcctggatgtgcagtttattcaactaaaattgttgacttcgtcaaaatcttttatacaggagctactacaaatgtacgacaat

SEQ ID NO: 11699 - DNA, 258 bp, Gossypium hirsutum
  Clone ID: LIB3048-009-Q1-L1-G9
aggaactctaatggttgtgatgatatcagcgaaaagggaccagattctaaaagatggtaagcttggatcatagccaaaaatgtaaaacagattctcccattaatgggtacttgttttagcttacgctcttgtgatttcttttttttgcacgaaagtgtgaaaatgagaacttgggaatttgcagatgtggttgctaaactgggtactatccacctacagggactcaaactacatgcgataaagctcttttataaactt

SEQ ID NO: 11700 - DNA, 909 bp, Gossypium hirsutum
  Clone ID: GOSHI-09MAY01-C26257_2
acaaccttggccaatgggccaaatgttggggtctgttagattgtctttttaatgaaaaggaaacaaaagagaaaatattatttgtttaatggatacaatatgttttaattgcagttgaattcatattagtttttgagagactagtgcttcaactctatgaataactaatatcaagagtacaaatttatcaaacacaactctctcaagaaaacaagctgaaccatagataacctatataatatcaagagatagtagtcctatcaaaatatatcctgatttagagtattcatctttggtaaacacatttggtgatgtttttctttattttggttttatgataatggtagcactatagactaaatgaaacaatgcagtaatgatgtttctgtgattcgaatgagcagctgacggctcgtggcaagccgctgttgcagtgccactacagctatagtgcatgtggtcttggttccgatgggacagatagactggtacagttggtgcaggagatgcagcatggtaaagcctctagagttgatgatggaactctatatggagctaaaattactggtggcggctctggtggaacagtttgcgtagttggaagaaattgtctccgaagcagccaacacattctagagattcagcaaaggtacaaaaaagcaacaggatatttgcccttcatttttgaaggttcatccccctggtgttggcaagtttggatatttaaaaattcgacgtagcatcgctcccaaatcttaaactgctgccttccaacgcttccatttatttattttcaaatagactcagctatttggttagatgtatcttaaaaataaattaagcaccaatctctggatatttatttaaagttaattaccatcaattgaatttattcccttcgtttatttt

SEQ ID NO: 11701 - DNA, 1287 bp, Gossypium hirsutum
  Clone ID: GOSHI-09MAY01-C26257_1
gctttgaagatagtattagcatgctggtttcttctgcagtcccagagggtaaaggagtatcgtcttccgccgccgtggaagttgctagcatgtcagctatagcagtcgctcatggattgagcattagtccaagagagcttgccctactctgccaaaaggtggagaatcacattgtaggagccccatgtggtgttatggaccaaatgacttcagcatgtggtgaggcaaataaactacttgcaatggtttgtcagcctgctgagataattggtcttgtaacaattccaagtcatatccgattttggggaatcgattcaggaatacgacacagtgttggaggtgcagactatggatctgttcgaataggagcctttatgggtcgaaagattataaaagctacagcatcaactaggttgtctcaatcaatgtctactgctaatggggcatcccctgatgaagtggacaatgatggactagaattacttgaagccgaagcttcattagattatttatgcaacttgtcacctcacagatacgaagctctttatgccaatctacttcctcaatcaatgcttggtgaggtgtttttggagaaatatgttgatcatggtgatacagttacagtaatcgataagaaacgaacatatagtgtaacagctgccgctaagcatcctgtttatgaaaattttagggtcaaggcatttaaggcactgctgacatctgcgagttcaaatgagcaacttacggcacttggagagctgttgtatcagtgccactacagctatagtgcatgtggtctcggttccgatgggacagatagactggtacagttggtgcaggagatgcagcatggtaaagcctctagagttgatgatggaactctatatggagctaaaattaccggtggcggctctggtggaacagtttgcgtagttggaagaaattgtctccgaagcagccaacacattctagagattcagcaaaggtacaaaaaagcaacaggatatttgcccttcatttttgaaggttcatcccctggtgtaggcaagtttggatatttaaaaattcgacgaagcatcgctcccaaatcctaaactgctgccttccaacgcttccatttatttattttcaaataaactcagctatttggtttagatgtataacgcttccatttatttattttcaaataaactcagctatttggtttagatgtatcttccttaaaaataaattaagcaacaatctctggatatttatttaaagttaatatttaccattaattgattt

SEQ ID NO: 11702 - DNA, 1250 bp, Gossypium hirsutum
  Clone ID: GOSHI-09MAY01-C26277_1
catcgagctgctttgttgaagctcgaggaatcatgccaacacacatgatgacaagagttctcacaagtttcaccctcgccgccggccaagtttctgctgtggttcaggaagatacatttgtggcaagtccgagaattggacccaaaccaacggcgaacctagtaaccaccagattactatcccaaatgctctaggaactgatgtacttgatgttgagaagcctgtggttttcacttacgaagatattcttttttcaaccgatgggttctcagattctaatctacttggtcgtggaatctatggttctgtttatttcggtttccttcgggaccaggaagttgctatcaaaagaatgaccgctacaaagacgaaggaatttatggcagagatgaaagtcttgtgcaaggtccatcatgcaaatctggtagagttgatcggctatgctgcaagtgatgatgaactcttccttatttatgaatatgctcaaaagggttcccttagaagccatttacatgatcccttgaacaaaggtcataccccactttcgtggataatgagagttcagattgcactcgatgctgctagaggcctggagtacatccatgagcataccaaaacacattatgttcatcgagatatcaagtcaagcaacatcttgcttgatggttctttcagggcaaagatttcagattttggtttgtcaaagcttgttgggaagacaaatgatgaggaagcaacagcaacgaaagttgttggtacatttggttatttggcaccagaatatttgagtgatggacttgcatcatcaaaaagcgatgtgtatgcatttggtgttgttctgtttgagattatatctggaaaggaggccatcatacggactgaaggcagtgcgatgaaaaacaccgaaagacgttcattggcatctattatgttagcagctctccggaacacaccagactcgttgagcatgtcaaacatgaaggactatattgatccaagtatgctggatctttaccctcatgattgtgtcttcaagatggctatgttggccaagcaatgcgtggatgaggatcctattgtacgaccggacatgaaacaaattgtgataaacttgtcacagatcctattatcctcagttgagtgggaagcaacacttgccggttacacccaagtatttagtgttttggcccatggctgatcgttatagatatctcgtccgaatttcttttctcattcttatgtccttatat

SEQ ID NO: 11703 - DNA, 451 bp, Gossypium hirsutum
  Clone ID: GOSHI-09MAY01-C26207_1
cccacgcgtccgcgccaacttccatttcttttttcaggtcgcattggtgagagcacgattgagaagagcgactgagagatatggatctttgaattcaagaaaagtttcgaatgccatttcccagctaccggaaaaagagcgcagcaataccaaccatgaaatttcagcgaagctggatagcattccagaaagttgtactactctaggacatgctgctgataaggcaactaagatattggaaagggtgaatagctcttcaattccttctgtggtctgcctatcaaatgaggttgattccggagggcgggacaatctggctgcttaagggtgctgaacataccatgaaacccgttccactagtaagacctcgttgatttcctttgccctatatctttggaactaatgagggatccagtgattgtggctacaggacagacatatgagagatctt

SEQ ID NO: 11704 - DNA, 1175 bp, Gossypium hirsutum
  Clone ID: GOSHI-09MAY01-C27997_1
cctgatcaaagctgggattggcagccaagtaaaggttactgttcctctcaatgctgatgtttatgcaagttcaaatacctatccgtctggtggtgatttccgtactgatatctttgaccccatgcttaaaattgtcaagttcttgaatgatagtaattctcccttcacggtgaatatctatccttttataagtctctatactgattccaatttcccagttgagtatgcattctttgatggcaacgcaacgcctctaaatgatggtgggacattatattacaacatgtttgatgctaatcttgatactcttgcacatgcattacaaaagaatggatttggaaatctgcccattatagttggggagattgggtggcccactgatggagaccgaaatgctaacatagaatatgctcgacgattcaatcaaggttttatggctcatatttctggtgggaaaggaaccccaatgagacccgtaccgatagatgcgtatttatttagcttgattgatgaggatgaaaagagcattgatccagggaattttgaacgccactggggtattttttattttgatggacaggttaaataccctctcaaccttggaactacaaacagtggagcattaattcctgcaaaaggtgtacagtacttggaaaggaagtggtgcgtgatgaagccttcagccccacttgatgacccacaagtggcacaaagtgtgagctatgcatgtggccttgctgactgcactagcctcggttatgggacatcttgtggaaacctagatgctaggggaaacatttcttatgcctttaacagttattttcagaagaataaccagtttgaaaaagcctgcgaatttccaaatgtttcagttataacgaaaacggatcccacccctacggggatgggaaattgcaaatttccaataatgatccagccctattatgaatctgcaggacggaggtttgggtgtggccagatgccattgcctttggtttctgttcttctcctcctattgctaacggttgtacaacactaatcggggggcatcatcttcttcaggttgatgaaaactgttgagaggtgtagttgaagctatgaattttgctatctataaggcaaactgtgaatttgtcttgtttattttatatgcatctgtatttgttagggttgtg

SEQ ID NO: 11705 - DNA, 400 bp, Gossypium hirsutum
  Clone ID: LIB3048-054-Q1-L1-C5
agagcattgatccagggaattttgaacgccactggggtgttttttattttgatggacagcgttaaataccctctcaaccttggaactacaaacagcggagcattaatatctcctgaaagtggtccccacttttaaaaggaaaggtgccccatgaaaaacttcatccaccctttgatgaaccaccaattagacaaaaagtgagctatttatgtgggcttgctgactgcactagcctcggttatgggacatcttgtggaaacctagatgctaggggaaacatttcttatgcctttaacagttattttcagaagaataaccagtttgaaaaagcctgcgaatttccaaatgtttcagttataacgaaaacggatcccacccctacggtgggaaattgcaaatt

SEQ ID NO: 11706 - DNA, 435 bp, Gossypium hirsutum
  Clone ID: GOSHI-09MAY01-C27937_1
gtcccccagaacttttgttgggttctacagattatactgcggctgtggatctttggagtgtcggctgcgtgtttgctgaacttcttctcgggaaacctatcctgcaaggacgaactgaggttgaacaactgcataaaatttttaagctctgcggttccccacccgacgattactggaaaaaatccagacttcctcatgcaactctattcaaaccacaacaaccttacaatagttgtcttcaggagacctttaaaattttaccgtgcaactgctgttaacctagtagaaactttgctttcagtggagccgtacaagcgtggaactgcttcctcagctcttgcattagagtatttcacaacaaagccttacgcatgtgatccatcaagcttgccagtatatccacctagcaaagagatagatgcaaaacatcgtgaa

SEQ ID NO: 11707 - DNA, 437 bp, Gossypium hirsutum
  Clone ID: GOSHI-09MAY01-C27857_1
catagatgctggatttgagctaaagctatgcatatacatttctataatttcaaatttttaagtgtgtttcggtaaaaaaaataaaattaaattgtttagcattttaaagtgcattgtgattgttcatttatgtttgcatgcatttatatgtgccttgccgcatctttcttctttatagaatattataaatctataaatatattgattgttagttttattttatagatataggccgactcattatatagaatattagatatataaaaggtttttggatatacatagagcctttatcagttaatccttttcatatttattctatatatatctcatttttctcattcctttaaatggccccagatgaaaaaaaaaccctcaaatttaagtctatgcaactatacaagtttcgctcttgttacaaggtattatttaatttc

SEQ ID NO: 11708 - DNA, 779 bp, Gossypium hirsutum
  Clone ID: GOSHI-09MAY01-C27867_1
cggtcgcgtgggctgggatatcaactcggttgatccttgtacatggaacatggcggcttgttctgctgaaggtttcgttatctcactagaaatggccagcacagggttatcaggtctgctttcacccagcattgggaatttgagtcacctaaggacaatgttgttgcaaaacaatcagttatcaggtcccatcccggatgagatagggaaactctcggagcttcaaactctggatctttccggtaaccactttgttggagcaattccaagtactttgggctctctaactcatctaagttatctgaggcttagcaagaacaatttatctggacctattcctagacacgttgcgaatctcaccggtctttcgttcttggacttatcatataataatctcagtggtcctactccgaaaatactagcaaaaggttatagtattacgggaaacaactttctttgtgcttcttctgaacatatatgcacagatgtttcttatccattaaatgtggcaggctcagtttcgtcttctcgagtcagtggaaaccatcattggctgctttctgttgccataggaattggttttgcatttgtggtttccgtgatgctgcttgcttgttgggtgcgttggtacagatctcggattatgctaccctcatacgtgcagcacgattatgattttgaaattggtcatataaagaggttctcctatcgtgaactgcaaatcgccaccagtaattttaactccaaaaaacattttaggacaaggaggatatggagtt

SEQ ID NO: 11709 - DNA, 869 bp, Gossypium hirsutum
  Clone ID: GOSHI-09MAY01-C27557_1
ccccgcctccgtggaacacaccaaaaagtgaaagaaaaacatggctgccgcttcttcttccactatcttcttcaatccgttgacttctcagctctgcaactccaagaagaagccttgctctgacccttctgcctccaccctcaaactgggtctttttggacacgccactaacactgccgctgcatctctgagattcaagaagcttaattatgggaaaggatactcttctggtttctctgttgtgtgtaaagctgtctcggttaagcctgacgccgagatcgaagggcttaacattgctgaggatgttactcagcttattgggaaaacacccaatggtgtacttgaacaatattgtgaaaggctctgttgcaaatattgctgccaagcttgagatcatggaaccatgttgcagtgtgaaggacaggatagggtacagtatgatttctgatgctgagcaaagaggacttataacacctggaaagagtattcttgtggaacctacaagtggaaacacaggcattggccttgccttcatagctgcctcaaaaggatatagactgatcttgacaatgccagcatcaatgagtttggagagaagagttctactgaaagcatttggagctgagcttgttttaactgattcagctaaaggcatgaagggggctgttcagaaagctgaagagattgtgaaaagcacacacaacgcctacatgcttcaacaatttgacaatccagcaaatcctaaaatacactatgagacaactggtccagagatctgggaagacacccgaggcaaagtggacatttttgttggagggattggaactggtggaaccatatctggagttggtcgattccttaaagaaaag

SEQ ID NO: 11710 - DNA, 436 bp, Gossypium hirsutum
  Clone ID: GOSHI-09MAY01-C27547_1
tgaaagtggctttagccaatattcaaagatgcccacgctgactcagatggtcgggcagttgacactggatgtttcctaagatactcagactcccccttctttggtgctaactacaccattgacctgaaacccttcttgaaaaccagaaatacaactaaaagggatgctctgattggaggactggttggaggtggaggtcttctgttgcttataactttattattgttttgggttagaaaatcaagaaacaatatggcagttcctcaagaggatgtagaggcgccacctgagttacaaggtccgttgacttacacttacaaagaattgaattttgcaacgacaagttttagtcaacaaataaattaggagaaggtggttttggtgaagtatacaagggtatattgaagaatggaagggtggtagcagtgaagaaact

SEQ ID NO: 11711 - DNA, 753 bp, Gossypium hirsutum
  Clone ID: GOSHI-09MAY01-C27537_1
cggcgcgtggggcaaggtctgtccctgctcataaggttatattgcaagcatcagggaactttgttctgagctcatcacatgaagatgttattcagctacagcaggtagcatatccaactctgcacgcgcttcttcagtatgtgtatgcaggccaaacacagatttcagaggcacaacttagttcgttgtggggtttggctttacggttcgaagtgatgccactagtgaagcaatgtgaggaagcaatggagcggtttaaagcaaacaaaaagttgtccgactcgggtgagactatggagttatcatatgcgagttctcatatccactttggaggaaatttctgttgtgggctcccaataaacatgcagagactccaacaattgcgttcaacaggcgagtacagtgacattagcatttacattgagggtcaaggtctcattgctcgggctcataaagtcattctcgggttatatagtgtcccatttacaaagatgttcacgaatggaatgtgtgagagcaactcacctgaggtttgtttaagggatgtgtctccagcagcattgaaggctatgcttgaattcatgtactgcggggatctcaggattgaggataatgaggactttggtaccttgttactccagctccttctgttatctgacaaattcggaatctctcttcttcatcaggaatgctgcaaaatgcttttagaatgcctctcagagggacggagttctagtggaagatggtcataca

SEQ ID NO: 11712 - DNA, 401 bp, Gossypium hirsutum
  Clone ID: GOSHI-09MAY01-C27147_1
gtaccttccatcgttttgataaatttaaccttaagtataggccttgcggtcaaagtaggctcagggaaattttcctcaagcaggataatcttatccaaggtcgattccttggggagctgacaaagcaggtcttttctgatcttgccgcaagcaaataccacatggctgaatacagaatatctatatatggcacgaagcaaagtgagtgggatcaactggctagttggatcgttaacaacgtattccacagtgagaatgttggctggctaattccgatccctcgactttccaacgtatacagagcagacggggactgctacaccatctcagagcattcttgacaacatcttccttcctctctttcaggccactgcggatcctgattcacatcctcagatgca

SEQ ID NO: 11713 - DNA, 436 bp, Gossypium hirsutum
  Clone ID: GOSHI-09MAY01-C27067_1
tttaaagtccagtttctagatgaaatagggacatttggaaggaaaacagaggatagccaaatttgaacatcaataataaggggaaagcaagttttgaaaaacagagtaaaagggggaaaaagttgagaacaaatgggagatgttattttgtttgtcgataatttctcatcgaattcttcaatttcactctgtagaatttgccatgaagaagagttggaaagctttaagagcttggaagttccttgtgcttgttcaggcactgttaagtttgctcatagagattgtatacagagatggtgtaacgagaagggaaacacaacttgtgaaatttgtcttcaggaatatgaaccaggatatacagtaacagttccttcaaagaaggctcagctgattgaagatgctgtaaccatcagagatagcctacaaattccaagaa

SEQ ID NO: 11714 - DNA, 418 bp, Gossypium hirsutum
  Clone ID: GOSHI-09MAY01-C27007_1
cttaatttcaaactcttgtactcgctagatttgttgggttatcgattatgtgccagaagtacccttttcttcattttcaatgtcaaagcctaaatagcgccgccgtcgaaccatgatcgttagaacgtacggtcgccgcacccgtggtttaaccaggactttctccgactccgtaaacgactacgtttccgactcccctccactctctcaagaaacggtgccgtctgaggacgtgtatagtttccctttcgccactcaagagtcatcttccttttggccatcatcacaagaattcaacgacgacgtttaccagggccgggtaacgaccgggttggaagcatcccaccgtgggttccggttccaccatttgggaaacgacctcgtagggagatcttagaagccgaaaccaagccagggt

SEQ ID NO: 11715 - DNA, 708 bp, Gossypium hirsutum
  Clone ID: GOSHI-09MAY01-C27357_1
ccccgcgtccggggaggtaaccttcgtaagcaatggcttcgtcaagtgtcgtgactactcaaatatcaaatcaacttggaaccaccgattggaagaagtccatcccttcactctcccttggtaacttaaacttgaataaaaatctagctggtaagcagtttttatcattgtcagctcctcaaaaatctgggctgaactataaatccctacgtgtaaatggtctgttcggaggaaaaaaggaaaatggtgagaagggtgatgatgcaccttccaaggcaggaattcttgggaacatgcaaaacctctatgagacagtaaagaaagcacaaatggttgtccaggttgaggctgtgcgagtgcaaaaggaacttgccgcagcagagttcgatggctactgtgaaggtgagctgattaaggcaactttatctggaaatcagcaacctgtacgcatagagatcactgaggcagcaatggaattgggtgcagaaaagctatctcttttagttaatgaagcatacaaggatgcacaccaaaaaagtgtccaggccatgaaggaaagaatgagtgaccttgcacaaagtttaggtatgccacaaggtctcagtgagggattaaaacaacaatgatctctcaactagcaccctgaatggaactttctgaaggaaatgatgccacattgatctccttgaactggcacccagaattacc

SEQ ID NO: 11716 - DNA, 385 bp, Gossypium hirsutum
  Clone ID: LIB3149-040-Q1-K1-C1
aattgcttctaaggaatgtgccacgaaaggttcaattttctgaacttccacctggtttagggggggtgccattaagctatctcttttagttaatgaagcatacaaggatgcacaccaaaaaagtgtccaggccatgaaggaaagaatgagtgaccttgcacaaagcttaggtatgccacaaggtctcagtgagggattaaaacaacaatgatctctcaactaacacctggatggagcttagtgagggattgaagcaacaatgatctcttgactggcaccaggattagcttcagttttgcatacaaaccaatggtagaaattttcatttgtactttttactgcgaattcatgttgtgaatttccgttctccatagaactggcacac

SEQ ID NO: 11717 - DNA, 1065 bp, Gossypium hirsutum
  Clone ID: GOSHI-09MAY01-C27337_1
agggaatagggttaaagcagttgtgataggtcttggtgcgggcttacttcctatgtttcttcatggatgtatgcaatctatgcaaattgagggagtggagctagatcctgttatgcttaaccttgcaagagactattttggttttactgaagataaacgaatgaaggtacatattgctgatggcatccagtttgtccgggactacagaaacttattttcagctggcaatgaagtgctcctttcttccaacggaagttgcaaactttcagatgctgaaagcagaagtaccgctattgacataattattggtgatgtggactcttctgactcaagctctggactgagatgtcctgctgctgattttgtggaagattcttttcttcaaaacgtaaaagatactctttccgagcaaggtctctttgttattaatttggtctcaaggtctcctgccatcaaggatgcagttgtctcaaggatgaaagaggtttcggccccctgggtttgcattcagctggagggagaggtcaacctagtactttttggtctttgttcggagtctcgcattgaggaggattgcatacctgatgctgcccttaaacttgataaattgcttaagtccgaacatcccgagataagccagagcatcacagatgcagcaaagaagctcaaacgtttaaagtgaagactgtttgataacaaagtttcccctttaatgtattctcaagtaactcgagagcaagcttttgcagattttgaagcaaatgacattgaaactgggtgactgaagattgcgccacagaacatgaaaaatctgaggttggtttttatttcttttctttgaatggtatgcattctgcatcatctccagtttggttgttcgatgtcttaatacttccgtcttgcatcgtttttgcatacattttaagcattacagtcagaggcccgaattcaaaatataccctcttcaatatgtaatagtattaacctgtaaatcacaccattgggtgtacgaatttagacaggatttttatttgacttaatcgattcattgagatttgagaccaa

SEQ ID NO: 11718 - DNA, 767 bp, Gossypium hirsutum
  Clone ID: GOSHI-09MAY01-C27217_1
cttctttctgcgcactccgatatatcccccaagacgcctatccacccctttttctattttatttacaaacgccaaaatccccaaagcttcacttcccataatctgcccccatcatggacgttgatcctcgtctatacgaacaaattgcagtcaatgataatgacatccacaacatcatcatgtcatatcttgtgcacaattgctttaaagaaaccgtggaatcgtttattgcttgtactgggatgaagcagccttctgattatcttgaggacatggaaaaaagaaaaagaatttatcaatttgctttagagggtaatgcacttaaggcaattgaattgactgaacagctggcaactaacttactagagaaaaataaggacctgcattttgatcttctaagccttcatttcgtcgagcttgtatgctctaggaaatgcacagaagctctggaatttgcacagatgaagttgaccccatttgggaaggagcaaaaatatgttgaaaagcttgaagattttatggctctgcttgcatatgaggaacctgagaaatctcccatgtttcacctgcttagcttggagtaccggcagcatgttgcagagagcttaaatcgagcaattcttgctcatggaaaccatccaacctacacggcaatggaaaggctgatacaacaaacaacagtagttagacaatgcttaaaccaagagcatgcaaaggatgggccaccgccattttcgttgaaggactttctaaaaacctgaacagtg

SEQ ID NO: 11719 - DNA, 548 bp, Gossypium hirsutum
  Clone ID: GOSHI-09MAY01-C20877_3
tccacgcgtccgcccacgcgtccggtctacagttgagtcggtagttaaatcagcagtgtcaaaagagaagcgcatgggcgctgcatctcgtccgctggttcttccatgactgctttgtcaatggttgtgatgggtcaatactcctagacgacacttcttctttcacgggggagaaaactgcggctcccaataataattccgtgagaggtttcaatgttgttgatgacattaaggccaaggtggagaaagcttgccctggtgtagtctcttgtgctgatatcttagcccttgcagctcgggactctgttgttattcttggagggcccggctgggatgttaagcttggaagaagggattcaaagaccgccagctttgctgctgcgaatagtggtgtcatcccacctccgaccgccacccttagtcaactcatcaacagattccaagcgcgaggtctttctgccaaggacatggttgctttatctggggctcacacaactgggaagccagggcccggccttcgcagtcgtcgcatatacaacgagacaaac

SEQ ID NO: 11720 - DNA, 449 bp, Gossypium hirsutum
  Clone ID: GOSHI-09MAY01-C20877_2
tgagaaaagataacgatattcacaagaaaaaagttgaatttgattggtacagcttggagggcccggctgggatgttaagcttggaagaagggattcaaagaccgccagcttttctgctgcgaatagtggtgtcatcccacctccgaccgccacccttagtcaactcatcaacagattccaagcgcgaggtctttctgccaaggacatggttgctttatctggtataatagaccattctttcctcccctgcactgcactactttattatatctatacatctcttctaagctaaattgctttatggtgccgagccaggggctcacacaattgggaaggcaaggtgcgtgctttccagaggtcgcatatacaacgagacaaacatcgatacttcatttgcgaaggcaaggcaaagtagctgcccaagaaccagcggatcaggggacaacaat

SEQ ID NO: 11721 - DNA, 609 bp, Gossypium hirsutum
  Clone ID: GOSHI-09MAY01-C20877_1
aaacacctctgcacttttatcttcttttataatttgtcaagtatatcattatacatatcgagactagagagaatggctttttcttcttcatttagtgtcatgtttgttgtggtggtttggatgatggtggggagcagtagctatgctcagctctccactaatttctactctaaatcatgtccaaaggtgttgtctacagccgagtcagtagttaaatcagcagtgtcaaaagagaagcgcatgggtgcttctctcgtccgcttgttcttccatgactgctttgtcaatggttgtgatgggtcaatactcctagacgacacttcttctttcacgggggagaaaactgcggctcccaataataattccgtgagaggtttcaatgttgttgatgacattaagcccaaggtggagaaagctttgccccgtgtagtctcttgtgctgatatcttagcccttgcagctcgggactccccgttgttattcttggaggccgctgggatgtaagcttggaaaaggatttcaagaccgcagctttgtgctgcgatatggggtcatccactttcgacgcacctagtcactatcatgattcaacgcgagcttctgcaagac

SEQ ID NO: 11722 - DNA, 952 bp, Gossypium hirsutum
  Clone ID: GOSHI-09MAY01-C20837_1
cggacgcgtgggccgtcccgccgcctcttttctcttggaaaaaaataagaccaccttgaagtaggaatactgagatggggatggaaggtatttcagcgaccatgtacaagaacttgacagggtactggaggaggagaggctacgtgaagctaaatggtacgagtggagcacggcggagtcgggtggagctgggctcctcacggcggaagaggttctggaagatcaggatcaaggcaaagctgagaataagatcgccgaagaagtggttggtttggctacgtgatgcgtacatgaaaatgatgctggggttagccaactccaggatggtaagcagtgggtatggaggtagcatagcgaatcaaggaatcgctgcctttgggaagcgtccggttaaagagtatgacgagaaggtgtccgtggtgatctacaaatcgttggtgatggctcacggtcaggtggtgccgcgggaaccaggggggctttgctctgccatcatctgtcaacgctgaaaatcagattaagtaaagggattattttgaagtatgtcagattattttttgccacaaaactgaggtgaaaatagcagttattagttcatgaaaattacagaaagcacagttcctaaagaaaagcagataaaatatgaaaatccttccttttttttttttttctaatctctccaaaaatgctgctattaagtaaggcatgtaaacttgttcaatttaacaaaaagacttttaaaacccgcataaatggttaatgtgggacccaaaagaaactttttttaaatttaattagttttctccaaaagcttgttacttaataaaaaacttaaggatgctgctaaataatctcattagtttaaaggaaaattcaccttaattttttcgggggggccccttttaagaaacaaattttctaatccgggtttaggaaagaatttttttttttt

SEQ ID NO: 11723 - DNA, 431 bp, Gossypium hirsutum
  unsure (1)..(431): unsure at all n locations
  Clone ID: LIB3083-053-Q1-L1-A6
ccaggatggtaagcagtgggtatggaggtagcatagcgaatcaaggaatcgctgcctttgggaagcgtccggttaaagagtatgacgagaaggtgatcgttgagatctacaaatcattggtgatggctcaaggtcagttggtgccgcgggaaccaggaaagctttgctctgccatcatctgtcaacgctgaaaatcagattaagtaaagggtttattttcaagtatgtcagattatttttcgccacaaaactgtggtgaaaatagcagttattagttcgtgaaaattacagaaagcacatttcctaaagaaaagcagataaaatatgaaaattcttgctttagttttagtttttttattttattttttaatctctccaaaaatgttgttattaagtaaggcatantaaattgttcagtttagcaataagct

SEQ ID NO: 11724 - DNA, 1509 bp, Gossypium hirsutum
  Clone ID: GOSHI-09MAY01-C20557_1
ccaagcaagtttggagaagttctcaagcgctactaatccagatgttgtggaacagagtctgaatagtttggctgagaaggcaaacaaagagatggcctcggcagtgaatagctcggcccccgggctgcaggacgtctgcgccaggacagtaaatagctccactgaggagatgaaaagagagacaactacaataaagagctcagcggagaagatgaacaaagagacagccttgaaaataaataactcagctgagaagatgaagaaagaaacatcattaaatagctcagctgagaagatgagacaagagacagctgcagaaaatggttcagctgaaaagatgaagaaagagacagccttgacagtaaatatctcagctgagaagatgaacaaagagacagccttgacaataaataactcagctgagaagatgaacaaagagatggccaggacagtgaatagctcagctgagaagatgagacaagagacagctacagtaaatggctcggctgagaagatgaagaaagagacggccttgacagtaaagagctcgaacgagaaggtgaagaaagaaacagccttgacagtaaataactcggctgagaaggttaagaaagagatcgcttcaacagtgaatggctcagctgagaagatgaaaaaagagaccactgtggcagtttcgaaatcacctgacattgaaactatgctggggccattagggatgaatgagacatcagatttatttcatgcagatccttttgttgctgattcaaagccttcgatagatagtatcgttaaggatgaaaataatcccatagcaaacgtggagctgaacaggaagggcgattcaaccaacaatgagaatcagaagtctggcaggaaagcttctaatcctgcaaaacaagatcatactgagaatgggcctcaaatcagtcctgcactgccaagctacatggcagcaactgaatctgccaaggctaagctgagactgcaaggctctcctcgatttagccaggatggaggtgaaaaacataacctcgctcgtcgccagtccctgccaatttcagccaatagtaaaatccactcacagtcaccaaggacgcagagactggttcatgcagggaaggaagggagcaaaagcgacagaccactgtcatccagagacagaaatgccaaggcgactcaagtagagtggaggaggtgatcttattgagatttgaggagttgttggcactattaggttcaagattcatatgctttgtggtgtaaattaatagaacttgctttgaaactgaaaccgggtcgataggatgtgtgcgcgggttgagtgcctctgaaaattcaatgtttctcagtgtttgtgagtgaatttgagtgtaaatcaatagattttgaactttcaaacatgccgcaaaataatcatcgttgtgataaattgcttcattccgtttgtttcttcttttcctccccccgctatttttagttaaaaaaaaaaaaaaaaaaaaactcgag

SEQ ID NO: 11725 - DNA, 373 bp, Gossypium hirsutum
  unsure (1)..(373): unsure at all n locations
  Clone ID: LIB3145-005-Q1-K1-A12
cgcgggcatntgagaaggatatgacgccttttttatagcnaaagagcgcatggggagatactcgccgcctgatcttatgagagcgggcgaggcggggaaactcntattccaatcctccgtaggcttagtctagcgcttctttaggaccttttaataacttaagcgaacttgaaacattctgaattagctaatatgaaagggagcataaagcgacaagaccaactgtcatccatgagacagataatgccaaaggcaactcaagtagagtggaggaggtgatcttattgtgatttgaggagttgttggcactattaggttcaagatacatatgctttgtggtgtaaattaatagaacttgctttgaaactgaaac

SEQ ID NO: 11726 - DNA, 340 bp, Gossypium hirsutum
  Clone ID: LIB3083-106-Q1-L1-A1
aggagatgaaaagagagacaactacaataaagagctcagcggagctatttactgtcatggccatctcgttcttcatcttctcagctgagctattcactgtcgaggccatctctttgtttgccttctcagccaaactattcagactctgttccacaatatccggattagtagcgcttgggaacttctccaaactttgcttttgcttatcagattcaacctgtgactgcactgaattttctactacaggattatgaacctttctcaagttgcgtttaaccttttcaagctcatttggtgggttttcctgcactgccatctcagctggccaactggaaacttt

SEQ ID NO: 11727 - DNA, 1258 bp, Gossypium hirsutum
  Clone ID: GOSHI-09MAY01-C20517_1
tttaaagatttgggcatgactgttttagttagtcaagttaataggttgaggaaaatgaataaaccagtagttggagttggctgtgcttctacaggggatacatcagcagcattatctgcttattgtgcagctgctgggattccttctcttgtatttttaccggctaataggatttccatggctcagcttgttcaacccattgcaaatggtgcatttgttttgagtatcgatactgatttcgatggatgttcccggttcgtgccacgcgtcccgcctggattgccgatttatttggcgaactccctgaatagtttgcggcttgaaggacaaaaaacggctgctattgagattttacagcaatttgattgggaagttccagattgggtcattgttcctggtggaaatcttggaaatatttatgctttttacaaaggattttcaatgtgcaaagagttgggacttgttgataagattcctaggttggtctgcgcccaagctgcgaatgcgaatccgttgtatttgtatttcaagtctggttggaaagactttcagcctgtgaaagcgaaaacaacatttgcctctgccatccagattggtgatccagtttccattgatagagcagtatatgccttgaagaattcaaatgggattgttgaggaagcgaaagaggaagagttaatggatgccatggcacaagctgattccactgggatgtttacttgcccacatacaggggtggcattgactgcactgaataagcttaggagaagtggggttattggtcctactgataggacagtggtggtgagtacagcccatgggttgaaatttacacacagtaagattgattatcactctaagaatatcaaggacatggcttgcagattggcaaaccctcctgtgcaagtcactgcagatttcgggtcggtaatggatgttttgaagaagtatttattaagtaaatctcattaacttgattggcaaacccgaatttcgggtcggtaatggatgttttgaacaagtatttatcaagtaaagctcattaagccgattaatatgagcatgatcagacttgctcatgttgtgcctttatattgctgtgtttaggctttattgttgttgttatttcaatgtatttttgttttcattaggattgtagctttgaggagagaaaacaataacatcttagcaaagcttaccaattttgaagggatctctaccatttgaatttaatggcattttaaatctttaaaaaaca

SEQ ID NO: 11728 - DNA, 576 bp, Gossypium hirsutum
  Clone ID: GOSHI-09MAY01-C20447_1
caaacagaccttttgttcctacacctattcttatatttaaatgtttttttcagtttcagctccatactccaaatcataatttgccttgctttgttttgttttcattgttttgctaaataatgcctctggaaacattcaagcctgaccattcctctggtgaacgagataagcatactagattacttgataaagaagtcaaagacatggtctccaccattactcgccgtgttgttgggagttcataaaccgggatcgagccacgtcagagacgatggtgatgacgatctgcatggtgttggtatcatcacgcttgcaggaagcaatgccggggcgacaatgcgaagcgaggtggatgagaaatccagcagtcctcatgggatttcacttgggggggagcctgatgaatggagtacctatgtcaacagcaatttccaaggctgtaacatttcgatcatgttcgagagcagttttaacgccacgatcccgggagttatttggacctcttaaattgttccgaaccttgaaggcaaaaatcaacagattagccttggggggggaaggaaatataaaatggtt

SEQ ID NO: 11729 - DNA, 813 bp, Gossypium hirsutum
  Clone ID: GOSHI-09MAY01-C20427_1
ctttgtgtcctctctgtgtgcttttcttcactgtttgttccccgtcaaaatattgtgtcacaggaagaaaatcccaatttccacgagaaattttaaacaaaaaaagaaacccaaaaatggacaaagaaaagaaattaaaacaaacccaagaagaagaggaaatggaattcaaagactgtgaaaaccatagccaacaagctcaacaagaagaagaagaagaagaagaagaaaaaatcgagataggcgatgaaataattcgaagcaaaattggtatcatgagagcacttgcagagagagatgacccatcagttaaggaagtggatgattttatgatacggagattccttagagctcgtgatttggatatagagaaagcaaacaccatgttattgaagtatttgagttggagaagaacgtttttgcctaaaggattcgtatctgaatcggagatttcaaatcaattggctgataataagctttgtatgcaaggagttgataaacaaggtcgacctattgtcgttgcttttggtggtagacataagcctactaaagggaaccttgaagaggttaaacgctttgttgtctatggtttacagaaaatttgtgccagaatgccaagaggacaagaaaagttcgtggcgatcggagatctcgaaggatggggatattcgaacagcgatattcgtgcatacgtcccatctctatcgattctccaggattgttacccagagaggcttgccaaattgtttattgttcatgtgccttacatattcatgactgcctggaaagttgtttacccattcattgacagca

SEQ ID NO: 11730 - DNA, 663 bp, Gossypium hirsutum
  Clone ID: GOSHI-09MAY01-C20757_1
cgcaaaaccctccttgcagacgtcttctgcttcttcctccaaacaatctccaaggaaacgaaaatggctgcctcttccgcttttctttctacttttatttctccccaaacggtctccttctcacccaaatcctcctcttctcttcgcctccttcctccaactagcgtgcgcatggtacgaactgtgaccctagccaccgcttcacagcccgccaccagcccccggacgccacgcggcatcatgaagccgcgtcgtgtaacgcctgagatgcaggatgtcgtcggagtccctgaaattccccgaactcaagcccttaagcagatttgggcttacattaaagagcacaatcttcaggaccctgaaaacaagaagattataaactgtgatgagaagctgaagaagatatttggtgggaaagatcgcattggatttcttgaaattgctgggctgattagtcctcactttctttgatgaatcctagcgagagagagtgttggtttggagaataggtaggtaaaaacttcagttggttgatcctctctttgaagaaaataatgcttttttgttttcaattttaacagtgctacttggttactacacaagtacctttttaagggttttgttttatttacgcattccctaatatgtagactggttttatga

SEQ ID NO: 11731 - DNA, 557 bp, Gossypium hirsutum
  Clone ID: GOSHI-09MAY01-C20677_1
gaaagaacaggatttagaggctgttctgtgagtctagatgtcattgcccaactgtgtaattacatgaatgctgatgccaaagaagtccaggggaagagagcaattcttccatcttgccccctgccttattcatgctatgctagacctatacaaacagttgttccactagagagagaacccaaaaatataaacaaattgggaagaagcaatgacacctcatcaaggaaaacacaaattaactacttcaccttcttacatatgtctaaatgattaggcagatgatattatcctataacctatacaagctgagtgccaatttttctgtgtcaaaaaccctttctttttacccccaaatgcaaatgggattcatgttttactaccaggtaccaaagctgcagccaacatgttcctgagtaacgacattaagccgtttttgcatttcggccctggaggtatatggtgggaagcacagccggtaaaagcaggtatgagaagaaggaagacgctcatgggggctccgagggacttataaatataaagctgaggaggccaaacct

SEQ ID NO: 11732 - DNA, 544 bp, Gossypium hirsutum
  Clone ID: GOSHI-09MAY01-C20667_1
gctttgcaaagtatggaagaagaagcagaacgaatttataaagatgagcgtggattgcttcttgatgatgaagctgcgtcaacaagagatgcaatgtatgagcaggcagaaaatgtggagagggaactggagcatatgacggaacagatcaagtcgattattgagacagtaaactctagtcagggtggggaactcgaggcacttgacggaatgactcccctagatgtggtggtcaagatcttgaataatcaactaacttctttaatgtggatcgatgagaaggctgaggaattctctggtcgtattcggaagcttgcagcccagggtaatgctgcagatggagaattaattgctgctccaaaatattggatgtcctgacccttccagaagttgctgttgttgagtttagtaactacagagggagtatggttaatttttccaaattattttggcatcagatggattatgtataagacctgactttcagacttggtctaactgattgcttcattaagaaaaattgaagtttcaaggcctgtaaaaa

SEQ ID NO: 11733 - DNA, 398 bp, Gossypium hirsutum
  Clone ID: GOSHI-09MAY01-C20157_3
taccatcatcatttatagaaccaaacctgacacattcttgacagaaataaccgttgcttctcctttggtaacgagaccaatatcgatactctttcgagaaccagtgtctgcatcaggaatgttaagccccacatacgctgttccaccacaaagcttttctagtcttagcaatccagcaatcgttacgcaatcacactcattttagcaacaggcggttggcgacggagaatatagcattatcatcagaggtttccacgtctaaaacatcgttgccgccataaaagaagcgccggagcaactggtaaatgataattccgcagatgatctccatccgcattctcaacctttttttttatatgtatagtttgaaaagtaacaaaactttgacatagctgcag

SEQ ID NO: 11734 - DNA, 786 bp, Gossypium hirsutum
  Clone ID: GOSHI-09MAY01-C20157_1
ctcctagaacatgcttgcttcctttaagctccagcctgtcccgcataggggctgtcatgagaatgtagttaagctgctgatgcatatgagtcctgcatttcgttcttcccaccacgcaaagcgcccttatcccacccggatatcatacctttgggtcctggttctaattgcacccattgatcataagtgattacctcaggtggaaaatttctataaatctcacggaagttcggattgggaattataactttgtaagaaaaatatccttcaggtaaagtaactcccctttgttcaagatacgattctaggactgaagctgtgtttttagcctctgcaacgggatcaggaatacgctctttccggtggctgcggccaccttcagaagtccagctaccatcatcatttatagaaacaaaccctgacacattcttgacagaaataaccgctgcttctcctttggtaacgagaacaatatcgatactctttcgagaaccagtgtctgcatcaggaatgttaagccccacatacacttttccaccacaaagcttttctagtcggttggcgacggagaaaatagcattaaaatcagaggtttccacgtctaaaacatcgttgccaccataaaagaagcgccggaacaactggtaaatgataattccgcagatgatctccaaccacattctcaacctttttttttatatgtataatttaaaaattaagaaaaatttgacatagctgaagataaatttggagtttttccttttctccttaaaatattaattaaag

SEQ ID NO: 11735 - DNA, 391 bp, Gossypium hirsutum
  unsure (1)..(391): unsure at all n locations
  Clone ID: LIB3083-029-Q1-L1-H11
agttactacctggagctggaatgggctaagccaagcatgctaatcttttggacattcatgtgaccaactnttgatctcttgatagtcgtcaaagccagggtatcctcctgcttccctttaaattccaggatttctcctaaaacttgctggcttcctttaagctcaagcctttccacattagggcctggcctagaatgaaatttaaccgcttattgaaagagtccttcattttcttctttccaccacgaaaagcgccctttacccacccggatatcatacctttgggtcctggttctaattgcacccattgatcataagtgattacctcaggtggaaaatttctataaatctcacagaagttctgattgtgaattataactctgtaagaaaa

SEQ ID NO: 11736 - DNA, 549 bp, Gossypium hirsutum
  Clone ID: GOSHI-09MAY01-C20087_1
cttttgctgaaccttcttttttctctctttttctcaccttccctctgctcctgctaatctaaagccttggtgctggttcatggatattgaacccttgtgggctcttggggggtggttttttctttatttctttgattgtatggcagcacctaaatcaacatcgtcgctctcacacacctatgaaaaaccccattttttcccactcttcctcacccttgtcttcttggttttccttctactcctcaacccctcttcaaaccctatcaactcatctaatgtcaccccttccatccctttcaagaggctcctcttacataattcatggaaatcatcatcatcaaccatgaacttgccccccaagcaaaggcgtcatccccgcacctacgcgtcttcgttcggagccgaagctcatgaagttccaagcggtccaaaccctatttccaacaggtaggaaagtgtgattttgtggagacatatggggtgaagatgattaagaaagagtcgtgacagcgaaactttattgttaatttgcttgtcatatcctttcta

SEQ ID NO: 11737 - DNA, 762 bp, Gossypium hirsutum
  Clone ID: GOSHI-09MAY01-C20357_1
attagacccaaatacaccaaacatgaacaacaccatctctttaactctgcttcacattgcattttgcttcactttagtttcattcactcctatttcagccctggaattgcacggaactggtgccaacatggtcgaaacaacctgccaaaagacacccttttacaatctatgcgtctcggctcttaaatccgaccctcgaagttccggtgccgacgtagcggggctagcgcaaatcggaactgataaactgaaggccaaagccaccgcaacgctgcggcagatcacagcgctgcttaaagtggccaaagatccgaagctgaaaatggccttgcgtgactgtgctgattattacaacgccattgttaaatacgatatcccggtagctgtagaagctgtcacgaaaggcgaccctaagttcggtgtcgagggggcgacggatgcagctaatgaagccgatgcttgtggcaggggattcaaaaaccaacccaagtttccaatatatgctagcaacaaggttgtccatgatctttctgctgtggttgcttccattgtccaattattactatgagtacgatgaaatgttttaactgtctaatgccaagtaatgggccttatgccaggttgtgggcaataaaaatgtatgtacagatgtgttatagatgttatgaaaaatggataaagagtgaaatgattagtggttttgtttaaaagaagaatggatgattggcattgaaacagtatgtcaatcattaattgtcctcc

SEQ ID NO: 11738 - DNA, 294 bp, Gossypium hirsutum
  Clone ID: LIB3148-004-Q1-K1-G2
gggattcaaaaaccaacccaggtttccaatatatgctagcaacaaggttgtccatgatctttctgctgtggttgcttccattgtccaattattactatgaggacgatgaaatgttttaactgttctgcaagaaacttactgtctaatgccaagtaatgggcaataaaaatgtatgtaaagatgtgttatagatgttatgaaaaatggataaagagtgaaatgattagtggttttgtttaaaagaagaatggatgattggcattgaaacagtatgtcaatcattaattgtcctcc

SEQ ID NO: 11739 - DNA, 275 bp, Gossypium hirsutum
  Clone ID: uC-gsronu33B077a11b1
tgccttggttgcttccattgtccaattattactatgaggacgattaaatgttttatctgttctgcaagaaacttactgtctaatgccaagtaatgggcaataaaaatgtatgtaaagatgtgttatagatgttatgaaaaatggataaagagtgaaatgattagtggttttgtttaaaaaaaaaaaaccaaataaaaaaaaaataaataaaaataaaaaaaaaaatataattaaatataaaaaaaataaaaaaaaaaataaaaaaaaatttactg

SEQ ID NO: 11740 - DNA, 826 bp, Gossypium hirsutum
  Clone ID: GOSHI-09MAY01-C20367_1
ataagcattctgaatctggctctcatcggtcaattgatgaatccaggcatcaaaatgaatcacttgcgcatacaaacatgataggaagagatttgggtccgaatcttactgacgatattgaactgttgggattcggaaatgcagattcagaggagagattaagtgatatatctgatggtgatctatcaatgggggctacagatactgatggctcaatctgtagtgccgtggagtttactcttttcccggaagtttcaaaacctcctgataaaccagagaaggttgagaaagcaagcaaatctgaaaaatctgataatattgggaagtctatcgccccatcactcccgtctaagcttccaaagctatctcagaaagtgttgcaaacaaaacctactgctcgattgtcactgtcccggagcacctccaagatcccatcaagttctaagaaaataactgctgcaaccactagcaattcttcaattaagcccccgaaacgacggccgtgatctgaaactatgtttttagatggtagaagatctttgacttaaagtgtagtttgtaatttatatcgaaaacttcactatgcttattgtctgtaggttgtttcttccttccatttatcttattggaagggggccaatgttagagaaactgttcacttgttacatactaaaaaaaagggtgttatatcagcccctccacttgggttctcgtcaaattgcaactctatctatgcattttttattgatatatatataggataattgtttgatacattgattttccggtgtattaaataataatctatatatgtacattgcaggtc

SEQ ID NO: 11741 - DNA, 480 bp, Gossypium hirsutum
  Clone ID: GOSHI-09MAY01-C20287_1
ttaaaaccggcccccccctttattttatatttattttttatattaatattgacttgataatttaatatatatataagacaagtttatttttccaagtctaaagaacaattatatttggttctcctcaaaatccgggaaaattattcagagttcagagaaatatcaactggctgcagttgcaattattccagttacaaaaacaacactaacaatgccctcaaagtccaaggcaaggaaaagcaaaattctgtaacaaaccttcggcattatctaataaaattataaaacttacgaaaacccaaaggaacgctaccaattcttaaccgataagcagtttgctctcatccaagaaggtgtaagtgggtacttccaggttgtatggtgctggacccttgcgaatcctgccagagacatcataatgggaaccatggcaagggcaaaaccatccaccataatcaccagcatttggcaagggaatgc

SEQ ID NO: 11742 - DNA, 522 bp, Gossypium hirsutum
  Clone ID: GOSHI-09MAY01-C20247_1
ggatgtatctttagtctttgatcctaatttagtactgatgctgtttctggcggtgctcttgtttttgcggtcagcaaattctcacttgggcacaaatttatatccctgctgataatattgctctagattgtggttcttcaacttcaggcaattctgcagcaccagatggtcgtgattggaccggagataacatgtcgtggttcgccgagtccggtagccaatcagtgtcggccagtgtccaaaagcataacagctctttccatggtgtgccttacttgactgctagaatgtctaaatccgaattcacctacatgttcccagttactgctgggcaaaaatttatcaggctctatttcaatcctgctctgtaccatggctttgacacctctgtctatttcttctctgtcaaggtaggcccttatacactgctcaataacttcacttcttccgttactgccgatcgttcgaggaaagggtcgtcgattagagagttctgtgtaagcttgatgcaaaatcaaactc

SEQ ID NO: 11743 - DNA, 834 bp, Gossypium hirsutum
  Clone ID: GOSHI-09MAY01-C20267_1
ggttatgtttgtaaattatagcaattaaagatgatgatgatgatggagatacattattgaaagccggcatcttgttggcaactatccgcatcaatacatttaatatattcggctcagggatggattattggtagcaacattgatcgtttgaaggtttagcaccttcaggggctgccacagtgttatcaaatatctatcatgttgaaatacttgaattagttgagttaaagcaaacacttgatggcctgtaaattttggggtggaatcgggatcaaccttccaatgtgggaacctgtacatcttggatagctctcaggattgctttgccgccgtactccactggcaaagcttcttcacctatctcctctataaagattttcttctcatcgtcattggtcacaattacaatctgttctcatggtgttgcaaaataagcaaagacagatatatcacataaatataatctaagaattctgctaattgtgtcgtacggatactctattaatatattcgctcgatgtaatggaacggatgaataaagttatcagactattctaattaacaaaatgtgtttactattaactacccttaaaaggagcactctacgtttatgtacaaaggaagcagggaaagtagaggaaaaaaagttccagatgctggaactcaagaatgactacatgaaccaactgatttgaactccgggatctctaaagataatcattagcaaaactcttgatccagtaactatttttaaggtacaaagatgcagtaacctccatttaggaaacatatattcaccaccattaagcaaaaacaatacatttgggacagtaa

SEQ ID NO: 11744 - DNA, 471 bp, Gossypium hirsutum
  Clone ID: GOSHI-09MAY01-C20217_1
tttccgtttttggttttttttgggagcatgtactagccaaatttattgtctatgatacaaaatatcaaagccaaatcacgaacagtgcagaacaagcgaagtggcacaataccctcaaccctaaatgaatttgcattcacaagtaggaataattgatacttccctacacattattacaaaaattaataatatatgagcaaagtttcatcacatctgcagcaaacacatcaaactgagactgcccaatgatttcctagcggcacaaaatctaatactcgtatcaactacaacctgctaagtttacacttacaaaagctaccggctgcaccaaggactctgccacctccacttctcatgaagctacgtgaattgttacagaagatccacgccaggtgtggcagcaagttaccaaaatattaatgcaagtagcagaagaatgagaaaacccaggatcttataggtaatttaatc

SEQ ID NO: 11745 - DNA, 544 bp, Gossypium hirsutum
  Clone ID: GOSHI-09MAY01-C21977_1
gttaaatcccagcagaagaatatacagaaaggtagaagatgagttcgggggaacctagtttcgaagaattgttggaggagaagaagcgtgtcaggaaccctcttgtccctgtcggtgcacttattaccgctggagtgctcactgcggggttgatcagttttagacaaggaaattctcagttgggtcagatgctgatgcgagctagggtggtagttcagggagctacagttgctcttatggttggcactgcatactactatggggataatccctggaaatcgagttagaacactcggtttcatggttgcaaccattatattgtttttattttgatatgcaatttctttttatagctatagatgttgaacaaaagcatcataccaagaaagcaaatgccctcagattgatatagcttgggaataaattaaatatgctctatgcatgtcttattctaagatattattatttggtacatatgtatatgtaatgttgaatatgtatttgtttaaaacccaaaggatagggacaaagaaccagctgctca

SEQ ID NO: 11746 - DNA, 381 bp, Gossypium hirsutum
  Clone ID: uC-gsflnu33B062d12b1
cccacgcgtccgtactactatggggataatccctggaaatcgagttagaacactcagtttcttggttgcaaccattatattgtttttattttgatatgcaatttctttttatagctataaatgttgaacaaaagcatcataccaaaaaaaaaaaaaaaaaaaaaaataaagtaaaaaaaaaaaaaaaaaaaaaaaaaaaaaaaaaaaaaaaaaaaaaaaaaaaaaaaaaaaaaaaaaaaaaaaaaagaaaaaaaaagaaagaaatgattataagttaaaaacctaacaaaaagaccaaaaaggatgcataaatgggggggggggccttttaggaatcccaatttttaacacccggctggcacaagaaatattttttttttg

SEQ ID NO: 11747 - DNA, 411 bp, Gossypium hirsutum
  Clone ID: GOSHI-09MAY01-C21817_1
gagaaactgaaaaaggcgaagtttggattgagatatagacaagtttctcttggtgcagcaacaacacaagtccgacttgctgcatcacttggggcatcattggtttggctatccggtggattaagcttggtccagttgttaatccaagaaacattaccgtcttggtttctatcagcccataatccagatcatgatggtggggaacctggaggtctagttgccatgctgagcggcgtgggcacttgcatactttgtagtgctttgtggtaccttggtgtggggtgtggattcctcctcaccgacatcaaaacggcgaccaaaggtccttggggcgcatttggaatttcttgcgagcgcaatagatggcaaaatatcacttggatgtgagcatgccacttggcatgcgtatgt

SEQ ID NO: 11748 - DNA, 546 bp, Gossypium hirsutum
  Clone ID: GOSHI-09MAY01-C21597_3
gaagaaaagctgaggaagaggaaccaggagttagagggggaattgaaggagagtagggaaagagaggagcagatgagacaggaattacgaaagatgtgggaaaggctgagggtggcggaagaggcggacgaaaggctctgttctcagctgggtgacctggaagcagagtccgtcaatcaggcccgtgcttacaacgcccacatactttccctcatggaccagctctccaagggtagcaaccttctcatcaacagccacccatcccctgcatccatctccatcctctgatttttcttttggctggtgttttttttatctatctaagcgaaggcatggggcttctaaatccgttaactttgagtatggtatggatccgtacatagtgtttgttctaatttttgctttaattggagaaagttctgcccagaggcagcggcggatatgcctcagtttgcttgctgtttcgaattgtgaaactcaaacaagcaaacgttgggccttttggttttaattggagaaagttatgccgaaaggcagtggcggata

SEQ ID NO: 11749 - DNA, 633 bp, Gossypium hirsutum
  Clone ID: GOSHI-09MAY01-C21597_1
tccactattctccaccaatagaagaaaaaatttaaaaaaaaaaacagcaagctatcacatggctccaacaatggcggcaccagaagaagagttgaggaagaggaaccaggagttagagaaggaattgaaggagagtagggaaagagaggagcagatgagaaaggaattacgaaagatgtgggaaaggctgagggtggcggaagaggcggaggaaaggctctgttctcagctgggcgagctggaagcagagtccgttaatcaggcccgtgcttacaactcccacatacttaccctcatggaccagctctccaagggtaacaaccttctcatcaacaaccacccatcccctgcacccatctccatcctctgattctgcttttggctgatgttctttttatctatctaaccaaaggcatggggattctaaattcgttaattttgggtatggtatggatctatatatgtaatagttgttaacacttggtggtgtttgttgatgttaattggtaaaggtagtgctgatatgtttcactggctgtttcatattgtgaaactcaattaagttgatttaattctgatatataaaaaaatttgtgcttttttcttcttcaaatatattaaaaatagtttggt

SEQ ID NO: 11750 - DNA, 571 bp, Gossypium hirsutum
  Clone ID: LIB3829-024-Q6-K6-A9
cccggtttgacccagctttttaaaacacagctatcactggctgcgcagtgggggcaccaaaagaagattgaggaagagaaccggattagagagggatgaaggaataggaagagggacagtgagaaggattacgaaagagtgggaaaggttgagggtggcggaagaggcggaggaaaggcggtggtctcagctgggcgagctggaagcagagtccgttaatcaggcccgtgcttacaactcccacatacttaccctcatggaccagctctccaagggtaacaaccttctcatcaacaaccacccatcccctgcacccatctccatcctctgattctgcttttggctgatgttctttttatctatctaaccaaaggcatggggattctaaattcgttaattttgggtatggtatggatctatatatgtaatagttgttaacacttggtggtgtttgttgatgttaattggtaaaggtagtgctgatatgtttcactggctgtttcatattgtgaaactcaattaagttgatttaattctgatatataaaaaaatttgtgcttttttcttcttc

SEQ ID NO: 11751 - DNA, 766 bp, Gossypium hirsutum
  Clone ID: GOSHI-09MAY01-C21487_1
aaaataggcggctattggcgtcctgggtcaaggagcgtggggaactatggctgaagaaccggcgacggctggagctggaagtgggtatcgggaattccgaggaaaagatgaatttccgtccaacatgttgcacggcatatttgctattgcgatgtggattggatctgtgcatttcgacatctttttgctccttttctcctttctattccttcctttttccaaattcctcatggtgctggggtttctattgattttcatggttcttcctatcgacccgtacagtaaatttggccggaagctgtctaggtatatatgtaagcatctttgcagttactttcccatcactctctatgttgaggattttaacgccttcaatcctgatcgtgcttatgtttttggttatgagccacattccgttttgccgattggagttgttacactcgctggacatacaagtttcatgcctcttcctaaaattaaagtccttgcaagcagcgctgtattccataccccatttttgaggcatatatggacatggttggatgtggcaacagcatcaagaaaaaaattttattccctattggatgccggttatagttgtattgtagtgcctggtggagtgcaggagacatttcacatggaccatgattctgagattgccttccttaaggcaccgaagggggtttgttcgcatagccattgaaatggggtgtccactggtcccagttttcgcctttggtcagtcacgtgtctacgactggtggaa

SEQ ID NO: 11752 - DNA, 427 bp, Gossypium hirsutum
  Clone ID: GOSHI-09MAY01-C21437_1
gacttttcgtcttctaaaactcgcacccaaaaaatttgcagctttggtcaacctaacgatgtcgtacgacgacgtggagatagaggacatgcagtggaacgaggagttacaggcatacacatatccatgcccttgcggcgatctttttcagataacaaaagaagagctcaagatcggcgaggaaatcgctcgttgccccagctgttctctctacatcaccgtcatctacaacgccgaggatttcgccgacagaaaatcaaacaacaatcttgagcctccaaaacgacaagccgtcgccgttgcttgagacctttaagatggcaaatggcaaacattacacttgagtataactggttttatagcagattgcaagaatgttttgttggagattagtctccttatgtgtgctgtggtgctagcattggtg

SEQ ID NO: 11753 - DNA, 768 bp, Gossypium hirsutum
  Clone ID: GOSHI-09MAY01-C21707_1
gtacagtcggcacaagaatccaggaagttaatgttttgggtggcctcatcgttccggtttggggcacaattgagaaagccctttctgagcaggcccgtgtcagccataggcgactttgtgttgtagggctagaacccactgcagataactggcgaattgttggtcttcttgttcggaatgcagcagttgaaactgtactccaagatttgacgtgggttcaagatattgaagattaaaagcgagtagcggccattcttctcctgtccgcgggctcgtgggcggcttttgtgtgagttttgtgacaggtttttgaagcataaaaggaaatttagtcaaagggacatagaggaatcctatgctcagcttcatagtggaagaagctccattatttggaatcgggcagccttattcatactgattatttttttgctataattttgtatatcaatattttcgccaagggaaaacagaccgaatagctccctaggttgtgtattcattgtagcaaaacctgaaataacttgagagctaacttgtaactaaatgtttgttcaagttatagctgcaatagataaatcatttttgttccaaatccaaaaaaaaaaaaaaaaataaaaatacaaatataaaactaaacaaaaaactctctaagatggtttttgtggaatgaactaaatggcttgcacccaattttgggctttaaataaaattgtggttattcacataatgattccccgttaaaacaattcacagaattgcctttccccc

SEQ ID NO: 11754 - DNA, 511 bp, Gossypium hirsutum
  Clone ID: GOSHI-09MAY01-C21687_1
ctacaaaaaaacccaaatcacagacaaaagttcacaaagaacccaaaagttgattacttttttgataacccaaaacacgaaaatgggtgcttctgaatcagttcctcaaaaatcaatccatgaatttacagtcaaggattacaaaaaccaagatgttgaccttagtatgtacaacggaaaagctcttcttgttgttaatgttgcctctaaatgtggactcactgattcaaattatacccagttgactgatctttacaacaaatacaaggaccaaggactggagattttggcattcccatgcaatcagtttttgagccaagaacctggtaccagtcaagatgcacaagaatttgcttgtacaagatacaaggctgaataccctattttccaaaaggttcatgtcaatggtccaaagacagagcctgtctacaagttcttaaagacaacaaatctgggttcttgggaaataggataaagtggaactttactaagtttttagttgacaaggatg

SEQ ID NO: 11755 - DNA, 403 bp, Gossypium hirsutum
  unsure (1)..(403): unsure at all n locations
  Clone ID: LIB3148-059-Q1-K1-H5
gccacgcttacagagacccgtgagctgtgatcgttgagcggatcaccccaaaacacaaaaatgggtgcttatgaatcagttcctcaaaaatcaatccatgaatttacagtcaaggattacaaaaaccaagatgatgaccttagtatgtacaaaggaaaagctcttcttgttgttaatgttgcctctaaatgtggactcactgattcaaattatacccagttgactgatctttacaacaaatacaaggaccaaggactggagattttggcattcccatgcaatcagtttttgagccaagaacctggtaccagtcaagatgcacaagaatttgctcgtatcaagatacatggctgaataccctantttccaaaaggttcatgtcaatgggccaaagacagagcct

SEQ ID NO: 11756 - DNA, 367 bp, Gossypium hirsutum
  Clone ID: GOSHI-09MAY01-C21637_1
cccacgcgtccgcttggaggtggtattggaaaaggaggtggccttggtggtggaattggaaagggtggtgggcttgggggtggtattggcaaaggaggaggcctcggaggtggaattggaaagggtggtggacttggaggtggtgttggcaaaggaggaggccttggaggtggaattggaaagggtggtggacttggaggaggacatggtggtggacttggaagtggtattggcaaaggaggaggccttggaggtggaattggaaagggtggtggacttggtggaggaattggaaagggtggtggcattggaggtggcggcggctttggtaaaggtggtggcttcagtgacgctgctggaagtggtg

SEQ ID NO: 11757 - DNA, 807 bp, Gossypium hirsutum
  Clone ID: GOSHI-09MAY01-C21147_1
cccacgttcccctttggagcaacatttcctcttggttcggccagctttcctggcagctcagcaacttactctgattcatctcatggtgggaggatttgtttaccctcagtccatgcacaattgttgagtcctgctggtgctgttccctcccattacccaaggccctatgttgttagccttgtacacaataatggtaatagtattgctgagaatggtaggaaatggggaagacaaggtctagacttaaatgcagggcctggagtcctggacattgaaggaagagatgagacaacagcgcttgcatctaggcaactgtctgttgtgagttcacaggccctggcagaggagcaagcaaggatgtatcaagtggcaggtgatgttttgaaaaagaaggaacttgagggttgttgggatggatacaagcaatcttcatggtagtaggaatccttaaatgtccctatctggtgacccatgaaatcttgtaagtcatttaggtttttttgttctcatcttcttttggcaaggcctttaactttcttccctccattttgctacttccatgtcaactcttgatagtggcaaggcggagaggaactttattagaattacaaattctctttgtgaccagatttatgttatatgtttgcagttattctaggataggcatgggctaacccccagaaggaacctgtgtgctcttagagggtgggtggtaagtgagccatttgatgctgttcttagtctccgacccccaccttttgctgtatcaactttatcataaaagaatctgtttgggtttttcatgcc

SEQ ID NO: 11758 - DNA, 377 bp, Gossypium hirsutum
  Clone ID: LIB3135-060-Q1-K1-B5
gttgttagccttgtacacaataatggtaatagtattgctgagaatggtaggaaatggggaggacaaggtctagacttaaatgcatggcctggagtcctggacattgaaggaagagatgagacaacagcgcttgcatctaggcaactgtctgttgtgagttcacaggctctggcagaggagcaagcaaggatgtatcaactggcaggtgatgttttgaaaaagaaggaacttgagggttgttgggatggatacaagcaatcttcatggtagtaggaatccttaaatgtccctatctggtgacccatgaaagcttttattcaaggataggcatgggctaacccccagaaagaacctgtgtgctcttaagaagggtgggt

SEQ ID NO: 11759 - DNA, 910 bp, Gossypium hirsutum
  Clone ID: GOSHI-09MAY01-C21127_1
cccacttttccgccaagagctaacatttcggatcctgtgtttgatggacaaaacaggggagggcctgaagtagctaagagaacatctgttggatcttcatctagcatgaggaaagcttcttcaactgcaaacattgttgatgacctcagttctatttttggagctgctgcatcttcttctggtgtgttccaagaggttgatggggaaactgaagaaaggcgaagagccaggttggaacgccaccaacgaacgcaggagcgtgcggcaaaagcactggctgagaaaaatcagcgtgaccttcaagtgcaaagggaacaagctgagagacatagaatttctgaaacactagatgttgaaatcaaaagatgggctgctgggaaagagggaaatttgcgtgctctgctgtcaactctgcaatatgttctttggcctgaatgtggctggcagcctgtttctttgacagatttaatcaccgctgccgcagttaaaaaggtttacagaaaggcaactctttgcatccatcctgataaagtccagcaaaaaggtgccaatcttcagcagaaatatgttgcagagaaggtgtttgacttgctcaaggaagcatggaataagttcaattcagaggagcttttctgagttcaaatcgttgattatatagctaaagaaattcgtcgtttgacaaactaggcattggagttgaatgaaaacacgactgtccagcagctataattcgcttagctgctgctgttgcctgctttggtttgatgaatcctttagtcagctggtaaagcgtggcatcggcccggcgctgcttgaaaaacatgggagggttacttgagaaggtgcatactgttatttggatcaggttggtgtatattaagcttcatccaacttgtggctatggaaagtt

SEQ ID NO: 11760 - DNA, 176 bp, Gossypium hirsutum
  Clone ID: uC-gsronu33B039c08b1
gatctgaccttcgattcttgggttatatagctaatcaaattcatggttttacactgtggcttggagtggaacacatgactgttctatctgctgctgcctgctttggtttgatgaaaccattaatgagcagttaaagcttgttataggcccggctctgcttgaaaaacatggtagga

SEQ ID NO: 11761 - DNA, 664 bp, Gossypium hirsutum
  Clone ID: GOSHI-09MAY01-C21357_1
cagcaacctggatatgacattatagcccagttcataattggttatatcttgcccggaaagcccagtgcgaacctgcttttcaagatatacgggcggatcagcaccatccatgctctttctttcttgtctgatctcaaacttgggcactacatgaaaatcccaccacgttgcatgtacactgctcagcttgtgggaactgtagttgcaggtatcgtcaaccttggagttgcatggtggatgttagatgacattgacaacatctgtgatgttgaaggaaatcatcctgatagcccatggacttgccctaaatacagggtcaccttcgacgcatctgttatctggggcctaatcggaccaaggagacttttcggaccaggagggatgtaccgtaacttagtgtggttgttcctcattggagcgttcttgcctgttcctgtttgggttttgagcaaaattttcccagaaaagaaatggattcccttgattaacataccggtcttatcttatggttttgccggaatgccacccgcaactcccaccaacattgcaagttggctcatcactggaaccatcttcaactattttgtgttcaagtaccacaagcggtggtggcagaaatataactatgttctatctgcaacattagatgcttgaactgcattca

SEQ ID NO: 11762 - DNA, 626 bp, Gossypium hirsutum
  Clone ID: GOSHI-09MAY01-C21367_2
acagccacagctctcttggcatcactgctttcgggtgcattcttgcatgcagattcaaatccttgataattggatgatctggattaatctctagtatcctccttcccctcatgaactccaaacttgcagtatctccaagggcttgtgctttcatcaacctttccatgttggctgaccatccaaacttgccagaaacaagcacactaggtgaagaggatagacgcttcgaaatttggactttggccactttgtctccaagttgttgctttacccaatcacagagaaggttgtattcttgtttagtttccctctcttttacctcatcttcatcaccaagttccaagtcttccttgctaatatcaacaaatttcttctctttgtaggtctgcaggttctggatggcaacctcgtcgataggctctattaaatagagaacctcaaggtctttttgaaccaacttctctaagaatggagcagtcttggcacttttcaagctgtccgttgccaagtcatgaattgcccttgcagtcgcactcatattttcaacataggtatccaaacttgtcaattcctcttcactttttgatgtgtaaaacctaagcaatggagttatacgcttgtgatta

SEQ ID NO: 11763 - DNA, 1078 bp, Gossypium hirsutum
  Clone ID: GOSHI-09MAY01-C21367_1
caaaactcctcgaaatttaagccaccattatcatccgccgcctgttaaacagcaactcaaaagacaactttccttggatgctttaaaaattaaaatcatcacgtataagtgactttaatccaccataggaacagccattatcactaacctcctcatcttccccaaccgaacccacaactcttctttccttctggattcttttgttaatagcaatcagataatacaggaaaatttttatttaaattttgacacttcaatcttgccaaggatcactctctgtccttacttccgatggttcgatcacttggttctctgaagcttcactggcactcgtatcagtttcagcagcactaacttctgatgcttccacttcatcatcgtcctcatatctaccccatcttcctccaagtgccattgccatcatctcatatatcttgttacctaactcagcggggctgtcgggagaaaaaccactggagatcaatgctgtatcatacaacaagtcaactgctctcttggcttcactgctttcaggcgcattcttgcaagcagcattcaagtctttaataatcggatgatctggattaatctccaggatcctccttcccctcatgaactccaaacttgctgtatctccaagcgcttgtgctttcatcaacctttccatgttagctgaccatccaaacttgccagaaacaagcacacaaggtgatgaacttagtcgcttagaaatttggactttggccactttgtctcccagttgttgctttatccaatcacagagaagattgaactcttgtttagtttctctctttgtaggtctgaaggttctgaatggcaacctcatcgataggctcaactaaatagagaacctcaatgtctttttgaaccaacttctctaagaatggagcagtcttggcacttttcaagctgtcggttgccaagtaataaatagcctttgattctcacccatactttcaacgtactcatccaaacttgtcaattcctcttcacttttgatgtgtaaaaccgaagcaatggtgttatacgcttgtgattaccagaggctcacgaacgc

SEQ ID NO: 11764 - DNA, 950 bp, Gossypium hirsutum
  Clone ID: GOSHI-09MAY01-C21297_1
cagacgcgtgggcggacgcgtgggtagaagctcacctgcacaaacagcaacgctgatgcgttttctttgtttcggttgtttaattgcggttttgtccgagtcatatcatcttcattttctactccctcgcctccgaactcccgttatgacggtgaattggtgataacatgattacggttttcctgcagggtgaaacaaagccggttaagccttacactcatcgatatcatgttccttaccgagcatcacaaagtactgctcccttttggtactcaatcaagagagcttcagcatacatcatagtgttgtcttcatattcggcatatggtaaatacactcctcagaaccaatggatcgaacaagagctaccgaaagttaaccgaactgaaacaccatggttaattgttctaatgcattccccatggtatcatagctataactaccattatatggaagctgaaaccatgagagtaatgtatgagccattattagttcagtacaaagtcgatgttgtattttccggtcatgtccacgcctatgaacgatccgagcgtatatcgaacatcgcatacgatctcgtaaacggtgaatgcagtcctgtgaaggatctatccgctcctatttacataactatcggcgatggaggaaacattgaaggcatagcaaacaacatgaccgtccctcagccggagtattcagcttatcgagaagctagtttcggtcatgccattttcgatataaagaaccggactcatgcttattatagttggcaccgcaaccatgacgggtattccgttcaaggcgattcgacgtgggttttcaaccgattctggcatccagttgacgagtctcaatgagaacaacatgtagttcccttttgaacctcttatttttagattaaaaaatgcagaaaatataaatcaatgaaaatttcctttttttttcccttt

SEQ ID NO: 11765 - DNA, 385 bp, Gossypium hirsutum
  Clone ID: LIB3584-016-P1-K1-C4
ctgaagttggacctgatgttccttacacgtttggtctcattggggatctcgggcagacttttgattcgaatgtaacactcactcattacgaaaagaacccaatgaacggtcagaccatgttgtttgttggggatctttcgtatgcagataaccatccaaatcatgataatgttaggtgggatacgtggggaaggtttgttgagagaagtgctgcataccaaccatggatatggactactggaaaccacgaaatcgactttgcacctgaaatcggtgaaacaaagccgtttaagccttacactcatcgatatcatgttccttatagagcatcacaaagtactgctcccttttggtactcaatcaagagagcttcagcatacatcat

SEQ ID NO: 11766 - DNA, 999 bp, Gossypium hirsutum
  Clone ID: GOSHI-09MAY01-C22977_2
gtcctcaacatgtcaaccctcgcttggtcagttgtggcgtcagttgaaggacgtgttcctcttgctagtgagggcttgagtctggtcgtgggctccttcaatggtgaagatatgcttatatcttttggaggatataatgggcattataacaatgaggttaatgttcttaagccaagtcacaaatcaaccttgcaatcgaagatgatggaggctcgtgttcctgatagtgtttctgccatccataacgttacaaatcctaccagagatttggagtctgagtttgaaagttggccacgaaggaaagatacgagaaattgttatggataatattgacacagggcatcagaaatttgaaggggaggagactaccgagcgcataatagcaactctcaaagtggagaacgaagaactagaatcgtcactcaacaaggagaagtttcagtctctccagcttaagcaagaacttgctgaagctaaggcgcaaaactcagatttgcacaaggagctccaaactatacgcagtcaacttgctgccgagcagtttagatgttttaaattagaggttgatgttgcggaacaaagacagaaacttcagacgatggaaacgctacaaaaggagcttgaactcctgcaacggcaaaaagctgcatctcaacatgctgccttgaacgcaaagcagaggtcatggctcacgtggtgtatgccgttggcgtgcgggttgccctcctcaaaacgctgacaatatctaaaattcatggaaagcttagctaaatagtgattttctagacttattcaaattaattgaaattttggttgaaatatatactcttttttctttttcgattacttaacccggtagttctttccatgagaagaattaaattatctagttagcctaaatgaacctttccatagattatagcttcagcttatgaagttagaaatgtctggtaatgaaatatctatctttttgccaaagaaatgctactttagtgaaaa

SEQ ID NO: 11767 - DNA, 616 bp, Gossypium hirsutum
  Clone ID: AI726980.1
aacatgcagagcgttactttcttgtttttggtgggggttcacatgctacttgcttcaatgatttgcatgtgtttgatttgcaaggtatggaatggtcaagacccacacaacaaggtgagataccaactcctagggctggtcatgcaagtgtgactgttggggagaactggtttattgttggtggtggagacaataaaagtggggcattggaaactgttgtcctcaacatgtcaaccctcgcttggtcagttgtggcatcagttgaaggacttgttcctcttgctagtgaggtattttacgtcttataaatgctgttacctgtaaaaagttatgcacgtgaaaaatctctcttggattggtttgtcatatgtatagtggttcaattgtgtcagaaatgctgcaatggagattgaacttctccatgcggatcaacaaggaatggtagaaagatgcaagtaaatcgagtatactttttacatatgatgatgtgcttttttctgtaattattatgatcgtttaacagggtgtctttaataacattttaagcatgttcattctcatcaattaagttcatcttcattggttattaaacttaaaaaaaaaaaaaaaaaaattc

SEQ ID NO: 11768 - DNA, 405 bp, Gossypium hirsutum
  Clone ID: AW187607.1
gacccacacaacaaggtgagataccaactcctagggctggtcatgcaagtgtgactgttggggagaactggtttattgttggtggtggagacaataaaagtggggcattggaaactgttgtcctcaacatgtcaaccctcgcttggtcagttgtggcatcagttgaaggacttgttcctcttgctagtgagaaatgctgcaatggagattgaacttctccatgcggatcaacaaggaatggtagaaagatgcaagtaaatcgagtatactttttacatatgatgatgtgcttttttctgtaattattatgatcgtttaacagggtgtctttaataacattttaagcatgttcattctcatcaattaagttcatcttcattggttattaaaaaaaaaaaaaaaaaa

SEQ ID NO: 11769 - DNA, 662 bp, Gossypium hirsutum
  Clone ID: GOSHI-09MAY01-C22967_3
cccacgcgtccgcccacgcgtccgcccacgcgtccgagcaaaagcttcaccaatggggatcgatttagtcgcaggaggtaagagcaagaagacgaagaggacagcccccaaatccgatgatatttacctcaaactcctcgtcaagctttaccgtttccttgtaagaagaactgggagcaaattcaatgctgtgatattgaaacgcttgtttatgagcaaagttaacaagcctccactatctctctctaggcttattgaattcatgaagggaaaggaggataagattgctgtggtagtggggacagtgacagatgatattagggtttatgaggttcctgctttgaacgttaccgctcttaggtctactgagactgctacagctaggattgagaatgctggtggggaatgcttgacttttgatcagcttgctttgagggctcctttgggtcataacacgatatcaatctttctcttgcattttgttttgagttgttatgctacattagttagttcaaatgtatgtatgttgattcagatgacatttttgagtcctatttttttgaaaattttattgcttatttgatcatttattgaaactcttatgagttgaaatgccagttttacttccatgcactattaaaaacgctacaaggatgatttct

SEQ ID NO: 11770 - DNA, 785 bp, Gossypium hirsutum
  Clone ID: GOSHI-09MAY01-C22967_2
ccctcgcgtccggtagtagcaaatattcacatggaacctttcccctcttcggccttcaaagcccacgcgtccgttgaaacgcttgtttatgagcaaagttaacaagcctccgctatctctctctaggcttattgagttcatggaaggaaaggaggaaaagattgctgtggtagtggggactgtgacccacgcgtccggggtttatgacgttccagctttgaaggttacagctcttaggtttactgagactgctagagctaggattgagaaggctggtggagaatgtttaacttttgaccaacttgctttgagggctcctttgggtcagaacacggttctcctcagaggtccgaagaatgcacgtgaagcagtcaaacactttgggccggctcctggtgtgcctcacagccacactaagccatatgtgcgctcaaggggccggaagtttgagagggccagaggacgaaggaacagcaaggggtttagggtttaagatgacttcagtgtttgttctgaggcttgtttttcatttattactgcaaacaaaattttgctatgcattaggtttctctggcatttgtttacttcatgttggattttgtttacttatggagtagttttctggttgacattgactttcttaatgaaaaaaaaagaataaattgaaaaaactcagatagaaaaaagatggaactaaaaacattaaaagacagaattacttgcatcttaaatttctaatgaaaatgataaaaatattgggggggcccttttagagaaccaaagtt

SEQ ID NO: 11771 - DNA, 833 bp, Gossypium hirsutum
  Clone ID: GOSHI-09MAY01-C22967_1
cccatttttccccccgcttgcaagtcgcggcgcctcccccaacttcacaccagcaaagcaaaagcttcaccaatggggatcgatttagtcgcaggaggtaagagcaagaagacgaagaggacagcccccaaatccgatgatatttacctcaaactcctcgtcaagctttaccgtttccttgtaagaagaactgggagcaaattcaatgctgtgatattgaaacgcttgtttatgagcaaagttaacaagcctccactatctctctctaggcttattgaattcatgaagggaaaggaggataagattgctgtggtagtggggacagtgacagatgatattagggtttatgaggttcctgctttgaacgttactgctcttaggtttactgagactgctagagctaggattgagaaagctggtggagaatgcttgacttttgatcagcttgctttgagggcacctttgggtcaaaacacggttctcctcagaggtccaaagaattcccgtgaagcagttaaacactttggtcctgctcccggtgttcctcacagccacaccaagccatatgtgcgctcgaagggaaggaagtatgagagggctagaggaagaaggaacagcaagggatttagagtttaatattactgcactacttgattttgaggcctgtttgttatttaggttttctctttcagttgttcacttgcttatgtttgcatcttattcatggattggttaatagcttgtttgaggatgaacctttcttgcgcttcgatgtggagcatgtttaagcgttttaatgttttattttactcaaacatggaattctttgtttg

SEQ ID NO: 11772 - DNA, 402 bp, Gossypium hirsutum
  Clone ID: uC-gsronu33B046d07b1
tcggctcctttgggtcaaaacacggttctcctcagaggtccaaagaattcccgtgaggcagttaaacactttggtcctgctcccggtgttcctcacagccacaccaagccatatgtgcgctcgaagggaaggaagtatgagagggctagaggaagaaggaacagcaagggatttagagtttaatattacttcactacttgattttgaggcctgtttgttatttagggtttctctttcagtttgttcacttgcctatgtttgcatttttattattgattgtttaattacttgtttgaagactatcctttttaagcgtttttaacgttatattttaccttaactcttgtatctttctttttgttatcaatttttttattctttttttttctgtctctctccttt

SEQ ID NO: 11773 - DNA, 354 bp, Gossypium hirsutum
  unsure (1)..(354): unsure at all n locations
  Clone ID: LIB3149-035-Q1-K1-C10
cccacgcgtccgggccgcccttttttttttttttttttaaattgaaacatgcttgtggatgcatcttattttatactagatgaactaaatatcgaatctcaaatttgtcagatgccacatttcaaagagaattatacaaatcaagtggattaaatccggttcccaaccgactatccctactttacatctagtacaatggcagaacattaacccaggattttgaggcctgtttgttatttaggttttctctttcagttgttcacttgcttatgtttgcatcttattcatggattgtttaatagcttgtttgaggatgaaccttttaagcgttttaatgttatattttactcccna

SEQ ID NO: 11774 - DNA, 368 bp, Gossypium hirsutum
  Clone ID: uC-gsflnu33B079e12b1
tccacactaagccatatgtgcgctcaaggggccggttgtttgagagggccagaggacgaaggaacagcaaggggtttagggtttaagatgacttcagtgtttgttctgaggcttgtttttcatttattactgcaaacaaaattttgctatgcattaggtttctctggcatttgtttacttcatgttggattttgtttacttatggagtagttttctggttgacattgactattaaaaaaaaaaaaaaaaaaaaaaaaaaaaaaaaaaaaaaaaaaaaaaaaaaaaaaaaaaaaaaaaaaaaaaaaaaaaaaaaatacagccaaatttaatataaaaaatactaaatcaaaggggcgccctttttaaag

SEQ ID NO: 11775 - DNA, 336 bp, Gossypium hirsutum
  unsure (1)..(336): unsure at all n locations
  Clone ID: LIB3583-045-P1-K1-C8
aacttccttcgatcaagacttgtaccgttttctcttgttaagcaanaactggtagagcaaatttcaatgctggtgggggtgtgaaacacttgtttattgagcaaagttaacaagcctccactatctatctctaggcttattgaattcatgaagggtaaaggaggataagattgctgtggttgtggggacagtgacagatgatattagggtttatgaggttcctgctttgaaggttactgctctgatgtttactgagactgctagatctaggattgaaaaagtttgtggagaatgcttgaattttgatcagcttgcttttaaggctccttttgggtc

SEQ ID NO: 11776 - DNA, 287 bp, Gossypium hirsutum
  Clone ID: LIB3189-042-P1-K1-G12
gagtaaaataaaacattaaaacgcttaaacatgctccacttcggggcataagaaaggttcttcctcaaacaagctattaaacaatccatgaataagatgcaaacataagcaagtaaacaactgaaaatgaaaacctaaataacaaacaggcctcaaaatcaaagagtgcagtcatattaaactctaaaccccttgctgatccgtgttactctagcccattcatactggcttgctttagagcacacatatacattgatgtagattttgcggatactgaaagcccaccc

SEQ ID NO: 11777 - DNA, 611 bp, Gossypium hirsutum
  Clone ID: GOSHI-09MAY01-C22897_1
ctttctttaatcattgtttgtttttcttaggtgcgttaatagtttcaaccccacaagatgttgcactgagtgatgctcgtagaggagttagaatgttctctaaagttcaagttcctattttgggattaatagagaacatgagctgcttcaagtgtccacactgtggtgaaccttcgtgcatctttggtgctggtggagcccgtaaaacagcagctgagatggggttgcaacttgttggtgagatacccattgaattggacattaggaaaggctgtgacaaaggcatgccgatagtggtatcagcacctgattccgctgtctccaaggcttaccatgatgtagctcaaactgttgtcatgagacttgaggatctggcaaaggcatgaaaatactcttgaggttggtcagtgaagtttgcttgtgccaaccatcttcattcccgtgttttcgtggtggtgctttgttcatcctgatataaataatttttaagtttgagcatttttggtcatgcgatgacaatattaagcatttgggaccatagtgattaagaaacttatttgatgaattacacactcagaccagtttagctaggagcatacgatttacagtct

SEQ ID NO: 11778 - DNA, 796 bp, Gossypium hirsutum
  Clone ID: GOSHI-09MAY01-C22587_1
aagaagaaggataaggtagaagaagctgaagaattagaagagggaaagaaagaaaagaagaaagacaaagaggcgaaggagaagaagaaagaaaagaagaagaaggatgaggtagaagaagctgaagaattagaagagggaaagaaagaaaagaagaaagacaaagaggcaaaggagaagaagaaagaaaaaaagaaggatgaggtagaagaagatgaagaattagaagagggaaagaaagaaaagaagagagacaaagaggcaaaggagaagaagaaagaaatgaagaaggatgaggtagaaggtgaagagaaagaagagaagaaggagaagaagaaagacgaagaggataaagatactaagtacaaggatgaagagaaagaaatcgacgaggaggaaaagaagaaagtcaaagtggaaaagaatgttgtgaagggtgacagtggcataacctccagggaaattgtaatagaagatactgggaaagaaccagaaggtgaaggagaccaagagaagcaaaagggtaaagcaaaagaagagaaagatgataacaataaatgtgagaagaagagaaaatttgaggggaaggacaaaagcaaagatattagcaagctgaaacagaagttagagaaaattaatagcaaaatatatgccctacttgagaaaaaggcagacatcctaaggcagattaatgaagctgagaacacgaccaatgaagttgctgtgtaattgcatacatggactgactgtggtatagcactatgcactagtgtgttttacacacgcattttttttt

SEQ ID NO: 11779 - DNA, 391 bp, Gossypium hirsutum
  Clone ID: GOSHI-09MAY01-C22517_1
tacaggcaaaagcgcaaggtaacagcagatgaacagattggggagattaaacgcttgaaagaggaaattcaacggttcaacgttgagaatggaatgttgaaagcacaacttggattgctactctttaatgcgcaattccaagcagcagctcaacagagacaggatggttacattacccagtcaaccggcaagcagcttcaccctcaaactgttaccgtccatggaacaaactctgaagctgttgacaagatgaatgagatacaaaatctgcagggaacagttcctgtaaatgtagttgatggtaatgacggtatagcaaaaaatcagacgagttctgaagttgaaacatgcagtaataatgaagcagccattactgacattcttatgaaac

SEQ ID NO: 11780 - DNA, 368 bp, Gossypium hirsutum
  Clone ID: GOSHI-09MAY01-C22467_1
gagttttttttttttttttttttttttttttatcaaggagtacgtctgtctttatttccatcaaaaccacccgttagtctaacaagctgcaatatatgttctgtttccagagtttcttctgttcaagcaaagcatatcactcaaaataaacacttcatatcaacacattttgtaaccaaaaatgaaaaaaaaaaaacacattaatgaataaattaaggccacttgcatcatttgaatcaggttcctccgttgagtttttgggcagacatgaggctctttgtcaaccaaattgctgtttctctagatgaggcaacttcatccccaaacggtcgtagaataccagcaagctcatctattttgtcttgctt

SEQ ID NO: 11781 - DNA, 481 bp, Gossypium hirsutum
  Clone ID: GOSHI-09MAY01-C22797_1
tgggcagctcacgctaaaatctgatgttgacagttgcgggggagtctttattgagcttataaccgggcgcaaggccattgataatacacgtgctccgggagagcagaatcttgttgcatgggcacgaccacttttcagagatcgtaggaagtttccaaaaatggctgacccactactacaaggtcgttatcccatacgaggattgtaccaagctcttgcagttgcagcaatgtgtttgcaggagcaagcagcaacaaggcctctaataggcgatgttgtgacagcacttacatatttagcatcgcaaacctatgaccctaatgcacctaacaatcaaagcaacagagttggtccgtcaactccaagagtcaaggatgatcgaaggagtatggcagacggtctggacagccccgaggctcgtggacggcttcgtggttctccttccacgcatagaaattcacctgattacaggaagaggaat

SEQ ID NO: 11782 - DNA, 454 bp, Gossypium hirsutum
  Clone ID: GOSHI-09MAY01-C22777_1
cttctgagtaggtcgaggagtaggcctgatgaccgacggcctataaagagagaagcagttcctcagatgaacattgatgcccctaggcggttgcttcagtttgctgtgcgagatgcagttggaacttcaagggcacctatttcagcaaaggagccatcttccaagcgccttcgatctgttgtgtcaacatcttctggagagttgccagctcgtcctaagagaattcagtctgttgcgtggggcccaatgccgggggcgacagtgatcaaggctgtggcagaagctgctgaagatgtgacaaaggtaaaaaatgcgggaagtgtgtttgacaggcttggtcctggaatggatgttttggagacccgtgacctacatccagaattcagagagtctcggtctggaggataaaatattaatcttaaccacctttaaaaacccattcacatattatcaa

SEQ ID NO: 11783 - DNA, 542 bp, Gossypium hirsutum
  Clone ID: GOSHI-09MAY01-C22647_1
aggaaaatgcgtaccctttcacagatgccaaagtggagtcgctagagaaagaactggaagaggcagccaagagcttaccaagaagtgaataccatgcaggacagcggcatctgctaacgttggtatctgaaggcagtggaggggggccctttatatgctgcgattgtgaagagcagggatctggttgggcttaccaatgtctggagtgtgggtacgaggtgcacccaaggtgcatcagagctgtcacccctcaaagctcaattgaagacaggtgactgtcacctcacctcacctcaactggcttttatgctaattgaattctgatcaatccatcatgccatcacctcttaatatctataattctctctctatatcacttgatatgtgggttttctactgagaatactatgttattgtagctaaagccgtcaacaccatgtgactgtaacaaataaaatgtgtgttccaacctgttttttttaaaatttatctgcccacctctttaccaaatggtcttactttaattcttctcctgggggggc

SEQ ID NO: 11784 - DNA, 757 bp, Gossypium hirsutum
  Clone ID: GOSHI-09MAY01-C22067_1
caaaccctttaaaaagcctaaaaaaccaccccctaaatgaccatcaccaccaccaccaccactacccctaccatctccaccaatgtctccgccgatgcctcaaatccctcccaaaaactacccttttctcttccccaaagtacaatcctctgttctctctgacccttctcgtttcttctccccaaacctcctctcatcccctctccctactaactctttcttccaaaacttcactctcaaaaatggcgaccagcctgaatacatccacccttatctcatcaaatcagccgactcttccctttctatttcctacccatccttctttcacaacccttctttcatttaccaaattttcgtccctgatttaaccatctttgctaccgataaaaccacctcaacttcggataaaagccacgttatctcttcttacagtgatctcagtcttactttagatatcccttcctccaacttccgtttctttcttgttcgaggtagtccctttttaacctgttctgtaaccggcaatacaccgatatcgatctccactgttcatgcaattctctcgttttcttccaatagttcactcaccaagcataccattaagctgaacaatggccaaacttggattatatatgcatcgtcatccatcagtttgaatcatagtgtttctttgattacttctggtgggttttcgggtattcttcggatagctgtattgtctgattctgacccgacatgtgaatcaatcctcgatcat

SEQ ID NO: 11785 - DNA, 410 bp, Gossypium hirsutum
  Clone ID: GOSHI-09MAY01-C22287_1
ggcaggtgtgttattggcaaaacatgaatgcattattcctttcattggaattgctttttgctcacaccacttgcttctcctccttactcatctcagcatggcctcaaaacccttcatcgcattagccaccactgttttcttcttctccctcatcgccgtcaatcattttgggaaacctttccagggaaaacttggggaaatggaagttgtcccaattacggatgccgtaggacctgaaagtgtagcatttcacccacttggagacggtccctacgtcggaatatccgacggtcggattatcaagtggcaaccaaatgagcatcggtggatcagttttggcatcacttctcctaacagagaaggatgtgaagggaaacacgatcatgagacaagggaacacatatgtggac

SEQ ID NO: 11786 - DNA, 408 bp, Gossypium hirsutum
  Clone ID: GOSHI-09MAY01-C22257_1
ctgtatctttagatatgtgtgaggattgcttgtcctggtcgccgtcggagaatggtgatgatgaagtgatggaaaacggcgatgaggatttcaagtgttcttgttgtggtgtcatggtggagaaaaagtggaatcttccttgtttcatgattaaaccttcctgggaggttttggattatccccaggaaggaaatttaatcactgatggtggagaaaaagttgagggttttattgcagatgagggttatgcttcagatggaatcagatcagattttgcggctggtgatcataaagatgaacagatgattgaagaaaacaagagagttggcatcatttctgatgatgaaggtattgaaccaagggaagtggaaaaagaggagttttcatattttgtttctaagtttgatt

SEQ ID NO: 11787 - DNA, 871 bp, Gossypium hirsutum
  Clone ID: GOSHI-09MAY01-C23987_1
taactcaatcccttgagtgattctcagaggggagaatttcatggccttgagagcgaaattatggcggatagagatcagaatgggatggttgatacttcattaggaggctctattcgaggagacattgcataagaagagaatgatccaattaaagctgttaaaaacttagtaccacgaggcttgattaattctggaaatttatgctttctgaattccactttacaggctctattggcatggtctccttttgtccagctcttgcagcaacctaaacttcgtcatataccaaaggttggctatccaatattaacttcgtttgcagagtttgtatctgacttcgatgtgccatccagtgattctaaattgaagaaaaaggatccagcagttcttgagattggaagacctttcagccctgtcatgtttgaatccgtacttaaaagttttactccggatgtgccaaatagcatatctggtaggccaaggcaggaagatgctcaggagtttttaagttttatcatggatcaaatgcatgatgaattggttaagcttcaagggcagtccggtagctcaaatggggtcagatcatcactagtttcgtatgcagaagatgatgaatgggagacagttggaccaaaaaacaaatctgcagtcactagaactcaaagcttccttccttcagagttgagtgatatttttggaggacagttaagaagtgtggtgaaggcaataggaaataaagcttctgctactgttcaaccatttctattgctgcaccttgatatccatcctgaacctggtcataccattgaggatgcacttcacttggtctcggctcccagttttgaggttatcagcttgactgtggatggat

SEQ ID NO: 11788 - DNA, 724 bp, Gossypium hirsutum
  Clone ID: GOSHI-09MAY01-C23957_1
gttgcttacaatacagtacttaatgggttgtgtaagactgggaacactggtcgagctgttaagtttctaaggatgatgaatgaaagaggtttcgaacccaatattagagcatatagcacccttattgactgtctttgtaagaatgggttactaaatgaggctgtcgacctcttctctgaagtgaacgttaagggcattagaccaaatattgttatttacaattgcttaattcatggtatgtgtaattcaggccagcagcatgaggcaaccaagcttttgaatgaaatggtgggtaacaatgtttctcctgatattttcacgtataacatattgattgatgcacattgcaaggaggggacaattttggaagctgtaagtatctttaatgcgatgagaaagcaaggcatcaagcctgatgttgtcacctataatatattggttgatgcatggtgcaaggagaggctaatttctgaatctttggatgtagttcacacaatgagaaagcaaggcattgagcctgatgttgtcacgtatagtacattagttgatgcgcattgccaggaggggaggtttctaccaaatattgttgacacaatgagaaagaaggcattgagcccgatgttgtgacgtataatatattggttgatgtgtattgccaggagaggagtatttctagagctgtagatactattgccacaatgagaaagccaggtgcggagcctgc

SEQ ID NO: 11789 - DNA, 756 bp, Gossypium hirsutum
  Clone ID: GOSHI-09MAY01-C23877_1
gaagaaagcatttttgattcactgggtgcggttagatcaatattcttcagttgatgaggcctataatgatggcatgaaacgattggaaactttagtatctagagtacatgatatagatcccccaaagctgcctgcaggttcaatcaagttgtatactcgtctttttggcccaaaattggagatttcaagcatgacaagtgatgcatacacagaggctgtgttgcgggctaaagagcacattctggctggtgatattttccagattgtattaagtcagcgttttgaacgtagaacatttgctgacccatttgaaatatacagagccctcaggattgttaatccaagcccatacatgacatatttgcaggctagagggtgtatacttgttgcttccagtccggaaattcttacacgcgtgaagaagggaaagattactaatcgacctcttgctgggaccattagaagagggaaaacacctaaagaagatttaatgctggaaaaagaacttttggctgatgaaaagcagtgtgcggagcacattatgctagttgacttggggagaaatgatgtgggaaaggtttccaagccaggatctgttaaggtcgaaaagctgatgaatatcgaacgatattcccatgttatgcacatcagttcaacggtgacaggagagttacttgacgatttaactagctgggatgctttgcgtgcagcattgcctgtcggaactgttagtggggccccaaaggtaaaagcaat

SEQ ID NO: 11790 - DNA, 442 bp, Gossypium hirsutum
  Clone ID: GOSHI-09MAY01-C23807_1
ccctcgcgtccggaaactttgaagtttttgtgtggagaaaaacaagtgttttttttagattatcctctgcgtagccagggcagctcgtagaatctctgcgttacttactcgttcactctctgtttcatcttcatctgtttctactttgttttcatctctagggaaaaacagtggcagaaatggaattgggaaaaggttcagcacagctgcagctcttgaggatctgattgttccaccggttcaaatagcttacactcagaatttaattgatgggaaatttgtagatgccgcatctgggaaaacatttccaacttatgaccctcgtacaggggatgtgattgccaatgttgctgaaggtgatgccgaggatattgaccgagcggttgccgccgctcgcaaggcattcgatgagggaccgtggccgaaaatgactccctatgaa

SEQ ID NO: 11791 - DNA, 631 bp, Gossypium hirsutum
  Clone ID: GOSHI-09MAY01-C23547_4
ctccttcttccttgactaggggtttccatttcccagttcttctcgtccctttcttaaagtcggcatcttcctttgctttctccagttttctcctacccagcaccttcttcaaggttccaagttctttttgtttctcctttaattgctcttgtatttagggatttaaattgcggaggcggccatatttttagttgggttgcgtttgtggtggtctgcttgcgttgcgtttgtggcggtcgcagataacggatgctattgcggtattgcggtcactgtagggtttgttcttatttgaatagcctttgttgtagctatttgcaaaatgctggctcctagtgttactgctcccttgcggccttcattatctaccggacatcgattagagtcacgaattgaatgcagtagccgttgtggctcagttagaattccgaatcggattaagccaagggaacttggcttgcaatcacaacctagggtaggaagaagtagaaaacaatcttcatccattgcatgcaccgcaactgctttgaacgcaacttgcagtgcatcaggacaaactcaaactgttactcgtgaggcaccaacgatcacccaagctcctgttcattcaaaggagagtcactgcagctag

SEQ ID NO: 11792 - DNA, 745 bp, Gossypium hirsutum
  Clone ID: GOSHI-09MAY01-C23547_1
ccctgttcttctccttcttccttgactaggggtttccatttcccagttcttctcgtccctttcttaaagtcggcatcttcctttgctttctccagttttctcctacccagcaccttcttcaagggtttgttcttatttgaatagcctttgttgtagctatttgcaaaatgctggctcctagtgttactgctcccttgcggccttcattatctaccggacatcgattagagtcacgaattgaatgcagtagccgttgtggctcagttagaattccgaatcggattaagccaagggaacttggcttgcaatcacaacctagggtaggaagaagtagaaaacaatcttcatccattgcatgcaccgcaactgctttgaacgcaacttgcagtgcatcaggacaaactcaaactgttactcgtgaggcaccaacgatcacccaagctcctgttcattcaaaggagaagtcactgcagctagatgatggtgattcaggatttcctccccgtgacgataatggtggtggaggtggcgggagaagtggtgggggcaactggtcaggtggattcttccttttcggattcctcccgtttctaggcttcttaaggataaagaaagcgaagaggattaccgggacagccgaagaagatgatgagattctctacttattgataacatctttagaacctatattgcctgttgttcttcatgttatatacttttgagaaaccattgcatatctttcttt

SEQ ID NO: 11793 - DNA, 667 bp, Gossypium hirsutum
  unsure (1)..(667): unsure at all n locations
  Clone ID: AI055380.1
ctccttcttccttgactaggggtttccatttcccagttcttctcgtccctttcttaaagtcggcatcttcctttgctttctccagttttctcctacccagcaccttcttcaagggtttgttcttatttgaatagcctttggtgtagctatttgcaaaatgctggctcctagtgttactgctcccttgcggccttcattatctaccnggacatcgattagagtcacgaattgaatgcagangcccgttgtgctttcagttaggaattccgaaatcggattaagccaaggggaactttggcttggcaatcacaaccttaggtngaaanngaaaggtagaaaacaaatcttcaatccattgcatgcaccgcaactgcttttgcagaacgcacttttgcagtgcatcanggacaactcnnactgtaacttcgtgaggcaccanacggatcacccaagnttctggttcattcaggggagaangtcactgcagctaatnaatggtgatcaaagaattcctnccgtgacatatggtggtgaggtgcgcgnaaaaggggtgggcactgtggtaagtgggattcttcttttggaatctcgggttctaggtttttaggataagaagcgaaaggataccggacagcgaaagtatatagatctctctatgatacattta

SEQ ID NO: 11794 - DNA, 633 bp, Gossypium hirsutum
  unsure (1)..(633): unsure at all n locations
  Clone ID: LIB3543-047-Q6-K6-E3
cggccgcgtgggctcacgccctgatttgccctcccanactcgaaatccacctccagcctctccctcccaacatcaaacagcagctgcgagcgaagtcacctccacctgactccaccgtctcaggtctccggccccattgtttcggtaccaatttgatcaagttactgaggatgccatggttgatagactgagcagtttctccctcgacgataacaactttgaagcgcagaatgcaacttgcagtgcatcaggacaaactcaaactgttactcgtgaggcaccaacgatcacccaagctcctgttcattgatgtgggttagccgaaaggagcaagcagaagtcgtttttggcatacaacattctcatggcgaatgatttcagcacgccaaggacatcttgctaatgtaacacagtgaaatttgtcaaggtgaaggtactttagctctgatcttgcacctgttaatccaaacatgcagagaaatccagcttgaagttgattatcgcgactcgatgaaacggtgggtcgggggattaggaaaacatgtactttctatgtgaactgtttccagcagtgctggggtgataagtgagtgaggcggngatgatgataccattgatatggctaacttccca

SEQ ID NO: 11795 - DNA, 391 bp, Gossypium hirsutum
  Clone ID: LIB3083-104-Q1-L1-D7
tgctgcggtatacaaagatcccagcgatgcttgtgctggaattgctggagactcctataaacgttggttggagcttgaaaatcgaaccaatgatattacaatcataattgtacagatcaaaggcctatcaaattcgggtgttggcacaactgatagtgaactacattccagaccctgccaaattggcggttccatgaatcaaagcactgccattgttccaccactgatgcatcagaggcctttggaatcggatgtaggttagccgaaaagagcaagcagaagtttttggcatacaagattctcatggcgaatgatttcagcgcgccaaggacatcttgctaatgtaacacaatgaaatttgtcaaggtgaaggtactttagctctgatctt

SEQ ID NO: 11796 - DNA, 1476 bp, Gossypium hirsutum
  Clone ID: GOSHI-09MAY01-C23467_1
aatgaaacaccttaattttgcaatatatattggattgtctcaaatttcctgttatcactctaccggtcaagaatcttttcatgcaaccagaagcacatggaatcaaaactcaaaaggcaggcatgattggtaatcaattgcataacccttacaccacgtatggtacacaattgcctaggataatcccaccacaagctacaccagtatctttcatggaaataaaacataatcaagaatccgataaataaaagtttcaaacgtctatctatccagtcccaatcagcatgcatgatccttaaccattttcaaccacgacaatccaaaaaagtgaagtccgttcatgacaaaagaccgaagctttgaatttagttccttagaaacgcaacagtggcaacacgttgatcccacagatccaccaaacatgaatgtaggataagtccgaacatgattcagatatcgaaacgggggatgatctctgtgtgtctcttggtccttcgttgcacttggctcctgggatattgcaatgttcctttgattgaaattttccacctcttggaccaattcatcttttgtatggttgcaagatgtaatcactaatattccaccgggggccaacaactttgaaactgaatcccaatacataatccttttgataggcccatcaggatgcaagccaatggcatcgagagtccccttatccatgacaagttgaaactgtctatccaactttgtctcaagaatatcatcaaccagaaacttgatgtttgaaaatccatctcgatcagctaggcttcgagcaaggtcaattgctccttcactataatcagttccagttaaatctgtgaacccctgcttagaaagctcctgaaggagcagaccatttcccgtgccaatgtcaagtacactccagcaagacaaatacttttcatcgtgttcaacagactgcggcttgggctctccaacatgattcggcatgtgaccttgagaaacatcagtacacaacttttggtccaagaaataacagtatccatgacatcagttccaaaccaattttcaccaacgtgaccatgttcacgaaaattggcaagctcatcaagatatgcagcatcccagtaactctgaagaccaagcattgatgtctctgcatctggttcgtccttgtcggaactgtaatcagaggcgggacggaagttggcagcggaggacagggcttcggcggcatcagcgtggcgctgctcatcatcaagtgtgcttccgtaatcgctctttatagaccatgaatctgcagccaccgacctgtcgtcatcggcacccgcttctcgaccggtctgcagctgttgctgcggaagctgaagatgttggttagcttccgtagacccgtcccgcggctcccccccgcctgcccccgatttcaagctatttaactcccaaaaaactggttaaatttgttagtgaagaaagaaagatggagactaa

SEQ ID NO: 11797 - DNA, 330 bp, Gossypium hirsutum
  Clone ID: uC-gsflnu33B073a06b1
tttattctgatggacctatcaaaaggatgatgtactgggactcagtctcgaagttggttgccccaggcggagtgttagcgattacatcttgcatccatacaaaagatgatatggtacaagaggtggaaaatttcaatcatagaaacgctggaaatgcttcgccaagacccaaatacaatcaaggaccgagaaacacacatagattgcccctctgtccaatatttgaaccatgttcaaacttattcaacaatttatgtttcgccggatctttgggagcacaatgttgctactggcgcattagtactggaacttaaagataacttgaaggtt

SEQ ID NO: 11798 - DNA, 283 bp, Gossypium hirsutum
  Clone ID: LIB3148-037-Q1-K1-H1
cccacgcgtccgcggaatttcttttcttcaattacaaattaatcaaattttctttctttctttttttaattttaaaattaaataccttaaaatccatggcggtattcagattggcgccggaagagtcaccggatccaacccaacaacatccaccgccgcaacaacagctgcaggccggtcgagaagtggcgtccgacgacgagcggtcggtggctgcagattcctggtctataaagagcgattacgggagcacacttgacgatgagcagcgccacgctgatgc

SEQ ID NO: 11799 - DNA, 1315 bp, Gossypium hirsutum
  Clone ID: GOSHI-09MAY01-C23427_1
gcaactgagagagatgtctatgaattcttctcaaaagcaggcaaggtaagggatgttcggctgatcatggatagaaattcaagaagatcaaagggggttgggtacattgagggttatgatgtgatgtctgtgccaatggcaatcgcattgtctggtcaactgcttcttggtcaacctgtgatggttaaaccttcagaggccgaaaagaatcttgttcagtccaatacttctggtgcaggcgcaggtggtgttgctggaccatatggagctgttgatagaaaactatatgtagggaacttgcattttaatatgacagaaatgcagcttagacagatatttgaaccttttggacctgtggagcttgtgcaactaccacttgaccctgagactgggcagtgcaaaggttttggggttggccagtttgctcaacttgaacatgcaaaagcagctcaaagtgccttgaacgggaaactggagattgttggtcgaaccattaaggtttcatctgttacagatcatgttgttacccaagatactacagcaaaatctgcagactttgatgatgatgagggtggtggcttggccttgaacgcacaatcaagagcgttgcttatgccgaaactggatcgctctggtattgcaacaagcattacgagctcccttggagtacccctccttaatgggtctgctccgagtccacaggctgttactttacctgtcaatggccaagcggcatatccagcaccggttctaccgccaatcatgtctactacggcccttgattctgttggccagcccagtgaatgtttgctgctgaagaatatgtttgatcctgcaactgagacggaaccagattttgatttggatattaaagaggatgtcgaagaagaatgcagcaaatatggcagggtgaagcatatatatgtagacaagaacagtgccggatgcgtctatctgcgatttgactccgcagaagcggcaggtaaagctcaacgtgcaatgcacatgaggtggtttgcaggccgatcaatatcagccttatttatgcaaccccaggagtacgaagcgaggtttaaatgctgaagcagaagcaatattggatttgtttgttatgatatgatgtgtgttgatgggtggtagggtattacttttgaagacgcgttttattctgctgagtttagaattttattattataagcatagtacacaacgacctaattgtaagataaatgttatttgctaactcatttttttgttctgtaataacgatagaatttcggatgtctttatgattcattcagaaagctttaatttt

SEQ ID NO: 11800 - DNA, 565 bp, Gossypium hirsutum
  Clone ID: AI725494.1
gggagtgtttgctgttgaagaatatgtttgatcctgcaactgagacggaacctgattttgatttggatattaaagaggatgttgaagaagaatgcagcaaatatggcagggtgaagcatatttatgtggacaaaaacagtggcggttgtgtctatcttcgatttgattcgacagaagcagcgggtaaagctcaacgtgcaatgcacatgagatggtttgcaggcagatcaatatcagccttatttatgcaaccccatgaatatgaagcgaggtttaaaggttgattgaagttcagcagctttcagattatcaagtgagttttgcaaatttttcgatgtggggtttttattttcggttcctcatgtttgcttcagtgcacatatatatatttaggataattgtcttgactgggttcagattatttttatttttatttcagattggtacacaatgagctaaatgtaagataattgatatttgttcacacttttttgttgttgtttttttctttaatttgcttaaaaatctgccaattttatttttgggaaaaaaaaaaaaaaaaaat

SEQ ID NO: 11801 - DNA, 415 bp, Gossypium hirsutum
  unsure (1)..(415): unsure at all n locations
  Clone ID: LIB3145-009-Q1-K1-H7
aaacgacccgcgcggacggcaacaaatagggcannntnaagcatatatatctacactagattattgcccaatgcgtatatcggccgcttgacttcatagaagcggcacgtaaaactcaacgtgcaatgcacatgacgtggtttgcacgccgatcaatatcagccttatttatgcaaccccaggagtacgaagcgaggtttaaatgctgaagcagaagcaatattggatttgtttgttatgatatgatgtgtgttgatgggtggtagggtattacttttgaagacgcgttttattctgctgagtttagaattttattattataagcatagtacacaacgacctaattgtaagataaatgttatttgctaactcatttttttgttctgtaataaccatagaatttcggatgtcttta

SEQ ID NO: 11802 - DNA, 403 bp, Gossypium hirsutum
  Clone ID: LIB3146-008-Q1-K1-E2
ctgagacggaacctgattttgatttggatattaaagaggatgttgaagaagaatgcagcaaatatggcagggtgaagcatatttatgtggacaagtaagcatcggactgtctattgcattggataaactcattttttacagcaattttttgttctttttagttggcttgataattgtgtactccagaaccggataaatatattttatctgttctttattgtttatgaaggggcaaatgttgtatcaatgttgaggaaggggataatcacatatttttacatctattaatctgttagtaatgttatttctgtgcaagttatggacattatgcagtcattcagcaacttggttaatatctgtagctgacaatcaatgactaatggcatcttattttgtattataa

SEQ ID NO: 11803 - DNA, 405 bp, Gossypium hirsutum
  Clone ID: GOSHI-09MAY01-C23777_1
tttaaaagtgtcttacaagttcaatctcttgaaatcaagatgtccaaggaggacggtttgctcagtgaaatgcgctttgccagaagaaagggctgacaagcatttagatgagctccaaagcgaaaatagctgagggagctgcacctggtcttgcaattttgaagaacaaagctccaagatggcatgaacatttacagtgctggtgtttgaatttccacggtcgggttacagttgcatctgtgaaaaactttcagctggctgcaactgtagatccaagtcaaccaggagggaaaggagatgaagaaaaggttctcctccagtttgggaaagttggggatgatacattcaccatggattacaggtcacccttgtccccctattttgcatttgccatctgccttacaa

SEQ ID NO: 11804 - DNA, 425 bp, Gossypium hirsutum
  Clone ID: GOSHI-09MAY01-C23737_1
gttttcaggtcgggtcggtcgggtcacaagaacttatatataatggatgcaatcgaaggggagacgagttggattgaaagactaacagatggtccgtggacggacacaatgtgtaattggtcaccagatggtgattggattgcattttcttcggatcgacatgatccagggtcaggtagtttcgagttatatatgattcacccgaacggtaccgggttaagaaggttgcttaggagcggttcatccggacgggtcaaccacccgtcatttcgtctcggatgggaagttattggtattcactacggattacggtggaatatcagcagagccaatctcaaacccacatcactaccaaccatatggtgagatattcacgatgaaattggacggttctgatttgaagaggacgacccacaattcttatg

SEQ ID NO: 11805 - DNA, 544 bp, Gossypium hirsutum
  Clone ID: GOSHI-09MAY01-C23087_1
cttttaaggatttaagaactcaggctactcagcagaatcaaacagtggaaactgagttgttttcttgccctgtgtgctatgaaccactgatcagaaaaggccctcctggtttaaacttggatgctatctaccggtctggattcaggccgaagaaatgcaacaagtcatactcaagtaaagatgtatgtctggacctgactgtcactactggattgagaaactacactgaagtcaaacctgttaggacagagctattccggagtcctcttgtatcgtttctctatgaaagaggctggcgtcaaaattttaatctcagtggcttccctggagctgatgaagagttcagaatggctcagagtactttaaacccgcagaaggtggcactttagtggatgttagctgtggaagtggtttgttttcccgaaaatttgctaaatcagggacatattctggtgttattgcactcgatttttctgaaaacatgctccggcaatgtaatgatttcattgagcaagatgcatctcttttagctagcaatattgct

SEQ ID NO: 11806 - DNA, 565 bp, Gossypium hirsutum
  Clone ID: GOSHI-09MAY01-C23057_1
aaagctgtgatttactgcagggtttcaaacccttttccattgccgctctcggcctacggccgatccaaatctcagccctccaactcctcattcgaaacgaagcaggcttggatcgttgacggcgagtccccgcagatttgaaatcggccttttatacccggtatgtgagaagaaaagaaaagaagtaaaaatccaaagaaatctattctgttatttgttggcctattgctgcccgatttttgctattctgttctgctttctcttctttgtcgtattgtttgttgtcgcaggtataacgtggcatgaagcggcgcatgttggggagggtcgtggtgcgagattcgcggcggcgagcgaggacgagcggtgccagcttgctgcggcgctaagcagaagctagggtttctgctagtctgtttttttgtgggctaggtttaggattattgggttgaaaaggtctgggccaattgggccttattacaaatatattttatttgattttagtttaattataaactcgattgcgataattattcctaaatatttgcaaacattttttgttcag

SEQ ID NO: 11807 - DNA, 1168 bp, Gossypium hirsutum
  Clone ID: GOSHI-09MAY01-C23077_1
cccacgcgttccggtaaagggactgtttctttttaattcagcgctgggggatgtgaaacagcgtctcatctactacaagagtacaatgtttggttcttaatagtaacaaactctcagttcaaatacctcctgctgctgtttctgcaatctcctggccccctcagccaaagtttcacaaattcaaatgttgtgacaagcaaaatccaagccgagtgaaaaggtatcacagtcttttgcatttctttaaaacctgttgaaagatttgtcatcttcagtattcaagttccctcaactccatcattatcatcaccattttcaactatgacagcctcatcactcacatcagttaatgtctcatctactgaaactagtccaacatcggcaccaaaattttccttttcaacttcattttctgcggtgcctacttcacctgcaacacaatctagtgaaccaagttctgtagttgcagtagatgctaatagaaaagcttcttcttcctcaccatcatcagttcctttctctgcttttgtttcctcttctgattccttgtcttttcagcctctcgaaatgcctatacccttgcctgctgatttatctcccgtgagttcttctgagattttaaaagttgaggcccaaccacataacgaaatacatgacttaaaaaaagatggggatccgattatacgagcaccacctctgcaacatgaacttccagcaacagaattgagcttgaagcctaagtttgctgtctcatcaccaaagaaaagtgaaactcctactggagtgttatctggaagccaaacccgcatcattgatcttgcaagtcctgcaactaatttggcatcaaatcctcagccgctgcagccttctactggagatagtctttcagctccttcgtcaattagtattaatactgccaatggaaaaagcggaaatttggatctcacacaagaggatgagatggaggaggaggctcctgagacaaaccaaatgactgaacatggcttgggaagcttaagtagctttgggattggctcaaaccctaacccaactgctcctaagccaaacccatttggtgctccattcggagttgtggctacaagtgcagctacctcttcattcacctcaactgttaatcctggagagttgtttaggcctgcatctttta

SEQ ID NO: 11808 - DNA, 733 bp, Gossypium hirsutum
  Clone ID: GOSHI-09MAY01-C23397_1
aggaggcttagaaggaaccggggaaacgagccgagggtgtactcatctgcgattgggccgagttaacccacgaatgcctcctcaacatcctttccagactcactttcgagcaccgatggtccggtcctatgcttgtctgcaaaccatggctcaacgcctgcaaggatccctctctcaactccgtcttcgatctcgaaactcgcttcgattcctcctccgagtcaacccgctggtggacccccgaattcgaaagacgaatcgactccatgctccgatcggtcatcacctggagcaacggtaacctaacccagatccttacccgtcactgctccgatctctctctcaatttcgccgctcaaaggtgtccaaatctccaagttctttccataaaaagctctcctcgcgtgaccgatgcgtcgatggctcaaatagcgtatcattgtcggaaccttaaacagctcgacatcagttactgctacgaaatctcacacgaatctttatcgttaattggtcggaattgtcccaatttgaagatcctaaaacggaatttgatgaattggttggacccatcgcaacacgtgggaattgttccagatgagtatctaaatgcttgtccgcagatggagatacagaggctgctgttattgcgaaatttatgcctcaattggaacatcttgaaatcagattctcgaaattgtcagctaaaggattaggttccatttgtgaagggtgt

SEQ ID NO: 11809 - DNA, 725 bp, Gossypium hirsutum
  Clone ID: GOSHI-09MAY01-C23367_1
gtatggtattttgatcccatataagcaagcttggcgtgcaaaggaacggggacttgctgctatttatggctcttcagaagaaggatactgcatgcttcccacattttgtgagcaaataaagaaaacaaaccctggaagtattgcagaggtattcaccactggtgcagataaccgtttccagcggctgtttatttcctttcatgcatccatatgtggattcttgagtggatgcttgcctattgttgggcttggtggaatccagcttaaaagcaaataccttggtactttgctttcagcaactgcttttgatgctgatggtggtttatttcctcttgcatttggcattgttgatacagaaaacgatgatagctggatctggttcttatcagagttgcataaggctttggagatgaattctgagaaaatgccacagctcacatttctatcagatggtcaaaaaggcactttagatgcagtaaggagaaagttcccaaattcttgtcaggccttttgcatgcgctatcttagtgaaagcattagcaaagagttcaagaactcaaagcttgtccatcttctctggaaagctgcatatgctacaactacgactgcttttaaagagaaaatggctgaaatagaggaggcttctcctgaagctgcaaagtggatacagcaatttccttcttcccgctgggcattgtgtatttcgaagggacacgttatgggca

SEQ ID NO: 11810 - DNA, 848 bp, Gossypium hirsutum
  Clone ID: GOSHI-09MAY01-C23277_1
aataaaaatttcaacctgccatatcagtctttttcaccttacaagcttgccagaaatcctagatgtatcttaaaaatctttatccaagacataatatgatagtaagggtgaaaacaactggggaaaaaaaagagtaacgccatacgcagttacctaagcagatctgcagtgctatattacaagatagaaactaataataataagcatgaaaaagacaataaaaagacaaatttctttgcatctcttgaagcagactatagttaagtttactgagtaagatccctgtgggtgtaaataacccctttgtcaccatccaccacctgcccactccccctcaagatccatcgagttgttaacagtccttcaaccccgactgggcctcgggcgtggatcctgctagtacttattccaacctcagcaccaagtccaaatcgggctccatcacaaaatcgagtgcttgcattatgaaatactgcagcactgtcaactccatgtaagaaaatttcagcaacttcatgattttcagtgacaatgcaatcagtgtgagaacttccatgttgatgtatatggtcaatagcagcctgcacatcatccacaatttcaactgtgcaggccattgaactgtactcatgatgaaatgaatgtgcctcaggaatatttaacaaggaactcgctcttggtccaccataaagggtcacaccttcatgttggagttccttggtaagtgtattgagcaaaccattactagacagatccttgtgtacaagaagcgtttccatagcgttacatgctgcaggatagtctatctttgcatccagaacaatgcgcttggccgtatcccccttagc

SEQ ID NO: 11811 - DNA, 333 bp, Gossypium hirsutum
  Clone ID: LIB3148-029-Q1-K1-A4
cccacgcgtccgcccacgcgttcgattattagaacccatatttgctctacagatatctaggatgtgaactttattatacccattacaaagactagagtgagtagtcgcgattttgtaatttgatacaaaaaataaaatccaacatgtgaaaatattattatatactgtaaaaaaaaaaatgatttcacccttactatcatattatgtcttggataaaagattttaagattacatctaggatttttggcaagctgttaaagtgaaaaagattgatatggcaggttgaaattcttattgctggaaagtttgaatgcaacaccagattcattcatg

SEQ ID NO: 11812 - DNA, 449 bp, Gossypium hirsutum
  Clone ID: GOSHI-09MAY01-C23217_1
aaatcatcgccactcattagccagtcggttttgaaagctcaacaatggacgccatacttttagaatagcaataaaagaatatgcgtctgctgttggccttagacattactttttatgtttcctccaaccaaaacataattgcgatgtgaagtggtatacaaaaaaagataatctaagacacaaaggggaaagagcaaaaacatagcaaaacatattcaacaaacataatactatgtttgtcattacaagatacacacacacacatacataacaatgataatccgcaactgcagtgaaattactctgctctgaaggcgccctcgcggccgcccccgcgtccccccccgcctccgaaggaatctgcgaattcacagatcttatttcctccaaaatgggaagcaacagccctttgcactgttgttagtgggtttccgattgcggccagtgtt

SEQ ID NO: 11813 - DNA, 257 bp, Gossypium hirsutum
  Clone ID: LIB3083-099-Q1-L1-F4
gggtggggtttttcataggaggggcgtattcaacaaacataatactatgtttgtcattacaagatacacacacacacatacataacaatgataatccgcaactgcagtgaaattactctgctctgaaggcgccttcaatgtatttacagtgttccatgcgaactgataaggaatctgcgaattcacagatcttatttcctccaaaatgggaagcaacagccctttgcactgttgttagtgggtttccgattgcggcc

SEQ ID NO: 11814 - DNA, 501 bp, Gossypium hirsutum
  Clone ID: GOSHI-09MAY01-C23237_2
gaatgtctccgtcccaagagagcgcaaaatatgggcagagagagctccgtggcttgcaatggataccgtcgattcttagatctcttaaccctagccatttttattttttatcattctgatcgagcattgtttctaacgaagaaatcaacttttaggtttcatttgattcagttctggctggttttctgattttacctgcatttcgcgttctatttcgtcgtggttgctttgctgattgtttcgcctaaccaaacattgtatctgacgaagatatcaacgtttctgttccgtttgattcagttctggcttgtttcgatccggtttccttctgattttacctgcatttcacgttctgttttgaattttggagaagtctagaagttgtctgttagggtttccaagaagaaaggaagaggatggaaatgatgaagtgtatgtgaaagcagagaaggagataggagaaacgaggcgtgataatggacgattgaagaggttcatttg

SEQ ID NO: 11815 - DNA, 1163 bp, Gossypium hirsutum
  Clone ID: GOSHI-09MAY01-C23237_1
cccactcgtttgccacacccaagatctgccccccccacgccgtccgatttaaaaaaccaaacacctaaagtaacagatgcaagagagcgcaaaataagggcagagagagctccgtggcttgcaatggataccgtcgattcttagatctcttaaccctagccatttttcttttttatcatgtatagattctcaagatttttttctcccgagattctttcttattttcttttttttttcaagaatcttggtagccactgatcggagcttcactatgctttacttttcgaaactctattggctttatttttttttgtctgcaatctgattgagcattgtttctaacgaagatatcaacgtttaggtttcatttgattcagttctggctggttttctgattttacctgcatttcgcgttctatttcgtcgtggttgctttgctgattgtttcgcctaaccaaacattgtatctgacgaagatatcaacgtttccgttccgtttgattcagttctggcttgtttcgatccggtttccttctgattttacctgcatttcacgttctgttttgaattttggagaagcctaaaagttgtctgttagggtttccaagaagaaaggaagaggatggaaatgatgatgtgtatgtgaaagcagagaaggagataggagaaacgaggcgtggtaatggacgatagaggaggttcatttgttgctgttaggaggatttccccacgcctccggccgcgcgttccctgccattctacttctgctgaggttgtggcaggatcaacagcatggttgggtcgaggtctttcttgcgtatgtgctcagagcagagagagtgatgctcgtccatcatttgatttaactccttcccaggaggaatgcttgcagaggctgcagaatcgtatagatattgcttatgatagttcaatccctgaacatcaggaagctttaagggccttatggaatgctgcatttccagaagaagaactacgtggtttaatatctgagcagtggaaggaaatggggtggcaagggaaggatccatctacggattttaggggtggtggctttatatcattggagaacctgttattctttgctacaaattttccgaaatccttcaaggatcttctttggaagctggaaggtgatcggtctg

SEQ ID NO: 11816 - DNA, 396 bp, Gossypium hirsutum
  Clone ID: LIB3083-104-Q1-L1-E4
ccacacctatagatctcccccccaaaaaaaaaaaaaaaaagaaaaacaaacacctaaagtaacagatgcaagagagcgcaaaataagggcagagagagctccgtggcttgcaatggataccgtcgattcttagatctcttaaccctagccatttttcttttttatcatgtatagattctcaagatttttttctcccgagattctttcttattttcttttttttttcaagaatcttggtagccactgatcggagcttcactatgctttacttttcgaaactctattggctttatttttttttgtctgcaatctgattgagcattgtttctaacgaagatatcaacgtttaggtttcatttgattcagttctggctggttttctgattttacctgcat

SEQ ID NO: 11817 - DNA, 532 bp, Gossypium hirsutum
  Clone ID: GOSHI-09MAY01-C98987_1
agagcattataagaaaaaaaattccatttattttttaaattatatgtatacatacatacatatatatatgtaaggggaaagtgcaaaaatactgggaagaaaaaaagggacacaaaaatgtgtgagggacagaaattgaggtgtgaggacattccacctatgatttcttggcctttttcaggggcttgtcctgaatcttcagtgcgtgttgacatgctttcttagcatccaaatttccaggtatctcacccaatatcggcacaacatcatcgagacccttagcgtcctttagaatctgcctattcttggtctcgaggacgcttgcgacaaggaaaaccgagagcgcacagtttttatccgcgtgtccattctgcagattttttctttgaaatttaccggaccgctttagctcctttgcatgcaatgtgtgtgtactgttgctatctagagctgcatcgggttgctcggacaacgagagagatattaggggtgtattccattgcccacataacctcccaaagatacagggcat

SEQ ID NO: 11818 - DNA, 573 bp, Gossypium hirsutum
  Clone ID: GOSHI-09MAY01-C98957_1
catagcacatgttcttttgcacatagatattaaattacacgttgctctattgcattgcctaaagctgcagttaactgagatgatacaagttaataggagattactagcaaaacagagctgattctattttgagggagcagtatttggtttttgtgactgggataacagtccttaacttctcataagcatcagagcaggcgtgagaatagtccgacatagcccggaatagctcaggcagtcggattttaaggcttcccaaagatttctctctcacttgaatgcaatgcttttcgtgagcttcgacttcctcttccaacctctttttcaagctctcaaccgcaaactgcctctccgatacaggatcctttgcgtttgcatcttcccctctttcagcatccatctcatctgatccagatctccgttgcctatacttatgataccattcctcgaaagcctgactctttcgcagaaattccttccgggtttcctcacacttttcttttagtttcatctcttcctcttgatggatgattatggtttttatcacagcagcaaacgaagagatagcagatt

SEQ ID NO: 11819 - DNA, 494 bp, Gossypium hirsutum
  Clone ID: GOSHI-09MAY01-C98977_1
aaacaatcaagcttctttttttcattgattttttcaatgggtaaaatgacatttttgtcttaaaaaagcaagattacaatgcagaactaggtaactaagttgtgggaaacatcaagtttttggttgtcatgctttaggaaggggttccccactcaaaaatgatttgaaaagctgaagagctgctcttggcttgaacaatggtacttcatgtcctgcccctctcactggtgcaaatgttagcccttcatacacctcagtccatcccccgaccttcacaaacacatcaaaattcccaatttttttttcttatgtcagcatcatttcagtttggatgatcgtactcgaccggtcgggctttgtctaatccgaaaaaagagacaatttatagatatatgggggggcttaagcttacctgtttcttaacataccaaggataccagggaattttggtactcaatttcagttgtgcaagggagtaccttgttgctgtcact

SEQ ID NO: 11820 - DNA, 982 bp, Gossypium hirsutum
  Clone ID: GOSHI-09MAY01-C98527_1
gtagattggggaggctaaagaaacttgcgaagagtgaaaccagcagtggctgatggaccaagaggggtagattcccatcttaaggcctatgagagggcacagcagatgctccaggatcttgagtcggagatgatgaataaaggaggaggggatcgggtcgaacaaagccggctctttgacgccttccttggttcttcatcaatttggcaacctcaaccttgcaaggaccccatcagcttgccaaaatcaaatgcagttaaaccccaagatgattttggtgatgagaacatcaattcgaatgtaacggtaaaccaggtggtgattcctcaaccaaaaccagtcgctcttcctttcggaaattctctaaatatcgatgcactgcccttttactcatcaaagctggtgaaggaggtgaaagctccagttgtgaatcaattgcatgagacccttaaaagaacacggtcaggaaactcagctaactctatgagagtgaatgaaatgggtggagactgcacaaagcctttatctgaagaactggaaaaaccagagattaagacaagaagaaggctctctctttcaactaaagagaaaggagacaaattggctgatttattaccagacagccaagactttgaggaggctatcattgcagctgcagttctaggcccagcaaatgaagcagtgactcaaaggatgtttccaaagaaaactgataagaggcttaaggtcttccaagatattactctttctttgactcccagagcctgatgttggttaactgatttagtttctcaagtaacttaatagtctaagggtggagatgaacttgttctcctcacctacttgacttcctattcctgaaaaagaaggggtagcagttcttaaggttgtagccttaagtattatttacattttatttatgtatgcctctcaaatacggcgcatcccacacccatcaagataataaaaaacacttcggttt

SEQ ID NO: 11821 - DNA, 620 bp, Gossypium hirsutum
  Clone ID: GOSHI-09MAY01-C98357_1
cttttcttctgtggaaagatggataccccatataatacccatattagttcttcactttctaagttcgaggattccccagtctttaactacatcaacagcctttcccccatcaaaccagtcaaatccatacatgttacgcagacgttcaacccgcttagcttcgcatcgcttccatctattttcacttcaccccatgtcagctctcacaaggagtctagattcctgaaaagctatacagatccattgaaacccgagtcgtcttctgcggatgggactaaagttagtacaaatgaggaggcgggtgcggatgcacaggagaattttgatcaaggagtttccctgggtgagacttcttttgagatgcctaatgaaccttcaaggattgcaattgggctgccacaaactttaaagtatgattgcggtagccccgactgtgatgcaacaccttgtgttttcaagacaacttgtgtctcagacacatctctcgcaattgttccattttttcaagaggcctctgaaaaagcttatctgatggagtggaaatacgggacactttccaggttgagcaaaaagggatactataggatctgagtgggagagtttgatttctgatacatctg

SEQ ID NO: 11822 - DNA, 559 bp, Gossypium hirsutum
  unsure (1)..(559): unsure at all n locations
  Clone ID: LIB3829-004-Q6-K6-E8
gttngaagaatgtatacaggatcatttatgacctctctcgatatgaaaggattttcaatctctataatgaaggtagatcaaactctgttgcaacacctggatgcttccactaaggctccacattggcctgttggttctgctggtttgtgaatgtgtaatcgtccaccggccaagattccagttccattgccatcatctcgttcaatgaagagtgatgagttattaagtcggccactgcagcttactgaacagggccatattcttgaagtggctattgaggcagctgcaaatgccataatcaatatgagagatattttgaatgattgggatagcacagttggtgacggtgactgtgggtcaacagattaatttgcttttgcagatgtataaaggggcaacagcaatccttgatgatatgaaaaaatactatcctttgaataatgccgcagaaacagtgaatgaaattggatcatctgtgagaagagctatgggaggaactagtggggtcttatacactatcttttgcaaggcagcatatgcacagttgaaagcaaactca

SEQ ID NO: 11823 - DNA, 413 bp, Gossypium hirsutum
  Clone ID: uC-gsronu33B158h08b2
ttttctaggttgaaattttaaattaaagttcagaggcgaactgcggttaattttgcccaagtgcttgttttcttgtaggtaatcgtccaccggccaagattccagttccattgccatcatctcgttcaatgaagagtgatgagttattaagtcggccactgcagcttactgaacagggccatattcttgaagtggctattgaggcagctgcaaatgccataatcaatatgagagatattttgaatgattgggatagcacagttggtgacggtgactgtgggtcaacaatgtataaaggggcaacagcaatccttgatgatatgaaaaatactatcctttgaataatggcctcaaaacagtgaatgaaaatggatcatctgtgagaagagctatgggaggaacctaggggggtc

SEQ ID NO: 11824 - DNA, 892 bp, Gossypium hirsutum
  Clone ID: GOSHI-09MAY01-C98227_1
ggctaccggggagagaacgaggaattggtgggaaacatgtgttggatccgattagatctggaaccagtttcaatgaatcagtggatgaaattttatgttggagagattatgtgaagatatttcagcaccctgagtttcactcacccaacaagcctccttccttcagagaaattgcattggaatacagcaaaagagtccggctagtagccagagaaataataagaggaatatctgaaagtctggggctagaaaaggactacattgatgaaactctaaaccttgagaatggcctgcaactgattgcagcaaacttgtatccgccatgtccacagccggagctggcaatggggttgcctccacattcggaccatggtcttttgaccctcttaatccaaaaccaaatagggggacttcaagtacaacacaaaggcaaatgggtgaatatagaccctatccccaattcatttctagccaacattggcgaccatattgagattttgagcaacggaaagtacaaaagtgtcctccatcgagctgtggtcaacaacagggatgtaaggatatccatagcggtgccccacggaccagcattggatgccattgttagcccagctccaaagttggtggaaattgtggggaatccaccagcatatggagctatgaaatataaggaatatttggagcttcaacaaggtagcatgctcaatgggaaatctagcttggaacgcatacgaaacggagtttgagttgatttaagttaagtggctgacttcattttatgaggaaccaatcacaacaactgtatttcatttcaccacttctaaactccaatagccataggaagatgagctactataacgtttaatcttcaccaagtttctccttttcaacc

SEQ ID NO: 11825 - DNA, 546 bp, Gossypium hirsutum
  Clone ID: GOSHI-09MAY01-C99987_1
aaagacataaggaattatattaccgttgtttttgtggtctcaattatgcaatttgccatgagacaatcttcttacaaaggagaaaaaagggaaaaaagaaacagggtattaatcaattatatttcctctaacaagtaatttacacctttccagacccgcttataacagggatcggttgtatattatgtcaaacttccagggcaggctttgaaaccaggtttcaatgttttttagtggccaatttagctctcaattcctttctcagaatttttcccgacggtgcctttggaatggcttcaatgaagaacacacggcttattctcttgtaatacaccacctgtttcgaaatatactgtttgatttcatcctcactgatttctgatttgcctggtttcaccacaaacgcaacaggaacttcgccaaccgcctcgtctttcattccgaccacagcagcatcgatgatatcaggatgtgcaatgagcatggcttcaagctcagcaggggcaacctgaaagcctttgtatttgatcaattccttcaatcggt

SEQ ID NO: 11826 - DNA, 682 bp, Gossypium hirsutum
  Clone ID: GOSHI-09MAY01-C99837_1
atcttctgcggttttattttttcacataggggggcccgggggttcggaaacaatttcttgttccattgatagcaattcaagctcctgacgagtatcatttcatggatgaagggtgaatatggtatttgggcagcattcttgggactgctagttcgtctcttcttcttcattcctggtgaacttgagttgccatttctagcattactcttggtgattgtggcccctctccatgtaatgaacttaaggggaacacaacaaggcgctatcatttccttggtgattgcagcgtatttggcttaccagcatttctcaggtgctggcagcttgcagagagcatttgaccaaggttcaattattgccactgttggcattgtttgcatcactgttgtctcctgcttgcttttgatatgaatttaatgaagaatcaagacgtcttccaagttattgaagactcgtagaaggagagagtactgtaagaataacatattttccagacctatgttcttgtgttagcatgataagtccattttatgctgagaaaaataagacttctagatgaaattttatatatgttgaatgtgtatgttcctttcactttgctatatgttgtcttagtgtaatatcagtgtaagatgggaatcgttgttgaaataatacaagtttagtttgcagtggaatgatt

SEQ ID NO: 11827 - DNA, 1119 bp, Gossypium hirsutum
  Clone ID: GOSHI-09MAY01-C99467_1
gtgttgtgctcttttggtcttgactccattatttgaatacataccacagtgtgctttggctgctatagtaatctctgctgttataaccctggtggattatgaagaggcaatattcttatggcgtgtagataagaatctgtttcttctttggacccttacaactactacaacactgtttctcggaatcgagattggtgtccttgttggggtaggcgtctcacttgccttcgtcattcacgaatcagcgaatccgcatattgctgtcttggggcgtcttcctggcaccactgtttataggaacattcagcagtatccagaagcatatacttacaatggaattgtgattgttcgcatcgatgctcctatctactttgcgaacataagttacatcaaagacaggctacgagaatacgaagttgtgggtgataaatcgaccaaacgtggaccagaagttgaacgaatttattttgtaattttggagttggcacctgttacatacatagacgcgagtgctgtccaagctctgaaagacttgcaccaggagtacacatcacgggacatccagatagctatctcaaacccaaaccaggaggtcctgttgaccttatcgaaagccggtgtcgttgagatgattggtaaggaatggtactttgtaagagtgcatgatgcagtccaagtttgcctccagcatgttcagaccatgtctccgaaagcatcagatccttcacatgaaaaatcaagtttctttcagagaaaaatgaaacagcgttgggtggatttatcagtttctgagctagaatcgggtaatagtcaaatgcgttcggattcaacacaggatgaccctcaattggagccattgttgtctcgacggtcttgaaacttgcttgcatccgaagcaaacgttttggataatgccatttttttaacaaggtgtttccgatatccgatatgttgctcgattgtttacaatttagttaaaagattaggaccgagaactccgattcttgtatgtattgtttggaacattattgtactactactagtagtctaacttatttagtagctgtataaagctgcttcttgtacaaattttgattcaatctactcatttcatttctt

SEQ ID NO: 11828 - DNA, 770 bp, Gossypium hirsutum
  Clone ID: GOSHI-09MAY01-C99407_1
aattattaagtaatgtggttctcgtataggcatcgctaactagaacagtgagcgcttgcaccaagcatatctaggcataacagtccggttggcccataaaattcatttgtaggatatgtgatgttattttacttttcttgaaacatgatatgtggaattactgaaccagacaaagcaacaagaagcaatgaaaccaaaaacgtagactagatttcacacgataatgccctagtttctttcaacatataccctttgccttgctgtgccacatggggcaggatggttgctcctattgctatttcccatcatttatcgtggaggttggaaatttcaggcagctctctccatccatataaagtaaagcatgcatctacctaaatctggaaatatagcagaaatcaagaatctgatctggtggttgtaaaggatgatagaagtcctgcggcttgtacgggtaagatgtcaccaaatgttgacatggcagctgcagatctatccttgaatatgcccacttgcccatccgttaatatcgatcccagttttaaagtgctctccccgaatctactgccaacctgcatgagagattttaagaaaggcgttgcaacaccaaagctctggtggtcatccaaatcacctttccgggaaagctctccacttgtataagcttcccagaacttcttgaagtaatatcattggaggcagctataataagtttccccatattccctctaaaaaacaatgctggagcactgattggaagatatctgaat

SEQ ID NO: 11829 - DNA, 185 bp, Gossypium hirsutum
  Clone ID: GOSHI-09MAY01-C99437_1
gcgttcgttcagacgctttgaatcaaaagctctttcttccgccttctagaatggcaactgcgtgtagcccatttctctagtccctttctgagaaactccaatttctgtaaaagatctcctgatgttgcttcccccaaaaatttaacttcagctttgaatgattcctccaatatacaccaagcttc

SEQ ID NO: 11830 - DNA, 593 bp, Gossypium hirsutum
  Clone ID: LIB3829-009-Q6-K6-F7
ctttaaccgccctccggtagcggtggtgcaactcccgctacggcagcaacaaccatccactccttgctgctttgatcctcactacccttctcaatctgatcatgcgatcggccaaccactcaccaagcccaaccccagtgatggcaacatacacatggtgagaacaacttcacgaaagaaacataacaagtactatctgtggttttttgaagaactcggaggtagaagcaagaagtggagaacaataatgataccagggaaaaaaaatgttttgcgtgcaaaactaggaactgcgtctcctccacagtacgagttcttcccatcatcaagctgttgggagatggggtgagggagaaaaagcatttccattgaagaagagaagaggagcgttgaaacccaggggacgatgatgatacaataatggcgaaagatacaaataataagcggtcgatgaagagcagtaccagcaagatgaagactaagctgagcaagaaacttgtgcagcagcagcagcaaagcattggtgaagaacaagagagcaaagacattgcttgcactaatgttgattataataataacaattctagtggtgc

SEQ ID NO: 11831 - DNA, 480 bp, Gossypium hirsutum
  unsure (1)..(480): unsure at all n locations
  Clone ID: uC-gsflnu33B081d03b1
tcggtaaaatcttatctagcatcgatgaggatcaggaaaagacaggttccgctacctttctcttccatttcaccagtacccctttcatcagatcccaactttaaccgccctccggtagcggtggtgcaactcccgctacggcagcaacaaccatccactccttgctgctttgatcctcactacccttctcaatctgatcatccgatcggccaaccactaccaacccaaccccgtgatggaacaacacatggagaacaactcacgaagaacaaacaagactacttggttttgaagactggaggagaagaagaagtggagaacaataatgataccaggtaagaactgaagggctaaaaaagtttaaattaaaaacaaaaaccaaatttcttctgttatttcataaaatcttgtattaaaaggtgaaaaaggaagaagggtcttgatcttaactttntaaaccacactaannnatgaaatata

SEQ ID NO: 11832 - DNA, 763 bp, Gossypium hirsutum
  Clone ID: GOSHI-09MAY01-C99017_1
ccgatataacacaaagttccagtaatggtggcggtctcctgcgtatgtttaagcttttccctatgctaacctcaggttgcaaggatgggaaaaccccgccggaagcctttcttgaaccatactgctgcaacatgtacaatttttgggtatcgtaaaggccgagttttcttagcaatacaagctgatcccaattgtgtgccaatgtttgtgatcgagctaccgatgctcaccagcgtactgcaaaaggaaatggaatctgacatggtcaggatagcactagagagtgagaccaagactcataaaaagaaactgttggaggagtttgtatgggcagtgtactgtaatggaagaaagatgggttactctatcaggaagaaacatttgtgtgacgatgagcttcatgttacgcagcttttgcgaggggtgtcaaccggtgcaggcgtccttccaaccctaaatcacaaggaaagtagcgatggagaattaacctacatgagagcaagatttgagagggtggtgggttcaaaggactcggaagctctacacatgattaacccagatggtgcacctggtcctgaactaagtattttctttttaagatcttattagaaagcttcaaattttacttacctattttcatttaatgtaagatcattacatgtttacgtattgtgagtcaagctagctcatcatactgcattagttggtctgttactttcatgttgttgaaagccaatatctctcctgtttctgccttgaggtt

SEQ ID NO: 11833 - DNA, 185 bp, Gossypium hirsutum
  Clone ID: GOSHI-09MAY01-C99347_1
tttttttttgtaggcaaggggatagcagagaaaggtaaagtagggatgttcttcttaacctttttgtctgggaaacgggcttagaaactcacacaagcctgtccttccttcccatgttatcctaggtaacgctgtagctttaaactcattcatgttctgtgtcaataaagatgaaggaacggtcc

SEQ ID NO: 11834 - DNA, 603 bp, Gossypium hirsutum
  Clone ID: GOSHI-09MAY01-C99367_1
cggtccgcactcccggtcgacccagcgtttcgcatttggtgataaactcttaaacctatgtagttgctgagccagaattcaggaagaagaaatcgccggtgttgatttcataatcatcgccagtgatgggctttggaatgtcttatcgaatgaggatgctgtggccttagtgcagcacataactgatgcagaagctgcagcaagaaaacttataaaagaggcatatgcactagggagctcagacaacattacctgcgttgttgtccggtttgacagctcatgaacttgttcgaggtattggggacactatttagcataaggcaggaaataggattatgattatgaatggatgcaagttataagctcactttggcctgattggttactgcaagaggtagtcatttcaactggttacgagtgagaatgttgtatgtgttttaagatttagttgtttctcataagaaaattatcttaccccattgatggaatttttagattccgaaggggttagtaattgaaacattcgtaatgttaaaagattacattcttagtgtatcaaaaaaaaaaaaaaaaaaaaaaaaaaaaaaaaaaaaaaagggcggc

SEQ ID NO: 11835 - DNA, 609 bp, Gossypium hirsutum
  Clone ID: GOSHI-09MAY01-C99267_1
gcaaacctcgataggaattcaaaggcttgtatccgatgatgaaagttacattatggatcttgcattgaacgaggtaatcgagaattttggacatctggcgacgtacgtggctaggcttgggaagaaatgcactgaccctatatatcatcattttgaagccttcgtaaatgatccgttattgaacaatatggagtggtttgggtgggaatatcgatggaaaaagatggagaaaaaaatgaagaaaatggagagatttgttgcggctacgatgcagttgacacaagagttggaagtgttggcggaacttgagcaaactcttaggaggatgcagagaaatcccgagttagatcgggtgaaattactcgagtttcaacagaaggttatattgcagcgtcaagaagtaaaaaacctacgcgagatgtctccatgggttagaacttatgattacattgtccgatttctgttgagatcactattaacgatactcgagaggataaaaaatgtgttcgggaccaaccaaatggtaccggttgagaggaatgatgatttcgaatctgttaatagtgattatctttcacgcagccattccttttctactgtaataccgtc

SEQ ID NO: 11836 - DNA, 580 bp, Gossypium hirsutum
  Clone ID: GOSHI-09MAY01-C99217_1
ccgtccggtttagggtttctgagggacgacgccgctctgcttaaaccatgtagcacattcttcgacagacacaatgatggcattttttatccatgggagacttgtcaaggttctcgagcaataggggctggttatttatcgtcattcatcagtgccttcttaatcaaccttggtctcagtcgtaaaactcgccctgtttgtgtcgtggaagttcgaagaaatcttccccaaattcgctcgcactcattcggatgccttaccatcccatgaactgaaggcaatgcttaaggctaacagggaacccaaggattacaggggatgggtcgctagctgcacggagtgagataactctatacaatttgtgcaaagacaagggaggattatcgtagaaggaaacaatttagaggcgtttatgatggaagcctgtgtcaacaaatggactgggaaaaattagcaactgccggtaaaaagaaagaatgacatactcttacatgggcttgatttttattatgaatttgttttgatgagatgtaaatttaattactcgtttgaaggaattgaaacaattaaaatttcaccc

SEQ ID NO: 11837 - DNA, 355 bp, Gossypium hirsutum
  Clone ID: GOSHI-09MAY01-C99237_3
cccaaaggctgccgcagcaccaacgccactttcggtggccaacgatgccgagaaataggtctttcgaccccgatccaaggctgttttctggttgtggagtcgaggaagagtgcatgatcgtggggcgtgcacgtgcgagctaggggtcgtgtgtgggtgtgctcacgtgcgtggggccccgaacgtggggggttgcggtgcaaggtgaaagaagggaccctaggttttctgaatttgggccttctgtcactgggctattttaacataattgggctgggtttttctttttgggtttattatttgtaaaatgaacatttaattctgttctaatttatttgtttgattttggtctcct

SEQ ID NO: 11838 - DNA, 585 bp, Gossypium hirsutum
  Clone ID: GOSHI-09MAY01-C99237_2
aaaggaaaaaaaaggtttcttcattctctgctagggcttcattcgcatgccccaatggttgtcgcagcaccaacgccactttcggtggccaacgacgccgagaaatgagtctttcgaccccgatccaaggctgtattctgatcgtgaaggcgtgaagcggagcgcacagacgtggggcgtgcaataagcgagctgggggacgtgcttgatgtgccaacatgcgtagtggctgtggcgcaaggcaaatagaactctagggcttcctgtttctgaaaacgatttgggccattgggcttgtgtaaccaattattgggccattgcaaagtttttggcctggtgtaattagatttggactgttgttttgttttatttttctgtatatgtatgggcccgggctaaaaattgggtctacaggggtcatttgtattttaggtttacgttttcaggttaggtcattataagttttagttattatgtgtttgaagtgttccaaattctagtctgttaaaatacgtctgtgtctgtactcagacaaaatttgaaatttaatctttgtacttaaaaatatcaaaattagattttctt

SEQ ID NO: 11839 - DNA, 428 bp, Gossypium hirsutum
  Clone ID: LIB3829-034-Q1-K6-A5
gttttaaaaaaggaaaaaaaaaggttccttcattctctgttagggcttcactcgcatgtcccaaaggctgccgcagcaccaacgccactttcggtggccaacgatgccgagaaataggtctttcgaccccgatccaaggctgttttctggtaagccttcctctttcctcttttatacttgtttttattgtagattcgaataaaaaagggaaaaaaaacaaaaaaaaatggtcggccacctttgatctgtttttttaaaagtagattcttgtttgatattctatataatatgtttgatacccaatccgtgccctatccctctgaaccacaaaagggaaacaaaaaagttcccaattacaataatgatctttttcgctttattacaccctacaaacagttcctggcattttttttcttcaatttccccag

SEQ ID NO: 11840 - DNA, 543 bp, Gossypium hirsutum
  Clone ID: LIB3828-026-Q6-N6-F9
agaaaaaataaaaaaactaattttgatatttttaagtacaaagattaaatttcaaattttgtctgagtacagacacagacgtattttaacagactagaatttggaacacttcaaacacataataactaaaacttatagtggcctaacctgaaaacgtaaacctaaaatacaaatgacccctgtagacccaatttttagcccgggcccatacatatacagaaaaataaaacaaaacaacagtccaaatctaattacaccaggccaaaaactttgcaatggcccaataattggttacacaagcccaatggcccaaatcgttttcagaaacaggaagccctagagttctatttgccttgcgccacagccactacgcatgttggcacatcaagcacgtcccccagctcgcttattgcacgccccacgtctgtgcgctccgcttcacgccttcacgatctgtaaattgagcaagagaatagcgagcaactgtttgtatttggctataaagccttcaattttgattgtaaaaaggatgatttttttcct

SEQ ID NO: 11841 - DNA, 929 bp, Gossypium hirsutum
  Clone ID: GOSHI-09MAY01-C94787_1
tgatgaaaatatgttcgaggtcccaacatatgccttagaatgctagtgtgaccggtaaagcctgtttggttggcttgcagttcggctttgatggatgaccgacataaacactgctgtcttgcgtacattatttatttcgtcacggctgtgaattagtcgcacactttgccccttctgtaaagtttctcagctggtaggtagatgcaaatccgattttgtatttccatttgttgcttcttagagacacatttacatcatggaaatcgatcgaaactcgaaacgaggtgaatcaggataagaatgtgggttgtttgcatctactacttgttcaggtttaaatgaaaattgttggaaatatgcttttctgtctttggtttgatttttgaatttttgttgttttattgacatatacagattggtagattataatttagttttctagatttgcaacctttagtgtaatgaactctactgaaaattttctttttcagtcttgttcctgtttcagtttctggcccctgttttttatccctaaatatgttttgatttaaaaaaaaaaaaaaaaaaaaaaaaaaaaaaaaaaaaaaaaaaaaaaaaaaaaaaaaaaaaaaaaaaacaacaagcaaaaaaaaaaaaaaacataatatataaagtaaccaaaaatccaaataacttgaccgctgggtaacaacgtaaaagactgggaaaaaccctagaatacccccaactttacccactttgccgcctatccccccttttccaaaactcggaaaaataccctaacatgcccacaaacgaccccccttacaaaaattagaagcaacctgcaacagcaacatgggactcagccctataacggcgcaattaaggcgcgctcctccgtggctggttacaacgcaacatcgaccctatacactctgccacccccc

SEQ ID NO: 11842 - DNA, 1090 bp, Gossypium hirsutum
  Clone ID: GOSHI-09MAY01-C94057_1
gttataagtggcttcattatcactttgtatcactgaaggcatcggctttgatgttagcattgtggacaactagggcggtgggggtggaatattggctttttatatcatgtacaacgggatcccggctttaggcataaacagcaccgaaggaggattttgcaagtttcaccaagtaatcatgtggaagacaccatttcgacttcacaggaaagaaatagtttagtatccaatgatggagagaattcagcaactgcaggcaaaagctttgcatttaaaatcattgagtggatctctaatgttccctacattgaagcagggaaagtatacttgcagcaagatgtcgttttaccaggagttgctttagctttgttgtttttcactgttctaagtttcgggacattgatgacagcagccttggaatggcaaggcatacctgcatttgtaatcggcatagcacgtggaattagtgcttcaattggaatagctgcgactatagtgtaccctatgcttcaatctcatatttctacgctcagaaccggactatggtcagtctggtctcagtggatatgtctgctggtaagtgtggcttccatatgggtcacaaatagccatttatcagcatatatgctgatggctggagttgctacatctcggctcggtttgtggatgttcgacctatccatcatccaacaaatgcaggatgctgttcctgaatcggatcgttgcattgtgggaggagttcaaaactcacttcaagctacctttgatttgatggcttatgtcatgggaatagtaatctctaatccacagcatttctggaagttgaacttggtatccttttgggcggtgacaatggcttcatttctctacacatgccatctataccggattcggaagcacctttttcactttgagaagctgtcgtccttactcattagttctgctcagcgcttgtaagatgatatgaaataaaatgatatcccaagcattgccttgcttgcaaattaacatatgtatgatgtttgtaatctgaacacagaaatctgtccatgtatgattatggactgggcaaaactttttaatacaattt

SEQ ID NO: 11843 - DNA, 563 bp, Gossypium hirsutum
  Clone ID: LIB3825-022-Q1-N6-F4
ctggaaacaaaaattttctcttttctgctatatatatatatatagtgcgtgctagtgtgtcgaagcaacaccatcccatgtacgagcgatcttctatatgaaacttcatctacatcttctgccacctatcaaatccatatgaaacagctgtcaaaagaatagagaaaaaaaaaaccgtgagggatagcgactttcagtaaggaaatctgccggtcatccgaatatgctcaagagttcttctaaggccatatttataaactgcctgattccctgctctaaacccatctccatatacagaccatgtgtatcattctattggatgcttagaaaaactcacccaactatctataaaattcggcccttttgccttttacttattctactagaaccctaggataatgcacagcgcaacatctctgctcgaaataacaatcgagctgcgtattctatccacatgtgacactaatacctgacaaataccttcccttcacgtcactgactcagagtctgaaaacctcgaattcaaattcatgcatgcctcatttagtgcgctaagatcaacc

SEQ ID NO: 11844 - DNA, 454 bp, Gossypium hirsutum
  Clone ID: LIB3825-022-Q1-K6-F4
catgattgcatagcatcggatcgcgacattcaaggttcttccagcacttctgcagtcagcgacgtgcgaggaaggtatttgtcaggtattagcgcacatgtggatagctacgcatctcgattcttcttcgagcaacgatgttgcgccgacatcatcctcgggttctagtagaataagaaaaggcaaaagacccgaatttgagaggaagctgggtgagttcttcaagcatcaaatagaatcagacacatagtccgtatatggagatgggtttagagcagggaatcaagcagtttataaatatggacttagaagaactctagaacatattcagatgaccggcagatttccttactgaaaatcgctatccctcacagttaattttttctctatcctttcgaaagctgattcatatgaatttaataagtggcataagatggagatgaagtttcaataa

SEQ ID NO: 11845 - DNA, 1452 bp, Gossypium hirsutum
  Clone ID: GOSHI-09MAY01-C95527_1
gtttgggtcttaaagcagagtgagattccttttttttttctctcccttttaacaaatagtttttccagcaaaggaaaagcgtattcctcgtgaaccaacgcaccctcttcaccgctgtctgtaaaatcggagatatgacgtcagatggggcgacgtcgatgcgggcggctccaaggaggaagccgtcgttgaaggagagagagaataacaggaggagggagagagaaaactattgctgcaaatatatactgggcttaaagctctaggaaattacaatctacccaagcactgtgataacaatgaagttctcaaagctctttgtgccgaggctggttgggttgttgaaaaaaatggcaccacttatcgaaagggatgtaagccaccacgggctccaactgatatactaggcagttcagctaaaattacctcattttcatcccaaaatccaagtccattgtcgtctgcatttccaagcccgattccttcctgtcaagtcagtccttcctcctcttctttccctagtcccactaggcttgatgctcgtaaccagtctagtctattcccgttccttagaagcaccattccttcatctctgccacctctcagaatctcaaacagtgccccagtgacaccaccgctttcatcaccaacctcaagaaatcctaagccaattcccaactgggaggccattgataaagagtcaatggcctcttttaactacccattgtatgcagtctctgccccagctagtcccactcactgtcattttcatgccccggctgctatacctgaatgtgatgagtctgatgcatcaacaatcgaatcgggtcaatggataagctttcaaaagtttgcaccttctacttctcaaatgccaacttctccaacctttaatcttgtgaagcccattgctccacaaagtttgcccaatgatttgatcaaagagaaagggcatggttcggagtttcagtttgagagtggactggtgaagccatgggaaggagagaggattcatgaagttagattggatgatctcgagctcacgcttggaagtggaaaggctcggtgttagaccaagtctagcagagtacaaatcgaatgttggtgaaaatgtatgttgaaacagaagaaaagtaaagacgaaagctgttgtccttacaggttatcacagtgagatgtagaagagcatattgcagaatatcttaaaccaaagattggaagagttacattttcatctgcaattgtttttttttccccagtcagttgattctttgattcccctggttgaattgttaggggaagctgggttttttttagaatcaaaatcaattctttgtagatactgtcggctattttgctggttgacagaaatgtttttatttttttttaggctttttataggcttgggaaaaaacctcacagaatgaaattaatttactggtttctattgtt

SEQ ID NO: 11846 - DNA, 581 bp, Gossypium hirsutum
  Clone ID: GOSHI-09MAY01-C95467_1
ataatccacaaaaagaaaactacatttatttaatacgaatcttattattgttacattattatcgcgacatgggaacatagaaaaaggaacatatatatatataaaaacattaaatttagcagcaaattaattaggaacccctgcacaatgaagtcaagacatggattttctccacttgggaggacgaacaggcttttgtttgatatcaatgggggtttgcctcccaaagttagcctctctttcttcttcaatcttctcaaatacactcacgctgctcttcagcgacggcattatccccagcttcttccacctgaaaaaccctttcttcttatccactagtttctccatttgcatttgtatcgctacgcattggttttggaccctcagcagctcttccttcagcttctttatctccatttgttgagcgttcatttcacgtttcgacatgcaccgaaccggggcttccagtcctgccgggttcggactccgggttccgttgaacgacccactccaatcaacaatgtcggttgaagcttgctttgctcgcagaacaacacttgaatcaccgcccgaactggcaa

SEQ ID NO: 11847 - DNA, 1030 bp, Gossypium hirsutum
  Clone ID: GOSHI-09MAY01-C95697_1
gaaaagttaagggatatttgatttaatattttactttctacaataaggaaactatgcttttaactcactcccattgtcaacaagcttaagaccccaactcatgtcctcacagtgtcttacatgaggaacaactgcacctgtgtcaatgcctcttttggctttacagtcataaaagggtggggcatggaaacatggctccattgacattactctaccacaaggtggatctggggccgtccggttctccggcttgtacagaatccacggcttcaatcctccaaggctttgagcaacataaccgaaagttgaccatgagcttgtgatcagcacatctgtcaagctcaataaatacatttcggcccatgctttcctattgtgaaactgcttctctgtttgctgatactcttcgtggctcgggttggtaaaaaccgatgacctcccctgtcacagttgggatgttcccagtacatgtcccttaatctctcaaagtaacctccactcaaagatgtaaccagcacagctttagacttctgagattgattgattattggcttttccatgctgatatccggcagtagattctccttcaaggtacaagcaatgatctgatccaaaacatgttggaatggaccggtcccagtgtcaaagaccctgatctggatgcctatcctttcatctgctttagctaaataagcttgatagtatcgggttatgagtccccaaaccggattcgtggggtggaagatataccgacccaataagtggaaaactgcttcttttctcgggaagagattactcagttcctgctcaaaagtcgggatcaagaagagcgatgggacaaagtagttatctgttttcatgatcaaccacggtacttcacggagagaagtttggtcttcatcgcagaaaaaaagcttatcctgatcatcgtaatcatgaaccagatggagatatacaaaaggtgccaatatcgatttgcttgaattagcaaaagagtgttcttcagcccacgcgtccgcccacgcggccg

SEQ ID NO: 11848 - DNA, 764 bp, Gossypium hirsutum
  Clone ID: GOSHI-09MAY01-C95357_1
tgccgactgctttcaagttgttttcaggttcgtcgtttacaatgttaactcgtagttttgttgagttctgcatccttggtaccgacaatcttccgaggactttgctaatgtattttacaaacacgccttattcctactccaattatttccctactgtcctttgtaactctgaccagtacaagaaaactgtgataaaccataacctactgcatgtagccttcaacaaaaccttttcaacgaagcctctctcactcaagcctgaagaattcgatgctatgattcagagtggagctgcttttgcaacacatttccagtttgacagtccagtactcgaccgtatcgaccaagaaattttgaaacgcagccccggaaaagttgtaccaggtggatggtgcttaggtgatcccgccaatgacacatgttcagtttggggagatgccagtatcttgagacctggtccaggagcaaaaaggctcaaaaaacgtatcgtcgacttgcttgcagatgataagtatcgatccatgcaatgtcgatatgaatgatgtaatggatcaatctacatggagatatatgaaatcggggaaacaaaggggtaactgatgctgatcactcttaaaagttggcccttacatgctttataggagtactaaaattttatcaagcatctagttgtaccatgattgttgtaaagtaaaaattataattcatttgttcttgtactcgacatttttcatcagctttagaatgtagtttctatggttaac

SEQ ID NO: 11849 - DNA, 555 bp, Gossypium hirsutum
  Clone ID: GOSHI-09MAY01-C96847_1
aagtgacaaaaatataatattttgaatataaataattaaaatgtaatatgagatttatcctttgttaaataaggaaaacagctaagaaaataataataataataaaactacaataaagagcccgaagaaattttttcccctctttcttcatcagaataccaactgcctacgaattttattacttttcccagaagcagcagcgagatcccagatggtttcgacgatcaggtctttaaatattacccgttcaatattgaggactaattcggacatctcgatggggtaatctccccaaccgttaatggcatcccctgcaaggtcttttctcaacacactacaaatcacctcaaacaagtcatccgacgagtctctctcccgaatcttttggaattcggaccaaatttgccgcaatgatggctgttctccacaccctgatttcatactacttacgagcttccatgccggcaattgcctctttcggttgaggatttcattgatggtgtcaaatataagcttcctttggagtctagacaccttggaggtgtctttaccttt

SEQ ID NO: 11850 - DNA, 675 bp, Gossypium hirsutum
  Clone ID: AI731866.1
ccaacattcagcgtcgagtttgctagcagtactgatggtaaacatctcagagttaaaaattaggcatcgagtttgctatcagatccctaatgcttttcgccaggaatgttgaggtctttaaatatgggactgtcaactccaacacccattgcgttgagaccgttatcgacatatatgacggcaccagtgatagccgaagccaaaggtgatgccaagaaggcagcagcgttccccacctcatttgctgatagttctttttgaagaggtgcgttggcgattgaatattcaatcattgtatcaataaatccaattgcttttgcagcacgacttcttaatggaccggcagatattgtgttcaccctaattttgtgctttcttcctgcttcgaaagcaagtactcttgtatcactttctagagcagctttagcagaactcatacctccaccatatcccggaattattcgctcagaagcaatgtatgtaagagaaatagaagagcctcctggattcattaatgggataaaatgcttgagtaaagaaacataggagtaacttgaagcagataaagctgcaagatacccattccgggatgtctccagcagaggtttgctgacctctggcccattggctagcgaatgcaccagaatgtcaatgctgccaaaatcctgtttaacg

SEQ ID NO: 11851 - DNA, 551 bp, Gossypium hirsutum
  Clone ID: LIB3825-013-Q1-N6-H11
actgaaaacccagtgatcaattgaaattgtttagtcaaaaaagtttaatctaagatttaacagcacattaattcaggctagacagtatcaaaaaacactcaaaaattctaaaaacaaaaaggcagagcatgaacttctcaaggaaaaatggggccgctgaccgaaacatcctagacacagtatgacagcaaacgtcttgcattgaacattcggcgttgagtttgctagcagtactgatggtaaacatcttgagttaaatattcggcaatgtttgctatcagtctcccggtagctatccctaatgcttttcgccaggaatgttgaggtctttaaatatgggactgtcaactccaacacccattgcgttgagaccgttatcgacgtatatgacggcaccagtgatagccgaagccaaaggtgatgccaagaaggcagcagcattccccacctcatctgctgatagttctttttgaagaggtgcattggcgattgaatattcgatcattgtatcaataaatccaattgcttttgcagcacgacttcttaatgga

SEQ ID NO: 11852 - DNA, 546 bp, Gossypium hirsutum
  Clone ID: GOSHI-09MAY01-C96117_1
gatggaaaaatgatgttgtattgagtaataataattttgagctatcgagtgagttcgactacaaatcatcacatatccagtatttcaacaacacttttattgtatcactgctacaacaatggtgttttacatggatgatgatttctcaccaccttcgacgtctcctcccgtaccaatatgcaaatccagctatcgatgctgccagaacaactcccgctgccgcatgccaagcatacaccggtttttccaaaacaaggccagaagtagaacggctgacttcaatgggtagtgccggctgtggtttcttgctaattgtcaatgcgaagtttaggccctgctgtcccaactcagccagatcttcaaccggcggtttgagacttgtggctttcgctatggcttcgtactcctctttggttcccccttcaaggaaagacccaacaagatgacccttgcttatccagtaagccccaaaggtaccactcgagtaatccccgaaatgtactgcctctcctacattgtccccgtaaaactgccaagacaatccaa

SEQ ID NO: 11853 - DNA, 596 bp, Gossypium hirsutum
  Clone ID: GOSHI-09MAY01-C96047_1
tttttttttttttttttttttttttttttttttttttttttttttttttttttttttttttttttcaacgaaagatatataatataaattgataactgaagtataattcaaaatattcttacaataatattaaaagttacaatgttaaaaatattcttacaataagaaaacaaatatctaagatggcaaactaaaaaatagcttttgcctactctgttttagctaatgatctttcaaactcagcatatttgctccatgcattgcaattctcaggtgcccactctagatacttctcatacagtttttggcaacagtcaatattaccaagttgcagctcaatttcaatatacttcttaaagatctttaggtgcctttccaatagtaattcccaaaatttgccgcgcacccttgagattgagctgtcttatttcaaactgtgcagtaagaagccagacctttgcaaaagaaaacttatcgtgtggaataagcttaaggcactccttggaaattttttaaattaatgaggaaccatttcaatgtctattataaccaaccacaaatatgaatggtgaaaaacacccaaaaactgaatgatt

SEQ ID NO: 11854 - DNA, 330 bp, Gossypium hirsutum
  Clone ID: GOSHI-09MAY01-C96077_1
ctcattcctgaatagactagcgaatgcctcttcttcacgtgacttggtgtctggaacagattcgctacccttacatccaacacatatccgtacatcagtatagggtaccacccatcgaatatatgaaaactttagggaagagaagagtataaccgtatcggaaacatacaatatctgaaacttttgttttgagtccagataacttggttgaatatactggaagaggagtaagttttatttgcgaggcacaaccagaaaacaaactattctataaacaattattattcaagtttccttttataaaaatttatgttattgttgtgcactgtc

SEQ ID NO: 11855 - DNA, 571 bp, Gossypium hirsutum
  Clone ID: GOSHI-09MAY01-C97997_1
cggacgcgtgggtgaatacaagaagctgttgaagtttgataacaagcttcaaagtaatttatttctttccgaaagatacgataccaaggtatggttggtgggagatggactgaccgataaagaacagtttaaggcaccaaaaggaacaatattcattccattttcgatattcccacccaagaaagtccggaaagactgctattaccacactacaccggctatggtggctcctgcatctgtggagaacctgcactcttgtgaggactggttgccgagaagggcgatgagtgcgagccgtgtggccgggataattcatgcttcggaagggttcgacgtgaatgagtgcgatggcaccattttcagcgtcgataaagtttgggaggccagtcttgagaatggatttcgccccttgccaatctccacttaatcaataatacttatgagaaatcatgtagcagtactaatgcatgcataccaacttccatctcccttgtattttatctagttgtaatattggttggtaataatattttattatctagaaaagtctaataaattataattattaatg

SEQ ID NO: 11856 - DNA, 938 bp, Gossypium hirsutum
  Clone ID: GOSHI-09MAY01-C97947_1
cccacgcgtccggacgacggctaccgtgcccatcatcgacctcaatactacagacgcctcctccacatcggagatcactgaaaaggtcgtcgaagcatggtaggattctgaagcgatgtgcttcagagccatgtctgtggagctctacgcgcactttcatggggtctaaaggggaagagggggctttgtttggacctcaaactagcatcgacgccttagcttcttctccttctttttctttgtcggatttcgcttctccaaaacagagttttgaggtaaactctcattgatcatcaaactttgcattaatacacgtccataaaccataatggagattttaatggtgttccctctccttgttgatgtcatgcaagggttacaacaaagaagctaaagttgtgatcaacgtatgggttgaaagaagtccaggaccagtccgaacccatggtgaaattaggggccagtgtcgaagacgctataaagcttgttctgcacaagtatgctgatgaaaggagaactcctaagcttgattacagtttgggatttgaattacatcattcttattttagccttcaaagtttggataagttacagttaatcggggatgctagttgcagaaccttctatcttagaaaaaggagcagtctggaccattgcagcaatggaggatccggttcttatgtttcagaaattggtccagcaaaagccaaatccccggccttttttttccggctttcatggctcgaacagtagccgaaatcgtaagaggaatacgcaggctgtggaaggtcttcctttgcttcagataatgggggatttcatgaccacctatgttcatgctgctctaacaagtgacaattgtaacatatattttctcttgaaataatgttaaattgctaaatagtgatacataaaataatttaaatataagttttttg

SEQ ID NO: 11857 - DNA, 752 bp, Gossypium hirsutum
  Clone ID: GOSHI-09MAY01-C97977_1
aatgccttgtcaccagtcctgtattctatactccatttatgaggcatatatggacatggatgggtgcttcaccagccacaaggaagaacttttattccctgttggaagctggttatagttgtgttattgttcctggtggaatacaagagacattcctcatgcagtatgattgcgagactggattcctaaagtctcgaagaggatttgttcgtatagccatggaaatgggttgtccactagtccctgtttttgcctttggtcagtcatattcctataagtggtggaaaccgagtggaaatttcttcctgcagcttgcgagggctatcaaattcgtccctattttattttggggagttcttggaactccccttaccctatcaacatccaatgcatgtggtggtgggtaaacctattgagttgaagaaaaatccacatcctaccgccgaagaggtccttgaagtacaagcccaatttgttaaagccctacaagatctgtttgccaggcacaaggctcgggttggatattctgatcttccattaaagatcctttgatgatgtgaagttagtttgggtagggacaggttgtttcagttaatcatgtttgttctattaaaacttagtttattacacaagatggaagtccaatgtatgtcatataataatgacacaaagtacttcaaaagttacatactatataattaatcttcagctgcattattattattattttaataatgaaaaatagtaagttt

SEQ ID NO: 11858 - DNA, 476 bp, Gossypium hirsutum
  Clone ID: LIB3825-028-Q6-N6-F4
ggggctcaagaataaagggaacttttgaaggcctttgttaatataggacgaaattacatcaacaaaggcattattctataacatacatcgggcttccattttgggtaataaactaaaagttttaatagaacaaacagggttaactgaaacagcctgtccctacccaaactaacttcacattatcaaaggatctttaatggaagatcaaaatatccaacccgagccttgggcctggcaaacaaatcttggagggctttaacaaattgggcttgtacttaaaggaccttttcggggggaggatgggtatttttcttcaactcaatagggttacccaccaccacatgcattggatgttgatagggtaaaggagttccaaaaactccccaaaataaaatagggacgaatttgatagccctcgcaagttgcatgaaaaaatttccactcgggttccaccacttataggaatatgactgaag

SEQ ID NO: 11859 - DNA, 616 bp, Gossypium hirsutum
  Clone ID: GOSHI-09MAY01-C97917_1
ccgggtcgacctcgcgtccgtgtttacttaagatgctgaggttctgggaattcttaaaactggagtgctgttcgttagtgctagtcaacctataaatgctttagcatttatatttgatggtcttcattacggtgtctcggacttcccttatgcagcttgttctatgatgttattgagtgccatctcttcctgcatttgtgctctttgctccaaaagttctcggtcttctaggggtttggttgggcctaactctctttatggctctgcgaatgacagcaggatttgtcagaacactatcaaaaaccgggccttggtggttccttcacagtgacttggagagagcttgaacgtgccgtcaagaagctctgctacccatctacatctcatctctgagtggccaagatgacaaggtccgcttctatcggtgaggtctcgccttcgaccaaaacgccattgttgcagaaactaaagcttggggcctttttcaatttgatttctccattttcaaccttgtcatagaatttttcagggacagttgagatcaaacatgagctgtttctttgaggaagctatgtgttgggaccatcccatgtttttccaaacgaagctttttttt

SEQ ID NO: 11860 - DNA, 580 bp, Gossypium hirsutum
  Clone ID: LIB3828-025-Q6-K6-G5
tggatccggtggggagtccatttacccggttgctacaggtctctgtggcagctttcaggaagaggaatttgactatggtttctgatccaaacttgctgtaccagaatgaagagcttgacgcatcaatttctatcgacggaaggcttgtccacagtaaacaaatggcgtaagcttcctcttaatatctaatctctgttatattcaattcattcatctctaattatcagacactatatatttgcatcaattgatccaatcacaaaatacacgaacttgtccataaaccgacagtggtaccataacttagtcgtggcatcaaagcaagttgttataaagttcgtttgtttgttttatagagatatcctatttaagcacatgcatatcataactgacgtgaaaaatatattttacactttcaaattctcttttgatatttttatatgtaactttcctagcgatttggatttacatgttcacttttcggaaccattccaaaatcctttttcaataaacaattacaaatacatatattcatcacttcatcgtacaaaaaaggtttgatatgaaaattttaatttat

SEQ ID NO: 11861 - DNA, 578 bp, Gossypium hirsutum
  unsure (1)..(578): unsure at all n locations
  Clone ID: LIB3828-024-Q6-K6-C4
gcgttcggcgggntacggccttgcgtggctgcatttgggagcanaccagttcgatgaaacagatccaaagcaaccaaccaagacatgggaatacttcaactggtactattttgtgatgggggcatccatcctagcggctgtcacagtgattgtttatattcaagataacatcggatggggatggggccttggaatacccaccatttctatgtttctctccatcattgcattcgtccttggatacccactttacagacacatggatccggtggggagtccatttacccggttgctacaggtctctgtggcagctttcaggaagaggaatttgactatggtttctgatccaaacttgctgtaccagaatgaagagcttgacgcatcaatttctatcgacggaaggcttgtccacagtaaacaaatggcatttcttgacaaggcagccattgtgactgaagaagataatgtaaaagctccaaatctatggagactaaacagtgttcatcgagtggaggaattgaaatctttgatccgaatgggaccaatatgggcatcaggaatcctcctcatcacagcct

SEQ ID NO: 11862 - DNA, 567 bp, Gossypium hirsutum
  Clone ID: GOSHI-09MAY01-C97147_1
caagtagaacatctaacatgttgtacataaaatagtcaaataatgatgttttgaaaatcgtaaatacaaaatttctaacaaaactattgtaagaaaataataccattgtcgtatattggtttttaatttgaagcaaaaatgacccctttttgcttccatatgacaaaaatctataatgcctcgtcttctaagcaaaaaaatattaccttatcttgaactatgatgtgatgatatgcctgcatctggctttttggcgattatggcgacgttcctcggggatattgctggatcgaaaataggtaacattactgattctaacacatcaccttgttcctggagaaacaataatctatccagaagactaagagtttccaagagaggcccaaaagcagcacgaagtgaccagtaaatcccaataaggctgacatagggttcaactcccttccaaatgccatggaaatttatattgtcggaaggcttaagcccgagacgacataatccagactggcaaaatttctcgaaaagtgaatacttatcggtagacgtagtcctttcacatgtactacc

SEQ ID NO: 11863 - DNA, 449 bp, Gossypium hirsutum
  Clone ID: GOSHI-09MAY01-C97397_1
gcaaggcttctgagtcacccttaagcttcactcatggacactgatagtacttcaaatccaatcaaacttttccataagctagtctctcaactaaacaatgaaatccgtggctttaaggcaaaggtaaaggagctgtggtatgtggaggaatatgatgtgttggcccttgccttaaatggaaaaatgaaggtgcgcaggttccaaatgggttgctcaagtacctgaagttccaaattcagatgcaattttaagcatatttcaacttccatttctcctacagagttgttacgatagggtacaattcatagttttattttggccgggattaaatatgctaagatacctttctactactccaaacatgaatttgggatgttatcaacgagtttgatttgatgtattaatggccttcttttaatttcttctttttttggtgttaacaaacgatg

SEQ ID NO: 11864 - DNA, 837 bp, Gossypium hirsutum
  Clone ID: GOSHI-09MAY01-C97347_1
aatcgagtaatcagctgattcagctttgtaattgaaattaattcactgtttttttctcagaaaaaatatcatgttttcttgtagttacagttcataagtcgtccggttgaatggggggatttctataacatttcactaaagccccacacattatgggtattttaagaaatcatgataaaagaattatatgaatttatattcctttctttgaagtgataaagaatcaatacgtttgttgaccgagcttaaacaacctgcacggaggttggttgaaaaactgctctcggaactgaatcggtgttcaagtcaatgcattacggactcgtaaaagccaaaaagctatctgcagtgctaaaaggcgagcttcaaaaaggaattcctcgaaccagatatcaatccgggaaaataatgatttcatctgcatcatctttgcttcgacaacagcttcggaagaaactcttccgatgatcaaaaatgtctcgagtgaagaaccctgtaacagagagttattgactgctcttaagcaatcatttgtcttcaacattaatagaataacacggggcagtcgactgagaagctcggatatttgagggaaatattgagatgcatacatctgtagttcagaacgatcactatcagtgccttttatgaccaaatgatccacagctgggtcaatgacccgattccagggcctcatcgttagaatccctgcaaatagcacatacaggtcctccccagcacccaatttcacactatgttcctttattccattagcatcagaaaacaccaatgccctccaaagagaagcatagctgaatctagcggacgcgtggaaaa

SEQ ID NO: 11865 - DNA, 583 bp, Gossypium hirsutum
  Clone ID: GOSHI-09MAY01-C90987_1
ttgcccacgcgtccgcccacgcgtccgcccacgcgtgccgaacgagctctaagttatcaaaaagcgagaaaataaaagtaaataaaataaaggcctcgtcagctctgcttgttccttttgataaaccagtacgagaaaggcagacacggacaaattagaaatggccagtgaatacaacggaagttccaaagcctctgaatctgtttttaagattccgccaataaaattcaccaagctcttcatcaatggcaagtttgtggattccgtttctgggaaaacgttcgaggccattgatccaagaacaggggaagcgataacacgagtttcagaaggagataaagaggatattgatttggctgtgaaggctgcccgtcaagcttttgaccatggcccttggcctcgcatgtccggctcagagcggggcatgatcatgatgaagttcgctgatctaattgaaaaaaacgtagaagaattagccgcactggatgccatcaatgggggcaagctgttctctcattgtaaggccatggacatcccaggtgcagcaaggaatcttcgttactatgcaggtgcagccgataaa

SEQ ID NO: 11866 - DNA, 585 bp, Gossypium hirsutum
  unsure (1)..(585): unsure at all n locations
  Clone ID: AI731104.1
ggtacattgtctgccaatggtttctgtcattcaagagaagccgatgcttccaccaactgctgctgtcgcaaagaatgagcatcgccctttagctttcgatgcatcaatccttggatctgaatccaatataccctctcagttcatatggcctgacgacgataagccatgcctggatgacccggaacttgtaattcaagccattgacttgggagctttcttgcttggggactctcttgctgtatcaaaagtggcagaggcggtgaatgaggcatgcaagaagcatgggttttttttggttgtaagctcatcagtacatggaccgcttcttcagcctgcaactctctgagaagcaaaaggctaagagaaaagtaggagaaagctatgggtatgcaagcagtttcgttggcaggttttcctccaagttgccatggaaagaaacactgtcttttcggcactgaagattttaaagattttgggaggctttaccangaatattgtgaagccaggaacaaggtttccaaagagataatggggctgctanggataagtctangacttgaccaagcctacttcaaagactttttt

SEQ ID NO: 11867 - DNA, 570 bp, Gossypium hirsutum
  unsure (1)..(570): unsure at all n locations
  Clone ID: LIB3543-035-Q1-K1-H11
gtcattcaagaacagccgatgcttccaccaactgctgctgtcgcaaanaataagcatcgccctttagctttcgatgcatcaatccttggatctgagatatcctctcagttcatatggcctgacgacgacaagccatgcctggatgccccggaacttgtaattccaaccattgacttgggagctttcttgcttggggactctcttgctgtatcaaaagcggcagaggcggtgaatgaggcatgcaagaagcatgggttttttctggttgtaaaccatggggtggattcagggcttatagacaaagctcatcagtacatggaccgcttcttcagcctgcaactctctgagaagcaaaaggctaagagaaaagttggagaaagctatgggtatgcaagcagtttcgttgggaggttttcctccaagttgccatggaaagaaacactgtcttttcggtactgtcctcacactcaaaacatcgtgcaacactatatggtgaattggatgggtgaagattttagagatttcgggaggctttaccaggaatattgtgaagccatgaacaaggtttcc

SEQ ID NO: 11868 - DNA, 599 bp, Gossypium hirsutum
  Clone ID: GOSHI-09MAY01-C90587_1
cccagcgtccgccccgcgtccgattttttttccagcagattgaattgcaaagcaaccgatgggagaagaaaacaagaagattaggaaagaagaggtaattgcaaagctcaaggacgatggtgatttcgacaagctccgtctcaaaatcatccgcaagctcaaggacaacgaagaattacgcaacaacatcatttcagctgtgaagcagtcggcagcacttaaccgtcctggcgctgaaaacatgaaagtaaggcaactatcagatgccatacatgatgaggttgggaacaaagtgatgggccagatttcagatagtctctgggaaataataagctcggaaggtagcatgagaactgaaattacagaaacggtacaatctgtttatgataaattagctacacctcaagggaaagaaaaaggtgaatcatctgtccatgaaatggtacatgttgaaaaggaatctgagagtaatggtaccattaaggccacagctagaagagtcgatgagacattatctgatggtgatccacaagaaccaccaggtttctctatgtcaaataatcgtcacagcagccactgtcagcaatctcacaaggcta

SEQ ID NO: 11869 - DNA, 607 bp, Gossypium hirsutum
  Clone ID: GOSHI-09MAY01-C90787_1
gaagctcaaaacggagcttaattttgcgaaacttgaagtgggtcaattgaaatccccccccgcggccgccgcggtaaggtatcaagaagaatatattcggagcacattgcaaattagaagcgcttacgaacaagtggaatgcatacgaacgcagtcatgtcagagggagatggaactggaaaccgaattaaataaaatgaaagctgatgttgaagaattgagagcaaacttaatggataaggagactgaactgcagagtattttggctcaaaacgaggagctgaatttgaagaaccgagaaaaaacagttcgatgaaggagagctggaactttcaatgaagttgtatgaaaaagttagaggccgatttgacggaattgaatgcaaatttgacagccaaagaaaccgagttgcagagcgtaaccatgcaaaacgagaagctcaaaatggagattatgaagatggaaatggatagtaataaacttagtgatgaatctgctgccttgttagaagcagcaagggcagcagagcaagaggctctactgaaacacgacaatttaaccgaggaagccgaaaaaagtagaaaaagagcagctcaggtgaccgaac

SEQ ID NO: 11870 - DNA, 921 bp, Gossypium hirsutum
  Clone ID: GOSHI-09MAY01-C91877_1
aattaaaaaattaatatttaaggccaaccacaaaaatcacaacactaggcaatccccgaccgtaagatctgaatacatcatgaggctcaaagcctccaactcaacaaaacctaaccggcggatcaaaaccaactatccacgtttcattagcctaaaccaaaaccccgcggattgccggcgtgccatatccatctataaaatcccgcaatcaactatcactttcgcttcgcacaattcaaaaaaaaaaaaccatttcaaccaaaaaaaaatagaaagagttttccacactccttttcgccgatcaaataaaaaagttcatcaaatttgaatcaatttttgtattctttaaagtaaattaacgtcttttaagctgtaatggggtcgacgtcaaccacagcgggaggtaggagagggggagataggaaaaaagcggtttctaagtcggcaaaggcaggactccagtttccagtgggtcggattgcccgttacctcaagaaaggccgttatgcacagcgttatggcggcggtgctcccgtctatctagccgccgtcctcaagtaccttgctgctgaggtgtctgatctcttttctcaaccttttatttccatgtcctcccgatcacttcggtattttttttcgtaaccggaaatctgatagtttcatatttttgagcaggtgttggaattggcggggaatgcggcacgtgataacaaaaagaataggatcaacccacggcacgtgctgttagccgtgagaaacgacgaggagttggggaagcttcttcaaggagtaacgattgctagtggtggagttcttcccaacattaacgctgttttgttacccaagaaagcctcctcttcatctgataaggaccagtcttcaaaatctaaatttctaataaggtttagacataataaagat

SEQ ID NO: 11871 - DNA, 708 bp, Gossypium hirsutum
  Clone ID: GOSHI-09MAY01-C91457_1
aggttatgacttgaagttattccatttaccagtgatttgggttccacttcccttttacatcattaaaggaggcaacttcttaagttgtcctttatttaggtaaaaaagtcgattaaaataagaagggttccatataaatcacatgaaaataatttttaaaaaaatctactttttttttccgtcaaaactttttgatgtgggcaaataatttagttacatattcacacttcatctctgtacaaattaaatatataataaccggagataaaattgacaaatctaataaatatctccaacagatttactcaaaaacaaaaaaaatccagattaaggaaagcttgctatactgcagaacgcaactgtttagagatcttccattggtgcaaaatcaggccttcaacatcataaaacaaaatcatggcttcattctcattcatctccactgacatgaaaccttggccgtcgtacaagaacttcgcgctgtgattaacgtcatcgtcgggtttaaggtcacccctccatgcttttgaccctcctccactcgttaagtattgcattgctccgttcatgcttgtaatatgctccaaacagtggccggcgccattcatgtaaacatcaacattgttgtccttgagtactggaagtaagaacttgataagctgggcagtgtcaccatgatggccaagacttttaattgcatggtggcca

SEQ ID NO: 11872 - DNA, 642 bp, Gossypium hirsutum
  Clone ID: GOSHI-09MAY01-C91427_1
agggagaaaatctaaagtaaatgtttatttaatctttggagaaattaatgtgcattttaatggagtgatgatgctccgattcaagcatacaaggaatccacccatcgcctggaaaacatacataatagccaagatactagaaaatgtttatttaaaagagtagcataattgttatggaaagcaaaaaaattgttgaagaggggccgtggtgttgggaaacagagatgaaaaaatcaacagactccagctctcttgcgatctacaaggcgtttccagtacctaaagacctcttcctgagtttctctttcggtcttcttatgttgaaggcgactcgggaggccatccatttccttgaggacttgctcaatgtgtgccaccagtcttttcgccagcccatggctgaaatcttctcggatcactgctcggaggacagccacgtgctgtgcattggcaggcattgtataagccggaaggatccatccaaaccttcgcaagttctcggctatctcgaacactgtatgtttgctgctatcttttagagaaaaggccaccagcggtactcctatatcctttgacaatatgttaaacctcccggtgttctgtatgccttgtttaagcacttcaattctccatgcagttctc

SEQ ID NO: 11873 - DNA, 650 bp, Gossypium hirsutum
  unsure (1)..(650): unsure at all n locations
  Clone ID: AW186783.2
ctcatttcaccaaaattcacagccccaaaatcacattgttagggctcatacctgcagccatagaaccaccatctcatttggtggccaataacgcatgggcaacgaccagatcctaccatcgaaggctccactcgaggaaatctgtatttcagagatattagggatctcattggcatcgtttcgaggcttgatatataataaatcccccttccaacttctatctcaacgaagtgaacagaggtcaaaagccgattcgcaaggttctacggaagcagagctgtacggggagaaggccatggaagccatgcgtgggaaccccattctgttgctactctcgtatattccagaaacttctggcctaggctctatcggtttacctcaaatagccaagaagaaaggctactgctgcggcattgatcaattagtcttagattggaccttttccgggttattttcggtctcaactttggggtccaaaattttgcaaatggatttggattaaatttttgttttaatatttgggctaaactgtaagtaaactttggacctataattggtttttattttaatttatttattttctgtanataaaataggcccgggcaaaatgggttaactacaaacactattaaatgttcgtgtacaaacgc

SEQ ID NO: 11874 - DNA, 537 bp, Gossypium hirsutum
  Clone ID: LIB3543-039-Q1-K1-H2
aatgtttagggtttcgactcagcagccttcaatttctaaggccatttcatcactcgttcaccattaaaattggtgaggggtatggaagtagcctttatttccatcagaatcaacactcaaagaccattctcacttgcatatccacatttctagccccgatttcgacggagaagacaagggatctaactgatgcattcgtgaaggttctacggatgcaaagctgtacagggaaaaggccgtggaggaagtgcgtgggaaccactcataggagccccgttctgctgctactctcgtgtattccagaaacttctggcctgggctctatcggtttacctcgaatggccaagaagaagggctactgctgcggcattgatcaattagtcttagattgggccttttccgggttatttttggtctcaactttggggcccaaaattttgcaaatggatttggatttaatttaggcccaaagttttgtacagagattagatttgtgttttaatatttgggctaactataaataaactttggacctat

SEQ ID NO: 11875 - DNA, 663 bp, Gossypium hirsutum
  Clone ID: GOSHI-09MAY01-C91397_1
agcccaacgaataaggttggaatgcataacccattacattcaaccaacacaactttccaaatatccaacttattttaaccattaatgcacaacaaaatgcatttataattatttccttccaatattcaatgaaccaataagaaatccacttcacctgccatgagaggaggagaaaactagccccccattctcattgttgactctacagaggggaaaatggttaaccaatatgtataatttacaggcaaaagctctgtctctaaatgatttatatagacattagaaggcaatgtttcagtccaggtaaaaaagagtcacaatttttctgagattcttggcttcttggcatgtttccatcaacaacttgctatcatggaaggcaaagcaaatgacttgctgtacatgtgaaatgatgtccctattacacagcctgctggcttctatcaaaggtagatgatcattatagggcttctctatcacagtttgcaccttttccaacaattcctgactctcaggaggttgtttcttcaagctctgtggtaatattactgtaagcaactctggtttctctgctcttaaagcacctctgatgacagctgcattagtacctgatgcacctgatgtgaaaatatggtttttagttataactaatgcataactaag

SEQ ID NO: 11876 - DNA, 1028 bp, Gossypium hirsutum
  Clone ID: GOSHI-09MAY01-C91307_1
tttattctaatggcaacgaaaaatatgtgacaaaaactggttagaaactatcgatgtcacccggagatcctctatctcccttcacttctcttctacaatgatgaattgaccccttgcaaagatgacataggttcattattgaactcagtaaagtttcttcctaataaggactaccctgtttttttctttggtatacaaggttgtgatgagagggaaggaagtaatccgtcgtggttcaatcggattgaagccagcaaggttgtagaaattgttagcagtttgacagcaagtgggattctgaacgagaaagatataggggttataaccccctataggcagcaagtccttaaactaaagaaggccttcgagaatctcgacataccagatgtcaaggttggcaccgtcgaacaatttcaaggccaagaacgaaaagttatcattatatctaccgtccgatcaacaatcaaacacaatgagttcgacagaacccactgtctcgggtttttgagcaatcctagaaggtttaatgtggcggttactcgcgccatagctttacttgttattgttggaaatcctcacataattgccaaggacccttactggagcaagcttatatggcgttgtgctgatcataactcttaccagggttgtgctctgcctgaaaggcaagagtatgaagatgacgcttcaattccagaggattgtcgggtcgatgacgaaagcagcattgctgaaatgtggggtgaagatgccaaggaaattggaaatctcgttccttttacggatgaagccgagtggtccgatgggtggaaatgaaatacacgcatcctacaatggttcttttgcttttttgtgcttttgttttcacagtagcaaatgtgatgaacttgttcacttcaagtgacagtacggcagagtggtaaaagcaaacgaaaagaggagatatcttcatacactgttaccatctgtttttgatgatgtttttctgctaataaaactctttcccatcatatcattttactgattac

SEQ ID NO: 11877 - DNA, 443 bp, Gossypium hirsutum
  Clone ID: GOSHI-09MAY01-C91217_1
cttggacgctgctgctcttcatggcatcgttacacaaggagaaggtcgctcatccatccttgcaatgtttgcgagaaagagcaggaacaatgggaactagaagccaatacgccctgaagcgctacggctgataccccggtgcaccctgtagtgagacagtgggatgaacagttgaaatggtgtgaagaacgaaatcatgtgagtgacgcactaaatcaatcctgtgagaaactgtcttgaccaatggagcttaatggcgccaggtgcagctatcaacaagtagggcatgatatgcgacattacgcataaggaggataatcagctcttatgatacccattgacattcttctatggattaattaccacatgcttctctggttctagaatggcggatcctcctaggtgccacgctaccttgaacggatatatctgtcgctttgtga

SEQ ID NO: 11878 - DNA, 968 bp, Gossypium hirsutum
  Clone ID: GOSHI-09MAY01-C92917_1
gagattataattactaagatagagttccataatttagttcgcctcattattctatattaaaaggacgaatacaatctaaaatatgaaccataaaaaaaatattaaattgattacaggaatatcaattacagtatctattatccaaagagaaattcctccagtaatgtcgaccatttatcccgcttccctcaatatttcatcaagtgatcatacgcattttttggggggtcagaaaccgctactacattttggatgttgcaattgcaacattgttcacatcgtctgtagtttcatcaactccaagtttatctaaaatctctctataaagctgctttctattttcacagtaaacttggccgttccacccatttttaaccaacttttctcctaattccagcgccccttctgccgtctccgccgctgtatcaaacgctgcgtcgataattccactctccaatgcttgctcagccgttaacttcttcgctttcaacaccacatctcgccgtaccttggcgtctccaatcttgcagcttataacggcaatgaaccaagccggaattttcagcccgatatccgtttcactcatgtacaagaaccctcgatctttcctcataacaatataatcatgacaaaaagcaaagatcaacccggcggcgcaggcgtggccggtgatggcggcaacggtaggcattggaaaggagataaggtcggcgacaagttcccggagcttggaagacattaaacgtatcttgtctggtgaagagccagcccaggcgagatcatagccgttggagaagaacttgccgtgagcggtggtgatgagaacggagccagagagagaggtagagtcggagcggatttggttgagtgcagaccggattgcgtcgattcgggcggggtttatgcggtgctcgtcttcgccggtcaaggttaaactccccagcttaccccgctcccttgattgccaa

SEQ ID NO: 11879 - DNA, 630 bp, Gossypium hirsutum
  Clone ID: GOSHI-09MAY01-C92527_1
cggacgcgtgggtgagctgctgcctgaaagtgttatggcagtgatggttacacgaaaacaaccttgccccatagattctataagtttgaggatagccaggttacaaaaaatcctgaggacatttataggtgatagaaacaatgaaaagcagtttttaggttctcttaatgtgaaaattaaagcatcacctatcgttcatttccagttagagttggaaaaggaaattgggaacaatgagagtgttcgcagtatgttagctgaatggaggacaaagccaactgttgagagactatggtttgatgtaatgacaagagttgaaggagacaaattgaatccccttacgttaaagaaggtccggccttttgttagtgtagatacagtctcatggagtaatttattgtcaaacatttcttttacaaagttcccatccattcttgtccctcctgaggctctgacattgggtgtcaaatggtagtggaaaaccttgtaagatgtttttgttttcggtgatatttacagatcaatgctatacgccattatctgtctgttgaatcttcggttgatttgtgtaacatatgcatgtcacttatgtcgaacccaccttggattggatttgtaaataatatttac

SEQ ID NO: 11880 - DNA, 654 bp, Gossypium hirsutum
  Clone ID: GOSHI-09MAY01-C92417_1
ctttcgcggtctgattctctttctttagttgggttttctgatgcaaactggggattggattttgatgatcggaggtctacttcggggtactgtgtgttttttgggtctaaccctatttcctggtcatcgaagaaacaacaggtggtgtcacggtctacgactgaggctgaatatcgaagtcttgctgctgttacgagtgatgttatgtggttactttcgttattacgagaattgcaaattgggtctgcttctccaccaaatatctagtgtgatagctctagtgcagtcgcagttgctgctaatcctgtgttacactccaagtttaaacatgtggagttagatctattttttgttcgtgagaaggttgccgatggttcggttctggtccgagaagttcctgcgtccgatcaagttgctgatgtattaactaaaccactgccattttcgtgttttgctcggtttagaaattttcttcgagtcttatcaatagggaagatggatgcatgttaaagataataaaacggttagagaggtagttagtgaaggctgaaaagttagctagtttgttaaagatagcaagttataaatactatcgtctggctttgtattgagataagtaaacagtctaagttcatttttgaaaatagtttgttc

SEQ ID NO: 11881 - DNA, 855 bp, Gossypium hirsutum
  Clone ID: GOSHI-09MAY01-C92407_1
ccaactcttatgttcaatcttagcttagtggttggatgttcgattggtagaggttttgagggttgtttgtagatttttttggttttttgcaatgtttttgatactgttcacgtactacacaaatttggctactatttcaagattgttttattgtgttttttgttttgtttgacttagtttgggctatttgacttgatttgggttgttataaaactatgctttcgactttcttgacttttgtgaaatatatttatgaaatacaattattttattgtacctaatatgtgagatggcccaacaagcccatctgacatgtgatggacgacaaccctagttccaaatagtggtgtcccgcccacctccctattatcctagtaggacatgtgatgggagccctttcagagatgagtcaaaccaatatctttttgaggacgtatagaagccctcgtgagaatgggtggagagaatgttatgtgtcgtggatcaaagcccgtgaccattgcccccaaaatgtctcatgggggtccacttattaaatgtgactcatttgacttacttgaactgacccgactcatggaacatattggaaatctcatctacttgaagccttggtggcctaaagaaaccctcccgtaaaactagagttaacagggtaattagttttaatcctaagagataaaaatgtatagggttttaattttttaggcctctcaattgtagatagactctaatttagatcgtttatggcccgttggatttggaggggctcccctataaaaagaagttttttccccccctttgtattcccccagttgtaaacctgcaaagtaaaaaaaatttgagttctattccaag

SEQ ID NO: 11882 - DNA, 710 bp, Gossypium hirsutum
  Clone ID: GOSHI-09MAY01-C92677_1
ctttcaaatattattatattctcaaaataaccaattttgatttgctgaaacaaacaacgtaacccaaaaaagaagcgaagatggcatcctttgctcaagcaccgcgtggtgactcaaagtccggcgagaagattttcaagaccaagtgtgctcagtgccacaccatcgaaaaagctgccggtcacaaacaaggacccaatctgaacggtctgttcggaaggcaatcgggtaccgctcctggttattcatactccgctgctaacaagagcatggctgtgatttggggggagaatactttgtatgactaccttctcaaccctaagaagtacatccctggaacaaaaatggttttccctggattgaagaagccacaggaacgtgctgatctcattgcatatttgaaggaatctacggcttcctaaatgggtttacaaaattcccattccattttgcagcctttagagaaatgattcttataataaagtagacatgcatgctctttctacaatgagcattccttcccttcctgccaaattgttacccttgagaagagtttgccatttctggcaaatctaaggctttttcattacttcctgaatttcttgtgatttaccagcatgctaattcgtttttctttttttcattctcgaacttttacattgatttaccatttgctataagtctattacacgaattttcaacatttggtt

SEQ ID NO: 11883 - DNA, 539 bp, Gossypium hirsutum
  Clone ID: GOSHI-09MAY01-C92157_1
ttttttttttttttttttatggtactgaatgaccgatatgtgacagtcaatcaaatgaaatgatattcattgaccagattctaatagattgattgagcactgaaatgtttcaactcaatccacacacaccaacaaagaatttcaaacaagcccctagaatacaattttgagtaaaacctcatctcaaagcaagcaaacacattccctaaaaaccaaaccctttatctaccataagaaacttaaaactgatatagctagaattcaaaggcaaccaacctttactctgtacaaagaccggctccaacaagctcactccagttattagcctccaaaaaatgagaaaaacccacgctttttgggctcctcctcaaccataacagccttcatgctatcctgctcaacaagcctccaagcggcttgctcgaaggccaacccagcaagcgtgggaggcttattcagaacaagtgggtaccctctgttggtgcttctgataacctcggaatcctcaggaattacccccaacaatgccaaccccagca

SEQ ID NO: 11884 - DNA, 519 bp, Gossypium hirsutum
  Clone ID: LIB3828-011-Q1-N6-F9
ccctcttttttttttttcttttttttttttttttttttttttttttttttttttttttttttttttttttgggggaaaaacatcactaattctcagttttctttctacattcacaggggcgggccccccaaaaaaaaaaacaattgggataatgcccccaaaaaatatgccaaaagttaaaagaaaggaataaaattggcccttgaaagctaacccaacacttggttgttcaaacaatgcccttgacagatccaaatcaccgggaatgcaaagataaatcagccccccagaaaaatctttctagcttctaattcaaaatcttaaatcccagctgaatggcccccggattaaatggcttcctggaacccagggatccgctggaaaaactaattccaaagacccatgagaaaaacaagtttggaaaacccttcaggatttaactggcagtaggggttatgaatagggcaaaaacaaaagtttcggttttacactgcggcaaccaattgcttttgggttcac

SEQ ID NO: 11885 - DNA, 511 bp, Gossypium hirsutum
  Clone ID: LIB3829-009-Q6-N6-B7
ggacagaatcgggtaaaatcatcactaattctaaggtttctttccacatatcaaagtggcactcgcctcaaaaaaacaatctgtgataatgcctccaaaaaactgctccaaagttacgagagagagggtaaaattgtcagcacttgaatgttcaaacaatgcgcctgacagatccaaatcaccgggaatgcaaagattaatcggtccctcagaaaaaactttctagcttctaattcaaaatcttaaaatccaagctgaatggcgcccaaattaaatggcttcctggaacctaatgagccaattccaaagactcaagagagaaacaagtttgaaaaactctccaggatttagctggcaccctgtgttatgaatagtgcttgcgattaatgaaatcacaaaaatgaagttcgagaagctcaaaagctaaaggggttaaagatggcatcttataaacagttcatcaccctagacaaaagtttcggttttacactgcatcaaccaactgcttttg

SEQ ID NO: 11886 - DNA, 843 bp, Gossypium hirsutum
  Clone ID: GOSHI-09MAY01-C92317_1
cgagtaaatgatacttaattacttctaaaataatcggaaaatccaacaacaaatttaaaatccatatcaagaaatataaaattaataaaaaataaataatgaattaatggcaataaatttttaaggttgagggatttattaatccaagctttccaattcccttcccagttgctttcctagaaattgcttcattggtccttccattattttctattttcttctcagtgcttggcttcttgcatagcatgaaattcctagcccgtattgatccaattgcctcccagggactcaatgcatgtgatccaacactaggggaataaagaagaaactcattaagatccgatccaagaacaggtaacggccttcacgagcatatgatttcaaagcaatatcaataacagtaccaaccagttctccttcattaacaacgaaccggatcggaccggaacttcccaaaacagagacgctattcaataacttattgcctttacaaccctgattcttcttctgctcattgtgaaccatctttttttcaaaaaatcaaatcaaaatccactaaatatcgcgacgaaaaacaatgggtttcttttatttttttcaaaaaaaacaaaacaaaacagggtttatggatcgaggccgatgcaatgataataccagccttgtttacaagaacagataatgctcgcccttgaattacgaagggagagcattaaattactgtcactttgattcgtttccaccattcacaaatgatgttttagagcttaaacaaacaaacaaacaaaaaaacaattgggcgatggggtgattttttgaagaaggtttgtgagagtatttaagaac

SEQ ID NO: 11887 - DNA, 595 bp, Gossypium hirsutum
  Clone ID: LIB3825-009-Q1-K6-H6
gaaaaaaaatctattcttactgctgcaactttcatagtgtgtgtaaatcttttaggccttttactactgctaatccagctgtatgttgccagtccatactgcatcttcttgtctgcttttgaccctcatactgattatcaagaaaggaacctcaaacacacctctcaagattgcccgttttgcagacttcagtacactcttctttttatactctctctctcttgactatcatgcataggtaaaccttttattttctttttttgcagggatgtggacttacaaacatggtacagtaatatgttgagtggtggagaagggtcacctccaattggactaggtcttgagcttggacgtggatctgatcatagaccaactgggttcacaaaatacagtggcttcactgtttttcaactacaagaactgcagcttcaatctcttatctacaagtacatggaagctggtctccctgtccctaatcatctacttctacctatatggaaaagtgctgactggttctcttggcggtctacatgccaatccttatcaactctactctaactgaaaacactaaacacccgtttttctgttggttcat

SEQ ID NO: 11888 - DNA, 596 bp, Gossypium hirsutum
  Clone ID: LIB3825-006-Q1-K6-E11
cggccgcgtgggtttcagagtgtgtgtaaatcttttaggccttttactactgttaatccagtgtatgttgccagtccatactgcatcttcttctctgcttttgaccctcatactgattatcaagaaatggaacctcaatacacacctctcaagattgcccgttttgcagacttcgggattggacttacaaacatggagagtaatatgttgagtggtggagaagggtcgcctccaattgggctaggtcttgagcttggacgtggatctgatcatagaccaactgggttcacaaaatcgtgtggcttcactgtttttcaactacaagaactgcagcttcaatctcttatctacaagtacatggaagctggtctccctgtccctaatcatctccttctccctatatggaaaagtgttgctggttctcttggtggtctccatgccaatccttatcaaccttactctaactgtaaacactaaacacccttctttttcttggttcatagattagatgaaatgatttttgtttttgctttgatgttgttgattcagatttgggttctggaccattgcacttggagtataagaatggggttgat

SEQ ID NO: 11889 - DNA, 736 bp, Gossypium hirsutum
  Clone ID: GOSHI-09MAY01-C93487_1
cttctttttctctgttttctcaaccaaaccaacctttctgcacttctttctttccgtcgcctcccccctcgcctccgcaatttagtttgggggtttttttggaggctctgcttctaggccttgcctgcccaaaaacataataaaggaatccatttcaatcgcaaccgagacggggatgttgcagctgttcttcacaattgctttctctgcggcgccgttgactctatatgtcccgcctgtgaggagcttgaatctcttcgtagagaccatggaggatctggcaagggagtcgcgggtgtatacccacaggctttacccacgtgcacgcttcgtctggtctaggctcttggattgcatgctttgcaacttgagtttagattagagttggctgcgttgtgctgtgccatctcctaaccctactttaatcattagatctctttcaatgtacatatggaattttggtttcttttgcctctctggccatgtgacaaaggctcttcgtattgccaggaataaaagtcaaaagcattcttttggtggttccatatatgtttctttggggtggatatatatcttccgggatcataatgatgccaactgaaggatcataccgtaattctcaacttattactcaacttgtatgatgtccctccaagcttgaaggatgtgtaccaaatgatttgtgatcggtggaacccgcagaaaaatgataattggaaatgcgctttacaattac

SEQ ID NO: 11890 - DNA, 592 bp, Gossypium hirsutum
  Clone ID: LIB3825-009-Q1-K6-F5
gcaacttgagtttagattagagttggctgtgttgtgctgtgccatctcctaaccctactttaatcattagatctctttcaatgtacatatggaattttggtttcttttgcctctctggccatgtgacaaaggcttttcttattgccaggaatagaagtcaaaagcattcttttggtggttccatatatgtttctttgtgttgtatatatatcttcgcgggatccatagagtgattggtgagtgttatttaaagtttatgctatcaaccctttttattttaatcactagtctatatgaaattccccagggttagggttttgatgtaatttttgtatctgcttgtgatgggattctgaaatttgataatgtatctgggtttgtccgtttcctcattaacctttgtatcaacttcaattatcaatctcacttccaacaataggaaacccctccacttgacttcaaattggacgctgaatccccattcgacgctaaatttgcagtcaagctgagatggattcattacggttaagttgctcaagctttatttagctcgatcataggtgatgtattgttgcctgcctaaggcttttga

SEQ ID NO: 11891 - DNA, 443 bp, Gossypium hirsutum
  Clone ID: GOSHI-09MAY01-C93757_1
cggccgcgtgggtgtagctgtcactctgttggcaccagttctccgaacatacaagtcgaattcgatccaaaattcgtttacagaaatggaatgatggttcctatagattctagtcaagaagtttcttttcactgtaaattcgaaacgttgtgcctttgccctcttatagagtctatatcaatgacaaagcaacctgctgattgatttcgggtttttacagcgtatcatatcttcttccaagaggcatacttgactcgaagggtcgttacttagtttcctactcaaatagcttccccaaattttgtttcttctgggaagaagctataacccatatatcatgtaaatatcatccaaggtttcttctgcagttctgggtagtactgtaagtatgtttctcttatggccatcacatgataatatatatattcatatggaggtttgcc

SEQ ID NO: 11892 - DNA, 863 bp, Gossypium hirsutum
  Clone ID: GOSHI-09MAY01-C93647_1
aaaaaattgtccaattttccatgtaatgggctaaatttgcccagcccaatcaaacacaaaaaaatcaaaacaaaatataaaataaataaataaatataaaacccaagttttataacagtccaattacatggcctaataaccaataacaagcccagttacatgacccctagccgaaatttgcaacaaacccaaatggcccgaatgcggaaaccaaggcagaaaccctagcaggtccaccatgcgccgcagccaagccccggcctccatgcctccgtacgccccaacgttcagcagccacgccacagccctccctcagcgccgtacgctccgtacaacgcctccagcaaccacgccaagcctccgtacgccagcacagcacccgtacctgcgaaagagaacaaaccacagcagcaaatacatacaaaaaagacaacagcaaaatgagaatgtgtattcaatttttatttttatttttatttttgaatatttcttatttctgtttcagctataaagccaaagcctctgctcattgtaatttttttacgcacaaatacgcaacaaaaaaaatacaaaaactcaagcaatacaaagcaactatttttctaaaggtgatttccagactcaaatctctgggcgttccctttcgattggatctttttttttctttttttgttttgttgatctttttctttattcgaaggtttgaataaaaaaggaaaataggagtttacctggaggatatgccatggatctcctcttacttagtcgaaacctaagtcaagagaagatcaaagggccgaaaagcgttctccccagcctaaatttgttggctgctaggggaaagagaatcagcagcttcaagg

SEQ ID NO: 11893 - DNA, 1306 bp, Gossypium hirsutum
  Clone ID: GOSHI-09MAY01-C93677_1
agttcttcaataatattattatatacagacccatctacaggaatttgatactagaacaaatcttgattttccaatgaaagtgttaattagacaataaacagtccaaatacatataatttgtttttgattgcaaagatcaatattctattttatgggagaaagtacaaaattcttctaaaaaaagacttgccagttatgtaaaatattaacactaatcaaatttacagtgatatccctaatcaaatcagcagagacaatttagacttaaaacttgaaattataaaaaaagagttggttgggtttttatccaactttgaaacaccattgctcaatccttgaaggcacaaatgagagctctttgtacattgtcggccactattcttaaccttccttgagttgcatctgccggtgaagaaccactaacctccaccgttcgagccaccctctgtttgcacttctcccactcgtcaaggcgcagccagcatgcgcgtcctccatggcttccttccattccaagaaatgacacattggggttttcaccgaaggaatatcttaatctcactgagacacagtagggcagccatgcaaagcaccaccggcagtgtttatatgaggtatgagggcaaggatcgaagtacaaccgtcaagggcaaaatcgacacgacactcatcaggtcggtcatagtagatattgcttttagttgcggaaatgaactttcagaagcatcaccaaccatttaccccagtatgattttcaagacataactcgatccggggtttttgtgcaggagctatatctcccactttgtgttagtgctaatccttttttcccaagctattaacttcaggaattctccgaaaactgatatgggtaatgtgagaagcgtaatgaatgatgcaacacgtgaggcatcgtagggttcggatgcaacacgtcggctgaagtagtcacatatctcgcttatttcggattgagttaattcctcttgagaattagcattgttttgttgctgttgttgctgctgctgatgatggaagcgcttcacactaagaacctgaagaagaagttgaactctgtggacacttacggcaaacacatagcctcccacaaagaaacgcaaggcaggctgttcttggtccaagttcaaaagtgcaccctcattgtccttcaagatcgatcccaggatttctttcaaaagcgcgggtaactgggcaaataaccatagaactccgaggtatttaagaatacccctaagtcccatcttaacagcaacaacaggcacccatccacctccatatcatcatc

SEQ ID NO: 11894 - DNA, 798 bp, Gossypium hirsutum
  Clone ID: GOSHI-09MAY01-C93667_1
tttttgtaccgaaccaaatatgtttagtaataatacaaatcagtttcaaattttaaagactgtttaaatgtgttacaaaccaggtcgttccatgtatctgtaactcccggcaagcaccaatgcatgcagtcatcgtgtttctttcctccggctgtggaagggtgagcatcagctctgaactcactcatgcgggtaatatctaagatgtggacgttagaccccttgagggcgttgtatatgtgctgattcacaagccttgtctccacatttgtcccgttgtttttcaacgagaagagattttccacttgttcgggtaacaaaggctgtaaccgctgacaagaaccaccttggtcccaatcaccaccttcaaaatgccttggtgattgcgtgcgaaacaatttaattgcatccggtcgcatggttttctccacaaaccgtatcacgtgatttaaaaccttatccaagccaagatcaggaggtatgggagggattacaggtagacccttttcaaagaaaagcaagggtgacttaactgggtcaaatttcgaaggagcccaccaccagtgtcctgtgttaaagattagtatatcatggaagcttggagccttttcccatgtgctctctggaacatcaacatcaactctataaccttctttatatccaagagcttctaacttaccaccatttccattagctgatcatctaccatagcgtgccaaaagattagttctatgataagcaatggtgagattatagtgaaggaaagtaaagccacgatcagctccagcaggacgccat

SEQ ID NO: 11895 - DNA, 587 bp, Gossypium hirsutum
  Clone ID: GOSHI-09MAY01-C93007_1
cgcccatttaggtgacactataaaagatttattttttacaagaatctttgcttgaaattcaatatgttgttgaattaagaccatcatactttaaaaaattccaacacattgtacaagaacaaactatccaacaacttcaatgttctagccaaacacatttatcgacaaagaaacggatatccatcaagtatcgagatgactatgtcgagaaaccaactttgtcactattgatgtcgttgaaagagatggaggtttgtatggtgtctaatgcttagtttagaaatgcttcttaaaattatttttgagaaaaaaaaacacttttggggagaagttaaaattttcatctgaaaaaagtatttttgggctaatttttggcttaagagaagcactttttctctaaaaaaacagcttgtttagaaataattttgtcccaagagtattttttttttgtctcaaaaatatttgaaaagcattcctaaactagccctaatagcctttaaaggaagagattaggttgaaatgttggtcgcaggtgaagttgaatatgagtaatagtaggtgactcttcaataggtcactaagaaggc

SEQ ID NO: 11896 - DNA, 603 bp, Gossypium hirsutum
  Clone ID: GOSHI-09MAY01-C88937_1
aaaaaattaaaaaaaataaaaaatatagactaaaaaagataagattcgaaacaactaaaaaagtcagtacaaaaatactcatatctgtgtatatatatatatatggattagacagctttttccattgtcattgaaagcttagagctcataaattatgtgagcaagaatcctggtaccaaggatacaagtacatttaccaactttgacacaatccttagaccttactggtgacaaaatctttgtcacttgcttcccagatggtggtaccgtcacatgcacatttcttcttgtagttttcaccaaccccagcacttcgggctatcactgcagccgtcagacctggatccgatctatcttcagtctcataaacagctattgaccgcccaatgagatcagcaaccctgagctgctgtttgacaccagtgtaaaaggcctcaccgttcttatccacatctagagttcccaggtcgccaactggctgtttagcagttccttcatttgatggattaaacactttccctgtacttgcagcacctcttgtcagatcaccaaattcattaattgaccaaccgtgttttccaggtgacagaccactaaaactgg

SEQ ID NO: 11897 - DNA, 861 bp, Gossypium hirsutum
  Clone ID: GOSHI-09MAY01-C88547_1
gtgacagataaaaacaaatcaacggagaatcttgcattgcaggaatctacaagctcaaagcatcattctcatccatcagcggtggtagggcatccaatcatgataaataaatacaaattggacaaccgacctactgcttttcaagttaatccaccattgcctgcgggttttgcagatgttgatgttttgaagcaacacttttcacaatacggcgatctcgtctctgtggagctgcaagatgtggaaaaagatgataatacgggatcagaggcatcgcataattgctcggttcttataacttacagcacacaccactccgcagagaaggcttatgcagatggtaaatgctggaagacacataatttacagctttcatggcaaacatctagcaatgaccaacatagtagaaaggaaaccgatgtggagaccaatgaaaagttaacagcatgctgcagtacttcgggtaattgcgagcatatggaatgtttagtaccggaagattcaaagcataatcccatcccaaatgtctaagcatgaaagagtggcttaaaaggcttaagggtcattttgaggccgttttggggatttgtacagttgaggtaaaatgttaaaaaatcctattgaagtataaaattttgtgaaagttggaattccatttgtttcttttacagtacaatgtttgtttatgatattctcaataatggttgttgccaccacaaggatgattaggggtggcaaatttgtttagagctttaggggactaacattctccttttccacgagtctttgggaacctcctttttttttatttactctctttgattctccttataattcaaaggttaatttttattttgtttt

SEQ ID NO: 11898 - DNA, 650 bp, Gossypium hirsutum
  Clone ID: GOSHI-09MAY01-C88577_1
cccgggtgcgacccacgcctccgtttttagttcactgagtgttccaataatctactcttctttcagcatatgagaaggtataatgtcttgaagaaggccatggtctttaagcaaagactgccccgaggtgcgcgaacgcctctcgtgaagaaaactcgagtcaatggagggaccattatgaccaaagttcaaagaagacaagctattggcaaatggatgttgatgctgctgctgctgctgctgctggtagtagtagtgacactgagtattcctttgcattggcacactgaaagctgctgcggctccggcagagatgccggaatttatagtagaaccgacgagattcggccgaggcatgagcgggctggggtgagtgtgttggccttcgtaagtggtgaccacaatgcttgggtcggtgaaacatctctccactctttttttcacattacatgaggtgctggtgcaacgataataactcctaggaaaagggctgtttttaacagctttttggccgactttctccatctgtacccatcttccagatgatcaacctcgctctttgtcataaacgcgaatctcggctctctctgtctcttctggtttgtcttcttcactttcaactgtgtcttgttttttgttggtctcttctc

SEQ ID NO: 11899 - DNA, 425 bp, Gossypium hirsutum
  Clone ID: GOSHI-09MAY01-C88447_1
gacttggaagggtactaccccaaccacaacagaagctgaaaacagttacgatacgaaatgatatttcgttacctacaagaattaaaaatcaacatactggaattagaatccggttttacatatgataagaaaaaccaagctccggctggtaaccgagctccatagctcttctcctatgtcattccagcaactttaccttccaatttccttttgcatccaacaatagtccagccagccatcacagtttctttctcctcaacccccttctttaggtaaagccaagaacaaccttctccgcctttgggtattccaacattgaactttacgaaaaaactaagggcttccaacccttggaagggggggttcctggcttgaatgggtggttgccaaatcaaccttttctttttttttttaagaatttaaaa

SEQ ID NO: 11900 - DNA, 884 bp, Gossypium hirsutum
  Clone ID: GOSHI-09MAY01-C88467_1
aatgggccaacatacatctagaagtaaaagagccttgctacaaacattgcatggttgattgcagaagaaagcagaacactgcttgaaatactttatccattgtaaatgtgagctcaaagacttcaatgccaatctgttccacatgcctgcaaaggataaaagagcacaatggcgtacatttatgaagaaacaacaattgtctgaaaaatccaaacaccaaaagaaacactaagcaatgtcttaagtgactgctgttcgtataggagccaaaagctgtcatcgatcttaatagcttgttcatatctgaacaagcttgaattgatcaaaggctaaagtggagactgagtcagacagcttggaacagctttagtctaaaaaatccccaggttcagtaacacattaagcccacggctcatttctgacgaggagaaatggattgatctcctgacccattactaccaagccactgcttactacttgatctttcaagtctgtctggttcatctgcattcaatttgctatttggtgagtgcccttcatcactgtcaaattttggtaaatatttgcttctcagctcctgatcatcattcactgaaactttcaagtcataagcctcctcttttgaaaccagcattccatcatccccttcagctgactttgaccttgaatgccttctgtgcctcgaatcattgtcttcagaacttcttggtgaagacctgcctcctctaggaggctgagcttcaccagatgctaaatgctttttgtcatgacgttttgatctctcatctactttatcaatggcccgatgttttccatccagcagactttgtcctggagcgccgtcggtgttttaatctagtttcttctgaatttctgggggacca

SEQ ID NO: 11901 - DNA, 385 bp, Gossypium hirsutum
  unsure (1)..(385): unsure at all n locations
  Clone ID: LIB3149-013-Q1-K1-C4
gtgttactgaacctggggattttttagactaaagctgttccaagctgtctgactcagtctccactttagcctttgatcaattcaagcttgttcagatatgaacaagctattaagatcgatgacagcttttggctcctatacgaacagcagtcacttaagacattgcttagtgtttcttttggtgtgtggatttttcagacaattgctgcttcttcataaatgtacgccattgtgctcttttatcnnttttttcgggaaatgcttctagacaagatcggattcaaaaaggttgaagttgtcacttcatatttgtcgggaactataactgggtttaatagaccgatccttgcatactacaaatgaccaattttgatagtttgatttt

SEQ ID NO: 11902 - DNA, 623 bp, Gossypium hirsutum
  Clone ID: GOSHI-09MAY01-C88627_1
ctggattagctcgacttggatcaaagctcacagaggcagaggtgcagcaactaatggaagctgctgacgtggatggaaatggtagtattgattacattgaattcatcactgctacaatgcatagacataggcttgaaagagatgaacatctttacaaagcttttcaacattttgataaggacaacagtgggtatatcacaagagatgagctagaagcagccatgaaagaatacggaatgggtgatgatgacacaatcaaggaaataatatccgaagttgacaccgacaacgacggcaagatcaactacgaggagttccgggacatgatgagaagcggaacccaacacacacaactcttttagattttatacacgacactggtcttgcagaaatcagctaaaaggttccccccaaagggagtgcgaaaggactttctaagagatggtgtaggcagtcaattacccgactttctctggtttggtttttcattttgagtgtaatatattcacatatggttttttatcgacggattttgagaagagagattaaacttatggtttctcagagctaggaaaactcaaacccatgaatgcacagcatattatgttgatgtccatttgttt

SEQ ID NO: 11903 - DNA, 514 bp, Gossypium hirsutum
  Clone ID: GOSHI-09MAY01-C88197_1
ggggttttaatataatattttattaatttataatttaatataataaatccaactccaatagatgacaaggaagtctaaagctcctccattttcacaagagctgctgaattaggcatctctcaagatgattctcctcttaaatcatgggggggaaaatcaatgcccaatgctaagtagaatatttattatttgattacaggggaaaaaagtcggaaaattacaacattacaagaaaattgaataccccattttatgcacctttctctcaaagtcaccaccatacgttatgaatttctctacctcatcaacccaccctttctgggttgcctttttcagctcatcctttatttccccatgttagttttactccattttgttggttactacttgttaggcactcctcattttttcttactctcatcatagcccaaggttaattctttccgacatctttatgatgtcggagtgaatctgatcgccttctatctcgtccccggtggcaccagatgcaaca

SEQ ID NO: 11904 - DNA, 759 bp, Gossypium hirsutum
  Clone ID: GOSHI-09MAY01-C88257_1
aaaacctgtaaaatagacaattgctaaatttcccggggcaaagtaatctcttacataaactttatgccctactacgggcgctggtcttaaaatgccaccacttggtctcatgtcattattacccatgagcagcttttcctagtcttcttctcaaaatcttgactcccatgtacctgcccatcatcaagacagggccctgaggatttgttccaggggattcattaaatgtggagccatccacaattcggagtctgttggtgccaagaactttgagggcaggatccaccactttgccgacgtggcaccctccatggtaatgccaaattgggatcacagtgtctttgcagaactgctctagggacttggtgtcattagtatgctttggtataaggttaatgttagccttgacactcatgttaagaagcttctctacagttggtttgtcacaccttgtgaagtttgtgaaatgttttgattgtataaccttggcagccatgcggatcccgtcaacgcatcgctgcagatcacgtgggtggtggaagtagttgaaggtaactgaagggttgtcatcgatgttggtgttgaccaagttgaggtgccccgtggaaataggcctggcaatcttttccaaaatgaaacctcccttgaatgcttcatgtggtaggtctcgttttcttttgatgaaagcttggatcgcttcgggttcctttgcttcggaggaatcgtagagagctgaccgatctcagcagacaatattcc

SEQ ID NO: 11905 - DNA, 763 bp, Gossypium hirsutum
  Clone ID: GOSHI-09MAY01-C89967_1
gtccacaatgcaccagaaaaggaaagtgggaggagtggcaagaacaaacacaaagtggaggaggcatcatctacggctcctttatggtctgggatttcaaaagaaacaaatcatacaagttctgttcgcgcgcgtgggttgaagtcaaagtcttttgaatctaagttggatcctcactcatttcaggctctgactgaatcaaaggatggaaatcagtcttcagagcaggatgtagcttttcctaatgaagaagcctatggtcaattgaataaccagtggaaatctcagcattctcgcaggatgccacgaaatccacaggcttataaatctgcagtccatggtgatgctgttgtctgggcacctgtgcggtcacatgccaaagttgaggttactgaagaggttagccataaatcggcagttgagaatgttgcttcacagacaaagaatgatgatcaagtgcagaacaatccaagaaataagagggctgaggtagagagatacatcccaaagcctgttgcaaaagaaatggctcagcaaataatttctcagcaaccagtaactcattcagatgatccgaatgcagcagatgagatcgtgggaagagcagattctgggtcctatggtattgaatgttctcaacattcagaaacagccaccaggacagtggggaaccctacagagtcaaggaatgatggcaggcagggaagaggacatggatcttggcggcaacgggcctcagctgaggcaacttcgcaaggcttgc

SEQ ID NO: 11906 - DNA, 669 bp, Gossypium hirsutum
  Clone ID: LIB3543-042-Q1-K6-G1
ccgagattgagaccctgagcatttgcagtattgagattcgaaattagcaatggcggcttttctcaagctagaagattctcctatgtttcaaaagcaggtatgttctttggagtcgatggctgatgagttgaaaaacgctgtcaagtactgaccgaaggaagtagaaaatatatagcagctcttggagaagcatataatgcagacaatagctttgctgagtctttagaagcatttggttgtggacatgatgatcctcttagtgcctccataggagggccgatcatgtccaagttcatcagtgcctttcgtgagcttgctagctataaggagttgcttttttcacaagtggagcatgtgttagttgatcggctaatgcactttacaactgttgatttgcaagatgcaaaggagtctcgtcaacgatttgacaaagctacgaatggatattctcaggcacgtgaaaagttcatgtctttgaagaagaacacaccgggagatgttgttgctgtgctagaagaggatctagagaattcaaaatctgcttttgaaagaacccgcttcaatttagtaaattctctaatgaatattgaagcaaaaaaggagtatgagtttctagaatctataagtgcaattatggatggccatcttagatattttaagctggggtat

SEQ ID NO: 11907 - DNA, 610 bp, Gossypium hirsutum
  Clone ID: LIB3543-050-Q6-K6-G5
ccccgcgtccgcggccgcgtggggcgagagatgaaccttatagtttatctataggaggtttccaagatcagcgtctggaatccaggggtgcctcctaagatcattgtttagaggctgcttggaaccttggcttatgagattttaatttaatggagatggcatatgtctgtgttgtttcgtactcttgatttttgctggccatatctcatctggtagttgagttgtcttggtggaagacaatagggagattatcatgttggaccgttaacttactaattagggggccgatcatgtccaagttcatcaaagcttttcgtgagcttgctagttataaggagttgcttcgttcacaagtggagcatgtgttaattgatcagttaatgcactttatgaatgttgatttgcaagatgcaaaggagtctcgtcgacggtttgacaaagctataagtacatacgatcaggcacgtgaaaagtttgtgtctttgaagaagaatacgccaggagatattgttgctgagctagaagaggatctacaaaattcaaaatcttcttttgagagaagccgcttcaatttagaaaacaggtaaatgcgctaatgaatattgaagct

SEQ ID NO: 11908 - DNA, 450 bp, Gossypium hirsutum
  Clone ID: uC-gsflnu33B131f09b1
tgagacacagaccctgcgatcttttgagattgaattttgaaagataaagaagaagaaaagaaaaaagcaaattagcaatgtcggcctttctcaagcttgaagattcacctatgtttcaaaagcagatatggtctttggagcacatggctgatgatttgaaaaatcgctgtcaaatactgtataaaggaagcaaaaggtttatggcagcccttggagaagcatataatggagacaatagctttgctgattctttagaagcatttggtggtgcgaaggatgatccttatagtttatctataggaggtttccaagggccgatcatgtccaagttcatcaaagcttttcgtgagcttgctagttataaggagctgcttcgttcacaagtggagcatgtgtttattgatcagttaatgcactttatgaaatggtgatttgcaagatgcgaaggag

SEQ ID NO: 11909 - DNA, 617 bp, Gossypium hirsutum
  Clone ID: GOSHI-09MAY01-C89557_1
gttcaaagatttttgattttattgatttcaatattttttttcaatccaaatcccccccccgcgcccgctgggttggtggcttatataaccaaatgttttacattttttcgtttttctcttttctttttgccttgctgttatttcttcttttgcaggtatttctttcggctttcctttgcagatgctgcggtcaacagaggcaaagatttgccgttttggtgcaaaggtggctggcggtggcagacctcgggcgacgagtacgctggaggcacatgggtagcaagatgcggcgcactagggtttctaggtttctgattttttgctgaaattgttttaattttggaccatctgggccttgtttttttgggtttggaatttgggttgtaattttaggcccgggcataaatttggtcttacaagacatactaagacgtgaaaaaaaaaaagagaaatattgaaagcaaaaacgaaaaaaaatatacaatatatactcagcaatgaccttctcaatggtgtctgagaggtagaggttgacaagatctgagagcaaagacatgtctgtaaacaccaactcaaagggaagatttaacagataagggtttttggtttcacgtttt

SEQ ID NO: 11910 - DNA, 696 bp, Gossypium hirsutum
  Clone ID: GOSHI-09MAY01-C89547_1
ccccgcgtccgccccgcgtccgcgggaacaacggtcaggaatgaatctgctgaagattttttagcattattaaaagaatgggaacggctgtgtgcttcattttcattgtcaaaatctgagaatttggagaggcagtcattcaattcaagtgtaaatgaagataatgtaaatgatgaagaggaagaggaagatgaaaatgaagatggtgatggtgaagtgtttgaagtagagaaatttcttgctatatgttacggtgatccgaaagagaaaggggaacgtgggttgtacttaaaggttcgttggaagaattatggaccagaagaagatacatgggaacctttagatggattgggtgattgtcgagaatgcttgaaggattttgttacaagtggctttaaagcaaaaattctgcccttacctggtgatgttgatgtgatttgtggagggcctccatgccaaggcatcagtggctttaataggtttaggaacaaggataaccccttgcaagatgaaaagaacaaacaacttcaggttttcacggagatagtggagtacttgaagccaaaatttgttttgatggagaatgttgttgacattgtaaagtttgcagagggatatcttggacgatatgctttgagtaagctaattcatttaaattaccaagtccgaatgggaatgatggcagctggtgcttat

SEQ ID NO: 11911 - DNA, 637 bp, Gossypium hirsutum
  Clone ID: GOSHI-09MAY01-C89727_1
gcgttcgccccgcgtccgcccagcgtccgtaggaaaaaaaaaaccgcgcgctaagaaacctcgacggctcgagtggcgaagacatggtgacactggtggtggcgacaagcgctgatcctgcctccatcggcccggcctcttctctcttggctatgcctggctggcaccccggcccctctctccaggatgctgcgagttatacgaacaaggaagtgaggcttataaagctcgacaagcgactcgtcgtagagaaccatctggacaagcgttgggaggaagccaccggcgagactgtcgacgacgtcgtctttctcagcaaacatgtcgcttcttctaatagacctgcccttacgattcaccccataggcacgccgcaccttcgtgaagttgaggctttgaccgctggcggaaagccgggatgggctgcaccacctaacccacggattggtccgtggtttagactattgaagaacatcgctaattcacataatttagttcctgagtttgaggtcacattggaggctactcatcatggtcctgaaatcaattcaccaaccatgttcgtggaaattggtagtacagaaagatattggaagagacaggatgctgcacaagccattgctctgttggtatggga

SEQ ID NO: 11912 - DNA, 338 bp, Gossypium hirsutum
  Clone ID: GOSHI-09MAY01-C89697_1
cccagcgtccgctcaactgtggtggtttgcgggaattgccagacagttctatgccagcctactggtggtagagccagactcaccgaaggctgctcgttcaggaaaaaggtgactaattctgatggctctgactagaagagtttcttttttaggtgttaaaatctctttagttgtaggagcaacaacattaaggatttaaaaagactgttattgttcttgatgtggtggattttcttttaatgaatgttttgagttgcacttaattggtttcctaaaaaaaaaaaaaaaaaaaaaaaaaaaaaaaaaaaaaaaaaaaaaaagaagaacaatcataaaaa

SEQ ID NO: 11913 - DNA, 1040 bp, Gossypium hirsutum
  Clone ID: GOSHI-09MAY01-C89047_1
cgccatcaacatgtcatggccgccacaatcaataaacaaatccctacccgacgccaaatccattttcttcaaccttccaaagccaacaccttgtcttccccacgtatttctcactgcaatttctcttcttttcttcatctcctccactaaacgcaatccttcctttgtcaagttccttcctttcgtttcttcagaccgacgtcgttttctcaaaatcccatccatgtctcactctggaccccccttcgcaaccccacaagccctctccgattggctcaaaccacggttaccttccgactcgttagcttcgtggggggtcaagcctggaaccaaaaacgttcacaacctctggctagaactctccgaaggcgaaactacgatcgttgattcttcccctccgctccgtacggttaacgtcgttacggttcgtgtgatggggaaagacgacctcatcctcgttgaatctcgacaacaattgtctgacggtagtttcagggatcgctttaaacctctgtcggaaaaaatgaagcccaatgaaaccgttgaagaagccgtggctcgtgccgtgaaagaagagcttggttcggtaattgatcctgggtcggtcagaatcgtgccgggttcttatataaagaaactagaggagcgtaattcggcgtcgtatccgggtttgccggcgcgctacgttttgcattcggtagacgcgtgggttgaaggtttgccggaggaagatttttgtactgatgaacaagaggagtaccaggatttgaatgggaccatggaattggagaaagcagtgtctgtaagaaagcatttttggaaatgggttagttctgattcacttcattcttgaatttccacttatggaatgaggaattttggtttaattatttccaagtttttatgggtttttagttttgctgcttgtttaatcatggaattaaagtacccattttttgtgtagtaaaaaaggaatatttgaacttatatatatggcatatacatcaaaacaacagagtttcatatactgttgcaatttt

SEQ ID NO: 11914 - DNA, 904 bp, Gossypium hirsutum
  Clone ID: GOSHI-09MAY01-C89337_1
cggacgcgtgggcggtttcatgaatgggtccgtggtgatttgaccgacatactagtccctgtataagcatttcatctacacaacatgtttcaaggggttatcaaccaccagcaaagattcgatttcgatcgtgttcccgcggtcgtggagctatgcatgcaagcaggggccgatgtaactgatgaaattttgagatctggttcattaacaacccatgaattttctggtacaatcagtggaatcgagtccttgtcagatgatgatataagggtgatagcaaatggcaccttgagagcatgggagacccttagatccggtgttaagaagctgctactggactatccggcaaaagtttgcaaatattggtcagaagttcatgtcgggccatccggccatctagctcgtcattgtggagtatttagatacgagaggtggcgtggaacccattattggataaaggcaagggttgacaatttggtccctccaaagattgtgtggcggcgacggcctcaggatccaaaagtgcttttggatgaaggtcggaattactacgggcacgcaccagcggtggtcgatctgtgctcacacgcaggtgctattgttccaagtaagtatttatgtatgatgaaattgagtggtttacctggacctattggagttaaaccttaatcttttgcaaacctaaacctaagtggaggtggcgtcaaaggttagtggtatgtacaattttcagcaataatgatagtatttattcaacattgtagtctcttttaaagcttgagatctttgtataggaaaattttccccttttctcaagaaaaagtaagatagaatttggtaagaccagttttaaaagtaactgccccattgaaatggaaaacggttgcctatttgatcgatttgt

SEQ ID NO: 11915 - DNA, 874 bp, Gossypium hirsutum
  Clone ID: GOSHI-09MAY01-C84997_2
tgctttggcttcacagcaaggcccaaacaaacttccaggcccaattgtagatctaactttaaaatttcccgggagttattgttagaagaagaaatagaagaagaagatgatgatgattgttcatattacagtgaggttactaacactgctcatagagatgaagtggagtctataggtcgtgccaagcgttctgaagaaattttgaggttcaaacttgacaatggcttgatttgcaggcaatttcctgtcaagggaaccaacaggattgtccggtcagaggatggaaatgggaataagatgattaatgagtatgtgagggaatacaagattggttctggtagctatggaaaagtggttctgtatcgaaacagcatagatgggggacactatgctattaaggcttttcataagtctcatttgtcaaagctgcgagttgctcttacagagacggcactgactgatgttcttcgtgagattctaattatgaaagtgttggaacatcccaatatagtcaatctccttgaggtgtttgatgaccctagcatggatcaattctacatggttcttgagtatgtggaaagcaaatgggtttgtgatgggtctggtccccctggaggcattggtgaagatactgctaagaaaacattgtgcatggagatataaaacctgataatttgttgattactagcacgggtacggtgaagataggggatttcagtgtcagccaggtttttgagaatgacaatgatgagcttcgccgttctcccgggactcctgtgtttaccgcacctgagtgttgtctaggttcagtatatcacggaaaagctgctgacacgtgggctgtaggagttaccttgtactgtatggtacttgg

SEQ ID NO: 11916 - DNA, 967 bp, Gossypium hirsutum
  Clone ID: GOSHI-09MAY01-C84997_1
gggatggttctggttctcctggaggcattggtgaagatactgctaggaagtatgtgcgagatatagtatggggacttatgtacctccatgatcataacatggtgcatggagatataaaacctgataatttgttgattactagcacgggtacggtgaagataggggatttcagtgtcagccaggtttttgagaatgacaatgatgagcttcgccgtactcccgggactcctgtgtttactgcacccgagtgttgtctaggttcagtatatcacggaaaagctgctgacgcgtgggctgtaggagttaccttgtactgtatggtacttggaaaatatccgtttctcggtgagacactacaggatacatatgaaaagattgttaatagccctttaatcctgccgaacgacttgaacctagagttgaggagcttactagaaggacttctttgcaaagacccaaaagagagaatgactttgaatgatgtagccaagcatccttgggttatcggaaaatatggaccgataccccagtatatgtgttggtgtaagcgcaacaatactgacgatgggcggaatccaatacgaggccccatgatactcaatggtaactaactcatcttctgcttttgagaatttgctgtacagtaaaccaaaaagaaaaagaaaactcgggcctccattttcgcccggttactccctttttaatgcatgcgccggagaaccaaagaccgatatgaaacagtagtgtttgtttcaggttttatgataagatatatagtagggaaatatttgtgcaaaaagtgattttgtgagatttgttatcatagctttggtttgtttttttaagattccgagctttggcttgttaaggtttgtatgagtgttttctctcaaatatattgtacattaaaccaaataatttacttgacaagcaagtgcttatatttttgtgaaaaaaaaaaaaaaaa

SEQ ID NO: 11917 - DNA, 547 bp, Gossypium hirsutum
  Clone ID: GOSHI-09MAY01-C84897_1
tagattaattgttacagtgggattaacccttgaacccacggagcttctccgtttaggtctcggcgtcgaccccttcgacgttgagtcaccttctgtggattttgggttgatgactaaagttgaaccgcttgcggtcttacgtccttcttcggctaaagacgtggctcagctcgttaaagcagcgtacgagtcgagtcacgggtttactgtgtcggctaggggacacgggcattcgatcaacgggcaagcacagactggaaccggggtggtggttcagatgagtggggttgggtccggtggtaagccgagagtgtggggtggtgatatgtatgtggatgtgtggggtggggagctttggattgatgtgttgaagagttgccttgcgtatggattggcacctaaatcatggaccgattacttgtacctttccgttggtgggactttgtcaaatgctggtattagtggccaagcttttcatcatggtccacaaattagcaatgtccatgagcttgacgttgttacaaggaaaggtgagcttattacatgc

SEQ ID NO: 11918 - DNA, 796 bp, Gossypium hirsutum
  Clone ID: GOSHI-09MAY01-C84497_1
acgaaccggccagtttcaggaatggcagacatcaatgtttctccttggcacactggttcctttcagtcagtttctggccaattcaagtgaccgcctattggatctgagcctatgcaaactgtcaacctagttgataggaacatttcttctattgatagtggaaacatgaatatgggaagaaaggattttgaggatcaatatgttaatagctcatcaatgggtttgtctatatctcaaccggtgaagatgcctcgtgtctcaatttggaggaataaggaaagttaaagttaaccaagttaaggattccaccaatggcatgccagcatccatgggacagccatatagtaggggtgttaatggcttggtttcaatgtctactgcttacagtacaagttgtaacaatgctatatcgctggaccttccttatggtagcggagatgaaaataccatctcaatgggccccacatttacaaaggaagatggcaattttatttcaatggggcacacctttaacaagagagctggtgacttcatatcaatgggccacaattacaacaagggaaatgagagtatcttgtcagtaggtctgcctttcgacaaggaagatggcaattttatttcaatgggtcagtcatatgacaagggagatgccaatttaacttcattgagcccttcctatggtaaggggcagggaaatttcatttcctctgcatatggccaaccaaatgggaatctgatttcaatggtaccctcttttgataaggaagatgataatataccaatgcaaccatcctat

SEQ ID NO: 11919 - DNA, 628 bp, Gossypium hirsutum
  Clone ID: GOSHI-09MAY01-C85987_1
ccccgcgtccgaaagacaaaacagccttaatggtgggtggtaaggtaaggttagcaatgggtttgcaaaaacaccaaaacatggaactccacctaaacctccattgccgtctcctagctcagctaacaaaaccaattcttcccaaaaaactgttttttcacgttcctttggtgtttatttcccacgatcctcagctcaagtccagcctcgtccacctgatgttaccgaactccttcgactcgttgaagagttaagagaacgagagtccaggctcaaaaccgagctcctagaacacaagcttttaaaagaatcggtttccattgttccccttcttgaaaatgacattgctgttaaaaatgcagagctggaacgagctttgaaagagatggagaatttgaggaacgaaaatgaaaagttgagaacagaggtagaagaaatgaagggaaaggttgaagaagaaaggaaagagaaagagaggaaagtgagaggaatggagagcgagataagtgagttgaagaaaatggtgacgtcgcaccctgtttgtaacggtaaagctgaggtttttggtgaaaacgaggacttgctttcgtcttcgcagaggtttaatggggtacctggaaagtagtgc

SEQ ID NO: 11920 - DNA, 525 bp, Gossypium hirsutum
  Clone ID: LIB3582-038-P1-K1-F3
gtggcgtgaattccaggcttgaccaatgcgtccgtaatagaatacgacattgatggtaataatggcgaggctcgagcgagctttgaaagagatggagaatttgatgaacgaaaatgaaaagttgataacagatgtagaagaaatgaagggaaaggttgaagaagaaaggaaagagaaagagaggaaagtgagaggaatggagagcgagataagtgagttgaagaaaatggtgacgtcacaccctgtttgtaacggtaaagctgaggtttttggtgaaaacgaggacttgctttcgtcttctcagaggtttaatgggttactggaagttagtgcgaagtcgaatctggttaagaatttgaagagaagtaacagtaaatgttgggaaactgttgtttttagtgcttcgagtaatgaaaaagttgagagcttggagtttaaaagagaggtacttgaagctgatagacagagacactcgaggtgtaattcagacgaacttgctgagtcgactcttcttaacatcagatc

SEQ ID NO: 11921 - DNA, 681 bp, Gossypium hirsutum
  Clone ID: GOSHI-09MAY01-C85757_1
gtgctttggtatttttttgtcctatattcttaaacctaggtttcagcttgaaggaactattttcatttctgtgcactattattttcttcatttcaaagtaatggaagatcaagctccggaccctaatggtccgagccatggttcagagagaagtgaaccagtaaggtcaaggtggacaccaaaaccagaacaaatcctcatactagagtccatcttcaatagtggcatggttaaccctcctaaagatgaaactgtgagaataaggaagctgcttgagaaattcgggtctgttggtgatgctaatgtcttttactggttccaaaaccgacgttcgaggtctcgtcgccggcaacgacaacagctgttagctgccggtgcacgggaacaaaggaataaccaatcacaaatactcggtaacggcggtggcggcggtgcaattcagtatgaaaataatgaggtttccatggggtttgcaaattctcccccaaactttgcttctttcctaattggtccttcttcttcatatggtgttatgaatgatgatggaatgggaaatcttctctcattgtcctctcaaatggggtttcaaggaaatggagaaagctcaaacattacatcagttttatgcccttcagaaacttcaaatttgcagtatcaatctgggttcatcacagtgttcat

SEQ ID NO: 11922 - DNA, 860 bp, Gossypium hirsutum
  Clone ID: GOSHI-09MAY01-C85047_1
gctttcctgagacattagatcttacctcttacatgagtggagatggagatgataccaatgtatacaaactttatgcagttgttgtccatttggatatgttaaatgcatccttttttggtcattacatctgctatacccaagatttcaatggaaattggtatagaattgatgactgtaaggttatgagggttgaattggcagaggtcctttctcaggttgcatatatgcttttatatagcagggtttctgtacgcccctcatgtcttaaaacttcaggaactcaggggaatgatgaacagaaatcaatgaaagctttagttgaacattgtccaaaggagcaaattcagtgcctacctgaaaatgagtccatcacttctagtctttctccgtccttgtcattgaatggtagtttgcattcagaaattcctggacttaaagttgagtcatctacaggaatgaatactgatgctcaacctcaggatggtgatgtggttaggttaaagtccaactcctctctttctgaggaagtttccttctgtgaaaacaattcatgtttacagattgattcagaagttatccgaataaatggtgatgatatggataaggttaattctatagctgtgagaggaaatccagagaatatggataggattagtactctgccatgttcaactgatatgaaggggatttgcaggtctgacaaagatctatttgatgcaaccaactccgaagatatataaaagccaaaagtgcgatgacaattgatgcacagcaattttcatttgttccaagagaaataaatagctgtgagctagattcgcaagtatcaactagttatgtgatgaaagttcacaagacgt

SEQ ID NO: 11923 - DNA, 766 bp, Gossypium hirsutum
  Clone ID: GOSHI-09MAY01-C85067_1
caaattttatctccctcagtccctccctttctgggggttcttttttcttttttattggttcttgagaagattcaactgctgaagggaaggtagatcaaaggttggaataaattagtggcattcaagtgtttggttatctgctttattttcttttcaaggtgtggggttatgagaagatgggggaagatcaaaggcttcttttgtaaatcatggatcaacgggaaaaaacacagcagcagcagcaacagcctgtgatgggagttgtacctggtgctgggcagatgggctattctactgcttaccaaactgcttccatggtcgcttctggcactacaggagtagctgtccctatacaaactcagccttctgctactttctctagttctccacatcagcttgcctaccaacaagctcagcacttccaccaccaacagcagcagcaacaacagcagcagcttcaaatgttctgggctaaccaaatgcatgaaattgagcaaacaacagacttcaagaatcacagtctcccacttgctcggataaaaaagataatgaaagcagacgaagatgtgcggatgatatcagcagaggctcctgtaatttttgcgaaagcttgcgaaatgttcgtcttggaactgactttacgctcttggatccatacagaagagaacaaaaggaggacactacagaagaatgatatagcagccgctatttcgaggactgatgtctttgattcttggttgatattattccagggatgagttgaaag

SEQ ID NO: 11924 - DNA, 655 bp, Gossypium hirsutum
  Clone ID: GOSHI-09MAY01-C85017_1
ggttatgaaccacatgttttagcggtggatgataacctcattgatagaacactggtggagaaattactcaagaactcctcctgtaaagtaacaactgcagaaaatgggctgagggcattggaatttttgggtttgggaagtgacgagaggaattccttggagggcaccgtctcaaaggtaaatctagtaataacagattattgcatgcctggaatgacaggatatgagctgcttaagaaaattaaggagtctccggttctgaaggggggccctgttgtaatcatgtcggtctgaaaatattccaactcgaattaaccagtgcttagaagaaggtgctcaaatgttcatgctgaagcccttgaaacagtcggatgttaagcaattgaaacgccatttgatgaaatacagaagctgaaatttacccttttttgaggacaaactttagccattaccaaaaaatgtatgagaaacatttattctaataaaaaatattttttcagatgcaatttcttgttctgtttttaatccagagttcagctatcttcggaaagagaatattcattgtaccgagtaaagacttcgtttgtactaagttttatttaaatgtttatatatgatatagtttgtgtgaaaaaaaaaaatttttaataaattt

SEQ ID NO: 11925 - DNA, 926 bp, Gossypium hirsutum
  Clone ID: GOSHI-09MAY01-C86467_1
tgggtgcgagtcttctggccgacttttgggtcagccatctggatcaaaagaacatcattgcccaagttatgttgccctcaaacaaatatcctggactttctgaggatgatctctacgatgacttcaacatggatgaagttgatttgaatctcgaaagtacgaagaactctttgggatgacactcaatcattcggaagaacttcttgagaatggtggaattgctagcttatttgggacaaaagacatgcctgctgctgattcagactgtcaagtagcagcagctgctgagggctcatctgttggactggtcaatgcaatccagccagcatgcagcaatgcggcatctgccgattccatgatgagcaataaaaccgattcaatcctatattttactgccaggcggccccatcccggagagagtagtgcaggagattaccaagattgcggggcgtcgtcaatgcttctcatgggagaacctccttggtgtcctccatgtactgagacctccttcacgtcagcaactagaactgatgctgtcatgcgatacaaggaaaagaagaagacacgaatgtttgagaagcgagtgagatatgcttctcgcaaagcaagggctgatgtgaggaagcgcgtgaaaggacggtttgtcaaagccggtgatgcctatgattatgatccattgagtccaaccagaagcttttgagagtacaaatctttttaaaccttggttattattacctaaaaaccgaggcctgctttacgataaaacattgatggagccccaacattagttggcaagatccggctgaaccacgttggctgccagggttagcttttgagcaagttccacctgctcaaagtcttattggtacttatgaaaaggagaatgcttagttggagtcctctaaaaaggccagatttagggctca

SEQ ID NO: 11926 - DNA, 1239 bp, Gossypium hirsutum
  Clone ID: GOSHI-09MAY01-C86787_1
atatgaagtgtaactctatttctgatgttgttccttctggttgttcatcttcggattcaagcctcagcagaaggaaacacagtaaaaaagagaaatgcggatggagaaggtagttcttcaactaagggaaagaagttgagtgggtcatctttggagggacggagcaatgtttctagtcacagtgtctccatttctgattcaaggcgagctagaaattggtccccgaatagtgatagcagtgttgcttcttcaattaggactcgaagatcaagcagtagttatggtagagggagactcccccacccggtcgttcgcgcgtccgtaactttgaatgagccccctgtggtcatgccgcaagtgcctcaagctgctgtaaccatcgatttgaatgcacctgtttccacagaaactggctcaacttgtgctatttcttacggtcgagcaggtagaataagtgagagtttacacagtatcataccgtctattccttctgaagctggcatcaacctctcttcaatgaccggggatagtttccggcgctacaatatggatggcattgcagaggtgttattagctcttgagaggatcgaacaagatgaagagttgacgtatgagcaattacttgttctagagaccagcttgttccttaatggcctgaatttttacgaccaacatagagacatgagattggatatagacaatatgtcatacgaggaattactagctctagaagagaggatgggtaatgtgagcactgcactatccgaagaagcaatgtcaaaatgccttaaaaaaagcatctacgaggcaatatctatggaggatgttgcaaaggtcagctgtgaggttgaaaaggatgatgtgaaatgcagtatatgccaggaagagtatgttgttggagatgaagtagggaggttgctgtgtgatcattggcaccatgttgggtcccttccgcggtggctccaggtgaagaattggtgccctatttgcaaagcatcagcagaagcgatgcagtcttcttgttcacctcagaactgagttggaatttgaatagaagaaagcaacagactgagtttcattttgtacaaaattgatggcttttctcttcagcatttttaaattttaattttatggatcacatgtaaatatcaaatccaaacaaataaagcagatgcgcttggactgactctgcactggaaggaacactcaattcactggtaataaaaacaaatgtgaatc

SEQ ID NO: 11927 - DNA, 499 bp, Gossypium hirsutum
  Clone ID: GOSHI-09MAY01-C86757_1
cagaaatgtttccaggccggataagggcgaaggcaatgtcagtttgcttggctagtcattgggtggtaaatttctttgttggtctgttgttttgcggttactggaacagataggaccattagtcctgaatgcaattttcgccaccttctgtttgctggcagtaatttttgtgaagagaaacgtgttggaaactaaaggaaaatcacttcaagagatcgaaatgacccttcttccaccagagtagaggtttatcagtttcatctaattctctgaaccattgtgaacatagcatattaaggtgaatatgtacctaacagaactctggtttaaattagttagccaggtatagtttttggacccaaagccctttttttagttatggtaacttgtgttgtctagttgcctactttaggtttgcagaagaaattcggaaatgaaaagaatcactaaaacatattgttttttttcagagttgctaagcatttaagcagttccgttc

SEQ ID NO: 11928 - DNA, 537 bp, Gossypium hirsutum
  Clone ID: LIB3825-008-Q1-N6-F8
atataacataattttatatatgaaatgccaacctcatttttcaccagaaaatcaacatgaaactatggctggttataaaaattacaaaacttgctcatatacaatagtagtctattctattcacaaaatcgtctcacgaatctcatcttgcttttctccttcatactatatccattgtctcaccttgaggaactaactgcctcttatctgtttattaattcatttgcaatgccttgagcttcttttaatagctccaagctttttgcacagtcatcatccgttgttgcagacttcaatttcgaaagcaagtccctgacagcgctaacgaattcttctgaatcctctgtcctttcaccacggaagctagcagtagattttaatacaattgcttgtgtttctagttcttgatcactagatggtgtttcctgcaactgcttttctcctgattttttcctcgctctgctgctttcaatcatttccagtcttgtagccattatcattgctttattgatacacgatgaaggcagctgcgcgagc

SEQ ID NO: 11929 - DNA, 491 bp, Gossypium hirsutum
  Clone ID: LIB3827-002-Q1-N6-F5
ataatatattaatttaacaaagttcaatcaaatatatattatatatccttataaaagtaagagattataattaaaaatataaaaagttgttatcaaattaatatttacctgtttattaattcatttgcaatgccttgagcttcttttaatagctccaagctttttgcacagtcatcatccgttgttgcagacttcaatttcgaaagcaagtccctgacagcgctaacgaattcttctgaatcctctgtcctttcaccacggaagctagcagtagattttaatacaattgcttgtgtttctagttcttgatcactagatggtgtttcctgcaactgcttttctcctgattttttcctcgctctgctgctttcaatcatttccagtcttgtagccattatcattgctttattgatacacgatgaaggcagctgcgcgagcagagcaaccttgataccaaaactccttgcagaaacaccagggacaagcttata

SEQ ID NO: 11930 - DNA, 578 bp, Gossypium hirsutum
  Clone ID: GOSHI-09MAY01-C87447_1
agctgcaaattaccgagttccattacatgaggatatatatacagagactgatatttacaaattaaaagctaagacaaagataaacacaaaaccatatgcacatgaaaaagaaaagaaatatgtacaaaagaggttcctacgtccgtcgttcccctctctcggaaactccatgaaattgcagtgatagtttttttctccatcggtttaacgattcttcattcgaatcatccagtccttttattattgttaattaccaacttaatttttaccgatccccatatgatacgcgtatatagccgcacgcgaggtatatatatatatgatatgatatgatatgatgaaactttaaccgaagcttgataatatgtacaaaaagtttctttcatatgtcgattcttcaaaaacggaagtcgccaaatttcctctctcaacgatccaaagcactcatcacaatcctgcaaacatcaccaccaatttaccaaagataatttggttaaacagttacaaacaaattttatttttgcaatttcataagtagtaaaaaaagaagagggagaaccaatcgtaaacagtcggac

SEQ ID NO: 11931 - DNA, 603 bp, Gossypium hirsutum
  Clone ID: GOSHI-09MAY01-C87037_1
cccacgcgtccgaagaatcaaatttccttctctgtttctctctctttctactgctcagccatttctctttgagagagagaaaaaaaaagcttaacatttgaggcacaccgcagagaaagagagagagcatttgttcacttataaggaagaatggcagttcccaaggtttgtttcatggctgtttttgcagctcttgtttttgccacggctgttgatgcccagtcttctgctcccgcccctgctcccacaagcgacgggaactcaattgatttagggattgcgtacgtgttgatgctggtggcgttggtgctcacttacctcatccacgctgctgatttctgttttagcttttgattttgattttttaatttttgcatttgaacaatttatgtgaaacaatggttggttggtctcgatttgagtcctaaaagggttgttttttgtgagtttagatattaattgttgggattcgttgataatgtcaatttttttttaatctttggtgttagtctctttaatcttctatcatttgctaattctctttttgctgctgtatcttccatttttcgtctctcaaatcctaatggatttagcttattctgg

SEQ ID NO: 11932 - DNA, 539 bp, Gossypium hirsutum
  Clone ID: GOSHI-09MAY01-C87377_1
catcaatatagtggcattgcttcattgcctcctgtaatccaacttactggtttaccaggctgccatgctattgctgttatcaattgcattggacgaagcccttttgatttttgctcaagatacttttcaactgagagctccagattaacctatgcagaatctgtcaagcctattccagatatggactgggctatgcagaatgattattcggaacccgtaatgactgtaactcccccaacacgtcgtcccccaggtcggcctcccccaaagaaagttggattccaggaggcaatgaagcccccactccagtccagtaagggcaagggtcttggacccaacaaggccccttgcaaagggctcttgtaaattgttgtaacctgcccccattggggattcgtgttctgttctttaaagcttgccccagtgatactgaatacaccaatataggggccttgcttccaaaaaaaaaaaaaaaaaaaaaaaaaaaaaaaaaaaaaaaaaaaaaaaaaaaaaaaaaaaaaaaaaaaaaaaaagggcgg

SEQ ID NO: 11933 - DNA, 625 bp, Gossypium hirsutum
  unsure (1)..(625): unsure at all n locations
  Clone ID: LIB3543-058-Q6-K6-G6
agcgtccgccccgcgtccgcccagcgtccgcccagcgtccgggnatactttacctgtgctttggcctgaacaaattaaagaaactagnatttcggatcctgtagatgcccgcttctctgtttacagggngnaagcgtcgatccttcagtaatgataggactttgaatcctagcatatctggagctgaacaagattctgtttgctctaccaaaggaatacatcaggatacaccgggtttttcaaataggagggtcagaaaatttttctattgatagcagcgaagaaggaactgtcatttgcaagccagttacttcgaaagtttcaagtgccaacaaaactacaagacgttctctgacaaaagcttcggcaactcccaagagaaagacagagcctttgaagaaacgggactcgtttcatttttcacgcacacctgttaaaaaacctctccctgcaactcgaagagcttctttgccgctgccaacaagaaatacagttcgagaatctccttgtagatctaatgctggtattcttcacctcatacaatcaccagatgtttccgtcaatgctcctcgaattgataagatagctgaattcccgttagcctcatatgaagatgctttcttcc

SEQ ID NO: 11934 - DNA, 539 bp, Gossypium hirsutum
  Clone ID: LIB3585-051-P1-K1-A8
cccgccttttcctttctcagacttgtgttcaacacattcctcgagattgctaatagagtaacgtttttctagtttcaaaagctgcggttttactgtttatcttgtgccgacagtttcctggttcacgcactccgattaaaaaacctcttccagcaactcgaaggacatccttgccaccaccaacaagaactacagtacgagaatcagcttctatgtctaaagctggtattcttcacctcatacaatcaccggacgtttcagttaatgctcctcgaattgataagatagctgaattcccattagcctcgtatgaagatgcattcttccccatccacaaaacttcatcaatatctgcacagggctcctctggctcaccgcaatttgttgatcgttcaatcacaaaagacaaatgtactgttcaaacaagtgatcgagcatccatcaagccccgtttcactgatgcatggcagggaattcaacgcagcatgtttaaagctgatggagagaatgcgactgattcctccgatcagaatgccact

SEQ ID NO: 11935 - DNA, 885 bp, Gossypium hirsutum
  Clone ID: GOSHI-09MAY01-C80037_1
caacataatttccctctgtttctttcttctcatctcatttgcctgaaaatcaaacgagaataaaagaaaagaaaagcaggagaaaaaaaaatgtacagatacgagcgtgtgagcagcacgagtgtcagtaaggcggataaggtagatctagagtcaggagacactctgtacccgggactcagctacggtgagaaccagctccgatggggctttatccgaaaggtttacggcatcgttgcggcacagctagtgttaaccaccgtggtctccgcctttgtggtgttctcggctccggtcaacgagctcctccgtggaaactctggcatcttgctcttcctctgtttagtccctttcatcttgttgtggcccttgcacgtctatcaccaaaaacaccccgtaaatctgatcatcctcggcctcttcaccgtgtctctgagtctcacagttggtgtgagctgcgccaacactgacggaagaattgtgcttgaagcactaattttgacagcatgtgtggttgcatctcttactggctacactttctgggcatctaagaagggcaaggacttcagctttcttgggccaattttgttcaccagccttattattctcatcttaagtggtctaatccagatgttcttcccacttggctcaacgtcgactgctgtctatggcggcattagtgccttgattttctgtggatacatagtctatgacaccgacaacctgatcaagcgcttcacatacgatgattacatattggcctctgccactctctatttggacatcttgaacttgttcatttccattttgcgggtgctgagatcaggcgacaactagttgtatgatattctcaccaaggtcggatcagtaagaaaatggacatac

SEQ ID NO: 11936 - DNA, 1014 bp, Gossypium hirsutum
  Clone ID: GOSHI-09MAY01-C80277_1
accggaacgacccacgcgtgcgcccacgcgtacgaggggagtcatttatcgtagaatgtaatgaaagtgattgttttgtgaagaggacctatcaaggatgtccgcaaacgttctttaggtgttgtgcaatttgatacaactaagaaccggtatttagctgccggtgatgatttctctatcaaattctgggatatggacaatgttcaacccttgacaagtgttgatgctgatggaggccttccagcaagtccacgcattcgctttaacaaggatggctctctcttggctgtttccgccaatgataatgggattaagattttggcgaattcagatggtatgcgattattgcgcacgttggagaatctttcttatgatgcctcaagaacatcggaagccccaaagcctacaataaatccaatctcagctgctgctgccgcagcggttgctactagtgctggacttgcagacagaagtgcctctgtagttgctattgctggaatgaatggggatgccaggagcttgggggatgtgaaacccaaaataacagaagaatcgagtgataaatcaaagatttggaagctcaccgaaatcagtgaaccttctcagtgtcgatccttgaggcttcctgaaaacttgagggtgaccaagatatcaaggttaatcttcactaattccggtaatgctatcctggcgttggcatcaaatgctattcacttgctttggaaatggcagcgaagtgatcgtaattcaaatggcaaggcaactgccagtgtatcacctcagttgtggcaaccatcaagtggcattcttatgacaaatgatgttgctgatacaaatccagaagaggctgttccttgttttgctttatctaagaatgattcttatgtaatgtcagcatctggaggaaagatttccctgtttaatatgatgacatttaagacaatggcaactttcatgccaccgccacctgccgcgacttttcttgcattccacccacaagataataatattatt

SEQ ID NO: 11937 - DNA, 643 bp, Gossypium hirsutum
  unsure (1)..(643): unsure at all n locations
  Clone ID: LIB3543-055-Q1-K6-B8
naaaagacctatcaagcttccgcaacgttctttaggtgttgtgcaatttgatacaactaagaaccggtatttggctgctggtgacgatttctcaataaaattctgggatatggacaatgttcaacctttgaccagttatgatgccgaaggaggccttcctgcaagcccacggatccgctttaataaagatggctctctcctggctgtttcagccaatgataacggaattaagattttggccaattcagatggtatgcgattactgcgcactttggagaatctgtcttatgataactcaagaacaccggaagctcctaaaccaacaataaatccaatctcagctgcagcagcagctactagtgctgcacttgcagacagaagtgcatctgtggttgctatacctggaatgaatggggatgccaggagttttgcggatgtgaaacccagaataacagaagaatctagtgataaatcaaagatttggaagctcaccgaaatcagtgaatcttctcagtgtcgatccttgaggcttcctgaaaacttgagggtgaccaagatatcaaggttaatcttcacaaattccggtaatgctatcctggcgttagcatcaaatgctattcacttgctttggaaatggcagcga

SEQ ID NO: 11938 - DNA, 967 bp, Gossypium hirsutum
  Clone ID: GOSHI-09MAY01-C81907_1
cacaccctaatccccccccttaagacgacctcaaagaccaagccttagccaccatgcaaccaccacaaacggtggtcgacggatggtagattaccccattcaaactcgtttgaagccacgtttgaagttctagcacttccaaccgcaaggaatcaaaagaagggagtccccacctccgttggatttaggctttaacggagaagaaaactccgacagtgtcccaacggttcaggcggccgcggggcgtgcgttggcccttggcgtgaggcgtacggggctgtgttgtcgtggttgttggagactggggcgtacggaggcgatgtggttgctgcttgtgaaggctgcgacgcgaggacccttctgccctagggtttgccgaagtttggcttggctctcgggctatgggtcatgtaactggactaatgggtttcaatggggccgggcaaattggcctatttacagaagccaccagccttatctccccgaagtagcaatagagcagattgaaattgaagatcttatctctcttaagtagcagtggagcagattgaagttgaacatcttatctccttgaagttgcagtggagtagatcagatatgacgaatcttatcttcttgaagttgcagcgaagcagattgaagccaccggccttatctccctaaagttgcagcggagtagacggaagtcacaagtcttatctccctaagatgcagcgaagcagactatagatagtgaatcttatttcccctgaagttgtagtggaataggttaaagctacaagtcacaaatcttatacttctgaagttgcactagattagagcgaggctacttgaaaaagatgaaaagaagcgtcgagactcagcaggtccagaaaaaattagcccttttataatttttgctccattctcgttacacgacaatgaggaaagaggggcagctgtaatgagcctattttgcccagtaccc

SEQ ID NO: 11939 - DNA, 516 bp, Gossypium hirsutum
  Clone ID: GOSHI-09MAY01-C81927_1
tccacgcgtccggtgaaacccaacatcacaaatcttcttcatgtatatttctcttttggcaatgctgttttattaatctctatctttctatttcacttaaaaaaatttatatttattctgctttcttatatagctttagcttcagtggacattaatggagtacagtggtattcccttgtacagatgcagaaactgcaaaaatccacttgctcttatcgacgatcttctttctaaaaacttcatagcgaaatcacggaaagcatatatgttcgaacatgcaatgaacatcgtgttgggtcccaaatacgacaagcagttgataactggtcggttcagcattgctgatgtattctgcagtaagtgtggcgaagaactgggttggaaatatgcttctgccttatgatttgcaagaaccggtacaaggaacgcaagtttattcttccgaagaacttaagatgttccaagaatattaattaataaataatcaaatatatagtttgaataatgttataggta

SEQ ID NO: 11940 - DNA, 516 bp, Gossypium hirsutum
  Clone ID: LIB3585-005-P1-K1-F11
gtggtaatcccttgtacagatgtagaaactgcaaaaatccacttgctcttatcgacgagcgttggttctaaaaatttcatagtaatcaatctacttatacgacttatttttttaaaaataagaattttaagtttgattttggtttggtcttcttttcttctttcttttttttattatgacaggcgaaatcagggaaagcatatatgttccaacatgcaatgaacatcgtgttgggcccgaaatacgacaagcagttgataactggtcggttcagcattgctgatgtattctgcagtaagtgcggtgaagaactgggttggaaatatgttcagtcttatgatttgaagaacaggtacaaggaaggcaagtttattctcgaagaacttaagatgttccaagaatattaattaataaataatcaaatatatagtttgaataatgttatgggtatatagttggataaataattaactatataataatgaaatttgtatgatgtcagattttaaatttgca

SEQ ID NO: 11941 - DNA, 245 bp, Gossypium hirsutum
  Clone ID: uC-gsronu33B005b11b1
gcttaactgtgaaactcatcatcacaaatcttcttcatgtatatttctctttttccaatgttcttttattaatcgctttttttctatttctcttaaaagaattgtatatttattctgtgttcttatatagctttagcttcagtggacattaatggagtacagtggcgaaatcagggaaagcatatatgttccaacatgcaatgaacatcgtgttgggcccgaaatactacaagcagttgataact

SEQ ID NO: 11942 - DNA, 604 bp, Gossypium hirsutum
  Clone ID: GOSHI-09MAY01-C81627_1
ccggtcgaccccgcgtccttcccgcgtccgctcagccttgtttttttactgtgttaattacttgcttttgatcggaggttttctacgtaattcttttgaaatcatgaaagttgatcaaagaaaaagttggatttgattggattggattttagtgatgtatatgatgattttctttctggattatcagatgttgcatgcatgagtgtgctgctaacaacttagaaaaatgagaggaaactcgccgggttctgtcgacactagacatcggttatctgcatcaattgaggccatatacaaaaggcggttaaataggaataaagtgaaaggtactgggaagcctttccacatctcagtccaagatcgaaactcatgctgcaaataccctcttctcaaacttgtgttgattgccattgtttgtggcacttttgtatcgcttttgtactctccagaggcctatacaagtgaccatttatcggctgtgaaatcccgccgagattttatgaagaggtggatatggggaggggcagattctcgatatgtatcggatattgatatcgactgggatgatgttatgaaggttgtcgagatgatgggtgaacagcat

SEQ ID NO: 11943 - DNA, 497 bp, Gossypium hirsutum
  Clone ID: GOSHI-09MAY01-C81017_1
cccacgcgtccgcccacgcgtccgcccacgcgttcgtgaagaagttttatgtttacatgatgatggcctatttgttgcttagtgccatttggttctcacagtacgcggggtggtggaaagatatcctgctacttcaccactgtatctctgctgtcattggtctcggtttgtttgaaatgatattgtggtattccgactattctaatttgaacagtacaggaatgaggcctgttgtaattacaacttgggttgtgacagttggagcaataagaaaaacactgtctcgacttctcactctttctgcttcgatgggttatggcgttgcacgtccaactttaggtggccttacttcaaaggtgcttcttcttggagctacttattttctggccgctgaattgctggacattactgagtatgtagggaccatcattgacatatcaggaagagcaagactctttctagtccttcctgatgcattcctggatgcttttatgata

SEQ ID NO: 11944 - DNA, 559 bp, Gossypium hirsutum
  Clone ID: GOSHI-09MAY01-C82817_1
cccacgcgtccgcccactcgtccgcccacgcgtccgcccacgcgtccgcaagtcccgtggatgccgatttacctctttcagctgatgttgcagttataatgtatactagtggaagtaccggattgcctaagggtgtgatgatgacgcatggcaatgtactagctacggtttctgcagttatgacaatcgttcctggacttgggagtaaggatgtttatcttgcttatctgccgcttgctcatattcttgaattagcggctgagaatttaattcctgctgttggaggtatcataggatatggaacccctttgactctcaccgatacatccaacaagataggaaggggaacaaagggggatgccactgttttaagtcctactgtgatggcagctgtcccagcaattcttgatcgtgttcgtgatggagtgcgaaagaaggtagacgcatagggtggactagccagaaattgtttgactggcttattccgtagatatctgcaatcatggtagatggtttgtgcctgtgcctggaaagttctatggactttctggctttaaaa

SEQ ID NO: 11945 - DNA, 655 bp, Gossypium hirsutum
  unsure (1)..(655): unsure at all n locations
  Clone ID: LIB3582-061-P1-K1-F7
cccagcgtccgccctcgcgtcctgaaaaacccaatcctctctccctctctcagtctgtcggctcagaagccgacgaggtgcaggccgagcgccgccgtggccccgtcgctccggccaccgtacacggtggccagaaatcgcctcaggtataaattttttaattttttttcttgttttatatatttatttaatgatgcatattgttttaataaacataaataatatgtgctaataatattcaaagaaatagtaaaagaaagggcanaaaaaaaagtagatagacctttagatcggtcttcgaaattctgtgctgcaagttcgtgtttgtgttacaaagcctttttgattgttaatctccttgatatatttcgaatagaatgaaaattaagagcctaaaaatccaacccttacacccgatccccattgtggcttttatagcctattttttcagatcttcttctctgcgcattgctctttcccttttaatgctgcaggtacaagtgggcggtggcacagtggcggtgcttgcaggagatgtgactggggcggtgggatgggaccgatggcagaggcagcagcagtttggggggctagggtttattattttttgtgttaaggtttttttgggctgtaattgttttgggttgggctaggt

SEQ ID NO: 11946 - DNA, 385 bp, Gossypium hirsutum
  unsure (1)..(385): unsure at all n locations
  Clone ID: uC-gsronu33B179f10b1
tctttgtctgtcggctcagaagccgacgaggtgcaggccgagcgccgccgtggccccgtcgctccggccaccgtacacggtggccagaaatcgcctcaggtacaagtgggcggtggcacagtggcggtgcttgcaggagatgtgactggggcggtgggatgggaccgatggcagaggcagcagcagtttggggggctagggtttattattttttgtgttaaggtttttttgggctgtaattgttttgggttgggctaggttatttgtttagtttgggtttggnggattttgggcccaaaattgggcttgtacacataccgaattgaataacttggtgacaggatgaaaattacattntatatatgaaataactaacttctntatt

SEQ ID NO: 11947 - DNA, 830 bp, Gossypium hirsutum
  Clone ID: GOSHI-09MAY01-C82507_1
cccacgcgtccggtccaaccacgcaccaggttcaggccccgtcactttacggcgaacctttgagagtcctcactattgttctactctccgtctagcagaacactccgccgccgaggtcgcccttcaatccctctctagtcgtggaccctctcactctctagccgctagaatcctagacgagacaggggtttataagaacctcttacaggaaattgcacagagagttggagctccattgcctcagtatacaacatttagatcaggccttgggcatctacccgtttttacgggaacagttgaattggctggaatcacattcactggggaatctgctaagaacaagaaacaagcggaaaggccggctgccatggctgcttggacttctctgaaacaattggcgaaagaaactgcaagtttttcatcagagccggagaacaatgatgagcttgaacagatcacaatagctcgagcattgttgaattaccgcataaaggaaaaaatggctatggcgaactcctccactgccccaataccatttacaaagaagtttccgattcagaatccaagaccaacaagtccacagcctcctgctaccacctcaaaaatccttccgtttatttgccggaaggtggttcctcgaaacagatctatgtcagcaacagcaagtgacaagcccatactgccgtcgttgcaagcacctgaaagccgtgggccttgtatgcagaaattccctgtggctggggcagctccatatgttcccatccaacagttcaggacaccttgccatggcattgctcctccagtgacaataagaaccactgtgcctgttt

SEQ ID NO: 11948 - DNA, 635 bp, Gossypium hirsutum
  Clone ID: GOSHI-09MAY01-C82497_1
ccagcgtccgcccacgcgtccgtttctaccataaatgacgatatttgggatggatttggtttttacttcgatgtaagccatttcagacaagggaagaggagtttccatttgatcatggcggttgctgagaacgctggggcgaaaattgggtcggcgggacagaatttggaaagcactgtagcgtcggcaaacgctccagacaaatcaaaacccagaactgattccgtgactgatgctaaagaagccaactttcaacagttaaagccagtagcagctaccatcaacgatggcgatagcaatattaagatgcaaaatggttttaataagaaccagcagcagatgctgacaaagacggctgggtgtaatgagtttagcaatatggaaaatgggggtgatggtaaaattttcaacaatcatatgaataatttggtcgagattttgtccaagcttaaccctctggctgaggaatttgtgcctccttcccttgctaatcatcatcataatcttaatgataaccaaaatcaaaataaagggtttttgcaaaatggctttggatatagtactgacagttttgtagtatacactaattctggcaacaccaatggacattctaattgaagaaagagtataacttt

SEQ ID NO: 11949 - DNA, 737 bp, Gossypium hirsutum
  Clone ID: GOSHI-09MAY01-C82737_1
cagttattttagcctaatctctgcttctgttttttctcatcaaaaatggcggcagaagctgtgtttcgaagaagcccttctgcttcaactccatggaaatctccttcttcaacatataaaaggtctaaaactaatcaccttttacacttcactattcgagcttcttctcattccattgaggaggggaacaaagcttacaagcaacttgaagaagattgaagatgtcattctccgagctgagatgttagcaccgactgccttggaacttgaagaagcaaggagaataaagcaagaagagatgatacgcgattatgatctatggaacgccccggttaaatccagtgaaattctcgttgaagttggccgatagtgtcaaagtggttgatgctctgaaagatcttaaatacaaggctgaagaagccaagttgattgcacaggtggctgagacggatgccgtagattacagccttggtgagccagcatatgatgcatctttggctttagtgatttgttagataaatataggtatctaggctcctttaggggcatatgaaatggagggggcatgtgtcattataaagccactctgaaggcaacaattccagttggcttgacaactttaagctgttttaaatggcgaaaaacaaggttttggtattaattgagcttttctacgtggtagtacatgtcatgatccctcgtctttagaaaaacgtctcatgaagttaaacattgtg

SEQ ID NO: 11950 - DNA, 582 bp, Gossypium hirsutum
  Clone ID: GOSHI-09MAY01-C82327_1
cggaacggcattcccggtgtcgcccagcgttcgtttaagtctggtagcgctttaacagtgacctattttatcagggtgccagtaaacgacaatcctcgccttaataattatcatccctccctcccacagttttacaacactatatccaatatccagcggctgatataccccatgttttctttaattttccctctcttacaaaaccagctattcttacttgtgtatattagtatacatatatgcagggtagaaaacatttgctgatatattaatcagaatcatttgctgcgccatggagaagatgggggagagatggatcggaaagctgggtcggcagtgttacgcggtgttgtgtttgagtgtcataattgtttccgtcacaattgctcactttgtttatccgcagccagaggatgctcgtgaatgcaccaagcgtcgcctccgccccttgcatggacgtcctttctcttaattactctaaagctttgtgtttcttgttaataacaactacttgtacatgcttgcactgtttctcgggttctgtttctttatgctagctttcacaggtagtaattaactact

SEQ ID NO: 11951 - DNA, 639 bp, Gossypium hirsutum
  Clone ID: GOSHI-09MAY01-C82257_1
atcgaagatgttactggctagtgtggaccttgggtgtagtgatgagatattgacaattattgcaatgatccaaactggtaacatcttctacaggccaagggaaaagcaagctcaagctgatcagaagagggccaagtttttccagcctgagggagaccatttgactctacttgctgtgtatgaggcttggaaagctaagaacttttctgggccttggtgttttgaaaattttgttcagtctcgatctttacggagggcacaagatgttagaaaacagcttctaagcatcatggataagtacaaactggacgtagtgagtgcaggaaagaactttatgaagatcaggaaagctatcacagcagggttcttcttccatgctgcaaggaaggacccacagaaggatataaaacagtggtggagaaccagcctgtttatattcacccaagtagcgcccttttccagagacaaccggactgggtgatctaccatgaactggtaatgactacaaaggagtacatgcgagaggtgacagtgatagatcccacatggctggttgaacttgcgcctagattcttccaacaggccgatccccgccagatgagcaagccccagcctccggaacggattgagcctctttaa

SEQ ID NO: 11952 - DNA, 445 bp, Gossypium hirsutum
  Clone ID: LIB3493-033-P1-M1-C1
ccctggaaaccgttcaaacgaacctaactgggagcatggggaacagcacaacacgtaagctggcttacgctgctcacaacagggccaattgaaaatcagcgctgaccgagacgcattttactctacttgctgcgtatgacgctagtaaagctaaaaactgaactggctcttggtaatgtgacaatgttggtcaggctagatctttacagaggtcacaagattttagaaaacaattgtttatcatgactgatcactacagactgaacgtagtgagtgcaggaaagaactttattaatatcactaaagctatcacaagagggttcttcttccatgctgcaaggaaagacccacaggacggatatataacagtggtggagaaccagcctgtttatattcacccaactggcgccctttttcagagacaaccggactgggtgatctacca

SEQ ID NO: 11953 - DNA, 815 bp, Gossypium hirsutum
  Clone ID: GOSHI-09MAY01-C83307_1
ctttactaagcattactcttgcatttgcttggcaaaaggctttgcgggaatggcctcaaatcatggtttacttcatcctgtggtgcaccttcttcatgtctttatcagctggcatccttctgatttgcttccaaaagcccgccacagatggtgttggggtttgctttattgcctttgcaattggtaatggtttgtatgcttgttgggtctcccagcgagtcggtttttgttgcaaagtgttgctgaaatcactggaaccggtcgacaaattccgtgatttgaaccaaccagcgtattggatgcttggggctggattcttgtggatgtccctatggatcttggctgtagttggggccttgaatttctactacccagcattggttataattgcattactcttaagcttgtgttggacaactgaagtgatgaggaatgtagttaatttaactgttagcagagtgattgctttgtattatctaagaggaatgcagtctaacactcagttttgcttccaaagagccttgacccggaatctcggaagtgcttgtcttggttccttattcgtgccagcaatcgaagccatgagaattattgccagaggcttgaatttgcttgaaggagaagatgaattcatgttctcttgtgctcattgctgtctcaacgttatgcaatccatcttcagatatggaaatggatgggcatatgtacagatagctgcctatggaaaaggtttcgttagggcatcacaagatacttggcacttttgagagggaagaaatggaacccattgtagattctgacatgatgagcgcgat

SEQ ID NO: 11954 - DNA, 906 bp, Gossypium hirsutum
  Clone ID: GOSHI-09MAY01-C83327_1
ggcatgcccatgtgttagtggtcacataccctgcacaaggccacatcaaccctctcatccagtttgctaaacgcttaacctccaaaggagtgaaaaccaccgtagcgaccaccctttacaccgtcaagtccatcaatgtaagcagtacgatagctatcgagccgatctccgatggttttgatgaaggagggttcaaccaagctccaactctacaagcttacttggaatccttcaaagctgctgggtctaaaacattgacagagctgattatgaagcttaacaactcggggacaccagtctgttgcgttgcgtacgatttgatgctgccttgggctcttgatgtagctaaagatttcggtatttctgcagctatgatgttgacgaactcggcttcggtgtgctccttgtattggcatatcaatcaaggtggcttgaatttgcttgtgaaacaggaaaccttagcagccccgccaatgcctgggttgccttccctcgacgtatctgatttgccaagttttcttgctcagccgaccagtcaatctgcttatttagcactgatcttggatatttttggcatttgtgaggaaaatgattgggttttctgtaactctttcgaagagctcgaaagtgagctggtcgaggctctgatggcaaaatggcccgtcgtaatgattggtcccatggtgccatcattctacttagattctcgaattgaaggagatacaagctatgggctagcctgtggaactatgataatgatcagtgtctcaaatggctggactcaatgccatttaaatcggtgtatacgtatcatttggaagcatggcaagcatctcaatgaacaatttcaggaaatagcatggggcttgaaagcaagtaatatgccctttctatgggttgcaaagg

SEQ ID NO: 11955 - DNA, 831 bp, Gossypium hirsutum
  Clone ID: GOSHI-09MAY01-C83257_1
cccacgcgttcgcggacgcgtgggattttggggaagatgagatccataggtcctctgattcagtctccacagggtgatttacctatattggtcaaactggttacagaaccattggcgtggcatggccttgtaattcaggcttgtgtccgaacgttcctgccatcgggaaagacgaagaagaagagcggatctacaaatcagtcgatctcattgttatctaatgcagttagggatgctatacagggtttatgcagcgtattagaagaggttgcaaaatggtcacacgatcaaattaagatcccagcggacagtacgatagaccttttggtgtcgtctcttaagagatatggtggagctggaaaggttttcaatatgttggaaactgtggcatcttccccaaatgagacacagcttggggatcgaagatcccaggctttaaggtcttggagtccagttgatgtgggaagaaaaataggaaccggacagtgtagggtactgtctgaattttggcgtatttgtgaatcaaaaataaagtcactgaaaacattgaagcagcagatagctcaggtgtgaagagggagggataaagccaacttttttctttaaattttttctttttaaaatccttgggattgttaggagagatcctactggaggagtagaggttgaaggaattgaggtttcgacatttgattcctgtttgcctgtctgttgttcttgaattattattattttttattttcttttcatcagcaggttttgatggtcctatgaatgttagtttgtgattgacgtataatattaaatataagttgcttttccacattttgc

SEQ ID NO: 11956 - DNA, 333 bp, Gossypium hirsutum
  Clone ID: GOSHI-09MAY01-C58906_1
ttctgatgttgttgtccctaataatactctcttgaagattgttgatcctggcaccagattgatagatgcactcgagatgatgaagcagggtgtgagacgacttcttgttccaaagagcaaggtatggaaaggcatgagcaagcgattctcaattctttataatgggaaatggctcaagaacattgataacggtagcggcaacaacctcattgctaatgccaaccgcccttcctcttcatctgctgccgcttacatgcgtgacaagttttgctgtctctcaagagaagacatgatcattctatcggtgcttgggcactactctttcctctctta

SEQ ID NO: 11957 - DNA, 728 bp, Gossypium hirsutum
  Clone ID: GOSHI-09MAY01-C58876_1
tagacttaaaatatgatttctttgctcctaaaatatatctgaggggtcatttttagttaaatactagttaacttaggggcaccaaggaaattttaggttacaatgtttggctagatgagtagaaaatgctaataattgccttctattaagcgtataaagcctagtttaaacaaactattatcagatctgaacttgtaagatatggcagcgctttttggaagtctttgatctttctttaaaatatttgcaactggcaaggtatgcgaccctttgcatccgtgagacccagggttgtctttttattgctacaaccgtgtttcagttggacacatgactgatctgcaagagtggcctggtgcgggatgcatggttgctgccgtttgtgggtcaacggaacaagagcctattggtagttggaaaaccttcaaccttcatgatggacttttactgcagaaataatggtaagtacatctaaatgtgcatggtgggtgatagactagatctgacatttatttggacaaaatgctgttgcaaacccctgctgtctattggagtaacacacagtcactctgatacccctaacgatcaaacagttatacacccacaggttctgttttctagtattggagaagacctgggtatttcacattactcttatctgccgggatgtgtacatacaaaaattttccaattctgcccgaagtgaatatctttaaaaggggcgggtt

SEQ ID NO: 11958 - DNA, 354 bp, Gossypium hirsutum
  Clone ID: GOSHI-09MAY01-C58816_1
ctctttcgtccgctgagggtgcactagtttgcggtgctgataaattcagtagtactgaagatggcttcaaggaggaagaagcattcgactcaaatgagccaatgaacgaaaacttccgagatgaggatgacgagaatggcagtgattttgccaaaagggcatgaactaaatctgtctgtagtagtaaaattgttttggtttgtagttatatcgtcatcgcttttgaaacaaatttttatttgatcaaatgacgtgagctatggtctttgtaaaacttctaatactttctgatgtctccttccatggagaactgaaaattccttatgggaaaaaaataattttacgttcagttcc

SEQ ID NO: 11959 - DNA, 578 bp, Gossypium hirsutum
  Clone ID: GOSHI-09MAY01-C58546_1
ctctctttccctttttgcagtttccattgtttctgtggctcaacaatcaaacatgaattgcgaaaggaaaagcaacattggggcttggtgagatatcaattttatccaacaccttgtaccacaactttcaaacttaactttttcttttcttttctttttttcctttttgtttttctttttatggctgccactacttctctatctctactgccttcatctcttggttttccaaatgaacgcccttccagcacttcacaatcctcttcatattcttgttcttgttctgttttcttcaatgctgggacccgtctcaggtcccacgacagcttcgcttgtgtgacttttccttcttcttcctctacatgttattggagattcaataatagggctggtactcaccggtttgggaccacggtggtggctgcttctggggactattatgctactcttggcgtacccaaatcagcctccggtaaagaaattaaggccgcttatcgtagattggctcgtcagtatcatcctgatgtcaataaggagccaggagcaactgaaaagtttaggagaacagtgctgcatat

SEQ ID NO: 11960 - DNA, 835 bp, Gossypium hirsutum
  Clone ID: GOSHI-09MAY01-C58576_1
tgcaaaactggaccactaggctgaggaggacccagcgtttcaactacgaagataatgggaacatatggatatgcctgcacctggaatatgttagtgactggtcatctgactgcgaggagtgatgtataccagcttcggagttgttcttttggtagcttttgtacgggaagaaaaatctgttgtatgaggacggggacgcaagcaaggagcagaatttggtggattggggctcgcccaaaactgaatgataagagaaaattacttcaaataattgacccaagaattggagaaccagtattcagcaaggggctgcccagaaggcatgcagcttggcatactattgtttgagccagaatccaaaagcaaggccgttaatgagtgatgttgttgaaacgctggaacctctacaatgcactggtggtagtgcagatgaagtctcctcgtctttgaactcaaaagtaacaggaggtagtgctggtccgtttgcaatgggtggagttccagattatcgagtgcgacacagattttcaaacaatgttggtccaggtgccatttgtaggtcgcctaatccaaattgttccccaggtggccctgcagcatgcagagttcgatgaaaatgtcacctacttgtatacttgtttggtgtggcttttgtagcatgaccccctgtcaaaagtgacaaatttgcttgttaaaacaagggtggttttacttaattgtacctaatgtgtaagttgtctgtagtctgtgttgattatgtgttgattatgctattcaactgaagcttgtatcacttttttttgttttatcctttgccactggaatttcctgtcgg

SEQ ID NO: 11961 - DNA, 727 bp, Gossypium hirsutum
  Clone ID: GOSHI-09MAY01-C58696_1
atgggaatcagtcttgatactttacggccagagccctgtgttgagggctactcaactcctgggggttattcttgcaaagcagtccatcctattgcactagctaaagtgatgagcattgcaaaaatgatgaagtcagagtttaatgacaaggattactcactttcgggcattgggggtgttgagacagggggtgatgctgctgagtttattcttcttggtgcaaatactgtccagggctgtactggtgttatgatgcatggctatggccttgtgaagaaactctgtgaagagctcaaggattttatgaagaagcacaatttcaaatcaatagaagatttcagaggggtttcccttcagtattttacgactcatacggatttagtgcggaggcagcaagaagcaatacgagagaggaaagctattaagaaaggtttgcagtccgacaaggaatggactggagatggcttcgtgaaagagactgagagcatggtttccaattaattgcagtaccaaagtgagccttctccagcgaatagtgaaaaacagatggtttttagttatgtttggttgcattgtagaaatggttaatcatctgaatgattgagggtgccgatgtaaaaactaaagcttgaggttattccagagacaatttgttaataaaggaagtgcatatgtttcatgtagcaaaaaaaaaaaaaaaaagaaaacaaaaaaaaaaaaaaaaaaa

SEQ ID NO: 11962 - DNA, 677 bp, Gossypium hirsutum
  Clone ID: GOSHI-09MAY01-C58116_1
tattttttagggtttgctttataaaacccatttgcaaccctaccgttggttgatgaaagcggcaaagtcactgtgttaaagagaaacggcgcctccgcccaacaacaatggttcacgtctccttttaccgcaactatgggaagacatttaagaagcctcgtcgtccttatgaaaaggaacgattggatgctgagttgaggctggtgggagagtacgggctgcgatgcaagagggaactctggagagttcagtatgctttaagccgaatcagaaatgctgctagggatctattgaccctcgatgagaagaacccgcgtcggatctttgagggtgaagctcttcttcgcaggatgaatcgatacggactcttggatgagagccagaacaagcttgattatgtattggcgttgacggtggagaacttcctcgaacgtcgtcttcaaactcttgtgttcaagactggtatggctaaatctatccaccatgcccgagttctcatcaggcagaggcatatcagggttggaaggcaggtagtcaacattccatcattcatggtgagggttgattcacaaaagcacattgatttctcgctgactagtccgtttggcggtggacgtcccggaagagtgaagagaaagaaccaaagggcagctgccaaaaaggctgctggtggaaat

SEQ ID NO: 11963 - DNA, 378 bp, Gossypium hirsutum
  Clone ID: GOSHI-09MAY01-C58006_1
gtgagcttttgttgaaaaggcaagggattcttccaatagtgaagaaaactgtaagctttgcggaagatgggaatgtttataggattattaccaatggagatgaggttaattcaagtggagatggtagtttaaccgatgagagtgtttcgagtgatgaacgtggagatacaatggagaatcttgtcaaagaaagtgaagatttagttgagaatttggaggaggcaatgaacttgaacaaacaggcaagaagtaacagtgttgaggactatcagattcaaggtggtgattttgtgttttctgctccattgcctgtgaagatggaatctaaagctgatctaatgaagaaaaggaatggtgcgctcaaaattgtttcatcat

SEQ ID NO: 11964 - DNA, 1004 bp, Gossypium hirsutum
  Clone ID: GOSHI-09MAY01-C58026_1
gccaccagcaaaatttagaactatttgttcaagtattgacaagctagacaaacaatcctttgaacaggttaaaaaggaaatggtggaagagaagggattatctgttgagacagctgataaaattggcacttttgtgaagataagaggacctcctctggaattacggtcacgcttccgcccacgcgctcggggtagtgagcttcttaaacacaatgcttccaaagaagcattaggtgacttgtccattttatttgatgctttgtataaatcaaggtgcatagacaaagtggttttcgatttgagtctcgccagaggtcttgattattatactggtgtcatatttgaagctgctttcaaaggaggtgtgcaggttggttcaattggtgctggtgggcgttatgacaatctgatcgggaattttggcacaaagcaggttccggccgttggcatgagtcttggaatcgaacgagtgttgaccataatggaagagaaagcacagaaccaggcagtccgagccacggaaacccaagttttggttgctatcctgggggataaactcgctgtagctgcagaattggtcagtgagctttgggacgtaggcggcggggcagagtacatggttcataaaaaggtgatgaagcacatcgaatacgccatagactcaaagatcccttggatggtgatcgtgggcgagcgagagctgaatgaagggatcgtaaaaattgaaaaccatcgaaactaccaccgaggaagcgattcctagaagtaatcttgttggtgaactacagcaacgattgaagttggacccatgaaaaaggggtctcttttccctctcatcataatgctcttctattctcaacaaaggtagagattctcaaatatttgtctgaacatacaaatttacttagtaattgttgtactgcaaatagatccctgtactcatgcttttgatttttttttatttaaccataattatatttgaggttttatacattttattttac

SEQ ID NO: 11965 - DNA, 403 bp, Gossypium hirsutum
  unsure (1)..(403): unsure at all n locations
  Clone ID: LIB3149-059-Q1-K1-G6
gagctttgggacgtanacatcaaagcagatttcattgttcataaaaaggtgatgaagcacgtcgaggatgccatagactcaaagatcccttggatggtgatcgtgggcgagcgagagctgaatgaagggatcgtaaaattgaaaaacatcgaaaccaccaacgaggaagtgattcctagaagtaatcttgttggtgaactacagcaacgattgaagttgaacccatgaaaaaggggtcaatgctcttctattctcaacaaaggtagagattctcaaatatttttgtctgaacatacaaatttactttagtaattgntgtattgcaaataaatccatgtactcatgcttttgatttttttttatttacccataattatatttaaggggtttatacattttattt

SEQ ID NO: 11966 - DNA, 529 bp, Gossypium hirsutum
  Clone ID: GOSHI-09MAY01-C58266_1
gaaaagttcaacatgtggaagataaggtcaaggatttgcttattagaatacaaaagggagaggcactcggcaaagatgacattaattcacttaaagctaggaagcttattgttgcacagacatggaaaggttattcagtgaaaaaagggccgaactatgcccctacaagaaagaaagttgctactgatctgactcgagagaatctacagaggggtgactggaaggagctagagttcaaagagtataacttcaatgctaaaggaccacctgctgaagctggccatcttcatccattactcaaggtgaaacaacaattgaagaacatatttcttcagctgggttttgaggagatgccaacaaacaattttgtcgaaagcagcttctggaactttgatgcattgttccagccacaacaacaccctgcacgtgattctcatgatacattctttctggaagttccatctactacaagggaactgcctgaagattatgttaagttggtgaagcgtgttcatgaatctggtggtta

SEQ ID NO: 11967 - DNA, 588 bp, Gossypium hirsutum
  Clone ID: GOSHI-09MAY01-C58236_1
cttaagcaaagaacttatgtatcagcaggttcttcgtcggtttgctcattttaatgctatacaactaagtgagccagctcctttgcaagagttaatcatgttggccctgaaggaggaggacttggacctagaaagcaatgaaaatgatgagctcaaaaagaagattgcagaaatgaatacacagctgcttaagcaaaagtctgaaatgttggaggagtatttctgcatttttattgattcagatgggaatttatctagactgccaattctacttgaccagtacactccagacatggatcgtgttcctgaatttgtgctatgtttgggcaatgatgttgagtgggaagaagaaaaaaattgtttccaatcacttgcagctgctcttgggaatttttatgctatgcatccgcctatgttgccaaatccatcaggcaaaggattggaattttacagaaaaaggaaacatgggaagcatactcaagatggaggaaattcttgtcatgtggatggtacagcagaagaggatgaattcgaacatgaactactgtcagaggctgagactgcatgggcccagcgtgaatggtcaat

SEQ ID NO: 11968 - DNA, 647 bp, Gossypium hirsutum
  Clone ID: GOSHI-09MAY01-C59906_1
atgggcagttggacgttggagtctgaaggacaaaagcaacgtattggcttgagctggggaggggacagccgttggtatagaggcagaaaccgaagctgggagggaacggattcatcccgcacttgtatttagggtaggagaggagacagcccagggtgggcagagggtacgcctgcttggatgtgggcctgtggcatgggagtagcagaggaatagaagcctcaatggccaccttcccacccccttacttcctcctactgcccctccctgccctactcatgctcctttccctgccatcctacccttgggactccctgagcctcccttgggctgtcagatcacccccaggttcagtgtgttagaacatacaaggcactgcagccagatgagctgaccttggagaagactgacatcctggcagtgaggacctggaccagtgacggctggctggaaggggtccgcctggcagatggtgagaaggggtgggtgccccaggcctacgtggaagagatcagcagcctcagcgcccgcctccgaaacctccgggagaataagcgagtcacgagtgccaccagcaaactgggggaggcccctgtgtgaggggcagccgtggcctgggacagcacctccatgcctggttcccggat

SEQ ID NO: 11969 - DNA, 577 bp, Gossypium hirsutum
  Clone ID: GOSHI-09MAY01-C59596_1
gcgcccacgcgtccgggagaactaaggccatatcaattctctttcggcaaacacagaagaattttggttagatcaacgatgcaacaaggagattacagctcctattatcaatatccttacctttcaaaccccaactccaaccccaaccctaaccctaaccccaaccccaatccagtaccctccgaatttcaccaagcaccttacgcatctgcaccaccttttagctccggttatgcctcctctgattactccgtttatcccccaaattaccctccgtattcccaaaatcttgatgctgcccctcccactgcttccgcttatactcctccgccctcagccacaaccactccaccggctccggccatagctccacaatcgtctttcaatcaacaacccatggcgccaccctcggcgaccgcggctccttcttttccgccatatgattcacatgttccctatcagcctccggcctcccagcctccttatttccagcagtatgatcagcatcagacggcttccagctacggtcctgctcctccaaaccccaccctaaccccacgcctaatccgtcttccta

SEQ ID NO: 11970 - DNA, 617 bp, Gossypium hirsutum
  Clone ID: GOSHI-09MAY01-C59586_1
cggaaaataaatcaggtagaaaaacggggaaaggacaaaaaggaaaaaccgttctagggttgccttgaatctctctctttccagatattagataattagaaatagatttgtagggcttttcaatcgattccttctttattttcttacaattagggttttcgaaagaggtaagttgatttaactgctgggtctcattttcgtttcttatctttcttgggacagtggtgtcggagtttgggttttaatcgacccaacccttaaatcggtgcttttgggaatcggacttttaacatttttaccgagaatcggagctggaaaaggatcatttttttagcgactctttcttaacaaatatattgtatttttttacgatctgtaaatatgcgaggagtgcacaaatcaaaaagggttacttgggcatcaaacgttaacctttgtcaggtaaggttgtttctatcaaaagaatcaccttcacaatttggggtgggtggtcaaatcacctccaacaaaaacatccttggtatcacatataaatggggctactggggatgactttctgcctccgggattcaaggagctcattctacaagtcttccgcagattaatttgctaaaaat

SEQ ID NO: 11971 - DNA, 690 bp, Gossypium hirsutum
  Clone ID: GOSHI-09MAY01-C59456_1
aattgtttcaatttgcatcttccaatcactttgaaagcagttttttgaggtaaaaatcccccgataagaaggggaaaagaaacacttagctgctccggaaatggcggacgcgttttgttcggactgcaagcggaacacagaggtcgttttcgaccattccgccggcgacaccgtctgttcggagtgcggcttggtcttagagtcgcattctatcgacgagacatcggagtggagaaccttcgccaacgagtccggcgataatgatcccgtccgtgtcggcggtcccaccaatccgcttttggcggatggcggtttatccaccgttatcgctaagcctaatggtgcttccggggagttcctctcgtcctcgctgggtcggtggcagaatcgcgggtcgaatccggatcgggggttgattctcgcttttaagactattgctacaatgtctgataggttgggtcttgtcgcgaccattaaggatcgagccaatgagatatataagaaggtggaagaccagaagtctagtagaggaagaaatcaggatgcattgttggctgcttgcctttacattgcttgtcgacaagaggacaagccacgcactgtcaaggaaatttgctctgttgccaatggagccacaaagaaagaaattggccgagcaaaagaatacatagtgaaacaactgggattgga

SEQ ID NO: 11972 - DNA, 405 bp, Gossypium hirsutum
  Clone ID: GOSHI-09MAY01-C59466_1
atggcggcggtagcggctgtgttgctcgtttctctgagccatccagtgccatcctcgtcgctgcagcgacacacgcgctcgccgccgccatgactgagcagatgacccttcgtggcaccctcaagggccacaacggctgggtaacccagatcgctactaccccgcagttcccggacatgatcctgtccgcctctcgagataagaccatcatcatgtggaaactgaccagggatgagaccaactatggaattccacagcgtgctctgcggggtcactcccactttgttagtgatgtggttatctcctcagatggccaggtttgccctctcaggctcctgggatggaaccctgcgcctctgggatctcacaacgggcaccaccacgaggcgatttgtgggccatacc

SEQ ID NO: 11973 - DNA, 353 bp, Gossypium hirsutum
  Clone ID: GOSHI-09MAY01-C59796_1
ataaaagatgcagacttcattaattttattttgctttatcactttctccttgactaaggaaagcctcaggtgttgaaagttagagtaaaaatgcatttgcagcagaggtagaatgaaacatgatttagcttaatttgtgtactggattctacatttaaacattaagttatttaaacctttagttttttagccatatttgtccatttagcagaacttgaaatattcctttggaaattaaaataatttagcaatccagtcacctgcaaaaatttaatatttttgtttacttactgcttttattctagttggtagatcttaaggccgaactcttccgaaagcaagaagaattcaaa

SEQ ID NO: 11974 - DNA, 606 bp, Gossypium hirsutum
  Clone ID: GOSHI-09MAY01-C59716_1
aatcactgtatacacttccttaatttcctcctaaactagtttcattatcatttccattttgtttcctctgattatcatcatatttcattcataatggctaaaaatgttgctcaatctgctaccttggcttcccttgaccaaaagctggccatggctaaacgctgttctcatgagggtgtggttgctggagctaaggccgccgttgttgctaccattgccaccgcaattccaactctagctagtgtaaggatgttgccttgggcaagagccaatcttaatcacactgcacaagctctcatcatctccactgcggccggagctgcttattttatagttgcagacaagaccgttttggctacggcacggaagaactccttcaagcaggctcctaacaaggacgcatgaatttgagttggctttgatttaaactcggcatctacgccatgactattacctttcagttggctataaaagactgggtggggagagttgtatttgtatccgtagaagctattagccccagctgctattgtagtatccatcctatctgtgtatatataaataaaagatggtttctatttaaaaaaaaaaaaaaaaaaaaaaaaa

SEQ ID NO: 11975 - DNA, 391 bp, Gossypium hirsutum
  Clone ID: LIB3196-005-P1-M1-H3
gtcctacgacttgtctaaagtcacttaatgacatcactaaactagcctgataatcattaccatgaggatcattttgagtataatgatatctcattcataatggataaatatgttgatcaaatcggctacattggcttgccttgaccaaaagctggccatggctaaacgctgttctcatgagggtgtggttgctggagctaaggccgccgttgttgctaccattgccaccgcaattccaactctagctagtgtaaggatgttgccttgggcaagagccaatcttaatcacactgcacaagctctcatcatctgcactgcggacggagctgcttattttatagttgcagacaagaccgttttggctactgcacggaagaactccttcaagcag

SEQ ID NO: 11976 - DNA, 552 bp, Gossypium hirsutum
  Clone ID: GOSHI-09MAY01-C59686_1
atgccccagttaccaggagaggctgtgtcaaaggcaccatgagcaagatcagcgaggccgtgaagcgcgcccgcgccgccttcagctcggggaggacccgaccgctgcagttccggatccagcagctggaggcgctgcggcgcctgatccaggagcgcgagcaggagctggtgggcgcgctggccgcagacctgcacaagaacgaatggaatgcctactacgaggaggtggtgtacgtcctggaggagatagagtacatgatccagaagctccccgagtgggctgcggatgagcccgtggagaagacgccccagactcagcaggatgagctctacatccactcggagcctctgggcgtggtccttgtcatcggcacctggaactaccccttcaacctcaccatccagcccatggtgggcgccatcgctgcagggaacgcggtggtcctcaagccctcggagctgagtgagaacatggcgagcctgctggctaccatcatcccccagtacctggacaaggatctgtacccagtcattaatgggggtgtccctg

SEQ ID NO: 11977 - DNA, 595 bp, Gossypium hirsutum
  unsure (1)..(595): unsure at all n locations
  Clone ID: LIB3825-028-Q6-K6-G8
naaatttatacttgtaatatgatgtttgattagcaataattgggtagaataacaaaatctagatatgcttatactgggaattgtaggatctaggtggatcactaggcagggaggctgcaactggccgtggtgttgtatatgcaactgaagctttacttgctgaatatgggaagtcaattaagggaatgacctttggtatccaggtatatttcgacatgaaccattacatggttaaaatacctttccctttgaggtgcttcagaacttcctttcttaatgtttatattattcgcagggttttggtaatgttgggtcttgggcatcaaggctcatacatgagaagggtggtaaggttattgctgtgagtgacataactggcgctcttaagaacacaaacggaattgatataccagaactgctaaagcatanaagaagctactggaagtttgaaaagcttcaatggtggagattccatggatccaaatgaactgcttgtacatgaatgtgatgttctcatcccgtgtgccttaggtggagtccttaacaggttaggatccattgctgagcatcttggtcctataaactattgcgcggt

SEQ ID NO: 11978 - DNA, 353 bp, Gossypium hirsutum
  Clone ID: LIB3149-060-Q1-K1-F2
aattaagggaatgacctttgttatccagggttttggtaatgttgggtcttgggcatcaaggctcatacatgagaagggtggtaaggttattgcagtgagtgacataactggcgctcttaagaacccaaacggaattgatataccagaactgttaaagcataaagaagctactggaagtttgaaaagcttcaatggtggagattccatggatccaaatgaactgcttgtacatgaatgtgacgttctcatcccgtgtgccttaggtggagtccttaacagggaaaatgctgcatatgtgaaggcaaagtttataatagaggcagcaaaccatcctacagatccagacgcatatg

SEQ ID NO: 11979 - DNA, 388 bp, Gossypium hirsutum
  Clone ID: GOSHI-09MAY01-C59106_1
gttcaagacttgcagggactgtggggcgacaatttcatcatgtccgatgtgccggcagccaataacgacacgcctgagactgtatacctaattgggagctgatttctggttctgttgagtgctgtgaagcctattcaggacaggaccctttacaaaatctcagtcattatacaatatgcataaagtccagttttatttctattagagattctcaaatccaaaggtggccatgttactgaactggtcaactttttttttttacaaagggtttgcattggactattttgctcccccaaagttctttgcgttgtttgaataaagtatttgtatttggaatgtgcattgcaacttgccaggtgcagaggttacgggaaaaaatggaaaattt

SEQ ID NO: 11980 - DNA, 551 bp, Gossypium hirsutum
  Clone ID: GOSHI-09MAY01-C59006_1
aaaacagagggctcagcccctctctctctcgcaggttctaaatccggccgatggggccatcagcggcgccgccgtgcccctcaccgtcctcggtgatcggagcaacgcaaaggtcgtccctttggtccgtttttgaaacgcttgaaggcctaaactcctaggcttcaaggccgaaaggagaagaagaagccatgccctgtcccgtcccgatttcggcgaccgaacaaggctccggcgacgggctttgcgggcgacctccggtggtctgacacgcgtggagggccagcgattggcgatcagctgcggtgggcatgcgggaggaggtgaagcggcgtgcggcgcgccttagggtttctgcccctcccttttgctgaaaattagtcgtgggctattgggcccttagggttcaggtttagttgggctagtgctgttgtttgggcctttcattttggactgtaattttggactgtttaattttgggtttttattatttgggtttatgggttgcgggcccgagcaaaaaatgggctcttacaatgctgggtgcgtgg

SEQ ID NO: 11981 - DNA, 850 bp, Gossypium hirsutum
  Clone ID: GOSHI-09MAY01-C59036_1
cccttgcgtccttccacgcgtccgtcgaaactgaactgtgactcattcattccaaagctgaggaataggtgcaggaatcttgggatgacaatggacaaccccatcttatatgaaccggctcgaatgcaaatattttctgatgggaatgcacttcttcaactgcttgaaaatgttacttgtcgagtacatgaacttggtagaggaaatttacaatttctactttgtgtaatggtcggggaaggatgatggctacaaatgtcttaagtggatctctgagacaaaaattggtggtggtgactcagtgttgcttgtccaaccatgcaaacaaggggcaggaccaataccttgctaatcttgctctgaaaatcaatgctaagcttgggggcagcaatgtagagctgaatgaccggcttccccatttccatggtgaaggtcatgttatgtttattggagcagatgttaatcatcctggttctgataataagactagcccatccattgctgctgtagtagcaacaatgaactggcctcaagctaatcgttatgcagcaagggttcgaccccagttccatcgcaaagaacagatcctagagttcggtgaaatgtgtttggagcttgttgaatcttatgctcgtctaaataatgttaaaccagaaaaaattgtgctcttccgtgatggggttagtgagggtcagtttgatatggttcttaatgaagagttaatggatctcaagagtgcattccagagaatcaattattttcctacaatcacccttattgttgctcaaaagcgacaccaaactcgtttttttcccgagggaaagggggatggggtcccacgggtaatatt

SEQ ID NO: 11982 - DNA, 501 bp, Gossypium hirsutum
  Clone ID: GOSHI-09MAY01-C59386_2
attgatgatggcacaggccagaaacagatctggagaattgaaggctccagcaaagtacccgtggaccctgccacatatggacagttctatggaggagacagctacatcattctgtacaactaccgccatggaggccgccaggggcagataatctacaactggcagggtgcccagtctacccaggatgaggtcgctgcatctgccatcctgactgctcagctggatgaggagctgggaggtacccctgttcagagccgggtggtccaaggcaaggagcccgcacacctcatgagcctgtttggtgggaagcccatgatcatctacaagggcggcaccctcccgcgagggcgggcagacagcccctgccagcacccgactcttgcaggtccgtgccaacagtgctggagccactcaggctgttgaggtattgcctaaggctggtgcactgaactccaacgatgcctttgtactgaaaacacgctgagctgcctacctgtgggt

SEQ ID NO: 11983 - DNA, 634 bp, Gossypium hirsutum
  Clone ID: GOSHI-09MAY01-C59386_1
atctcctggttcttagaccaggctgagggtcaggaaggcacgtcctcatggagatggagagcagccacagcagcagtgccccggggacctcaggcaatagcgctgtctccgctcttcctggaattctgctgtccctgcccgtgtgttgttaggtcacattccatgccacacacagacacaagcatgatggctttgtctggaggagtgggcccagtgcgacatagaaggactgaggcctgcccccaaggtccctgactcgctttcctgtctccctgctcagagccgtgtggtccaaggcaaggagcccgcacacctcatgagcctgtttggtgggaagcccatgatcatctacaagggcggcacctcccgcgagggcgggcagacagcccctgccagcacccgcctcttccaggtccgcgccaacagcgctggagccacccgggctgttgaggtactgcctaaggctggtgcactgaactccaacgatgcctttgtcctgaaaaccccctcagctgcctacctgtgggtgggtacaggagccagtgaggcagagaagacggtggcccaggagctactcagggtgctacgggcccaacctgtgcaggtggcaaaaggcagcgagccagatggcttc

SEQ ID NO: 11984 - DNA, 521 bp, Gossypium hirsutum
  Clone ID: GOSHI-09MAY01-C59246_1
attttggatacccaggaggttaattttgagcaagggatgcaaattctcaaaatcttcaaggaccattccagcaagacatgcatccttgatgactttgaattttacgaggcccgtcaaaagatgatccaggagaggaaggctaagcatcagctgttacaaaaacaaggtctgagtggggaacctaaaggagaaaacccagcaatggcaaaggagacattggaaaaacctgtcgaggcagccttgacagaacgaacggttgcatcaacagcagaagcagtaaatgcaacgaacggagacgcaaaacccattgaagagaaaggatcagttgctgcaactgaagacggctctcaatgaaaccaggttgttttcgatagtcggctttggtagaaatgggataggattgtactctttgattggttaattctagttgcttgatagtgtgatcaatatcatttttagcttattttgagttaattttatgacctgagagactggtaggcaaaacaccttttttttttgaa

SEQ ID NO: 11985 - DNA, 440 bp, Gossypium hirsutum
  Clone ID: GOSHI-09MAY01-C54946_1
cccacgcgtcgcccacgcgtcgcccacgcgttcgtccacgcgtacgcccacgcgtccgcccacgccttccccctcgcgtccggcccccccagtactgccagagcagaaatggcgctaactctcccaaacacatttctccaaatcaagccttctcctcccccttcactccctctcagaaaggtggtgactgcaaggggagggggctataggccacaagttacttgccggaagaaggacatccacccggaattccacgaggatgctaaagtttactgcaatggagaattggtgatgacaacaggtgggacgcagaaggagtatgtggtggatgtttggtcggggaaccatcctttttacctcgggaacagggtcggccgtccttgttgacgctgaccaggtcgagaagttccgtaagaaggtcggcagtatctgagatttgg

SEQ ID NO: 11986 - DNA, 444 bp, Gossypium hirsutum
  Clone ID: LIB3493-051-P1-M1-H4
cggacgcgtgggcaagtatgagaatggtgttataacaccaaggccacctcctattcaatatggtagaaaccaaggcggtaggtttcgtcaacaaaatagaaaccctgaccaaccaagatatgatcgacaaggaaataccactccgaaccagcaagggaatgtaccttacaatcagcagggttttgtgcaagggggtggaaggaactataggcctccacaaaattacaggcagcagccgccaatgaataacagagattgtgctcctagaggccctgatccttcgcatcagagcagttacaaccaaggaaggcagggaagttataattcccaagaacgaagggaattcgttcaaggagagcagaggaattatatgcctcctgagcaaagggatttcagagtagatcataggaactatgcatcctcacaaggtgggaattatgggca

SEQ ID NO: 11987 - DNA, 366 bp, Gossypium hirsutum
  unsure (1)..(366): unsure at all n locations
  Clone ID: LIB3165-037-P1-K1-H12
gacaagtatgagaatggtattatggcaccaaggccacctcctatccattatggtagaaaccaaggtggtaggttccgtcaacaaaatagaaactctgaccaaccaagatatgatagacaaggaaataccactccgaaccagcaagggaatgtgccttacaatcagcagggttttgcgcaaggggatggaaggaactataggcctccacaaaattatccaccccaacaaaattacaggcagcagccgccaatgaataacagagattatgctcctagaggctctgatcctttgcatcagaacagttacaaccaaggaaagcatggaagttataattctaaagacgaanggacttcgttcaaggagagc

SEQ ID NO: 11988 - DNA, 495 bp, Gossypium hirsutum
  Clone ID: GOSHI-09MAY01-C54696_1
ctcgtacttctcacttctttctttttatatctttgtctctctctacctctgtctgaattctaaggtctctcctttttcctcccctgtaaaaaaggcttaaacaaaaaaatggagaacaataacaaccaggtcacgggagagttgaagtctgggaataagaagcaggttcgattgttttactgtatggagtgtgaagagcttgcccgtaaagttgctgctcactcccaactcattacccttcaatctatcaactggaggagctttgatgatggatttccaaatcttttcataaacaatgcacatgatatccgaggtcagcatgttgcttttctcgcatccttcagctccccagctgttatctttgaacagctttccgtcatatataatcttccgcgattgtttgttgcttccttcactttggttttgccattctttccaactggctcctttgagagaatggaagaagaaggtgatgttgcaactgcatttaccatg

SEQ ID NO: 11989 - DNA, 893 bp, Gossypium hirsutum
  Clone ID: GOSHI-09MAY01-C54676_1
gttgagcccagacctcgaagccttggcatcgattatgttgatgagagcgaagttcttaccctggccgacgaagaaaatcacattaacaaacataattttcggattccttttgtttgtgggtgtcggaatttgggggaagcgcttcggagaatccgagaaggagctgctatgattcgaaccaaaggtgaagctggaaccgggaacattatcgaagctgttaggcacgtcaggtccgtgatgggtgatatcaggatccttaggaatatggatgatgatgaggtttttagcttcgctaagaaaattcggtcaccttacgacttggttgtgcagacgaagcagctggggaggctgcctgtggtgcactttgccgctggaggagtggcgacgccggcggatgctgctctcatgatgcagttgggttgtgatggcgtgtttgtggggtctggcgtttttaagagtggtgacccggctagacgtgcccgggctattgttcaggctgtcacccattatagtgacccggccgtgcttgctgaagttagctgtgggcttggtgagactatggttggtcttaatttgaatgataagaaggttgagaggttcgctgctcgatctgagtagtgtctatcaaatttctgtggctacgcgaaggttatccaagtcaagtgtcgtcttccataagtgggggtctacttctatgtctaaatgttcaccaagtgaaggatgtttttgttaactatgctgtttcgttctctaaaatttgatctttgagcttgctagaaattaaacagctcgtctctgcattctgcatcaatacgagttgtaaccttgagctgaattatgcaatttttatgtatgatattctatttgctgactaaacgttgctttatttggtc

SEQ ID NO: 11990 - DNA, 385 bp, Gossypium hirsutum
  Clone ID: LIB3165-036-P1-K1-A5
cccacgcgtccggtggtgcactttgtcgctggaggagtggctactccggcggaggctgctctcatgatggagttgggttgtgatggcgtgtttgtggggtctggcgtttttaagagtggtgacccggctagacgtgcccgggctattgttcaggctgtcacccattatagtgacccggccgtgcttgctgaagttagctgtgggcttggcgaggctatggttggtcttaatttgaatgataagaaggttgagaggttcgctgctcgatctgagtagtgtatttcaaatttctgtggctacgcgaaggtgataaattccacttgtattctattttttcaacatttaagccgaagctttaatgatattccaaggtatttgatgtttt

SEQ ID NO: 11991 - DNA, 419 bp, Gossypium hirsutum
  Clone ID: GOSHI-09MAY01-C55446_1
cagttggaggcctgtgctagaattgatcgcccaagtagaagggaacacagagccagagcaatctgattcagaaaaatggagtcgtgcgttcacgaaatgttggcgatagcaaggctcttttcacatcactttattcccttcgccgttcttccatctccattcactttctgttagaaattcggttaaaagagctggcgagggactgctgttggacgcgcctaggcactctcttgcaattatccaagcctgtacaagagacttacgcttctattggagctaaacacggtctgaaattcaattcacctgcaataaagaaaggatccaaaagggcttttcctgctccctggcctgccttgccccccctcgagggggatggaaagccattttggaaacttgttgtctctgaagccactggttgt

SEQ ID NO: 11992 - DNA, 424 bp, Gossypium hirsutum
  Clone ID: GOSHI-09MAY01-C55406_2
aaaattcctttttccttttctgtttacttctctgggtcataattttttttgggatttttgtttgggctttgtggggggaggggggttgcccttttaactatggcttcaacgttgtatactggctctgggttttgtgattgatcttattgcttttggacttgctgttgctgctgagcaaaggagaagcacctgccactgttcgcactaatgggaacgaaagtttttgcgtttatgataaggatattgcaactggcttacctgtaggttcattccttttccttctactcggtcagatactaatcatggtggcgagcccatgcttatgctgtggtaacgccatgaaaccgcgtggctctagagcatgggcagctgtactcttcatcacttgctgggcgttctttctcatcgcggaggtatgcttgct

SEQ ID NO: 11993 - DNA, 765 bp, Gossypium hirsutum
  Clone ID: GOSHI-09MAY01-C55406_1
tatttatgctgcgtaaactgagccccttcagcttgcttagcgcttttgatcaatactgtttttgtgtgcgtctttttgcttctctggctcatattttctcgagattttccttctttgtttgcttgaactatggcttcaaccttgctactggctctggtttttgtgattgatctgattgctttcgcccttgctgttgctgctgagcaaaggagaagtactgcctctgttggcaataatgggaaagaaagttattgtgtttatgatgaggatattgcaactggtttgggtgtgggttcgttcctcttccttctgcttagtcagatactaataatggtgacaagtcggtgcttatgctgtgggaaggccatgagaccaagtggatcgagagcatgggcagttgtcctattcatcacttgttggttgttctttttcattgcggaggtatgtctgctggcagggtcagtgcggaatgcttatcacaccaagtacaagaatctcttaaatgatcccccatcgtgtgcgacattgagaaagggtgtctttggcgctggggctgcatttgctttcctaacagctgtagtctctgagctttactatgtgagttattcgaaggctaatgatgcaacagttaactacggccaagacacccggagtgtgggggtgggaacctgtaaatggatatgctcaaaagcagtcataaatttcattcattgttgattaccttaatgtttctgttgtagacacttaggttacacagtgtgtttt

SEQ ID NO: 11994 - DNA, 812 bp, Gossypium hirsutum
  Clone ID: GOSHI-09MAY01-C55366_1
cccacgcgtccgcccacgcgtccggattgctctgctcacatgctttgggttggtgagaggactcggcaattagatggagcacatgtcgaatttctccggggtatttccaatcctctcggcataaaggttagtgataaaatggacccgaaggaccttgtgaagttgtgtgaaattctcaaccctcggaacaaacctggaagactgacaataatcacacgaatgggtgccgataacatgcgaataaagcttccacatcttataagggcagtgcgccaggctgggcttattgtcacttgggtgagtgatcccatgcatgggaacacaattaaagctccatgtggtctcaaaactcgtccatttgatgcaatcagatctgagttgagggcgttcttcgatgttcatgaacaagaagggagctatcctggaggagttcatctggagatgacggggcagaacgtaacagagtgcatcggagggtcaaacactgtcacttttgatgacttgaactctcggtatcacacacattgtgacccaagattaaatgcgtcgcaatcattagagctagcctttgccatatcagaaaggttgaggaagagaaggctcaagtctgccaaggaactttgcaatgacaattaattgtcttgtgctatgtctgaaatggagagggttttttgtagtagaataaataaccctctcctccgatgtcccatttgagtttggatttttgtatgaactatgttctttgttttgcaattgacataaagtaatgcttggttaatggctactattcaaaccaaaaaaaaaaaaaaaaa

SEQ ID NO: 11995 - DNA, 647 bp, Gossypium hirsutum
  Clone ID: GOSHI-09MAY01-C56986_1
cggacacgtgggatcgctgaggctcaacaacaagagaaggtttcttcggaggttccggcagctgaaaagaaaagatggacccttggcgattttgacattgggaagcctcttggacgggggaagtttggccacgtttatttagccagagaaaaaaggagcaatcatattgtggccctcaaagttctttttaaaagccaactacaacaatctcaagttgaacatcaactacgtcgagaagtggaaatacagagtcacctgcgccatcccaatatattgaggctttatggatatttctatgatcagaaacgtgtttatctgattctggaatatgcagccaaaggtgaactttacaaagaactgcaaaaatgtaaatactttagcgaaagacgagctgctacctatgttgcctctttagctcgggcactcatttatggtcatggaaagcatgtcatacacagagatatcaaacctgagaacctgttaatcggtgcacaaggtgaactaaaaaattgcaaatttgggatggtctgtgcatacattttacccgaaagcggactaagtgcgggtaacttgattatctccccccctgaaatgggtgaaagttttaaagcattaatccagttgttgatttcttgaacctttggttt

SEQ ID NO: 11996 - DNA, 1159 bp, Gossypium hirsutum
  Clone ID: GOSHI-09MAY01-C56946_2
gccccctcttcctgatcctgtttggcattctcagggtggcaccaagctcctacaaataaaacaaagtagaaacacttttttttggatcattgggttttcaaagtttttagggttggtttatcttttcctttttggttttgaaagattgttgtgggtggttttgattgtttatttttcttctttgttttcatttttgtaagagagtgaagatcatccaggtgttggtggtggacccagtcatgactgttgacgagagtaatccattggtctttgttcaacccaatgccctcaagttcgtttgttcttcaaatgcaattgcaaattttgatagcaatactgctaacagaagcctgcaactagaaagacaatgagcatgtcgagattctcattttagtgacggtgcttctatttgcaacaataatgaaaaatttaaaggtgcgtgcagtttgccgtgacaatggagaaaagactgatatctctagagtcttttaggttgaacaagtaaaaggattgttggataagattcaacagaacctattcgatgtggcaaaacaaaaaagagatgcctgcattgaagttgtaaaaacttgggacgagtttgtaaaagctcttgggcaaaagaaactgatcttagctccttggtgtgatgaggaggaggtggagaaagatgtgaaagctcgaacaaggggtgagatgggagcagctaagtctctttgtaccccattcgaacagcctgaactcccagatggtactaaatgctctgcttctgggaagcctgcaaaaaagtggacctattggggcagaagttactaagattattcgccttttgataaccgtctccttctcatggtccttcggctcgggtcatcgggccgttctaaacagggaagttttcaatttaaaatcatgtgagactgattagaggattcagtttttaagcatttattttcctttttcttttttggccgaattttgctttgctacaatagatatactgtcttatctggtgttgctcctttgtggattgtgttttaagcatttgaaagagaacactactgtattataggatgtgtataggcaaaatgcccttttgatgttactcttttttatatatagaaagtggaaagtgagccaatatatatattttcatttaattttg

SEQ ID NO: 11997 - DNA, 1050 bp, Gossypium hirsutum
  Clone ID: GOSHI-09MAY01-C56946_1
cccacgcgtacgctcacacgtacatggagaatgtgggtggtttacttaacacagccggcgttgaggcatttattccaaacactgggcgtggtctataaggtgctacctgccattgtttgcgccaacactgcagaaaaatgtttgagataaactttgaaaatgaaaagggggaaaagtctatggcatggcagacttcctgggcatatagcactcgtacgattggggtcacggcgatggttcacggggataacaaaggcttagcgctgcctccaaaagttgcagctttgcaggttattgtgattcctgtgccttacaaagatgcagatactcaagggatctttgatgcctgtgctgccactgtggcaatcctctctgatgctggtattcgtgctgaagctgatcttagagagaactactcacctggttggaagtactcaaactgggaaatgaaaggtgttccactaaggattgaaataggacctcgagacttggcaaataatcaggtgcgtgcagttcgccgtgacaatggagaaaagactgatatctctagagtctttttggttgaacaagtaaaaggaatgttggaaaagattcaacagaacctatttgatgtggcaaaacaaaaaagagatgcctgcattgaagttgtaaaaacttgggatgagtttataaaagctctcgggcaaaagaaactgatcttagctccttggtgtaatgaggaggaggtggagaaagatgttaaagctcgaacaaagggtgagatgggagcagctaagtctctatgtaccccatttgaacagcctgaacttccagaaggtactaaatgctttgcttctgggaagcctgcaacaaagtggacctattggggcagaagttactaggtttattcactttttaaaaccatctccttttcatggttctttgcctgatgtcaacggttctggtcattggggccattgtaaacggggaaattttcaatttaaaattgttatatgaaactgatgaaaagattcagtttttaatcatgttaaaacttctgtgatctttcta

SEQ ID NO: 11998 - DNA, 572 bp, Gossypium hirsutum
  Clone ID: GOSHI-09MAY01-C56936_1
agaaaaaaacagctgtccgcccaaaaccctaacaatcaagagagttgagagggagaaagatgacgcagaaaggaaatctcttcaaggggcaaaaaaagcagaaaacaatccctcccaatcgccatggaaaagttcctcacattcgcaaaggtaagagagtggtcaaaccatcgaagatgacaaaagagatggacgctgatcgagagttgaccaagttcataaatcactgcaatgagataaaagcggccaccgttgctaacaaggatggaggccaactaagtattgtgaagccacccccagaatcttctggtaatgtgaaggaatagtaatgatgctttgtcaaatagggctccaaattctaacgcaagaaccttcagcatggattagaggagatttttttccccaagtaatgcaacctaaaccagcctttttgtttgaagatcaattctgttgtgaaatgtgtttttgataaaatatagtgtttatctttttgcgcttccatggatagatatgctactagttactatggatatttaactaaaatgcttgggtataataactgaattgaggat

SEQ ID NO: 11999 - DNA, 370 bp, Gossypium hirsutum
  unsure (1)..(370): unsure at all n locations
  Clone ID: LIB3149-024-Q1-K1-B3
nccgcccaaaaccctaacaatcaagagaggttgagagggagaaagatgacgcagaaaggaaatctcttcaaggggcaaaaaaagcagaaaacaatccctcccaatcgccatggaaaagttcctcacattcgcaaaggagttgaccaagttcataaatcactgcaatgagataaaagcggccaccgttgctaacaaggatggaggccaactaagtattgtgaagccacccccagaatcttctggtaatgtgaaggaatagtaatgatgctttgtcaaatagggctccaaattctaacgcaagaacctttaacatggattagaagagattttttttcccaagtaatgcaacctaaaccagcctttttgtttg

SEQ ID NO: 12000 - DNA, 670 bp, Gossypium hirsutum
  Clone ID: GOSHI-09MAY01-C56546_1
cccacgcgtccgagaagacggaaacgatcggccgtccacaaaatacccatacgctcacactacagtgactaccctctacgttctcactctttaaatcttgattcttctggaaacgtattccaacactctttgaatcaaagcatcgaatacgttatgtctgttctctgatgaaaatcaaagcttaaatctatctatctttcaaaaacccaaaaactaaaaagaaaagagaccaataccagcaacagaattgagaaaactaaaaattagtgtgagcgggtagaagagatgatgctacccgtagtaaagctaggaactcttgcgctgaaaaccgcttgcaaacccattgctaatcgtctcaagaaagaagctggtttgcatcccagattccgccaattgatcatcaatattgcccaggcaaatcatcgatttacaaccacgatgcaaagacgaatttacggtcatgcaactgatgttgcgatacgccccttgaacgaggagaaagctgtccaggctgctgccgatcttctgggggagctttttgtattcacggttgcaggagctgctattatttttgaggtacaaagaagctccagatcagaagcaagaaaagaggagcagcgcaaacaagaattggaggcaatgaaacaaaaagatgaagatgtagcacgag

SEQ ID NO: 12001 - DNA, 559 bp, Gossypium hirsutum
  Clone ID: LIB3582-054-P1-K1-A5
caacaaacagcacatgtcttctgcagaagcatgcaatgaattgatggcatattcattgatattgtcatgctgttgctacacatgctgtgttagaaggaagcttcgcaaggcgttaaacatcacgggtggatttattgatgatttcctctcacatttgatgtgctgctgttgcgcccttgttcaagaatggcgagaagtagagatacgtgggtttaatgggtcagagaagactaaaacaagcccgccaccatcacaatttatggaatcatgagtaacaggacaggataggattcaaagcttttccccttttttttttgtttttttggaggtttaatatatagagcgtaaccctccttagtggcctctgtgaaatgaaaactgtactaagaatatggggccctttgcttttgaacctatagatatgtaaattagtccaattatttgaggagattcattcacctcatgttgtattatacactaatttttagctgtatagtggttttcgatttagtttattaaacttgtttctttagatataagggaaacaagtattcaatct

SEQ ID NO: 12002 - DNA, 418 bp, Gossypium hirsutum
  Clone ID: LIB3149-021-Q1-K1-E4
atggttttagactgtcttgtcttaggtataagggctataattaagttattcagggttatcttacttcggattgggtttccttaaaatgcaacttttttttccctccttttggcagggtggatttattgatgatttcctctcacatttgatgtgctgctgttgcgcccttgttcaagaatggcgagaagtagagatacgtgggtttaatgggtcagagaagactaaaacaagcccgccaccatcacaatttatggaatcatgagtaacaggacaggataggattcaaagcttttcccttcttttttttttggaggtttaatatatagagcgtaaccctccttagtggcctctgtgaaattaaaactgtactaagaatatggcgccctttgcttttgaacctatagatatgtaaattagt

SEQ ID NO: 12003 - DNA, 439 bp, Gossypium hirsutum
  Clone ID: GOSHI-09MAY01-C56016_1
cccacgcgtccgaaaaaaatagtttggcgcaaagctcagagctttagcggcgagcacaagctacaggtcatcaccgccaaatcctattaaacaacataagtatttgcctgctagaatcatcgaacctgtaagaaatttcccttcttttttttttcttcttgtttgaatccgtcacgatggacccactttccgccctccgcgacttcacagtccggggtgagctcgacaaaatcgtccgagtcaacgacgagttccgatttggcaccgagtattccttcccatgttccgccgaaaccgcctaccgttccaagcaaggcaacctctacaaccttgaaaccttggttttctacatgcaaaatcaccatcgcaggcacaccgagtacatgcacaacttcctgtttctgcgtatgcccggcgggactttcaccgaccggaaacc

SEQ ID NO: 12004 - DNA, 860 bp, Gossypium hirsutum
  Clone ID: GOSHI-09MAY01-C56346_1
caaatggctgtagtttaatctagctgatccttaaaaataccatcactaccagcatcgccatctcccaccctatccctttgatcaagttcatccatctgccgttgattcttcatccaatggacggcaacaagcaagcccagtcctcctcttaccctcctcagcctcccactacttctattacgccttctcctccttcctcctccgccgccatcgccgccactccgcctgctcctttccaccacctcctccagcagcagcagcaacagctccaaatgttctggtcttaccagcgccaagaaatcgagctagtcaacgacttcaagaaccatcagcttcctcttgctcgcatcaagaagatcatgaaagccgacgaagatgtccgtatgatctccgctgaagcccctattctcttcgccaaagcctgcgagcttttcattctggagcttaccatccgttcctggcttcacgccgaggagaacatgcgacggacgcttcagaaaaacgacatcgcggcggctattactaggaccgacattttcgatttcttggtggatattgtgcccagggacgagatcaaggatgaggctggtctgggtgggatggtgggtaccactgccagtggggtgccatatttttatcctcccatgggtcagcctgctggcgctcctgctggacctggcgggatgatgattggaaggcccgccgtcgatccaaccggtggtatttatgctcagcctccttctcaggcttggcagagtgtttggcagacggcggtggctgacggtgggtcgtatgccagtggaagtagcggctgtcaggggaatcttgacggtcaaggctaagcaattcatttgtccgat

SEQ ID NO: 12005 - DNA, 652 bp, Gossypium hirsutum
  Clone ID: GOSHI-09MAY01-C56286_1
gccgatattcaaaaagaccagatgaacttccgtctttgtattgtatcaaattagggtatatgtgcataagttatcctaatgtctttcgaatcgtaggaatattttattcgccacatggatggctgcacacttgatactgaaggagagaaagaaagggttgttaaatgtctcgaagccgccattcatagaagagcgagtgagggtttaagcctggagctttgcgcaaaggacagagttgggttgttgtccgaagtaacaaggattctccgagagaacggattgtccgttacaagggcaggggtgtcaacagttggggagaaagcagtgaatgttttctatgttagagatgcttccggtactcctgtagatgcaaacccaatcgaagcccttcgcaaagaaatgggccagccaatgatgcttaacgtaaagaaggccccctcaagtacgaaagcccgggaggcagagcccaccggatgggctaaaccaagcttcttttttgggaatttattggaaaagttcttggcttgaaagaagaaaatcaatgcccatgtatagaataatgctagctattgcatatcccccatgggaagaccttgttacccctagtttgtttaaaaataaatcgcttgcgaattgtgaagcttgtgcccct

SEQ ID NO: 12006 - DNA, 724 bp, Gossypium hirsutum
  Clone ID: GOSHI-09MAY01-C56256_1
gttctatgcattctatgatcgttgttttgagatcaagcagaacaagtatgtttacaaagtctgcccatacaaacaagcttctcaggaggagggccacatgacaacccgtttagggcgttgggacaaatttgaggacgcatacaagatgatggtattttcaaatggagataagtgctggaatggtccagatcgaagtatgaaggtgaaattaagatgcggtttgaaaaatgagcttaccgatgttgatgaaccaagccgttgcgaatacgttgctttattggccactccagctgtctgcctggaagataagctgaaggagctgcaacataaactagatttgtcgaacaaagagcagcctcaggaacatgatgaactttgaggaacccggatagaagattcagacatggttagaggttgttgactccataacaaatctatcattagaacactaatcaatttgatcctagttgtgaagcgatgtagaatgtggccttttcgagctagtagagaagattttcaagcgatatctgaaatctgaggaagcctcctgaaaaaaattttcatagggaagtatgcttcacattacaatcacatagatgaagtgaggtacgattatatttgttaggttgagctgaactgactatggtgaaaataaactggtcctcaatacttatttgaatttctgcataaaagaataagaatgataacagatggcattaatttg

SEQ ID NO: 12007 - DNA, 546 bp, Gossypium hirsutum
  Clone ID: GOSHI-09MAY01-C57906_1
cgttatgcgtccgagatgcctcacttgcaccggggggattttaaagagacttgtgctttttaaccaccggctcggaagcgagacttaaaattgcccgtcgacttggagaagttcacgagctcgaccaattgtagtctgattgaggcaatgtagaaaggattcggcaaaaggtgggacgccttgaacctttgcatggaaagctcctttcggttgtgaagcaaagtaaaagaatgctggatccaggcatttacgccaagctaatattggagcttggaaagaatcctgataaacacatccttgcagaggagttactgggtgatctcggagaaagaagatgatttgaatttgagttcaccaggactgtccagggatcatgaaggctcgcattaaggcataggaagtttgagattggggagagcttgttttactggttcaagcaatcacggcgtgacccccgcgtggtgatgtacacaacattgcttcatagtcgttattctgagaacaagtacatggaagcattagctctggtttgggaaatgaggccag

SEQ ID NO: 12008 - DNA, 534 bp, Gossypium hirsutum
  unsure (1)..(534): unsure at all n locations
  Clone ID: uC-gsflnu33B015d04b1
tttcacgcgtccgagatgcctcacttgtaccctgatgataggattttgacttcaactgttgaagtattggctaggaagcgtgaattaaaattgcccgtcaacttggagaagttcacgagctcgaccaatcgtagtctgattgaggcaatgttgaaaggatttgttaaaggtggaagcttgaaccttgcatggaagcttctttcggttgtgaagcaaagtaaaagaatgctggatccaggcatttacgcaaagctaatattggagcttggaaagaatcctgataaacacatccttgtagaggagttactgngtgatcttggagaaagagatgatttgaatttgagtcagcaggactgtacagtgatcatgaaggtttgcattaggcataggaagtttgagattgtggagagcttgttttactggttcaagcaatcagggcgtgaccccagtgtggtgatgtacacaacattgcttcatagtcgttattctgagaacaagtacatggaagcattagctctggtttgggaaatggag

SEQ ID NO: 12009 - DNA, 675 bp, Gossypium hirsutum
  Clone ID: GOSHI-09MAY01-C57806_1
gtaacttccgttggcctgaagagtttgagcgccaatcatctagagaagttcctcggcaccatgctcattcaggatttcatcagaagggttgcctgtgattctcccatacattaccaaacaaatactgtatgcttccccagcagatttcaagcatcttttgcaatataaatcaatcaaatttgctgactttgttgatgctgatttcggtcagaaggcagcagacctgatgttaggctgctgtgtgattgttttgagagaagaccatatccaagcagatgcattggcaatagccattggctgctggaaaggccggtcgagtttgagtgtgatggttacagcaatggactgccaggaactgctggaaaggctttcagcacgcatggagactgaaaagaatggaactttggcacccgaaagccttggcgtgctagataagaaacaagatatgagtggtgaaaatggaaccccactggaggatcacaatgttgaagcaatgaaaatacaggataccaatgctagtgaataggactaaagatgaaagagtttcaaggttctatagatactttagtaatttgaaggtcttactgactgctagctcgaagctttgattattattgagaaattttaaggtttatttattgtcaccgtaggtataatggaacataacagtttaac

SEQ ID NO: 12010 - DNA, 586 bp, Gossypium hirsutum
  Clone ID: GOSHI-09MAY01-C57546_1
cttcaattcttcttttactactgggtgggggtgacttcctccttccaggaaagctagacccattaaacattcacttgtaagtaatccaagtcttttgccattttccatttatttatttattttcgtttcagtactgttattaagatctgattagtttttggtattgggttttcaaaaggagagcgaaacccttggaggaatcagatttttttgttggtttatctggagatctatttgtttctgtaattgggttttctttaaattgggttttctaggattgaagaaaacccatgaaggaatcagagttaagcactgaaccaatcggacaaaatctgataaaactgataagcaatctatgcttctcagtttttgtgttttcagtgttgatatttacagttattgctatcacttaccaacccccagatccatggcttgaatcagctccggccttaaccaagctcttcactcaaactgagaatgccactttcaaaaacgacgattctatccttaaaactggtgaggatgtagttcttgtggcagctcctgaagtgccccctgctttggcaatcaatcccatcacggaaac

SEQ ID NO: 12011 - DNA, 968 bp, Gossypium hirsutum
  Clone ID: GOSHI-09MAY01-C57456_1
ttcacttttccggccgctcaaccctgaaaagctgcggagatacctagcaccaaatccctaaaatcattttctttgaagggaaaaaaacaactttttttgtgccaggaaaagtaacttctgtacaagctgactcattaatggctaccgccacttccatcgtacggtctccagcggccctactctctgccaaagtcactgtctccgatcacaaaccaaccccaaccgttcaattctcccgattcccttcaaaacgtagttgtttcactgctcttttgtcttccctccacgacaacaacaacgacgacgacaacaacaacaacgtcatctcgcatcccaagcctctttcttcatcccagctctttaattccgtgtctaatggctctcgccttcgcgttgcgtatcagggagttcgtggtgcctacagtgaagctgctgctgagaaggcctatcccaattgtgaagctgttccttgtgaccaatttgatgctgcttttcaagctgttgaaaagtggttagtggatagagcagtattaccgatcgagaattccttaggtggtagtattcatcggaattatgacctcttgcttcgccatagcttgcatattgttggggaagttaagcttgctgttcaacattgcttactagccaatcatggtgttcaacttgaggatttaagtagggttcttagtcatcctcaggctctagctcagtgcgagaacacgttaacaaagttaggcttgagcagagaagcagctgatgatactgcccttgcagcaaagcacgtggctctccacaaactaaaagatacgggagctgttgcaagttcttcggctgcaaagatatacggactgaacatccttgctcaagatgttcaggatgattgtgataatgttactcgatttctaattctggccagggaaccaattattcctggcattcagaattcattcaagacaaagttatgtttt

SEQ ID NO: 12012 - DNA, 611 bp, Gossypium hirsutum
  Clone ID: LIB3828-003-Q1-K6-A7
cggccgcgtgggttcgaggattccccgtatgacgttgtttcaaaaaactccccttttcatcccagtatgatatccccgttttcgcttttcttttttgggtttatcttttactcttaaattttgcattttatgttatgttattcagggccactttcttcaacccagctccctaattctgtctctgctggctctcgccttcgcgttgcgtatcagggagttcgtggtgcctacagtgaagcagctgctgagaaggcctatccgaattgtgaagctgttccttgtgatcaatttgatgctgcttttgaagctgtagaaaagtggatagtggatagagcagtattaccgatcgagaattccttaggtggtagtattcatcggaattatgacctcttgcttcgccatagcttgcacattgtcggggaggttaagcttgcagttcgtcattgcttactagccaatcatggtgttagagttgaggacttacaaagggttcttagtcatcctcaggctctagctcagtgcgagaacacgttaacaaagttaggcttgagcagagaagcaactgatgatactgctcttgcagcaaagtacgtggctttcaacaaactaaa

SEQ ID NO: 12013 - DNA, 166 bp, Gossypium hirsutum
  Clone ID: GOSHI-09MAY01-C57166_1
atttttagctgttgaagttgtaatcttgctttactgccatttaaccttctgtggttaactgaagtatttttgtttaatatgttatttcaagaaaaaaattgtttgacattgttctgtgctgaaatgcacttattgcttcaaatatagagacttgatttctttagtg

SEQ ID NO: 12014 - DNA, 434 bp, Gossypium hirsutum
  Clone ID: GOSHI-09MAY01-C57136_2
tgaactgggaggaacatataacccaggactcagagcagtgggagtggcagatgactgtatctaagctatttgaagaacggcctatatggcccaaggaatctgtaactgagcgcttgcttcagaaaggtctaaaatttagccatttggtgcttaaaaggcttctacttggggttgcttactacttctcaaatggaccatttcggagattctggatcagaaaaggatatgatcctcgcaaagatcctgagtctcgcatatatcagagaactgattttcgtgtacctgaaccattgcggaactatgcagatgctagcgtggctaacaatttgacgcataagtggggagatttatgttcattccaagtatttccttacaaattccagatgattttacaactatttgaactggatgatgattacattcaacaagagata

SEQ ID NO: 12015 - DNA, 630 bp, Gossypium hirsutum
  unsure (1)..(630): unsure at all n locations
  Clone ID: LIB3827-001-Q1-K6-E10
ctgagcgcttgcttcagaaaggtctaaaatttagccatttggtgcttaaaaggcttctacttggggttgcttactacttctcaaatggaccatttcggagattctggatcagaaaaggatatgatcctcgcaaagatcctgagtctcgcatatatcagagaactgattttcgtgtacctgaaccattgcggaactatgcagatgctagcgtggctaacaaaaactttgcagcctaaaactggatggttctccgagtgtgtgcttgattgcctgagacttcgtgtagcactgaggttcttgtcagtttatcccaaaactggtgcagaaagcatactgaaatcttgctctaatgaatttgagaagttaaagaggtcatgcttatacaaggatgtcttcaactctcatcaagaggagcatcagcaaactaataaaggtgatgatgataaagagagagccaaaagttctgataataaggaagatgaagttgaagctgaggatgaagaggaattggatgcgtatgatgagacacttactctgggtgatggggatgatgaaatctctntgcaacctgatacatatttagatatggagaacaactcaaggacatacttgcaagagctntttggtagc

SEQ ID NO: 12016 - DNA, 642 bp, Gossypium hirsutum
  Clone ID: GOSHI-09MAY01-C57036_1
cccagcgtccgcccacgcgtggcgggtgtgttccaggaaaatccaaagtaaaaaacctaaactcggtggaaagaagtccttgaacagtgaggtgttaacaacaatggaaccagcttccggagaagatgatgctactgtttctgagaaacgaagcattccaaggttggactacaaaaggctatatgatgagacatatggcaatgttccttctagttccagtgatgacgaagattggaacgatggcacagcaccaagaaaaaagaagaaacgtaatgctgaagtggctacaacatcagcaaatggaaatgcttctccaactggtagtgtctcggtttccaatggtttaaacgaacccacgagagaagcgtgcacctaggagaagcgccaatggtttaaagcagaaccgaggagagcggcatacaactaagagaagtgccaatggtttaaagcagaacccagaagaggatcatacacctagaagacgcactcggaagaagtcaaatcagaagggtactgctaaattacccaaagccactcctaaatcacctgctaaattaccggaacccactcccacacctggttcgagcggtaaaaaggctggttcatcgacatataaaagactaggagaagctgtaacgcagg

SEQ ID NO: 12017 - DNA, 392 bp, Gossypium hirsutum
  Clone ID: GOSHI-09MAY01-C50806_1
gaaagattctaaaattcaaaaaaaaaaatggaaaagaaaagaaaacaatgattgtctagggcccttagtgcagggtgtgtaaagaaggaaacgtgtgtgggttttctgtaggaagaaaaacatggttagaaacattgaactccttagtatggtatcaaaaagctgataccatattacatagtcaaaaagctaatgaaaaaaaaaacaaaactaaaaaaggagttaaaaagggaatcaatcatacataatttttgtagaaaatttatgtagtggtggaattggcagatcaaattcacactttgtaaacagtgtgttgcttgaacttgatttgaatttttttttatgggaatgaaaaaaaaaagtttatttttttaaaaaaaaaaccaacaaaa

SEQ ID NO: 12018 - DNA, 489 bp, Gossypium hirsutum
  Clone ID: GOSHI-09MAY01-C50836_1
ttggtaactggcttgggtaatggttcactaactggttcactaaagcctcattcttcatcttcttcccagttggctaaagagtccccactcatcgtgcaggtcctagttattgcaagagcacaacgccagattatgcatcagttagacaatctgagcaatctgatacatgaataccggggagaaagatgtcgccaagaaaggaacgatcgatcaaacagagcaattgacgttgagactattggtgttccgctgatctttactctagcaattggtggtttaggagtaattttgtttaggaatctagcatcccaaaagtaacatcatcacttggaggtccaaattgcgatttctggcatcgcgaaaatggtcttatgcccctgtgctttaagggaccatggagggctaacacacgtaccgtaggttggcatggaaaaattgtaaatattggaaaaacaaataaaggtgaaattctgaaactagtgtttatcc

SEQ ID NO: 12019 - DNA, 214 bp, Gossypium hirsutum
  unsure (1)..(214): unsure at all n locations
  Clone ID: LIB3583-032-Q6-K7-B9
tggnacaatctgagcaatctgatacatgataccggggnagaagntgtcaccaagaaaggacgatcgatcaaacagagcaattgatgttgatactattggtgttccgctgatctttactctagcaattggtggtttaggagtaattttgttttagtttnnnaccttccatctatttgggggggggggggggggtcttttttnattttttcctctt

SEQ ID NO: 12020 - DNA, 634 bp, Gossypium hirsutum
  Clone ID: GOSHI-09MAY01-C50606_1
attaaaaggaagcacaaggtgtgctatgatgatggtgatgaagaaattttgaatcttaggagagagaagtgggcagtgatctatgatgagactgcgtcagagagggaagatgggccagatgtccacatcctctgtcctgatggtttatccgaaatgtctcaaaagaggaaagcaaaagcagctgatcagccaagcaagaaagctaagatggatgctttgccaaaaaggggtggaggtgcttcatctggaaaatccaagggtgctgtcacaaagtctggtcaaaaaacgaaggaagatgggtaagaggatagctccaagagtgtggctaaatcagaaaatgttaccaaagccaagcagcatacccctaaaagtggtagtagatcagttgatggcgcttcaaaagtaggcaacaaatccaaaaatgaggacactggtgatacacccaagtctaccaaatccaaggatgatgtcgcttcaagagtaggcaacaaatccaaaaatgaggacactggcgacacacccaagtctaccaaatccaaggaggatgtcacttcaaaagtaggcaacacatccaaaaatgaggacactggtgacacacccaagtctaccaaatccaaagatgatgacaatgtta

SEQ ID NO: 12021 - DNA, 392 bp, Gossypium hirsutum
  Clone ID: GOSHI-09MAY01-C50016_1
gttaaatctgcagaaacaatatatgagagtgtccaagcaataattgctttggaggagatgattaaaaccgagtccttgaggaatgagtggtggtattggtcatcgctatctgcagctgcggaaatttccactgtgtcttctcttgctctacgtgtatactcacttgatgctgctattgtttatgaaaagtcatgcgactttaattcaattgacaatttgaagcccagcagcatgccaggcccaaagctgccctccaacttggatctgccggagaagtgcaaggtgagtcggaggactatcaagaaaagggaggaaccagaaaggctgatctttgtgaaattgcagttcaaatcctagaggatcttattttaatcaaacttgatccctgtggc

SEQ ID NO: 12022 - DNA, 413 bp, Gossypium hirsutum
  Clone ID: GOSHI-09MAY01-C50026_1
cgtccaaaaaaagtgcgtcgtgagtccaaggctaaaaagatcactgaatatgattatgtcaatgccatgaaggaggaaattagcaaagttgtcaggctccaggaagagcttggcattgatgttttggtgcatggtgaaccagagagaaatgacatggtcgagtactttggtgagcaattatccggttttgccttcactgtgaatggctgggttcagtcatatggatcccgttgtgtcaagcctcctattatttatggtgatgtgagccgccccagagccatgactgtcttttggtcttcaacagcccagagtatgactagacgacctatgaaaggaatgcttactggcccagttacgattctgaactgggtcctttgtgagaaacgaccagaataggcatgaaacatgctacc

SEQ ID NO: 12023 - DNA, 717 bp, Gossypium hirsutum
  Clone ID: GOSHI-09MAY01-C51946_1
cccacgcgtccggtgttttctcagtatttgtaaactgaagcagtgaatctccagtgagcaaaagagctacactttgttgttagcgagggtaaggacaactcgagctgactcagaaatggccatatatgggaatttacgtgtcgatgccactcttgcatctcaccaccaacacccttttcgaacctatattcgctcttcaaaggtagagtgtgtgggtttcatgaatggaggatcaagggtttctgaaattacaccaaaatggaatggagtgacaataaatagtcgaagcattggcagcaaaaataaaagatcagttgggatcatgggagattataagttctctccaaatgctgtccacgaagaggttgagagcttcctcttacacgccataaacatgagcttcttcgagcgacttcacttggcttggaaaatagttttcccttctccagcatctagaaggagctctaatgcaaatatagcgaagcagcggttgaagatgatcctgttctccgaccgctgtgcagttagcgatgaggcgaaacagaaaattgtgaaaaacattgttcatgcactgtcagattttgtcgagatagagtcgaaggacaaggttcagcttagcgtctccactgattctgatctgggagctatttactccgtcacagtgcctgttccgcgggtcagggcagaataccaagaggcagatgaatctgggacgat

SEQ ID NO: 12024 - DNA, 887 bp, Gossypium hirsutum
  Clone ID: GOSHI-09MAY01-C51966_1
tttcttgctttgttctcttatcaattactgtcccctctcttgtttctctcatttcatttgtttaagaatgtctttcatggcggctgctaaggtttttgcgtgtcctttcgtccttgttgccctcttcagcatggttgcttctgatcctgatcttctccaagatctctgcgtagctaataaagctgctgggataaaggttaatggatttccatgcaaggacgaagccaatgttaccgaagctgattttttctttagcggattagccaatccaggagtcatcaacaactcggttggatcagtggcaacaggagccaatgtcgagaaaatcccagggctcaacaccctcggcgtctcgcttgctcggatcgactatgcaccaggtggccttaaccctcctcacactcacccacgagccaccgagatcatcttcgttctcgacggtgaattaagacgtggggttcatcactacatcaaacatgttggtctccaaatcagtcaagaaaggcgacgttttcgtgttcccaaggggattggttcatttccagaagaacaatggcgacaaatcggcatccgttatagcaggatttaccagccaattgcctggaactcaatctattgccgcaacattgtttacatcgacaccggctgtcccagacaatgtgttgacaaagacctttcaaattggcaccaaagaagttgacaaaatcaaaaacaagctagccccgaagaaaacttagaaaattggcttctgtaattgaaaatatcatacgtatttctgtcggggattgaataatgtaatttaagagcaaatattggttttgtatgtggtaacgtcgccaattcactatattttctttgaattatctactcatgtgttgtttttaaaa

SEQ ID NO: 12025 - DNA, 558 bp, Gossypium hirsutum
  Clone ID: GOSHI-09MAY01-C51926_1
attgcttcttatcatttgtaacagctctcgggagcatagttagtcgagttaaaaacaggatcttggtcagtgatgctgaacccaattgtcaacaaagtccatccagctccagagaatctaaagacctaacagactcgcacatcaaaaccttgcatgactctccactagaccagaaaacagagaagaaattgacacgctcgagtgctcagccttgtaagatgacgagaaccagcctaagtggaagcattcaggctaaggggattaagcacgagaaaggaaagagcttgaatttccaatattcaacagaagaacttggaggtggactcaaaaattctgcaaaaggtgatagtggaaggaagtcaggtgctcggagatgtctgaaacctgatcctgtataccagaaacaaagagcttgtacaggaggtggtgcttttagaacttcaaacccctctttcagtgttgtgatacacccatcacaatatggttcttgtagtactgtgcacataccggaggaatttggcaagagatatttgaagaaaaacggagaaatgatgctga

SEQ ID NO: 12026 - DNA, 502 bp, Gossypium hirsutum
  Clone ID: GOSHI-09MAY01-C51886_1
gcttcatgaactaagggaagaacatctggcattttctccaaaacctgatcaaaaagatgaccaaaagcagtatttgaaccagagaagaaagtttgggtttatccacatatctcttccattgccaaagcaaaacacgaagaaaccacaagctgtaaacacaatgtgataccatttggatgcatggtaattattgaacagtggtaattctgtggtcatatatagtaacatgttttattcagtttgcctcatttgtttgtgttgtcttctgggtgatcatttctgttttttaaatgttgctgctatctatggatacttgttttgaaatctccctgtgctgtaaatgtgttctataatttgcaataatgtattatgcaaaaataaaaaagaaaaaaaaaaaaaaggaaaaaaaatataaaaagaaccaaataatacatacaaagaaataaacgaccgaggtcgtctatagaatgaccttcaccaacattaccggctgatgtttcac

SEQ ID NO: 12027 - DNA, 995 bp, Gossypium hirsutum
  Clone ID: GOSHI-09MAY01-C51816_1
ctcgatttctccctctttctcccctaaagacgaagttcaggaagcttaatcgacccactggtcatcgcatgtcccccgtttttctttttcctacttcggtacttccttcctcattctatctcgatttctccctctttctccccgaaatgacgaagttcaagaagcgtaatcgacccgctggtcatcgcatgtccatgctcagaacaatggtttcccagttggtaaagcacgagcgcattgaaactactgttgccaaggcaaaggagattcggcgacttgctgataacatggtacagcttgggaaagagggttcactttgtgcggcaaggcgtgctgctgcttttgtccgaggagatgatgtcattcacaagctatttacagaactggcatatcgatacaaagacagggcaggtggatatacaagactgcttcgaactcgcatccgagttggtgatgctgcaccaatggcctatatagagttcattgatagagaaaatgagcttagacagtcgaagccacctactcctcagccaccacaaagaccttctctggatccttggacaagatcccggcttagcaggcagtttgcaccccctaaagaggagaaaagctctgaatctgatatatgaatcaggaagcccttattggattgatagtgttttacagatacaacagattaaaacaactggcagaaatctggcttgccagtgtcatcggttcagcgaggatggaataagttggttctttttgtttcttaatattatttgggatgattttggaatgttgtacaaattgagtgctttttttaataggttttaatatatgatactgcccagctattgtacttttgacccccctctattgtgttttgaggtttgagttttgtttagggtgtggagtagagtccaaaagctagcgtatgaaatctggtttgactttaactgagttttatttttatagtttttaaaaaataaattactcgagcttgcttgatc

SEQ ID NO: 12028 - DNA, 231 bp, Gossypium hirsutum
  Clone ID: uC-gsflmaxxa119h07b1
ccctcgcgtccgctctttctatctcgatttctccgtctttcttccctaaatgacgacgttcaggaagcttaatcgacccactggtcatcgtatgtccatgctcagaacaatggtttcttagtcgttaaagcacgagcgcattgaaactactgttgtcaaggtataggagattcgtcaacttgttgtttccatgcttcttctttttttttatcctttctttttttttttttt

SEQ ID NO: 12029 - DNA, 959 bp, Gossypium hirsutum
  Clone ID: GOSHI-09MAY01-C51826_1
ttggttttagactctcttctagaagtagtggatatgttggggatgataatgataacagacctggtgatggtcgccgtgcatcttgcaaaagaaaagctcttgaaggaaacgttgggcagtcctcttcgagtggaagttctagctacttccattgtgcagaaagtagcgctgggcatggtgtttctgctagttctagtgtaggaaacggcatgaatatatctgcctcctcaggacaggcacaccctagacttggtttagaggtgggaggatcaggttctgatgccaaccctggaccaatcgttttaccagctgcaaagggctcccacaggaacttccggctaagaataagtccatcaagcatacaggaacctattgctcctccggtattttctacaggtgatatgaccaggcggtctgttatttcgtcttcacagcaatcgtcaaggctttcaactgatcattctttggacataaggtcagcaccagtgctagataatgcaagtcttcaaaacccgaatgttgcagttcatgttccgactttgcctcgaaatgtacagtcatttaggtggaatggaggttctggctctagaactggcaatacatcaagttctaatatatctgggggatagggatgctggaccccaatgagggccttcaatccagaagcatggcttggaacctggtagatcatcctatggttggtccggcccctgagttgagaaatttgggtcggaatccaatgaatccagatgtaaatagtggaaatttaagtggtcctggaaattttgcttcgacatctcgtggtggctcaagttctggtgccaatgcatcttccgttcccacatgggctcctcagctgaatcacccttctcaatatccgcggagattgtcgggacttgttcgtcgacagttgatgtcttcccttggcccagagtctggtggcccgggaaatcatcctt

SEQ ID NO: 12030 - DNA, 282 bp, Gossypium hirsutum
  Clone ID: LIB3146-034-Q1-K1-E6
gcgaggataaaccacttgataggttatcatttctaacaagctcttcaatcgttggaactgatcattataatgacataaaggcagcaccagtgctagataatgcatgtcttcaaaacccgaatgttgcagttcatgttccgactttgcctcgaaatgtacagacatttaggtggaatggaggttctggctctagaactggcaatacatcaagttctaatatatttggggatagagattctgtaccacatgagggacatttattctaaaccattgctaggaacc

SEQ ID NO: 12031 - DNA, 755 bp, Gossypium hirsutum
  Clone ID: GOSHI-09MAY01-C51546_1
ggattgcaagagaaatggaaatcaatttcataaagtgctcttatcctgcctgccccttgtgttcaattctttttttgttgcatttcataatgataagtgattagtttatggtgaatgaaggtttcattgtttggcggagtttgatgaaggaaaacgaagttgcaggaagcgtctcgatggacataaccgaagacggagaaaacctcaacctcaacctcaacctcattctctatctgtaaatccaggaagatgtctttccaatctccaaggttctagacatttaccgtccagtagtccccaaatatttgccactactgccataacctcttcttggttgggaactgccaaaatggaacctgatataggctcggaatccagccgaaatggtttcttccgtggatcctttccacacagctacaaaagggaagaacagttgtcattattacaaaccaatcattcatcactccatggagtttctgtttatcagttacctttattaagcaatggtgtaggcagcagccaaaaaatgttctcaaatgcgatcgactccgatcgtgctctctctcttctgtcatcacagccggctgagaactcgggagattggttttgaaacccatggtgctatctggtccaacttcatcactgatcccaaacatgcaatataatggtgtacaatggaaggtgagcatgtttttggcactgacgcatgataacacaacatctatggacaaaaaatgtttggatctgcaaatgtc

SEQ ID NO: 12032 - DNA, 404 bp, Gossypium hirsutum
  Clone ID: LIB3146-030-Q1-K1-E4
gaaacaaaggcaagcatgctagccaagaaaccttcacacagctaaggggcttcttgtttcgtgccattaccatttcatctgaagtggtcaattccacgctcacccgtattccctgtagtgcgatttcggatttcacctctgatctctgctggtttggctctttgtagaaaatttgttgtttacgcagttttttagctgtaccaaagacagatgtcaattggtgttttggtttgtcttctgatgtattaactactcataataacatatcttagagattgatttggatctgaatcaaagttatcaacttttcaattttgatggatcggatcgaattaagcaaaacttgaatgtatttactagagatttaagactgaatgaagatatatataattttttacttattt

SEQ ID NO: 12033 - DNA, 212 bp, Gossypium hirsutum
  Clone ID: uC-gsronu33B110g04b1
actttttcatctgaagtggtcaattccacgctcacccgtattcccgggagtgcgatttctgatttcacttctgatctgtgctggtttggctctttgtagaaaatatggtgttgacgcagttatttagctgtgccaccaaaaaatggaaataataaccccacaatgaaaaaaaagaaaaaaatgataaaaaaatatttgaaagatagccatat

SEQ ID NO: 12034 - DNA, 792 bp, Gossypium hirsutum
  Clone ID: GOSHI-09MAY01-C51466_1
gaggaagttagttgggtagggggaacacatagtagatagaatggtccggatagattcaagtagagattgcatgcgcattgcatagctgggacaataggaaaggaagcagggagttaatggggggtccaataagttggcatgaaatggattcaaatggatcaaacagcctagtgatttctaatgggtcaggaaccattaataacaacctttcaacccacactgatgtctatcattccgatggaacagcaaagaataggaacagaactacaaaagttgaacccaaccatggggatgaatgggttgagcaagatgagcctggtgtatacattacccttgttgcattgcctggaggtatcaaagatcttaagcgtgttcggttcagtcggaggcgtttcagcgaaaagcaagcggaacaatggtgggcagcaaacagggctagagtatatcagcgggtcaacgttcccttggttgaaaaacccactcttggggcgggaagggaagggttagctcattgacttggcagattcaagactctggctacttaatccgaagttcattccgggctacagctttcaagactgagccaaggtaagatgccctcaattttgttttagttttgcgagggtgtgtactagttctggtttcggcactttaaatttcggctgtaaatgtataattgtactatgttggattttaggagataaactgtgaggaattgattgagttctttatgactaggctgcggagggctttgtattcgaaactgattgtaaatgcataagaaattactaa

SEQ ID NO: 12035 - DNA, 538 bp, Gossypium hirsutum
  Clone ID: GOSHI-09MAY01-C51796_1
cccacgcgtccgcccacgcgtccgcccgtcatgatactcgtggctcagatggcataattgaactcgattagttagttttccgtgagaaattatgaatgcagtgctgttgtgcataggatactactgctgtcagcttttgatcatgagaggcatattaaaaattgggaattgttttacaatgttaatattgaatggggagagttcctgaaattttccgggttttactttgagataagtgatttgagataagtgaaccgtaacccagtttaaggggattgctagcttccctacggtctcaccaggtgaattagctgatctacgctgcaaggtaattattctgcgaatgaaggctcctaatgtttttctcttttttagggtatggaattttttgttcttgtgcaaggatgaagtgttaataccaaattaacagtacttagatacttaggaattttcttttggttgaatatttttctatggaagaccggttaaacatcttgagggagaagcaaaatcttacataatttacaaagtttggttt

SEQ ID NO: 12036 - DNA, 514 bp, Gossypium hirsutum
  Clone ID: GOSHI-09MAY01-C51696_1
ctcgaagctcactgacctcaaaatagaggggatgcaagagctgaggcagtgacaagtgagatggttcgtttgattgaaacagctactgtgccaattttggcggtggatgttgatggcctggttaatgggtggaatatgaaaattgctgagttgactggtcttccagtcgataaggcaattggaaggcatttactcacacttcttgaagattcttcagttgaaacagtcaagaaaatgttgtccttggcattgcagggcaaggaagaaaagaacggccactttgagatcaaaactcatgggttgaggtctgaggttggccccgtcagtttagttgtcaatgcttgtgcgaaccgggatctccatgaaaatgttgtgggggtttgttttgtggctcaagatataactggtcagaaaattgtaatggacaaatttacccggatcgaaggggatttccaaacaattttgccaaattcaaacccggttgtttcaaccattttttgaaccaaataaattt

SEQ ID NO: 12037 - DNA, 606 bp, Gossypium hirsutum
  Clone ID: GOSHI-09MAY01-C51676_1
ctcaacaaaatgctcgtaagaaggacttaaaataagcagcgggaagaggagcgtcgccgtaaggaggaggaaaaagcaccaaacaggctgcagccaaggcaagctcacatagtcagaaatctgctggagctgatgatgaagatatggatcccacgcaattccatgagaataggctgaaatttcttgcagcccagaaagcagaaggaaaaaatccatatcctcataagttctttgcgtcgatgtctattattgaatatatagataaatatggaagcttagccaatggggagcatattgaggatatctcagtatctttggctggtcgaattatgagcaaaagatcatcaagttcaaagcttttcttttatgacttgcatggtgatggtgccaaagtccaagttatggctgatgcaagcaagtcaggcttggatgaagcagaatttgcaaaattccattccagtgtgaagcgtggtgatatagttggtgtcactgggtttccaggaaaaacaaagagaggggagttgagcatctttcctaagtcatttactgctgtatcccattgtctccatatgatgccaacgcaaaaagcaggtcctgatgccagtg

SEQ ID NO: 12038 - DNA, 677 bp, Gossypium hirsutum
  unsure (1)..(677): unsure at all n locations
  Clone ID: AI729311.1
cgctatctcaaaatggaaggctccgtcgaagaaacggccaagggagtttccgatttagcagtggattcggcttcccccgcagaaattcagagcaaaaatgctcgtaagaaggaacttaaaaataagcagcgggaagaggagcgtcgccgcaaggaggaggaaaaagcagccaaacaggctgcagccaaggcaagctcacattgtcagaaatctgctggagctgatgatgaagatatggatcccacgcaattccatgagaataggctgaaatttcttgcagcccagaaagcagaaggaaaaaatccatatcctcataagttctttgcatcgatgtctattattgaatatataaataaatatggaagcttagccaatggggagcatattgaggatgtcgtantatctttggctggtcgaattatgagcaaaagatcatcaagttcaaagcttttcttttatgacttgcacggtgatggtgccaaagtccaagttatggctgatgcaaggcaatatctggcctggtatgagacaagtaaatgagcttctccacaagtctttgatatgaccttttatcaactgctgcatcttctaatgcatttccaagtccgtggttcacctctaagggtgtctctgctggtttacagcccaacttgcccgtttctgtcaacaaatcccct

SEQ ID NO: 12039 - DNA, 1141 bp, Gossypium hirsutum
  Clone ID: GOSHI-09MAY01-C51616_1
gtatctcagtttagatattttctgttttctttttttgcccctagtgagagatttatgcggtgttatcgccatgattgatgttggtgtgtgttggcttgttacaacgcgaccatacatgaaggctgcgtaataaggagttcctaataaaggcacttggtaagctaaggaatgaagccgatcaaacctcccaaccaaccattttctgattctcaatttctccaaatcaagtcctctgatttctcatttttgtctcttctaacttgattatagtttccctttatatatatttttgtctgtgcgtgtgctgcggcccgcacagcgtctgtccccaacttgaggagtttcagcaagagattataaactgcaagtctcggattggccaatatggagaaaaacgattaagaatatttgaagggcgatgcttccgaaatcacaacgttgattcaggccgactaccacgagcagatcctggaggaaacactgaaacaagtgcgcttacacaagcaagttttagaggaaaaatatacttctcctggtcctccgccaactacaaaggtaaaacttccaccaaatgctggagatgtaaatggctttgttacagcaagttccagcagtatctccaaccatttcttgaactttttggattcaaatggtcttcttcctccagggtgtgcatcaattatagatgaggcaccagctatagctgaaatcttaccaccacattccactgatctcctgaatgaagaagaaataaatgttgaggagcatttaagtctcacaagaggtttagagaaccacaataaagtacaacatcctgaatttggacaagttaatgatgtcatgttcccttggactcaactctatccaacaggtagtacttggggaccaaacaaactagttcgtggttgggcttttgaagcttaattgtcctacttctcttacaaacttatggcccggacaattctccatattaaaggatatggggtaatatataaaatctagaattagaatggagattttgatattttatacactggaaatgaaaccaaaaattaccaaaaaatggatcattggttatattggactttttttacaatacgataatgttttttagcaatagacattacttttatttcttttt

SEQ ID NO: 12040 - DNA, 683 bp, Gossypium hirsutum
  Clone ID: GOSHI-09MAY01-C51636_1
agggcagccgccagaagtaaccgaaaatggaaaacttttcctccaaaccaacaatcgtaatcctcctcctcctcaccaccgtcagcaccgccgacttaacttccaaagaactagacgcagccatcttagtccttcaatcaagaggctacactctcttccccaacgccatctccacatcggatctccaagtccgcctcctctcatcccaaaactcttccatattcactctttttgcacccccggactccctcctcttctccctcgacctcctctcctccgcccgcctttacactttctctctctttctccacgtctccccacatttcctctcctcctcagacctcctcgccctccctcgccccgccttcatcgacaccctcctccctaaccgtcgactcttcgtagaacatgctatgtctacccgcaacggcacagccttgctaactgtttccgtcgacggggttgtcgtctccgtcccggatcttttccttggatccaacattgttgtccacgggcttgatgggattcttgttggcaaaatacgggtccttggttagtgaaggtagtgacaatgctattgctgagccacccaagtccccctatcaaacctatgtttcgccgggcaacccaccggagactttgccccctacggacctgggagatggtcacaatcgggaaggccc

SEQ ID NO: 12041 - DNA, 1052 bp, Gossypium hirsutum
  Clone ID: GOSHI-09MAY01-C51146_1
gtgtagctgtgatgacggtgatgttttcagggctggtttcagtggctgaatctgcagtaggggtgaactgggggacaatttcattccacaagctgaagccatccacggtggtggatctggtgggggacaacaagattcaaaaagtgaagctttttgaagctgacccattggtgctaagagctttgatggggagtgggattcaggtcatggttgggatacccaatgagatgttggctgctctcagctcttcccccgccgctgctgatttgtgggttcgccaaaatgtatctgcttatgttggcaaaggtggtgctgatatcaggtttattgctgtcggaaatgaacctttccttacaagttacaacggtcaatttcagtcctatgtaatccctgctatggcgaatttgcagcagtctctggtcagagcaaatcttgctggatacataaagttggtagttccttgtaatgctgatgcctacgaaggcaatgttccttctcaaggggcatttcgatcggaactgactcaaattatgactcaacttgtttctttcctaaactcaaatggttctccatttgttgttaatatatacccatttctaagcctctatgggaactcggaatttccacaagactatgcattttttgagggtactacacatcctgttatagatggtgcaaacacttacaccaatgcatttgatggaaattatgacacattaattgcggccctcagtaaaatgggatacgggcagatgcccatagttattggggaagtgggctggcctacagatggtgcggtcggtgctaatctcactgctgctgaggttttcaaccaaggcctcattaagcatgtgttaagcaacaaaggaacccctctaaggccggctgttccacccatggatgtttatctcttcagtttacttgatgaaggggcaaagagcacccttccagggaactttgaaaggcactggggaattttctcctttgatggccaggctaaatacgcactagaccttggtttgggaaacaagagactaaaaacgccaagaatg

SEQ ID NO: 12042 - DNA, 485 bp, Gossypium hirsutum
  Clone ID: GOSHI-09MAY01-C51246_1
agaaagtggaaggaagggaagaaaacaatggtggatgatttcatggtatgtgtcgacaaaattatagcatctgcagcttgttttgagtcttcttcagtgagtccgggacaaccaatctcaactacagctgctgggaatactaatgttgttgttcctatgacgaaagcaagtggtgatgatgatagtggaaaagaaggagaaggaaaaactgggtatagttcaaagaaggtgaaagaggtggtggagtgtaggatatgtcaagaggaagatgatttgctttctttggaagctccttgtgcttgcagtggcacttctcaggttggctcacaggaggggcttccaaagatggtgccacaaggaaggggaccttacctggcgaaatatgcaaccaggttttttcaccaaattattctctttctcccaccagaaccctcccgatgtttttgcaattgacattaagcaaacatggagcccgcatattgatc

SEQ ID NO: 12043 - DNA, 420 bp, Gossypium hirsutum
  Clone ID: GOSHI-09MAY01-C52596_1
gttctccttctgccctcctctgctcctatggcgatgaaacaaaggagcttcaacgacgccacaccggtaagttccctttactcccttcctcgttttgtttatttgttgttttttagaagcaaaagaaaagaactaaaataaattgaaaaaaaaacagtaaaggaacagagaaaaataaaaccaaatcccaccttcaaaaatatttttctgtatattttctttttgatttcggtacaaaaaaaattttgctccccattacaaagatcgattggcctttatatggtcgaatcaaaaaaacaagccctcgaaaacttccccccatttacatttttgtcatattttctgccattatcgattgtttgttgcatgtgtatggaaaacgtgcgttgtgcgggctactggacgtgcgagcaagaacgt

SEQ ID NO: 12044 - DNA, 473 bp, Gossypium hirsutum
  Clone ID: GOSHI-09MAY01-C52726_1
catacactgaaaaagtctgctcgctcattttccctattgtcaccattcaaaagcaagaccagtgagaagaagttgacagcttgatgatgatgaaaggtgaaccggaagtgtctcaattgtctcgtttatatcgatttccaaaggaagttccttaagtagacacaatgttaaaccgaactggttcttagcaagtgacatcccagcatgattttatgtaccgtctctgtcgtagccatggatttctgccattgttttactgtaaatgagagaatgcctttgattttatcccattacctcacaagtcacaaccaaaccaaacatgaaactatcaaaacccgaaaaaatataaacccaacccgaagccgtccaaacccacccgattgccacaagaatggcagttcgccaaattaattccatttaacagcaattgagttgtacatcgtcccgttacttttgtacctacttttataata

SEQ ID NO: 12045 - DNA, 1191 bp, Gossypium hirsutum
  Clone ID: GOSHI-09MAY01-C52636_1
gcgttcgcccagcgtccggcaattaaccctggggggagggggtgtctttgccactgtactaaagcaaaccactgtcgagtccttcgcgtccgccctcgcggccgcttcaatccattgcacccaaaaagaaaacgcgagaaaaaaaaaaaaagagaatccttccaacaagttatttgtgagaaatactagtgggaagtcaaaatgcaggcttgtaatggagctgcaatgatgggttctttgcttcagcccatatgggtcaaagggaatagaccaatttttcctttaaaagggtatggtcttaagttcaactctgtcaaaccctgtagagctcaacttgaaagcagcttggttactggaaagcctccctcttcggactcattccctgtggtcgaaacccgatttgtggaccatggcctcagtgaagccgatcccgaggttcgtgctattattaacaaggagaaagagaggcaattcaaaagccttgagcttattgcctcagagaactttacatcccgagcagtaatggaggcagttgggtcatgtctcacaaacaagtattccgaaggactacctggtaaaaggtactatgggggcaatgagtacattgatgaacttgaaatactttgccaaaagtgggctttggccgcatcccatttggatgaaaataagtggggcgttaatgttcaaccattgtctggttctcctgcttattttgagggtttatacagcaattcttaatccgcatgatcgaataatgggtttggacttaccacatggcggacatttgtcacatggatttatgactcctaaaagacgtgtatctggtacatcaatctatttcgagtcaatgccttatcggcttgatgaatccacaggcctagttgattatgacatgcttgagaaaacagctaccctttttcgaccaaaactcataatctgtggtgccagtgcatatcctcgagattttgattatccttgcatgaggaagattgcagatgctgtgggtgcatttctcatgatggatatggctcatataagtggcctggttgccgcttctgtagttgctgaccccttggaatattgtgatatcgtgacaacacccccccacaagtctttgagaggtccaagagggggctggtctttagaaggagcccgtttctgggatattggatcgcataaaaaacggttttc

SEQ ID NO: 12046 - DNA, 698 bp, Gossypium hirsutum
  unsure (1)..(698): unsure at all n locations
  Clone ID: AI055615.1
cttcaatccattgcacccaaaaagaaaacgcgagaaaaaaaaaaaaaagagaatccttccaacaagttatttgtgagaaatactagtgggaagtcaaaatgcaggcttgtaatggagctgcaatgatgggttctttgcttcagcccatatgggtcaaagggaatagaccaatttttcctttaaaagggtatggtcttaagttcaactctgtcaaaccctgtagagctcaacttgaaagcagcttggttactggaaagcctccctcttcggactcattccctgtggtcgaaacccgatttgtggaccatggcctcagtgaagccgatcccgaggttcgtgctattattaacaaggagaaagagaggcaatncaaaaaccttgagctaattgccttagagaactttacatcccgagcagtaattgatgcaagtgggtcatgtcttacaaacaagtattccgaaagactaacctgtaaaaagtactatgggggcaatgagtacattgatgaacttgaaatactttgccaaagaagcgttggcagcatttatttggatgaaattaatggggcgtaatgttaacacttggatgatctccggtaaattggaggtatacagcaattttaatccgatgaacgataatgggttgaattacacatggggcatttgaccaggattatactattaaaaggtgtaggtcag

SEQ ID NO: 12047 - DNA, 395 bp, Gossypium hirsutum
  Clone ID: LIB3146-057-Q1-K1-D3
ctcttattctcttcgatattttctccccccatctgttgctttcttcttctttttcccccgcttcttttacctaattgcttcccaaatatctcttcagattgcttgcccaaaccctggttatttgtgagaaatactagtgggaagtcaaaatgcaggcttgtaatggagcttgcaattagtactcaatttgttttccaaatgtttctgaaaattttccttctcctttaatttattcccttctaaactctaccaggatgagctgttttttgctgaaatagagtatacgcagaaaaagccaataccatctgtttcatcatgcataaaagttcaggcaacaaaactcatcctatgaaaaaaaaagataaactcaccggtggtggagaagaggaacaaag

SEQ ID NO: 12048 - DNA, 421 bp, Gossypium hirsutum
  Clone ID: LIB3146-040-Q1-K1-C1
cggacgcgtggggttaaaaatttctccttttctttagcttgaagtgcttttggctgataattgatctttttaacctggttaaacgttctttcctctgctattggttttttggagctgtatacccttttttttcacattttcgctttcaaagctctttcctgttctttgctcctctttcgcaggcacagttactttggagttgatgcctggaaagcttacatatctcacaaggaaagtagcacaagtatgtttaaatggaatctggactatataggaggctctcctatccctcacagtccttgaagaagttttgatgcaatcgatcgtaatgtgtctgttaatcgtcagttaaggagcttcttctaatatcaaaattcagatgtgatgtgaagatggttacaacataaaaaataaatgctaa

SEQ ID NO: 12049 - DNA, 383 bp, Gossypium hirsutum
  Clone ID: LIB3146-040-Q1-K1-C2
cgtccgcaggacatgaatttccaagaatgatggttttttttagctaaactaactcaagcttatttgggggcggtttaaaccggaactgacgtgcctatatctgctactggtttttcagagctcaataccctcttgtttcacattttaccttacaaagctctttcctgttctttgctcctctttcgcacgcacagttactttggagttgatgcctggaaagcttacatatctcacaaggaaagtagcacaagtatgtttaaatggaatctggactatataggaggctcttctatccctcacagtccttgaagaagttttgatgcaatcgatcgtaatgtgtctgttaatcgtcagttaaggagcttcttctaatatcaaaattc

SEQ ID NO: 12050 - DNA, 617 bp, Gossypium hirsutum
  Clone ID: GOSHI-09MAY01-C52106_1
tggaccaagccgtcggaaccaattcaaccctctctttcctgcggtatttccaattctgagactcaaatctcaaaacgattttagaaagaaaaaaccccccaaaaaaatcaaagccttttttaactttccttcaatgaaacgaaggaccccagattctcaggcaaccgtctccgaccagaaattgaagaaaatcaaagaagatgaagaacctgaggatacaaaatctgggttgatgaatttagatgaaaatcttttgtacgaagttttcaaacacgtcgatgcaaggactttggctagggcttcttgtgtaagccgtctatggcgccaaaccgccaaagacgagcggctttgggagctgatctgcaccaggcactgggctaacatcggttgtggaacccaacagcttagatctgtcgttttgcctctcggcggcttccgtcagctccactcccggtacctttggacgttttccaagccacaagccgcttcggcttccgcctggactccgcccaagattatcaactccaaacccgcagcacggtgggggaaagatgaggctaatgtatgactatatcgtctctatattcagcaatatgagaagatgaataacaaaggca

SEQ ID NO: 12051 - DNA, 862 bp, Gossypium hirsutum
  Clone ID: GOSHI-09MAY01-C52086_1
tcgttccggccgaagaatattaaaggcttctttcgacttgtataacaggccatacaaaacccccattatctaccgtggatggaaggtgttgatcttcgaagcatactgatggtttggtgaatatgctagatagaaaacggtgctcgaaggggtaatatgttggtggcacacaccggtgaaggccagctaatgagctgggatgaacacataatgcttatcggtcatactgtcaactgttttggcggatccgttaaagtaattggtaacacgggaagtgactcaaccagggaagcgattcacgccaccgaacaaggttttgctgttggaatgcatgccgctcttcacatcaatccttactatggcaaaacctctctagagggcttggtttctcactttaatagtgtactaccaatgggccctactatcatatacaacgtcccgtcacgaactggccaagatattcctccgcgtgtcgtcaatactgtggcacaaagtcctagcttggctggtatcaaagaatgtgttggaaatgaccgaattgagcaatatacaggtaacggaattgtatgtggagtgggaacgatgatcagtgtcatgatgctaggtggagccatggggctaccggggtaatttctgttactataatctggttcccggtttgatgcacaaactcatgttcaatgggaaaaacgcttcacttaatgcgaagctcttacctttgattcaatggctctttgaggaacctaaccccattggtcttaacacagcccttgcacaactcggggttgtgaggcccgtttttaggttaccgtatgtacctcttccgctggaaaagaaggtcatatttgttgaactggtcacc

SEQ ID NO: 12052 - DNA, 472 bp, Gossypium hirsutum
  Clone ID: uC-gsflnu33B136a01b1
ttgggtttcatgttgtaggtttttttcttttttagaattcgagtcgtcgttaagaagggagatgataggtgtcatgatgctaggtggagccatggggctaccggggtaattgctgctactagtaatctggttcccggtttgatgcacgaactcatgttcaatgggaaaaacgcttcacttaatgcgaagctcttacctttgattcaatggctctttgaggaacctaaccccattggtcttaacacagcccttgcacaactcggggttgtgaggccggtttttaggctaccttatgcacctcttccgctggaaaagagggtcatatttgttgaactggtcaatgaaatcgggcgagagaactttgttggagaaaaagatgttcaggttcttgatgacaacgatttcatcttggctggacgatattagtttttctttttttatgactatgcacacgactcgatgcccgtgtctc

SEQ ID NO: 12053 - DNA, 448 bp, Gossypium hirsutum
  Clone ID: LIB3146-039-Q1-K1-A3
cgccctacggaccgggcactgaacgggctgggacccacgcgtccgcggaattgtagtgtggagtgggaacgatgatcagtgtcatgatgctaggtggagccatggggctaccggggtaatttctgttactagtaatctggttcccggtttgatgcacgaactcatgttcaatgggaaaaacgcttcacttaatgcgaagctcttacctttgattcaatggctctttgaggaacctaaccccattggtcttaacacagcccttgcacaactcggggttgtgaggccggtttttaagttaccgtatgtacctcttccgctggaaaagagggtcatatttgttgaactggtcaatgaaatcgggcgagagaactttgctggagaaaaagatgttcaggtacttgatgacaacgatttcatcttggttggtcgatattagtttttttttttt

SEQ ID NO: 12054 - DNA, 765 bp, Gossypium hirsutum
  Clone ID: GOSHI-09MAY01-C52316_1
ctcaattactaatatctattcttcacttcttccatttcaacactctcaaactatattctaattttgaggttgtgtactgatgtaaacacaaaaaacaaaacatattgtggggagttcatattacatgttttttgggttttcttgaaagctttgtcttgttgggttttgtgttttgtttttggatgggaactgagagaagtgaagaaactgtgttgaagaaacagaagaaatataatggtggggaaagtgagagagggcaatggttgttgttgtgcagttgtaaatttctacaatcttgtacaagttggtcttgttttagacaagggtgttactctttttacaagtgatactacaaccatcttgcatctcttaaatcttgtataaaaacaaaacttctgtcccaaaacaatacacaattaaggctctctctctcttttttctttttctttttaatctgtttgaaatttacctaaaggttgattcaaccatgaagaggtcacttggcagctcagattctttgggtgctttgatgtccatctgtcccacaacagatgaacatagtcctaggaacaaccatgtttacagcagggagtttcagtcgatgttagatggattagatgaagaagggtgtttagaagaatcaggtcatgttgctgagaagaagagaagattaagtgtagatcaagttaaggccttggaaaagaatttcgaggttgaaaacaagcttgaacctgaaaggaaagtgaagttggctcaagagcttgg

SEQ ID NO: 12055 - DNA, 508 bp, Gossypium hirsutum
  Clone ID: GOSHI-09MAY01-C52296_1
ccctcgcttccgggagaagacaaatggagaagaggagtgaaaaagatcgattaaatctatatactcattgtttgcttcttccctttgatcttcctaccttgattttctcatctaccacattggttgaggacttttaatcgtctttctaagaaatggttctggacggaattgtatcatctccccttcgaaggtcagcatcaacgaggaggcaatcctcgagagatgaattcggtagctggtcaacacttgttgagaggcataggttcctcttaacagcattgggattgttggcattcctctgtactatctacctttattttgctgttactttaggagccacggatacatgttctgggttgaaaggaacagagaaagcaacatgtaatctgcagcatgtaagctccactctctcccatgggaaactcaaattcctgtgacattcttcatgctatgtatgttacaagttgcttttattaattaaacttataatctgagcatcttaatatat

SEQ ID NO: 12056 - DNA, 327 bp, Gossypium hirsutum
  Clone ID: LIB3146-041-Q1-K1-H11
cccacgcgtccgctttgatcttcctgccttgattttctcatctgatctgagttttaacaagatgattgatttcactattgggaatttgagatcaagaaatagaaaggatctgttacgatctgtcacaattaggggcggtttagggttctacgtccatcttttagaaacaattgaagcatacaagggttttcagatcacattggttgaggacttttaatcgtctctctaagaaatggttctggacggaattgtatcatctccccttcgaaggtcagcatcaacgaggaggcaatcctcgagagatgaattcggtagctggtcgacact

SEQ ID NO: 12057 - DNA, 590 bp, Gossypium hirsutum
  Clone ID: GOSHI-09MAY01-C52256_1
ggagtgggatgtgtgttaaggttgtatgcgatcacctgggacttggtgtgaaaactgggatgccatatgtctggagaaatgatagaggtgatgctatagcaagcttgagaaaagaatgggagggtgtgaagctgatggaggaagtcgtacctttctttcagtcggtgaggttgtcacgggaagctacaacaacagaggactgtgtagctgaggtggcaaatgttgttaaagagcagctagaatcgaaagatcccatgtttgctcgtgcagctaaagccatggtggattgggtaaagctgtggaaatcagttggatctagcacatcctcaccgggggcataggattaagacatggttataatttgtgtgtttttgctttttggtttgctagaattatttctatcatacactcttccatgatggtgatattacgtggaatatctgtttgtaattgagctgcaacctgaattggtttgcttgctagtgatattacgtggcaaaaccgaacttgaagactttaggcaacattttaagacaatctctaatgctgggttttgagttttgtaattcaaattattaagatttacgttt

SEQ ID NO: 12058 - DNA, 207 bp, Gossypium hirsutum
  Clone ID: uC-gsronu33B048h02b1
gcgatcagcttctagcttgcggggaaaactggtaggccatatgtctggagaaatgatagaggtgatgctatagcaagcttgagaaaagaatgggagggtgtgaagctgattggggaagtcatccgtggtttcattcttggaggcccacgtttacggcccctaccgttcaaggctatagttttttattaggggcccctaattaaagtg

SEQ ID NO: 12059 - DNA, 790 bp, Gossypium hirsutum
  Clone ID: GOSHI-09MAY01-C53816_1
ccagacagaaaagtcatctttgttacatgtgaagatgaagaaaagtttcttatatacaaaagcttgaaggaaaagtgtgagattggaggcatcgtcaagtggtgtgagcataagtccatcttctttagatgatcgtgatgctgattctgttgccaaaaatctttcaactaatggttcatctgctgttgatatgcgtggtcctcctgatttgacagggttgtctcctaaagcctcttactccaataagggtagttcttcagctggacttatactgcttgctgatgcagatgcacaaacttcaggagcaaaggcagctgcttgtggccgtttagcttccttggcagcagtttctgataaggcctacagtgacctaggggtgccagcgtcatttcgtgttcctgctggagtagttattccatttggctccatggaatgggctttagagcaaaacaaatccatggaaacattcatgtctcttcgagaaaagattgaaacagcacgtctggaggatggtgaacttgataatttatgccaccaactccagcagctggtctcttccgtacagcccccacaagacataattgatagcataatgagagtatttccaggcaatgtacgcttaattgttcgttcaagtgccaatgttgaggatttggcggggatgtcagctgctggactttatgaatccatcccaaatgtcagtccttcaaatccaactgtttttgccagtgctgttagccatgtttgggcctcgctctatacacgaagagcagtactaagtcggcgagct

SEQ ID NO: 12060 - DNA, 661 bp, Gossypium hirsutum
  Clone ID: GOSHI-09MAY01-C53426_1
gatctgaaaaatcggcatctctttaggggaaaaaaggggaagaaatggcaagagcaggagggataacgaacgccgttaacgtagggatagcagtccaagccgattgggagaatcgcgaattcatctctcacatttccctcaatgttcgtcgcctctttgaatttctcctccaattcgaggctacaacgaagagcaaattagcatccttgaacgagaaactggacaccctggaacgtcgtttggagcttcttgaagttcaagttggaactgcgtccgctaacccttctcttttcagtacgtgattcatatttaaaagttgtatttgtttccatatctttgtcgtgattttgttcctctcctagttttcgacgttgtaggaaaacaaagttttcttctttttctgtttgtctatataataaccttggcgattagtgaacttttgctcttcgtttctttcgaatctgtcatatttgtaagacattagcatcttgctgttgaatttttctttcattcatcctttccttgattgtatattttttgtcaatcttgtttcaatatttcagctgcttagaaaaaaatagttgtcaattagctgcatggttgtgtttaaaagtaaaatcgtcttaatctgaatttggatctattttgctcaaactttact

SEQ ID NO: 12061 - DNA, 639 bp, Gossypium hirsutum
  Clone ID: GOSHI-09MAY01-C53796_1
ccccgcgtccgctgggaatctacaactcacctctctctctgaggatgaaatcatatcaatcattaatcacgcctttgctaaaggaatcactttctttgacacggctgatgtttacggagcgcataccaatgaagttttggttggcaaggccttgaaacaattacccaagagaaaaaattcaactagccaccaagttcggtattgcagggatggcaccgactggtatgatcgtgaaaggtagtcccgagcatgtccgggcgtgctgcgaggcgagctttgaagcgtctcgatgtcgattacatcgatctctattatcagcatcgggtggacacgtcggtacctatagaagaaaccatgggtgaacttaagaaactggttgaagagggaaaaatcaaatacatcggattatctgaatccagtcccgatacaatacggagagcgcatgctgttcatccgatcacagcagtccaaatggagtggtcgctctggactcgtgatattgaggatgagattgttcctctttgcagggatcttggtattggaatagttccttatagcccccttggtcgaggattcttcggtggtagagcagtagtggacagtttatctgcaggaactttcttggcttcacatcccggt

SEQ ID NO: 12062 - DNA, 653 bp, Gossypium hirsutum
  Clone ID: GOSHI-09MAY01-C53706_1
tttttgtcagtcatgactgtgctatttgtagtatgtggcctcacaatatcggatttgtttgctgccatccttgccttcttgccgactggatgggcaattcttctcattggacaagcaatgaggccagtgttgaaaagcttaaagttctgggactcaataaaggagctagcaaggggatatgagtatatcatgggtctgatattgttcatgcccatagctatcttgtcatggttcccgttcgtatccgagtttcaaactcgattgctcctcaaccaagcatttagcagaggactccagatttccatgatccttgctggcagaaaagagaaagacattacttccccagttaagtatgcttgaaaattcttttgctgttaacaaccttaatcagcagccatttttatcctttttgtaatctctccattgagcccctttttagcctttcttatgacagactttgtatttattagatctttgttctttaaatctttaggttctccataaattaatcaaaaagaacctttcatgtaatctgtaaaaaaaaaaaaaaagtagggattccaagttctggagtctttctcctacaatttctttccttttttcactacgacctattttgttgaattgatgaatgggaaactagttcaattttc

SEQ ID NO: 12063 - DNA, 738 bp, Gossypium hirsutum
  Clone ID: GOSHI-09MAY01-C53186_1
ggaaattgtaagttgtgaccatctgaacagtattccaagaatgagtagattttcttctcttgagaccatcattattcaaaactgcgagaagttaagttggagagacaatgaactgtttccctctaggcttaaagaactaagaataacagaccgttggaacttaaggttcattccaagtgtagagggtggtatctcttttcttcaacaacttcatggtgatgtggtgtaaaaaattatgtaaaataggagagggactgctcacctccacatgtctaacagatgtggacataagtgaatgtcctaatttgaggtctgctcctttcaatggccaatctcaatctcttttgagtcttcgattacgcaactgtgaagaattactggagatagagggcgtgattatctgcaagcacaagattggaaacgttagagattgcaaattgtcctattatgatttcaatttccagcttatatgggtttctcttctcttttaaaattagagctgaataaatgtgaagcatttacaagtctaccatctggattgtcaacttgtacttctctatggcgtgttcatctaccactgcaataatctggagtcaattccagatgatgttggaccaatgcgttgtttggaggaattgcgttttgtgattgccaagcatgatagggttcctaagaagacttggtgcctcacaattgagagatatatggtccttttaaaaacatagaattcaagctggt

SEQ ID NO: 12064 - DNA, 519 bp, Gossypium hirsutum
  Clone ID: GOSHI-09MAY01-C53086_1
gataagctctctaaattctcttgccccatccaattcttcagcaactggaccagagcttcatccccatccgttgttttaccgccgtcgttggccaccacgtgcagtggccgaagttaaaaaacctttatttttacaggtacaaaaatgaaattatggcgaacatggagccattggagctgacatgggcgagaggcgacgtaggggaagccgacgtgggcgcgcgaacgtggaggacatgcgtgggaaggcttgcggcggctgcaacagaaaagggtgttagggtttttcttttcttttttttatttagggttaaatatttcggtctaggattaatttagggcttgggtaatttgggcttcaaaattgggttaattttattttgtttttgatttgattttgggtctatttttggtctttgaagtttgtttttggtttaaaaatttaggttttaatggtaaataggcccgggcaaaaattggtacccacaatttacataataaaaaaataagattatttcat

SEQ ID NO: 12065 - DNA, 1014 bp, Gossypium hirsutum
  Clone ID: GOSHI-09MAY01-C53076_1
aaggtgtcctggagttcattgattatgcttacactgtgtttgggtttacttatgacctaaaattatctacgaggccagagaaataccttggagatttggaaacatggaacagagctgaagctgctcttacagaggctttgaaccagtctgggaagccatggcagataaatgaaggagatggggcattttatggtccgaagatcgatattagtgtatctgatgcattgaacaggaaatttcagtgcgcaacattgcagcttgacttccaacttcctgagcgcttcaagttggagtactcggcagaggatgaagccaagagggagaaacctgttatgatacatagagctatcctggggtctgttgagcgaatgtttgctatattgttggagcactataagggcaaatggcctttctggcttagtccccgtcaagcaattgtttgccctgtgtcagaaaagtctcagcaatatgcaatgcaggtccgggattggattcatgaagctggttattatgtagatgttgacatgacagatcgaaagattcagaaaaagattcgagaagctcagttggcacagtacaactttatattagttgttggtgaagaggaaatgaacactaagaaggtgagtgtgcgggtgagggatagtggagatttcagtggaatgagcatagaagatctactcaatcacttccaggctgaaactgaggcttttcattaggatgatgcgactctatcaacttaacatgtggaacatcaagggggggattggcttcttcccttgtattatttacatctctgctgcctcctgattggctttttgaacttgtaagcattttgtttggagaaattacacacatacatcctgttttactttaaaccatcgtcttcccttcatctttttattggttaaataacattgttgttttacatttcttctgccctgataattctaaattttatatcaatccatggcactaatcacacacttgtacaacatgcctttattgattgcg
